United States Patent Application Publication US 2026/0240958 A1 - sequence listing, part 9

SEQ ID NO: 9344 - RNA, 8787 nt, synthetic construct
  source 1..8787: mol_type = other RNA
aggaaataagagagaaaagaagagtaagaagaaatataagagccaccatggcccctaagaagaagcgtaaagtgagccggatgaaccacgaccaggagttcgacccccctaaggtgtaccctcccgtccccgccgagaagagaaagcccatccgggtcctgagcctgttcgatggcatcgccaccggtctgctggtgctgaaggacctgggcatccaggtggataggtacattgcctccgaggtgtgcgaggactccatcaccgtgggaatggtgcgtcatcagggcaagatcatgtacgtgggcgacgtgcggagcgtgacacagaagcatatccaggagtggggccctttcgacctggtgatcggcggcagcccttgcaatgacctgagcatcgtgaacccagcccggaagggcctgtacgagggaaccggcagactgttcttcgagttttacagactgctgcacgacgcccggcctaaggaaggcgacgaccggcccttcttttggctgttcgagaatgtggtggccatgggagtcagcgacaagcgggatattagccggttcctggagagcaaccccgtgatgatcgatgccaaggaagtgagcgccgcccaccgggccagatacttctggggcaatctgcctggcatgaacagacccctggccagcaccgtgaacgacaagctggagctgcaggagtgcctggagcacggccggatcgccaagttcagcaaggtgagaaccatcaccacccgaagcaacagcatcaaacaaggcaaggaccagcactttcctgtgttcatgaacgagaaggaggacatcctgtggtgtaccgagatggagagagtgttcgggttcccagtccactacacagatgtcagcaacatgtctagactggccagacagagactgctgggaagaagctggtccgtccctgtgatcagacacctgttcgcccctctgaaggagtacttcgcctgcgtgagcagcggcaacagcaacgccaacagccggggccccagcttctctagcggcctggtgccactgtccctgagagggagccacatgggccccatggagatctacaaaaccgtgagcgcctggaagcggcagcctgtgcgcgtgctgagcctgtttcggaatatcgataaagtcctgaaaagcctgggattcctggagagcggctctggctccggcggtggcaccctgaagtacgtggaggatgtgacaaacgtggtcagacgggatgtggagaagtggggccccttcgatctggtgtacggcagcacccaacccctgggcagctcttgtgaccggtgccctggctggtacatgtttcagttccaccggatcctgcagtacgccctgccgagacaggagtcccagcggccattcttttggattttcatggacaacttgctgctgaccgaggatgaccaggaaactaccactcggttcctgcagaccgaagccgtgaccctgcaggacgtgagaggccgggactaccagaacgccatgcgggtgtggtccaacatccctggactgaaaagcaagcacgcacctctgacccctaaagaagaggagtacctgcaggcccaggtgcggagcagaagcaagctggacgcccctaaggtggatctgctggtgaagaattgcctcctgcccctgagagagtacttcaagtatttcagccagaatagtctgcccctgggaggcagcggcggcggcatgctgaccttcagggacgtgttcatcgagttcagccaggaggagtgggagtgcctggaccccgcccagaggaagctgtacatggacgtgatgctggagagctacaggaacctggtgagcctgggccacagcatcagcaagcccgacgtgatcaccctgctggagcagggcaaggacccctgcatggtggtgagggaggagaccaggaggtggtgcaccggcaagaacaagagcggcaggaggggcggcccaagcagcggcgcccctcctcccagcggcggcaggcggcccaagcagcggcgcccctcctcccagcggcggcagcccagccggctccccaacctctaccgaggagggcacctctgagtccgccacccccgagagcggccctggcacctccaccgagcccagcgagggcagcgcacccggcagccctgccggcagccccacctccacagaggagggaaccagcaccgagcccagcgaaggcagcgccccaggcaccagcaccgagcctagtgagcaggagattaaacggatcaacaagatcagaagaagacttgtgaaagacagcaacaccaagaaggccggcaagacaggccccatgaaaaccctgctggttagagtgatgacacccgatctgagagagcggctggaaaacctgagaaagaagcctgaaaatatcccccagcccatcagcaatacatctagagccaacctgaataagctgctgaccgattacaccgaaatgaagaaggcgatcctgcatgtgtactgggaagagttccagaaggaccctgtgggcctgatgagccgggtggcccagcctgccagcaagaagatcgatcagaacaagctgaaacctgagatggacgagaagggcaacctgaccaccgccggctttgcctgctctcagtgtggccagcccctgttcgtgtacaagctggagcaggtgtctgagaagggcaaggcttacaccaactacttcggacggtgcaatgtggccgagcacgaaaagctgatcctgctggcccagctgaagcccgagaaggatagcgacgaagccgtgacatatagcctgggaaagtttgggcagagggccctggatttctacagcattcatgtgaccaaggagtccacccaccccgtgaagcccctggcccagatcgccggaaacagatacgcctccggacctgtgggaaaggccctgagcgacgcatgtatgggcacaatcgcctccttcctgtctaagtaccaggacatcatcatcgaacaccagaaggtggtgaagggcaaccagaagagactggagagcctgcgggagctggccggcaaggaaaacctggaataccctagcgtgaccctgccacctcagcctcacaccaaggagggcgttgatgcctacaacgaagtgatcgcccgggtgcgaatgtgggtgaacctgaacctgtggcagaagctgaagctaagcagagatgatgccaagcctctgctgagactgaagggattcccttcctttcctctggtcgagagacaggccaacgaagtggactggtgggacatggtgtgtaacgtgaagaagctgatcaacgagaaaaaggaggatggcaaggtgttttggcagaatctggctggctacaagagacaggaagccctgagaccatacctgagcagcgaggaagatcggaagaagggaaagaaattcgctcggtaccagctgggcgacctgctgctgcacctggaaaagaagcacggcgaggactggggaaaggtgtacgacgaggcctgggagcggattgacaagaaagtggaaggcctgagcaagcacatcaagctggaagaggaacggagaagcgaggacgcccagagcaaggccgccctgaccgactggctgcgggctaaggccagcttcgtgatcgagggcctgaaggaggccgacaaggacgagttctgcagatgcgagctgaagctgcagaagtggtacggggacctgcggggaaagcccttcgccatcgaagccgagaacagcatcctggacatcagcggcttcagcaagcagtacaactgtgccttcatctggcagaaggacggcgtgaagaagctgaacctgtacctgatcatcaactacttcaagggcggcaagctgcggttcaagaagatcaaacctgaagccttcgaagccaacagattctacaccgtgatcaacaaaaagagcggcgagatcgtgcccatggaggtgaacttcaacttcgacgaccccaacctgatcatcctgcctctggcctttggcaagagacagggcagagaattcatctggaacgacctgctgtccctggaaaccggcagcctgaagctggccaacggaagagtgatcgagaagacactgtacaacagaagaacccggcaggatgagcctgccctgttcgtggccctgaccttcgagcggcgggaggtcctggactcctccaatatcaaaccaatgaacctgatcggcgtggcaagaggcgaaaacatccccgccgtgatcgccctgaccgaccccgagggctgcccactgagccggtttaaggatagcctgggaaacccaacccacatcctgagaatcggcgagagctataaggagaagcagcggaccatccaggccaagaaggaggtggagcagcggagagccggcggctacagccggaagtacgccagcaaagccaagaatctggcagacgatatggtgagaaacaccgctagagatctgctgtactacgccgtgacccaggatgccatgctgatcttcgccaacctgagccggggcttcggccggcagggcaagcggaccttcatggccgagagacagtacacacggatggaggactggctgaccgccaagctggcctacgagggcctgagcaagacctacctgtccaagacactggcccagtacacctccaagacatgcagcaactgtgggtttaccatcaccagcgccgactacgacagggtgctggagaagctgaagaagacagcaacaggctggatgaccacaattaacggcaaggagctgaaggtggagggccagattacctactacaacagatacaagagacagaacgtagtcaaggacctgtccgtcgagctggatagactgagcgaagaatctgtgaacaacgacatctcctcctggacaaagggcagaagcggagaagctctgagcctcctgaagaaaagattctcccatagacccgtgcaggagaagttcgtgtgcctgaactgcggcttcgagacacacgcagccgagcaagccgccctgaacatcgccagatcctggctgttcctgcggagccaggagtacaagaaataccagacaaacaagacaaccggcaacaccgataagagagccttcgtcgagacctggcagtccttttaccggaagaagcttaaggaggtgtggaaacctgccgtgcggtctggcggatctggcggaggctccaccagccccaagaaaaagagaaaagtctaagctgccttctgcggggcttgccttctggccatgcccttcttctctcccttgcacctgtacctcttggtctttgaataaagcctgagtaggaaggctagcaaaaaaaaaaaaaaaaaaaaaaaaaaaaaaaaaaaaaaaaaaaaaaaaaaaaaaaaaaaaaaaaaaaaaaaaaaaaaaaagcccagccggctccccaacctctaccgaggagggcacctctgagtccgccacccccgagagcggccctggcacctccaccgagcccagcgagggcagcgcacccggcagccctgccggcagccccacctccacagaggagggaaccagcaccgagcccagcgaaggcagcgccccaggcaccagcaccgagcctagtgagcaggagattaaacggatcaacaagatcagaagaagacttgtgaaagacagcaacaccaagaaggccggcaagacaggccccatgaaaaccctgctggttagagtgatgacacccgatctgagagagcggctggaaaacctgagaaagaagcctgaaaatatcccccagcccatcagcaatacatctagagccaacctgaataagctgctgaccgattacaccgaaatgaagaaggcgatcctgcatgtgtactgggaagagttccagaaggaccctgtgggcctgatgagccgggtggcccagcctgccagcaagaagatcgatcagaacaagctgaaacctgagatggacgagaagggcaacctgaccaccgccggctttgcctgctctcagtgtggccagcccctgttcgtgtacaagctggagcaggtgtctgagaagggcaaggcttacaccaactacttcggacggtgcaatgtggccgagcacgaaaagctgatcctgctggcccagctgaagcccgagaaggatagcgacgaagccgtgacatatagcctgggaaagtttgggcagagggccctggatttctacagcattcatgtgaccaaggagtccacccaccccgtgaagcccctggcccagatcgccggaaacagatacgcctccggacctgtgggaaaggccctgagcgacgcatgtatgggcacaatcgcctccttcctgtctaagtaccaggacatcatcatcgaacaccagaaggtggtgaagggcaaccagaagagactggagagcctgcgggagctggccggcaaggaaaacctggaataccctagcgtgaccctgccacctcagcctcacaccaaggagggcgttgatgcctacaacgaagtgatcgcccgggtgcgaatgtgggtgaacctgaacctgtggcagaagctgaagctaagcagagatgatgccaagcctctgctgagactgaagggattcccttcctttcctctggtcgagagacaggccaacgaagtggactggtgggacatggtgtgtaacgtgaagaagctgatcaacgagaaaaaggaggatggcaaggtgttttggcagaatctggctggctacaagagacaggaagccctgagaccatacctgagcagcgaggaagatcggaagaagggaaagaaattcgctcggtaccagctgggcgacctgctgctgcacctggaaaagaagcacggcgaggactggggaaaggtgtacgacgaggcctgggagcggattgacaagaaagtggaaggcctgagcaagcacatcaagctggaagaggaacggagaagcgaggacgcccagagcaaggccgccctgaccgactggctgcgggctaaggccagcttcgtgatcgagggcctgaaggaggccgacaaggacgagttctgcagatgcgagctgaagctgcagaagtggtacggggacctgcggggaaagcccttcgccatcgaagccgagaacagcatcctggacatcagcggcttcagcaagcagtacaactgtgccttcatctggcagaaggacggcgtgaagaagctgaacctgtacctgatcatcaactacttcaagggcggcaagctgcggttcaagaagatcaaacctgaagccttcgaagccaacagattctacaccgtgatcaacaaaaagagcggcgagatcgtgcccatggaggtgaacttcaacttcgacgaccccaacctgatcatcctgcctctggcctttggcaagagacagggcagagaattcatctggaacgacctgctgtccctggaaaccggcagcctgaagctggccaacggaagagtgatcgagaagacactgtacaacagaagaacccggcaggatgagcctgccctgttcgtggccctgaccttcgagcggcgggaggtcctggactcctccaatatcaaaccaatgaacctgatcggcgtggcaagaggcgaaaacatccccgccgtgatcgccctgaccgaccccgagggctgcccactgagccggtttaaggatagcctgggaaacccaacccacatcctgagaatcggcgagagctataaggagaagcagcggaccatccaggccaagaaggaggtggagcagcggagagccggcggctacagccggaagtacgccagcaaagccaagaatctggcagacgatatggtgagaaacaccgctagagatctgctgtactacgccgtgacccaggatgccatgctgatcttcgccaacctgagccggggcttcggccggcagggcaagcggaccttcatggccgagagacagtacacacggatggaggactggctgaccgccaagctggcctacgagggcctgagcaagacctacctgtccaagacactggcccagtacacctccaagacatgcagcaactgtgggtttaccatcaccagcgccgactacgacagggtgctggagaagctgaagaagacagcaacaggctggatgaccacaattaacggcaaggagctgaaggtggagggccagattacctactacaacagatacaagagacagaacgtagtcaaggacctgtccgtcgagctggatagactgagcgaagaatctgtgaacaacgacatctcctcctggacaaagggcagaagcggagaagctctgagcctcctgaagaaaagattctcccatagacccgtgcaggagaagttcgtgtgcctgaactgcggcttcgagacacacgcagccgagcaagccgccctgaacatcgccagatcctggctgttcctgcggagccaggagtacaagaaataccagacaaacaagacaaccggcaacaccgataagagagccttcgtcgagacctggcagtccttttaccggaagaagcttaaggaggtgtggaaacctgccgtgcggtctggcggatctggcggaggctccaccagccccaagaaaaagagaaaagtctaagctgccttctgcggggcttgccttctggccatgcccttcttctctcccttgcacctgtacctcttggtctttgaataaagcctgagtaggaaggctagcaaaaaaaaaaaaaaaaaaaaaaaaaaaaaaaaaaaaaaaaaaaaaaaaaaaaaaaaaaaaaaaaaaaaaaaaaaaaaaaa

SEQ ID NO: 9345 - RNA, 8787 nt, synthetic construct
  source 1..8787: mol_type = other RNA
aggaaataagagagaaaagaagagtaagaagaaatataagagccaccatggcccctaagaagaagcgtaaagtgagccggatgaaccacgaccaggagttcgacccccctaaggtgtaccctcccgtccccgccgagaagagaaagcccatccgggtcctgagcctgttcgatggcatcgccaccggtctgctggtgctgaaggacctgggcatccaggtggataggtacattgcctccgaggtgtgcgaggactccatcaccgtgggaatggtgcgtcatcagggcaagatcatgtacgtgggcgacgtgcggagcgtgacacagaagcatatccaggagtggggccctttcgacctggtgatcggcggcagcccttgcaatgacctgagcatcgtgaacccagcccggaagggcctgtacgagggaaccggcagactgttcttcgagttttacagactgctgcacgacgcccggcctaaggaaggcgacgaccggcccttcttttggctgttcgagaatgtggtggccatgggagtcagcgacaagcgggatattagccggttcctggagagcaaccccgtgatgatcgatgccaaggaagtgagcgccgcccaccgggccagatacttctggggcaatctgcctggcatgaacagacccctggccagcaccgtgaacgacaagctggagctgcaggagtgcctggagcacggccggatcgccaagttcagcaaggtgagaaccatcaccacccgaagcaacagcatcaaacaaggcaaggaccagcactttcctgtgttcatgaacgagaaggaggacatcctgtggtgtaccgagatggagagagtgttcgggttcccagtccactacacagatgtcagcaacatgtctagactggccagacagagactgctgggaagaagctggtccgtccctgtgatcagacacctgttcgcccctctgaaggagtacttcgcctgcgtgagcagcggcaacagcaacgccaacagccggggccccagcttctctagcggcctggtgccactgtccctgagagggagccacatgggccccatggagatctacaaaaccgtgagcgcctggaagcggcagcctgtgcgcgtgctgagcctgtttcggaatatcgataaagtcctgaaaagcctgggattcctggagagcggctctggctccggcggtggcaccctgaagtacgtggaggatgtgacaaacgtggtcagacgggatgtggagaagtggggccccttcgatctggtgtacggcagcacccaacccctgggcagctcttgtgaccggtgccctggctggtacatgtttcagttccaccggatcctgcagtacgccctgccgagacaggagtcccagcggccattcttttggattttcatggacaacttgctgctgaccgaggatgaccaggaaactaccactcggttcctgcagaccgaagccgtgaccctgcaggacgtgagaggccgggactaccagaacgccatgcgggtgtggtccaacatccctggactgaaaagcaagcacgcacctctgacccctaaagaagaggagtacctgcaggcccaggtgcggagcagaagcaagctggacgcccctaaggtggatctgctggtgaagaattgcctcctgcccctgagagagtacttcaagtatttcagccagaatagtctgcccctgggaggcagcggcggcggcagcgtggccttcgaggacgtggccgtgaacttcacccaggaggagtggagcctgctggaccccagccagaagaacctgtacagggaggtgatgcaggagaccctgaggaacctggccagcatcggcaagaagtggaaggaccagaacatcgagaacgagtacaagaaccccaggagcaaccagaggggcctgatggaggagaggctgttcgagagcgagggccaccagcccggcgagatcctgggcggcccaagcagcggcgcccctcctcccagcggcggcaggcggcccaagcagcggcgcccctcctcccagcggcggcagcccagccggctccccaacctctaccgaggagggcacctctgagtccgccacccccgagagcggccctggcacctccaccgagcccagcgagggcagcgcacccggcagccctgccggcagccccacctccacagaggagggaaccagcaccgagcccagcgaaggcagcgccccaggcaccagcaccgagcctagtgagcaggagattaaacggatcaacaagatcagaagaagacttgtgaaagacagcaacaccaagaaggccggcaagacaggccccatgaaaaccctgctggttagagtgatgacacccgatctgagagagcggctggaaaacctgagaaagaagcctgaaaatatcccccagcccatcagcaatacatctagagccaacctgaataagctgctgaccgattacaccgaaatgaagaaggcgatcctgcatgtgtactgggaagagttccagaaggaccctgtgggcctgatgagccgggtggcccagcctgccagcaagaagatcgatcagaacaagctgaaacctgagatggacgagaagggcaacctgaccaccgccggctttgcctgctctcagtgtggccagcccctgttcgtgtacaagctggagcaggtgtctgagaagggcaaggcttacaccaactacttcggacggtgcaatgtggccgagcacgaaaagctgatcctgctggcccagctgaagcccgagaaggatagcgacgaagccgtgacatatagcctgggaaagtttgggcagagggccctggatttctacagcattcatgtgaccaaggagtccacccaccccgtgaagcccctggcccagatcgccggaaacagatacgcctccggacctgtgggaaaggccctgagcgacgcatgtatgggcacaatcgcctccttcctgtctaagtaccaggacatcatcatcgaacaccagaaggtggtgaagggcaaccagaagagactggagagcctgcgggagctggccggcaaggaaaacctggaataccctagcgtgaccctgccacctcagcctcacaccaaggagggcgttgatgcctacaacgaagtgatcgcccgggtgcgaatgtgggtgaacctgaacctgtggcagaagctgaagctaagcagagatgatgccaagcctctgctgagactgaagggattcccttcctttcctctggtcgagagacaggccaacgaagtggactggtgggacatggtgtgtaacgtgaagaagctgatcaacgagaaaaaggaggatggcaaggtgttttggcagaatctggctggctacaagagacaggaagccctgagaccatacctgagcagcgaggaagatcggaagaagggaaagaaattcgctcggtaccagctgggcgacctgctgctgcacctggaaaagaagcacggcgaggactggggaaaggtgtacgacgaggcctgggagcggattgacaagaaagtggaaggcctgagcaagcacatcaagctggaagaggaacggagaagcgaggacgcccagagcaaggccgccctgaccgactggctgcgggctaaggccagcttcgtgatcgagggcctgaaggaggccgacaaggacgagttctgcagatgcgagctgaagctgcagaagtggtacggggacctgcggggaaagcccttcgccatcgaagccgagaacagcatcctggacatcagcggcttcagcaagcagtacaactgtgccttcatctggcagaaggacggcgtgaagaagctgaacctgtacctgatcatcaactacttcaagggcggcaagctgcggttcaagaagatcaaacctgaagccttcgaagccaacagattctacaccgtgatcaacaaaaagagcggcgagatcgtgcccatggaggtgaacttcaacttcgacgaccccaacctgatcatcctgcctctggcctttggcaagagacagggcagagaattcatctggaacgacctgctgtccctggaaaccggcagcctgaagctggccaacggaagagtgatcgagaagacactgtacaacagaagaacccggcaggatgagcctgccctgttcgtggccctgaccttcgagcggcgggaggtcctggactcctccaatatcaaaccaatgaacctgatcggcgtggcaagaggcgaaaacatccccgccgtgatcgccctgaccgaccccgagggctgcccactgagccggtttaaggatagcctgggaaacccaacccacatcctgagaatcggcgagagctataaggagaagcagcggaccatccaggccaagaaggaggtggagcagcggagagccggcggctacagccggaagtacgccagcaaagccaagaatctggcagacgatatggtgagaaacaccgctagagatctgctgtactacgccgtgacccaggatgccatgctgatcttcgccaacctgagccggggcttcggccggcagggcaagcggaccttcatggccgagagacagtacacacggatggaggactggctgaccgccaagctggcctacgagggcctgagcaagacctacctgtccaagacactggcccagtacacctccaagacatgcagcaactgtgggtttaccatcaccagcgccgactacgacagggtgctggagaagctgaagaagacagcaacaggctggatgaccacaattaacggcaaggagctgaaggtggagggccagattacctactacaacagatacaagagacagaacgtagtcaaggacctgtccgtcgagctggatagactgagcgaagaatctgtgaacaacgacatctcctcctggacaaagggcagaagcggagaagctctgagcctcctgaagaaaagattctcccatagacccgtgcaggagaagttcgtgtgcctgaactgcggcttcgagacacacgcagccgagcaagccgccctgaacatcgccagatcctggctgttcctgcggagccaggagtacaagaaataccagacaaacaagacaaccggcaacaccgataagagagccttcgtcgagacctggcagtccttttaccggaagaagcttaaggaggtgtggaaacctgccgtgcggtctggcggatctggcggaggctccaccagccccaagaaaaagagaaaagtctaagctgccttctgcggggcttgccttctggccatgcccttcttctctcccttgcacctgtacctcttggtctttgaataaagcctgagtaggaaggctagcaaaaaaaaaaaaaaaaaaaaaaaaaaaaaaaaaaaaaaaaaaaaaaaaaaaaaaaaaaaaaaaaaaaaaaaaaaaaaaaagcccagccggctccccaacctctaccgaggagggcacctctgagtccgccacccccgagagcggccctggcacctccaccgagcccagcgagggcagcgcacccggcagccctgccggcagccccacctccacagaggagggaaccagcaccgagcccagcgaaggcagcgccccaggcaccagcaccgagcctagtgagcaggagattaaacggatcaacaagatcagaagaagacttgtgaaagacagcaacaccaagaaggccggcaagacaggccccatgaaaaccctgctggttagagtgatgacacccgatctgagagagcggctggaaaacctgagaaagaagcctgaaaatatcccccagcccatcagcaatacatctagagccaacctgaataagctgctgaccgattacaccgaaatgaagaaggcgatcctgcatgtgtactgggaagagttccagaaggaccctgtgggcctgatgagccgggtggcccagcctgccagcaagaagatcgatcagaacaagctgaaacctgagatggacgagaagggcaacctgaccaccgccggctttgcctgctctcagtgtggccagcccctgttcgtgtacaagctggagcaggtgtctgagaagggcaaggcttacaccaactacttcggacggtgcaatgtggccgagcacgaaaagctgatcctgctggcccagctgaagcccgagaaggatagcgacgaagccgtgacatatagcctgggaaagtttgggcagagggccctggatttctacagcattcatgtgaccaaggagtccacccaccccgtgaagcccctggcccagatcgccggaaacagatacgcctccggacctgtgggaaaggccctgagcgacgcatgtatgggcacaatcgcctccttcctgtctaagtaccaggacatcatcatcgaacaccagaaggtggtgaagggcaaccagaagagactggagagcctgcgggagctggccggcaaggaaaacctggaataccctagcgtgaccctgccacctcagcctcacaccaaggagggcgttgatgcctacaacgaagtgatcgcccgggtgcgaatgtgggtgaacctgaacctgtggcagaagctgaagctaagcagagatgatgccaagcctctgctgagactgaagggattcccttcctttcctctggtcgagagacaggccaacgaagtggactggtgggacatggtgtgtaacgtgaagaagctgatcaacgagaaaaaggaggatggcaaggtgttttggcagaatctggctggctacaagagacaggaagccctgagaccatacctgagcagcgaggaagatcggaagaagggaaagaaattcgctcggtaccagctgggcgacctgctgctgcacctggaaaagaagcacggcgaggactggggaaaggtgtacgacgaggcctgggagcggattgacaagaaagtggaaggcctgagcaagcacatcaagctggaagaggaacggagaagcgaggacgcccagagcaaggccgccctgaccgactggctgcgggctaaggccagcttcgtgatcgagggcctgaaggaggccgacaaggacgagttctgcagatgcgagctgaagctgcagaagtggtacggggacctgcggggaaagcccttcgccatcgaagccgagaacagcatcctggacatcagcggcttcagcaagcagtacaactgtgccttcatctggcagaaggacggcgtgaagaagctgaacctgtacctgatcatcaactacttcaagggcggcaagctgcggttcaagaagatcaaacctgaagccttcgaagccaacagattctacaccgtgatcaacaaaaagagcggcgagatcgtgcccatggaggtgaacttcaacttcgacgaccccaacctgatcatcctgcctctggcctttggcaagagacagggcagagaattcatctggaacgacctgctgtccctggaaaccggcagcctgaagctggccaacggaagagtgatcgagaagacactgtacaacagaagaacccggcaggatgagcctgccctgttcgtggccctgaccttcgagcggcgggaggtcctggactcctccaatatcaaaccaatgaacctgatcggcgtggcaagaggcgaaaacatccccgccgtgatcgccctgaccgaccccgagggctgcccactgagccggtttaaggatagcctgggaaacccaacccacatcctgagaatcggcgagagctataaggagaagcagcggaccatccaggccaagaaggaggtggagcagcggagagccggcggctacagccggaagtacgccagcaaagccaagaatctggcagacgatatggtgagaaacaccgctagagatctgctgtactacgccgtgacccaggatgccatgctgatcttcgccaacctgagccggggcttcggccggcagggcaagcggaccttcatggccgagagacagtacacacggatggaggactggctgaccgccaagctggcctacgagggcctgagcaagacctacctgtccaagacactggcccagtacacctccaagacatgcagcaactgtgggtttaccatcaccagcgccgactacgacagggtgctggagaagctgaagaagacagcaacaggctggatgaccacaattaacggcaaggagctgaaggtggagggccagattacctactacaacagatacaagagacagaacgtagtcaaggacctgtccgtcgagctggatagactgagcgaagaatctgtgaacaacgacatctcctcctggacaaagggcagaagcggagaagctctgagcctcctgaagaaaagattctcccatagacccgtgcaggagaagttcgtgtgcctgaactgcggcttcgagacacacgcagccgagcaagccgccctgaacatcgccagatcctggctgttcctgcggagccaggagtacaagaaataccagacaaacaagacaaccggcaacaccgataagagagccttcgtcgagacctggcagtccttttaccggaagaagcttaaggaggtgtggaaacctgccgtgcggtctggcggatctggcggaggctccaccagccccaagaaaaagagaaaagtctaagctgccttctgcggggcttgccttctggccatgcccttcttctctcccttgcacctgtacctcttggtctttgaataaagcctgagtaggaaggctagcaaaaaaaaaaaaaaaaaaaaaaaaaaaaaaaaaaaaaaaaaaaaaaaaaaaaaaaaaaaaaaaaaaaaaaaaaaaaaaaa

SEQ ID NO: 9346 - RNA, 8787 nt, synthetic construct
  source 1..8787: mol_type = other RNA
aggaaataagagagaaaagaagagtaagaagaaatataagagccaccatggcccctaagaagaagcgtaaagtgagccggatgaaccacgaccaggagttcgacccccctaaggtgtaccctcccgtccccgccgagaagagaaagcccatccgggtcctgagcctgttcgatggcatcgccaccggtctgctggtgctgaaggacctgggcatccaggtggataggtacattgcctccgaggtgtgcgaggactccatcaccgtgggaatggtgcgtcatcagggcaagatcatgtacgtgggcgacgtgcggagcgtgacacagaagcatatccaggagtggggccctttcgacctggtgatcggcggcagcccttgcaatgacctgagcatcgtgaacccagcccggaagggcctgtacgagggaaccggcagactgttcttcgagttttacagactgctgcacgacgcccggcctaaggaaggcgacgaccggcccttcttttggctgttcgagaatgtggtggccatgggagtcagcgacaagcgggatattagccggttcctggagagcaaccccgtgatgatcgatgccaaggaagtgagcgccgcccaccgggccagatacttctggggcaatctgcctggcatgaacagacccctggccagcaccgtgaacgacaagctggagctgcaggagtgcctggagcacggccggatcgccaagttcagcaaggtgagaaccatcaccacccgaagcaacagcatcaaacaaggcaaggaccagcactttcctgtgttcatgaacgagaaggaggacatcctgtggtgtaccgagatggagagagtgttcgggttcccagtccactacacagatgtcagcaacatgtctagactggccagacagagactgctgggaagaagctggtccgtccctgtgatcagacacctgttcgcccctctgaaggagtacttcgcctgcgtgagcagcggcaacagcaacgccaacagccggggccccagcttctctagcggcctggtgccactgtccctgagagggagccacatgggccccatggagatctacaaaaccgtgagcgcctggaagcggcagcctgtgcgcgtgctgagcctgtttcggaatatcgataaagtcctgaaaagcctgggattcctggagagcggctctggctccggcggtggcaccctgaagtacgtggaggatgtgacaaacgtggtcagacgggatgtggagaagtggggccccttcgatctggtgtacggcagcacccaacccctgggcagctcttgtgaccggtgccctggctggtacatgtttcagttccaccggatcctgcagtacgccctgccgagacaggagtcccagcggccattcttttggattttcatggacaacttgctgctgaccgaggatgaccaggaaactaccactcggttcctgcagaccgaagccgtgaccctgcaggacgtgagaggccgggactaccagaacgccatgcgggtgtggtccaacatccctggactgaaaagcaagcacgcacctctgacccctaaagaagaggagtacctgcaggcccaggtgcggagcagaagcaagctggacgcccctaaggtggatctgctggtgaagaattgcctcctgcccctgagagagtacttcaagtatttcagccagaatagtctgcccctgggaggcagcggcggcggcccccaggagagcgtgaccttcgaggacgtggccgtgaacttcagctacgaggagtggcagtgcctgacccacgcccagaggcacctgtacaccgacgtgatgctggagaactacggcaacatggtgagcctgggcttcagcttcagcaagccccccctgatcagcaggctggagcagggcaccgagccctacgtgcaggacaggcaggactgggagttcctgaactgcagctaccccgccgccggcggcccaagcagcggcgcccctcctcccagcggcggcaggcggcccaagcagcggcgcccctcctcccagcggcggcagcccagccggctccccaacctctaccgaggagggcacctctgagtccgccacccccgagagcggccctggcacctccaccgagcccagcgagggcagcgcacccggcagccctgccggcagccccacctccacagaggagggaaccagcaccgagcccagcgaaggcagcgccccaggcaccagcaccgagcctagtgagcaggagattaaacggatcaacaagatcagaagaagacttgtgaaagacagcaacaccaagaaggccggcaagacaggccccatgaaaaccctgctggttagagtgatgacacccgatctgagagagcggctggaaaacctgagaaagaagcctgaaaatatcccccagcccatcagcaatacatctagagccaacctgaataagctgctgaccgattacaccgaaatgaagaaggcgatcctgcatgtgtactgggaagagttccagaaggaccctgtgggcctgatgagccgggtggcccagcctgccagcaagaagatcgatcagaacaagctgaaacctgagatggacgagaagggcaacctgaccaccgccggctttgcctgctctcagtgtggccagcccctgttcgtgtacaagctggagcaggtgtctgagaagggcaaggcttacaccaactacttcggacggtgcaatgtggccgagcacgaaaagctgatcctgctggcccagctgaagcccgagaaggatagcgacgaagccgtgacatatagcctgggaaagtttgggcagagggccctggatttctacagcattcatgtgaccaaggagtccacccaccccgtgaagcccctggcccagatcgccggaaacagatacgcctccggacctgtgggaaaggccctgagcgacgcatgtatgggcacaatcgcctccttcctgtctaagtaccaggacatcatcatcgaacaccagaaggtggtgaagggcaaccagaagagactggagagcctgcgggagctggccggcaaggaaaacctggaataccctagcgtgaccctgccacctcagcctcacaccaaggagggcgttgatgcctacaacgaagtgatcgcccgggtgcgaatgtgggtgaacctgaacctgtggcagaagctgaagctaagcagagatgatgccaagcctctgctgagactgaagggattcccttcctttcctctggtcgagagacaggccaacgaagtggactggtgggacatggtgtgtaacgtgaagaagctgatcaacgagaaaaaggaggatggcaaggtgttttggcagaatctggctggctacaagagacaggaagccctgagaccatacctgagcagcgaggaagatcggaagaagggaaagaaattcgctcggtaccagctgggcgacctgctgctgcacctggaaaagaagcacggcgaggactggggaaaggtgtacgacgaggcctgggagcggattgacaagaaagtggaaggcctgagcaagcacatcaagctggaagaggaacggagaagcgaggacgcccagagcaaggccgccctgaccgactggctgcgggctaaggccagcttcgtgatcgagggcctgaaggaggccgacaaggacgagttctgcagatgcgagctgaagctgcagaagtggtacggggacctgcggggaaagcccttcgccatcgaagccgagaacagcatcctggacatcagcggcttcagcaagcagtacaactgtgccttcatctggcagaaggacggcgtgaagaagctgaacctgtacctgatcatcaactacttcaagggcggcaagctgcggttcaagaagatcaaacctgaagccttcgaagccaacagattctacaccgtgatcaacaaaaagagcggcgagatcgtgcccatggaggtgaacttcaacttcgacgaccccaacctgatcatcctgcctctggcctttggcaagagacagggcagagaattcatctggaacgacctgctgtccctggaaaccggcagcctgaagctggccaacggaagagtgatcgagaagacactgtacaacagaagaacccggcaggatgagcctgccctgttcgtggccctgaccttcgagcggcgggaggtcctggactcctccaatatcaaaccaatgaacctgatcggcgtggcaagaggcgaaaacatccccgccgtgatcgccctgaccgaccccgagggctgcccactgagccggtttaaggatagcctgggaaacccaacccacatcctgagaatcggcgagagctataaggagaagcagcggaccatccaggccaagaaggaggtggagcagcggagagccggcggctacagccggaagtacgccagcaaagccaagaatctggcagacgatatggtgagaaacaccgctagagatctgctgtactacgccgtgacccaggatgccatgctgatcttcgccaacctgagccggggcttcggccggcagggcaagcggaccttcatggccgagagacagtacacacggatggaggactggctgaccgccaagctggcctacgagggcctgagcaagacctacctgtccaagacactggcccagtacacctccaagacatgcagcaactgtgggtttaccatcaccagcgccgactacgacagggtgctggagaagctgaagaagacagcaacaggctggatgaccacaattaacggcaaggagctgaaggtggagggccagattacctactacaacagatacaagagacagaacgtagtcaaggacctgtccgtcgagctggatagactgagcgaagaatctgtgaacaacgacatctcctcctggacaaagggcagaagcggagaagctctgagcctcctgaagaaaagattctcccatagacccgtgcaggagaagttcgtgtgcctgaactgcggcttcgagacacacgcagccgagcaagccgccctgaacatcgccagatcctggctgttcctgcggagccaggagtacaagaaataccagacaaacaagacaaccggcaacaccgataagagagccttcgtcgagacctggcagtccttttaccggaagaagcttaaggaggtgtggaaacctgccgtgcggtctggcggatctggcggaggctccaccagccccaagaaaaagagaaaagtctaagctgccttctgcggggcttgccttctggccatgcccttcttctctcccttgcacctgtacctcttggtctttgaataaagcctgagtaggaaggctagcaaaaaaaaaaaaaaaaaaaaaaaaaaaaaaaaaaaaaaaaaaaaaaaaaaaaaaaaaaaaaaaaaaaaaaaaaaaaaaaagcccagccggctccccaacctctaccgaggagggcacctctgagtccgccacccccgagagcggccctggcacctccaccgagcccagcgagggcagcgcacccggcagccctgccggcagccccacctccacagaggagggaaccagcaccgagcccagcgaaggcagcgccccaggcaccagcaccgagcctagtgagcaggagattaaacggatcaacaagatcagaagaagacttgtgaaagacagcaacaccaagaaggccggcaagacaggccccatgaaaaccctgctggttagagtgatgacacccgatctgagagagcggctggaaaacctgagaaagaagcctgaaaatatcccccagcccatcagcaatacatctagagccaacctgaataagctgctgaccgattacaccgaaatgaagaaggcgatcctgcatgtgtactgggaagagttccagaaggaccctgtgggcctgatgagccgggtggcccagcctgccagcaagaagatcgatcagaacaagctgaaacctgagatggacgagaagggcaacctgaccaccgccggctttgcctgctctcagtgtggccagcccctgttcgtgtacaagctggagcaggtgtctgagaagggcaaggcttacaccaactacttcggacggtgcaatgtggccgagcacgaaaagctgatcctgctggcccagctgaagcccgagaaggatagcgacgaagccgtgacatatagcctgggaaagtttgggcagagggccctggatttctacagcattcatgtgaccaaggagtccacccaccccgtgaagcccctggcccagatcgccggaaacagatacgcctccggacctgtgggaaaggccctgagcgacgcatgtatgggcacaatcgcctccttcctgtctaagtaccaggacatcatcatcgaacaccagaaggtggtgaagggcaaccagaagagactggagagcctgcgggagctggccggcaaggaaaacctggaataccctagcgtgaccctgccacctcagcctcacaccaaggagggcgttgatgcctacaacgaagtgatcgcccgggtgcgaatgtgggtgaacctgaacctgtggcagaagctgaagctaagcagagatgatgccaagcctctgctgagactgaagggattcccttcctttcctctggtcgagagacaggccaacgaagtggactggtgggacatggtgtgtaacgtgaagaagctgatcaacgagaaaaaggaggatggcaaggtgttttggcagaatctggctggctacaagagacaggaagccctgagaccatacctgagcagcgaggaagatcggaagaagggaaagaaattcgctcggtaccagctgggcgacctgctgctgcacctggaaaagaagcacggcgaggactggggaaaggtgtacgacgaggcctgggagcggattgacaagaaagtggaaggcctgagcaagcacatcaagctggaagaggaacggagaagcgaggacgcccagagcaaggccgccctgaccgactggctgcgggctaaggccagcttcgtgatcgagggcctgaaggaggccgacaaggacgagttctgcagatgcgagctgaagctgcagaagtggtacggggacctgcggggaaagcccttcgccatcgaagccgagaacagcatcctggacatcagcggcttcagcaagcagtacaactgtgccttcatctggcagaaggacggcgtgaagaagctgaacctgtacctgatcatcaactacttcaagggcggcaagctgcggttcaagaagatcaaacctgaagccttcgaagccaacagattctacaccgtgatcaacaaaaagagcggcgagatcgtgcccatggaggtgaacttcaacttcgacgaccccaacctgatcatcctgcctctggcctttggcaagagacagggcagagaattcatctggaacgacctgctgtccctggaaaccggcagcctgaagctggccaacggaagagtgatcgagaagacactgtacaacagaagaacccggcaggatgagcctgccctgttcgtggccctgaccttcgagcggcgggaggtcctggactcctccaatatcaaaccaatgaacctgatcggcgtggcaagaggcgaaaacatccccgccgtgatcgccctgaccgaccccgagggctgcccactgagccggtttaaggatagcctgggaaacccaacccacatcctgagaatcggcgagagctataaggagaagcagcggaccatccaggccaagaaggaggtggagcagcggagagccggcggctacagccggaagtacgccagcaaagccaagaatctggcagacgatatggtgagaaacaccgctagagatctgctgtactacgccgtgacccaggatgccatgctgatcttcgccaacctgagccggggcttcggccggcagggcaagcggaccttcatggccgagagacagtacacacggatggaggactggctgaccgccaagctggcctacgagggcctgagcaagacctacctgtccaagacactggcccagtacacctccaagacatgcagcaactgtgggtttaccatcaccagcgccgactacgacagggtgctggagaagctgaagaagacagcaacaggctggatgaccacaattaacggcaaggagctgaaggtggagggccagattacctactacaacagatacaagagacagaacgtagtcaaggacctgtccgtcgagctggatagactgagcgaagaatctgtgaacaacgacatctcctcctggacaaagggcagaagcggagaagctctgagcctcctgaagaaaagattctcccatagacccgtgcaggagaagttcgtgtgcctgaactgcggcttcgagacacacgcagccgagcaagccgccctgaacatcgccagatcctggctgttcctgcggagccaggagtacaagaaataccagacaaacaagacaaccggcaacaccgataagagagccttcgtcgagacctggcagtccttttaccggaagaagcttaaggaggtgtggaaacctgccgtgcggtctggcggatctggcggaggctccaccagccccaagaaaaagagaaaagtctaagctgccttctgcggggcttgccttctggccatgcccttcttctctcccttgcacctgtacctcttggtctttgaataaagcctgagtaggaaggctagcaaaaaaaaaaaaaaaaaaaaaaaaaaaaaaaaaaaaaaaaaaaaaaaaaaaaaaaaaaaaaaaaaaaaaaaaaaaaaaaa

SEQ ID NO: 9347 - RNA, 8787 nt, synthetic construct
  source 1..8787: mol_type = other RNA
aggaaataagagagaaaagaagagtaagaagaaatataagagccaccatggcccctaagaagaagcgtaaagtgagccggatgaaccacgaccaggagttcgacccccctaaggtgtaccctcccgtccccgccgagaagagaaagcccatccgggtcctgagcctgttcgatggcatcgccaccggtctgctggtgctgaaggacctgggcatccaggtggataggtacattgcctccgaggtgtgcgaggactccatcaccgtgggaatggtgcgtcatcagggcaagatcatgtacgtgggcgacgtgcggagcgtgacacagaagcatatccaggagtggggccctttcgacctggtgatcggcggcagcccttgcaatgacctgagcatcgtgaacccagcccggaagggcctgtacgagggaaccggcagactgttcttcgagttttacagactgctgcacgacgcccggcctaaggaaggcgacgaccggcccttcttttggctgttcgagaatgtggtggccatgggagtcagcgacaagcgggatattagccggttcctggagagcaaccccgtgatgatcgatgccaaggaagtgagcgccgcccaccgggccagatacttctggggcaatctgcctggcatgaacagacccctggccagcaccgtgaacgacaagctggagctgcaggagtgcctggagcacggccggatcgccaagttcagcaaggtgagaaccatcaccacccgaagcaacagcatcaaacaaggcaaggaccagcactttcctgtgttcatgaacgagaaggaggacatcctgtggtgtaccgagatggagagagtgttcgggttcccagtccactacacagatgtcagcaacatgtctagactggccagacagagactgctgggaagaagctggtccgtccctgtgatcagacacctgttcgcccctctgaaggagtacttcgcctgcgtgagcagcggcaacagcaacgccaacagccggggccccagcttctctagcggcctggtgccactgtccctgagagggagccacatgggccccatggagatctacaaaaccgtgagcgcctggaagcggcagcctgtgcgcgtgctgagcctgtttcggaatatcgataaagtcctgaaaagcctgggattcctggagagcggctctggctccggcggtggcaccctgaagtacgtggaggatgtgacaaacgtggtcagacgggatgtggagaagtggggccccttcgatctggtgtacggcagcacccaacccctgggcagctcttgtgaccggtgccctggctggtacatgtttcagttccaccggatcctgcagtacgccctgccgagacaggagtcccagcggccattcttttggattttcatggacaacttgctgctgaccgaggatgaccaggaaactaccactcggttcctgcagaccgaagccgtgaccctgcaggacgtgagaggccgggactaccagaacgccatgcgggtgtggtccaacatccctggactgaaaagcaagcacgcacctctgacccctaaagaagaggagtacctgcaggcccaggtgcggagcagaagcaagctggacgcccctaaggtggatctgctggtgaagaattgcctcctgcccctgagagagtacttcaagtatttcagccagaatagtctgcccctgggaggcagcggcggcggcacccacggcctggtgatgttcaaggacgtggccatcgacgtgagccaggaggagtgggagtgcctgaaccccacccagaggagcctgtacagggacgtgatgctggagaactacagcaacctggtgagcctgggcctgagcctgagcaagcccgccgtgatcagcagcctggagcagggcatggagccctggatggtggtgagggaggtgaccggcaagcagtgccccgacctggtgagcaggggcggcccaagcagcggcgcccctcctcccagcggcggcaggcggcccaagcagcggcgcccctcctcccagcggcggcagcccagccggctccccaacctctaccgaggagggcacctctgagtccgccacccccgagagcggccctggcacctccaccgagcccagcgagggcagcgcacccggcagccctgccggcagccccacctccacagaggagggaaccagcaccgagcccagcgaaggcagcgccccaggcaccagcaccgagcctagtgagcaggagattaaacggatcaacaagatcagaagaagacttgtgaaagacagcaacaccaagaaggccggcaagacaggccccatgaaaaccctgctggttagagtgatgacacccgatctgagagagcggctggaaaacctgagaaagaagcctgaaaatatcccccagcccatcagcaatacatctagagccaacctgaataagctgctgaccgattacaccgaaatgaagaaggcgatcctgcatgtgtactgggaagagttccagaaggaccctgtgggcctgatgagccgggtggcccagcctgccagcaagaagatcgatcagaacaagctgaaacctgagatggacgagaagggcaacctgaccaccgccggctttgcctgctctcagtgtggccagcccctgttcgtgtacaagctggagcaggtgtctgagaagggcaaggcttacaccaactacttcggacggtgcaatgtggccgagcacgaaaagctgatcctgctggcccagctgaagcccgagaaggatagcgacgaagccgtgacatatagcctgggaaagtttgggcagagggccctggatttctacagcattcatgtgaccaaggagtccacccaccccgtgaagcccctggcccagatcgccggaaacagatacgcctccggacctgtgggaaaggccctgagcgacgcatgtatgggcacaatcgcctccttcctgtctaagtaccaggacatcatcatcgaacaccagaaggtggtgaagggcaaccagaagagactggagagcctgcgggagctggccggcaaggaaaacctggaataccctagcgtgaccctgccacctcagcctcacaccaaggagggcgttgatgcctacaacgaagtgatcgcccgggtgcgaatgtgggtgaacctgaacctgtggcagaagctgaagctaagcagagatgatgccaagcctctgctgagactgaagggattcccttcctttcctctggtcgagagacaggccaacgaagtggactggtgggacatggtgtgtaacgtgaagaagctgatcaacgagaaaaaggaggatggcaaggtgttttggcagaatctggctggctacaagagacaggaagccctgagaccatacctgagcagcgaggaagatcggaagaagggaaagaaattcgctcggtaccagctgggcgacctgctgctgcacctggaaaagaagcacggcgaggactggggaaaggtgtacgacgaggcctgggagcggattgacaagaaagtggaaggcctgagcaagcacatcaagctggaagaggaacggagaagcgaggacgcccagagcaaggccgccctgaccgactggctgcgggctaaggccagcttcgtgatcgagggcctgaaggaggccgacaaggacgagttctgcagatgcgagctgaagctgcagaagtggtacggggacctgcggggaaagcccttcgccatcgaagccgagaacagcatcctggacatcagcggcttcagcaagcagtacaactgtgccttcatctggcagaaggacggcgtgaagaagctgaacctgtacctgatcatcaactacttcaagggcggcaagctgcggttcaagaagatcaaacctgaagccttcgaagccaacagattctacaccgtgatcaacaaaaagagcggcgagatcgtgcccatggaggtgaacttcaacttcgacgaccccaacctgatcatcctgcctctggcctttggcaagagacagggcagagaattcatctggaacgacctgctgtccctggaaaccggcagcctgaagctggccaacggaagagtgatcgagaagacactgtacaacagaagaacccggcaggatgagcctgccctgttcgtggccctgaccttcgagcggcgggaggtcctggactcctccaatatcaaaccaatgaacctgatcggcgtggcaagaggcgaaaacatccccgccgtgatcgccctgaccgaccccgagggctgcccactgagccggtttaaggatagcctgggaaacccaacccacatcctgagaatcggcgagagctataaggagaagcagcggaccatccaggccaagaaggaggtggagcagcggagagccggcggctacagccggaagtacgccagcaaagccaagaatctggcagacgatatggtgagaaacaccgctagagatctgctgtactacgccgtgacccaggatgccatgctgatcttcgccaacctgagccggggcttcggccggcagggcaagcggaccttcatggccgagagacagtacacacggatggaggactggctgaccgccaagctggcctacgagggcctgagcaagacctacctgtccaagacactggcccagtacacctccaagacatgcagcaactgtgggtttaccatcaccagcgccgactacgacagggtgctggagaagctgaagaagacagcaacaggctggatgaccacaattaacggcaaggagctgaaggtggagggccagattacctactacaacagatacaagagacagaacgtagtcaaggacctgtccgtcgagctggatagactgagcgaagaatctgtgaacaacgacatctcctcctggacaaagggcagaagcggagaagctctgagcctcctgaagaaaagattctcccatagacccgtgcaggagaagttcgtgtgcctgaactgcggcttcgagacacacgcagccgagcaagccgccctgaacatcgccagatcctggctgttcctgcggagccaggagtacaagaaataccagacaaacaagacaaccggcaacaccgataagagagccttcgtcgagacctggcagtccttttaccggaagaagcttaaggaggtgtggaaacctgccgtgcggtctggcggatctggcggaggctccaccagccccaagaaaaagagaaaagtctaagctgccttctgcggggcttgccttctggccatgcccttcttctctcccttgcacctgtacctcttggtctttgaataaagcctgagtaggaaggctagcaaaaaaaaaaaaaaaaaaaaaaaaaaaaaaaaaaaaaaaaaaaaaaaaaaaaaaaaaaaaaaaaaaaaaaaaaaaaaaaagcccagccggctccccaacctctaccgaggagggcacctctgagtccgccacccccgagagcggccctggcacctccaccgagcccagcgagggcagcgcacccggcagccctgccggcagccccacctccacagaggagggaaccagcaccgagcccagcgaaggcagcgccccaggcaccagcaccgagcctagtgagcaggagattaaacggatcaacaagatcagaagaagacttgtgaaagacagcaacaccaagaaggccggcaagacaggccccatgaaaaccctgctggttagagtgatgacacccgatctgagagagcggctggaaaacctgagaaagaagcctgaaaatatcccccagcccatcagcaatacatctagagccaacctgaataagctgctgaccgattacaccgaaatgaagaaggcgatcctgcatgtgtactgggaagagttccagaaggaccctgtgggcctgatgagccgggtggcccagcctgccagcaagaagatcgatcagaacaagctgaaacctgagatggacgagaagggcaacctgaccaccgccggctttgcctgctctcagtgtggccagcccctgttcgtgtacaagctggagcaggtgtctgagaagggcaaggcttacaccaactacttcggacggtgcaatgtggccgagcacgaaaagctgatcctgctggcccagctgaagcccgagaaggatagcgacgaagccgtgacatatagcctgggaaagtttgggcagagggccctggatttctacagcattcatgtgaccaaggagtccacccaccccgtgaagcccctggcccagatcgccggaaacagatacgcctccggacctgtgggaaaggccctgagcgacgcatgtatgggcacaatcgcctccttcctgtctaagtaccaggacatcatcatcgaacaccagaaggtggtgaagggcaaccagaagagactggagagcctgcgggagctggccggcaaggaaaacctggaataccctagcgtgaccctgccacctcagcctcacaccaaggagggcgttgatgcctacaacgaagtgatcgcccgggtgcgaatgtgggtgaacctgaacctgtggcagaagctgaagctaagcagagatgatgccaagcctctgctgagactgaagggattcccttcctttcctctggtcgagagacaggccaacgaagtggactggtgggacatggtgtgtaacgtgaagaagctgatcaacgagaaaaaggaggatggcaaggtgttttggcagaatctggctggctacaagagacaggaagccctgagaccatacctgagcagcgaggaagatcggaagaagggaaagaaattcgctcggtaccagctgggcgacctgctgctgcacctggaaaagaagcacggcgaggactggggaaaggtgtacgacgaggcctgggagcggattgacaagaaagtggaaggcctgagcaagcacatcaagctggaagaggaacggagaagcgaggacgcccagagcaaggccgccctgaccgactggctgcgggctaaggccagcttcgtgatcgagggcctgaaggaggccgacaaggacgagttctgcagatgcgagctgaagctgcagaagtggtacggggacctgcggggaaagcccttcgccatcgaagccgagaacagcatcctggacatcagcggcttcagcaagcagtacaactgtgccttcatctggcagaaggacggcgtgaagaagctgaacctgtacctgatcatcaactacttcaagggcggcaagctgcggttcaagaagatcaaacctgaagccttcgaagccaacagattctacaccgtgatcaacaaaaagagcggcgagatcgtgcccatggaggtgaacttcaacttcgacgaccccaacctgatcatcctgcctctggcctttggcaagagacagggcagagaattcatctggaacgacctgctgtccctggaaaccggcagcctgaagctggccaacggaagagtgatcgagaagacactgtacaacagaagaacccggcaggatgagcctgccctgttcgtggccctgaccttcgagcggcgggaggtcctggactcctccaatatcaaaccaatgaacctgatcggcgtggcaagaggcgaaaacatccccgccgtgatcgccctgaccgaccccgagggctgcccactgagccggtttaaggatagcctgggaaacccaacccacatcctgagaatcggcgagagctataaggagaagcagcggaccatccaggccaagaaggaggtggagcagcggagagccggcggctacagccggaagtacgccagcaaagccaagaatctggcagacgatatggtgagaaacaccgctagagatctgctgtactacgccgtgacccaggatgccatgctgatcttcgccaacctgagccggggcttcggccggcagggcaagcggaccttcatggccgagagacagtacacacggatggaggactggctgaccgccaagctggcctacgagggcctgagcaagacctacctgtccaagacactggcccagtacacctccaagacatgcagcaactgtgggtttaccatcaccagcgccgactacgacagggtgctggagaagctgaagaagacagcaacaggctggatgaccacaattaacggcaaggagctgaaggtggagggccagattacctactacaacagatacaagagacagaacgtagtcaaggacctgtccgtcgagctggatagactgagcgaagaatctgtgaacaacgacatctcctcctggacaaagggcagaagcggagaagctctgagcctcctgaagaaaagattctcccatagacccgtgcaggagaagttcgtgtgcctgaactgcggcttcgagacacacgcagccgagcaagccgccctgaacatcgccagatcctggctgttcctgcggagccaggagtacaagaaataccagacaaacaagacaaccggcaacaccgataagagagccttcgtcgagacctggcagtccttttaccggaagaagcttaaggaggtgtggaaacctgccgtgcggtctggcggatctggcggaggctccaccagccccaagaaaaagagaaaagtctaagctgccttctgcggggcttgccttctggccatgcccttcttctctcccttgcacctgtacctcttggtctttgaataaagcctgagtaggaaggctagcaaaaaaaaaaaaaaaaaaaaaaaaaaaaaaaaaaaaaaaaaaaaaaaaaaaaaaaaaaaaaaaaaaaaaaaaaaaaaaaa

SEQ ID NO: 9348 - RNA, 8787 nt, synthetic construct
  source 1..8787: mol_type = other RNA
aggaaataagagagaaaagaagagtaagaagaaatataagagccaccatggcccctaagaagaagcgtaaagtgagccggatgaaccacgaccaggagttcgacccccctaaggtgtaccctcccgtccccgccgagaagagaaagcccatccgggtcctgagcctgttcgatggcatcgccaccggtctgctggtgctgaaggacctgggcatccaggtggataggtacattgcctccgaggtgtgcgaggactccatcaccgtgggaatggtgcgtcatcagggcaagatcatgtacgtgggcgacgtgcggagcgtgacacagaagcatatccaggagtggggccctttcgacctggtgatcggcggcagcccttgcaatgacctgagcatcgtgaacccagcccggaagggcctgtacgagggaaccggcagactgttcttcgagttttacagactgctgcacgacgcccggcctaaggaaggcgacgaccggcccttcttttggctgttcgagaatgtggtggccatgggagtcagcgacaagcgggatattagccggttcctggagagcaaccccgtgatgatcgatgccaaggaagtgagcgccgcccaccgggccagatacttctggggcaatctgcctggcatgaacagacccctggccagcaccgtgaacgacaagctggagctgcaggagtgcctggagcacggccggatcgccaagttcagcaaggtgagaaccatcaccacccgaagcaacagcatcaaacaaggcaaggaccagcactttcctgtgttcatgaacgagaaggaggacatcctgtggtgtaccgagatggagagagtgttcgggttcccagtccactacacagatgtcagcaacatgtctagactggccagacagagactgctgggaagaagctggtccgtccctgtgatcagacacctgttcgcccctctgaaggagtacttcgcctgcgtgagcagcggcaacagcaacgccaacagccggggccccagcttctctagcggcctggtgccactgtccctgagagggagccacatgggccccatggagatctacaaaaccgtgagcgcctggaagcggcagcctgtgcgcgtgctgagcctgtttcggaatatcgataaagtcctgaaaagcctgggattcctggagagcggctctggctccggcggtggcaccctgaagtacgtggaggatgtgacaaacgtggtcagacgggatgtggagaagtggggccccttcgatctggtgtacggcagcacccaacccctgggcagctcttgtgaccggtgccctggctggtacatgtttcagttccaccggatcctgcagtacgccctgccgagacaggagtcccagcggccattcttttggattttcatggacaacttgctgctgaccgaggatgaccaggaaactaccactcggttcctgcagaccgaagccgtgaccctgcaggacgtgagaggccgggactaccagaacgccatgcgggtgtggtccaacatccctggactgaaaagcaagcacgcacctctgacccctaaagaagaggagtacctgcaggcccaggtgcggagcagaagcaagctggacgcccctaaggtggatctgctggtgaagaattgcctcctgcccctgagagagtacttcaagtatttcagccagaatagtctgcccctgggaggcagcggcggcggcacccaggagagcgtgaccttcagggacgtggccgtgcacttcagcagggacgagtggctgtacctggaccccgcccagagggccctgtacagggaggtgatgctggagaactacagcagcctggtgagcctgggcatcctgttcagcaagcccaaggtgatcttccagctgcagcagggcgaggacccctggatggtggagaacggcgtgagctgcggcgcctgcctgggctgggagagcctgggcggcccaagcagcggcgcccctcctcccagcggcggcaggcggcccaagcagcggcgcccctcctcccagcggcggcagcccagccggctccccaacctctaccgaggagggcacctctgagtccgccacccccgagagcggccctggcacctccaccgagcccagcgagggcagcgcacccggcagccctgccggcagccccacctccacagaggagggaaccagcaccgagcccagcgaaggcagcgccccaggcaccagcaccgagcctagtgagcaggagattaaacggatcaacaagatcagaagaagacttgtgaaagacagcaacaccaagaaggccggcaagacaggccccatgaaaaccctgctggttagagtgatgacacccgatctgagagagcggctggaaaacctgagaaagaagcctgaaaatatcccccagcccatcagcaatacatctagagccaacctgaataagctgctgaccgattacaccgaaatgaagaaggcgatcctgcatgtgtactgggaagagttccagaaggaccctgtgggcctgatgagccgggtggcccagcctgccagcaagaagatcgatcagaacaagctgaaacctgagatggacgagaagggcaacctgaccaccgccggctttgcctgctctcagtgtggccagcccctgttcgtgtacaagctggagcaggtgtctgagaagggcaaggcttacaccaactacttcggacggtgcaatgtggccgagcacgaaaagctgatcctgctggcccagctgaagcccgagaaggatagcgacgaagccgtgacatatagcctgggaaagtttgggcagagggccctggatttctacagcattcatgtgaccaaggagtccacccaccccgtgaagcccctggcccagatcgccggaaacagatacgcctccggacctgtgggaaaggccctgagcgacgcatgtatgggcacaatcgcctccttcctgtctaagtaccaggacatcatcatcgaacaccagaaggtggtgaagggcaaccagaagagactggagagcctgcgggagctggccggcaaggaaaacctggaataccctagcgtgaccctgccacctcagcctcacaccaaggagggcgttgatgcctacaacgaagtgatcgcccgggtgcgaatgtgggtgaacctgaacctgtggcagaagctgaagctaagcagagatgatgccaagcctctgctgagactgaagggattcccttcctttcctctggtcgagagacaggccaacgaagtggactggtgggacatggtgtgtaacgtgaagaagctgatcaacgagaaaaaggaggatggcaaggtgttttggcagaatctggctggctacaagagacaggaagccctgagaccatacctgagcagcgaggaagatcggaagaagggaaagaaattcgctcggtaccagctgggcgacctgctgctgcacctggaaaagaagcacggcgaggactggggaaaggtgtacgacgaggcctgggagcggattgacaagaaagtggaaggcctgagcaagcacatcaagctggaagaggaacggagaagcgaggacgcccagagcaaggccgccctgaccgactggctgcgggctaaggccagcttcgtgatcgagggcctgaaggaggccgacaaggacgagttctgcagatgcgagctgaagctgcagaagtggtacggggacctgcggggaaagcccttcgccatcgaagccgagaacagcatcctggacatcagcggcttcagcaagcagtacaactgtgccttcatctggcagaaggacggcgtgaagaagctgaacctgtacctgatcatcaactacttcaagggcggcaagctgcggttcaagaagatcaaacctgaagccttcgaagccaacagattctacaccgtgatcaacaaaaagagcggcgagatcgtgcccatggaggtgaacttcaacttcgacgaccccaacctgatcatcctgcctctggcctttggcaagagacagggcagagaattcatctggaacgacctgctgtccctggaaaccggcagcctgaagctggccaacggaagagtgatcgagaagacactgtacaacagaagaacccggcaggatgagcctgccctgttcgtggccctgaccttcgagcggcgggaggtcctggactcctccaatatcaaaccaatgaacctgatcggcgtggcaagaggcgaaaacatccccgccgtgatcgccctgaccgaccccgagggctgcccactgagccggtttaaggatagcctgggaaacccaacccacatcctgagaatcggcgagagctataaggagaagcagcggaccatccaggccaagaaggaggtggagcagcggagagccggcggctacagccggaagtacgccagcaaagccaagaatctggcagacgatatggtgagaaacaccgctagagatctgctgtactacgccgtgacccaggatgccatgctgatcttcgccaacctgagccggggcttcggccggcagggcaagcggaccttcatggccgagagacagtacacacggatggaggactggctgaccgccaagctggcctacgagggcctgagcaagacctacctgtccaagacactggcccagtacacctccaagacatgcagcaactgtgggtttaccatcaccagcgccgactacgacagggtgctggagaagctgaagaagacagcaacaggctggatgaccacaattaacggcaaggagctgaaggtggagggccagattacctactacaacagatacaagagacagaacgtagtcaaggacctgtccgtcgagctggatagactgagcgaagaatctgtgaacaacgacatctcctcctggacaaagggcagaagcggagaagctctgagcctcctgaagaaaagattctcccatagacccgtgcaggagaagttcgtgtgcctgaactgcggcttcgagacacacgcagccgagcaagccgccctgaacatcgccagatcctggctgttcctgcggagccaggagtacaagaaataccagacaaacaagacaaccggcaacaccgataagagagccttcgtcgagacctggcagtccttttaccggaagaagcttaaggaggtgtggaaacctgccgtgcggtctggcggatctggcggaggctccaccagccccaagaaaaagagaaaagtctaagctgccttctgcggggcttgccttctggccatgcccttcttctctcccttgcacctgtacctcttggtctttgaataaagcctgagtaggaaggctagcaaaaaaaaaaaaaaaaaaaaaaaaaaaaaaaaaaaaaaaaaaaaaaaaaaaaaaaaaaaaaaaaaaaaaaaaaaaaaaaagcccagccggctccccaacctctaccgaggagggcacctctgagtccgccacccccgagagcggccctggcacctccaccgagcccagcgagggcagcgcacccggcagccctgccggcagccccacctccacagaggagggaaccagcaccgagcccagcgaaggcagcgccccaggcaccagcaccgagcctagtgagcaggagattaaacggatcaacaagatcagaagaagacttgtgaaagacagcaacaccaagaaggccggcaagacaggccccatgaaaaccctgctggttagagtgatgacacccgatctgagagagcggctggaaaacctgagaaagaagcctgaaaatatcccccagcccatcagcaatacatctagagccaacctgaataagctgctgaccgattacaccgaaatgaagaaggcgatcctgcatgtgtactgggaagagttccagaaggaccctgtgggcctgatgagccgggtggcccagcctgccagcaagaagatcgatcagaacaagctgaaacctgagatggacgagaagggcaacctgaccaccgccggctttgcctgctctcagtgtggccagcccctgttcgtgtacaagctggagcaggtgtctgagaagggcaaggcttacaccaactacttcggacggtgcaatgtggccgagcacgaaaagctgatcctgctggcccagctgaagcccgagaaggatagcgacgaagccgtgacatatagcctgggaaagtttgggcagagggccctggatttctacagcattcatgtgaccaaggagtccacccaccccgtgaagcccctggcccagatcgccggaaacagatacgcctccggacctgtgggaaaggccctgagcgacgcatgtatgggcacaatcgcctccttcctgtctaagtaccaggacatcatcatcgaacaccagaaggtggtgaagggcaaccagaagagactggagagcctgcgggagctggccggcaaggaaaacctggaataccctagcgtgaccctgccacctcagcctcacaccaaggagggcgttgatgcctacaacgaagtgatcgcccgggtgcgaatgtgggtgaacctgaacctgtggcagaagctgaagctaagcagagatgatgccaagcctctgctgagactgaagggattcccttcctttcctctggtcgagagacaggccaacgaagtggactggtgggacatggtgtgtaacgtgaagaagctgatcaacgagaaaaaggaggatggcaaggtgttttggcagaatctggctggctacaagagacaggaagccctgagaccatacctgagcagcgaggaagatcggaagaagggaaagaaattcgctcggtaccagctgggcgacctgctgctgcacctggaaaagaagcacggcgaggactggggaaaggtgtacgacgaggcctgggagcggattgacaagaaagtggaaggcctgagcaagcacatcaagctggaagaggaacggagaagcgaggacgcccagagcaaggccgccctgaccgactggctgcgggctaaggccagcttcgtgatcgagggcctgaaggaggccgacaaggacgagttctgcagatgcgagctgaagctgcagaagtggtacggggacctgcggggaaagcccttcgccatcgaagccgagaacagcatcctggacatcagcggcttcagcaagcagtacaactgtgccttcatctggcagaaggacggcgtgaagaagctgaacctgtacctgatcatcaactacttcaagggcggcaagctgcggttcaagaagatcaaacctgaagccttcgaagccaacagattctacaccgtgatcaacaaaaagagcggcgagatcgtgcccatggaggtgaacttcaacttcgacgaccccaacctgatcatcctgcctctggcctttggcaagagacagggcagagaattcatctggaacgacctgctgtccctggaaaccggcagcctgaagctggccaacggaagagtgatcgagaagacactgtacaacagaagaacccggcaggatgagcctgccctgttcgtggccctgaccttcgagcggcgggaggtcctggactcctccaatatcaaaccaatgaacctgatcggcgtggcaagaggcgaaaacatccccgccgtgatcgccctgaccgaccccgagggctgcccactgagccggtttaaggatagcctgggaaacccaacccacatcctgagaatcggcgagagctataaggagaagcagcggaccatccaggccaagaaggaggtggagcagcggagagccggcggctacagccggaagtacgccagcaaagccaagaatctggcagacgatatggtgagaaacaccgctagagatctgctgtactacgccgtgacccaggatgccatgctgatcttcgccaacctgagccggggcttcggccggcagggcaagcggaccttcatggccgagagacagtacacacggatggaggactggctgaccgccaagctggcctacgagggcctgagcaagacctacctgtccaagacactggcccagtacacctccaagacatgcagcaactgtgggtttaccatcaccagcgccgactacgacagggtgctggagaagctgaagaagacagcaacaggctggatgaccacaattaacggcaaggagctgaaggtggagggccagattacctactacaacagatacaagagacagaacgtagtcaaggacctgtccgtcgagctggatagactgagcgaagaatctgtgaacaacgacatctcctcctggacaaagggcagaagcggagaagctctgagcctcctgaagaaaagattctcccatagacccgtgcaggagaagttcgtgtgcctgaactgcggcttcgagacacacgcagccgagcaagccgccctgaacatcgccagatcctggctgttcctgcggagccaggagtacaagaaataccagacaaacaagacaaccggcaacaccgataagagagccttcgtcgagacctggcagtccttttaccggaagaagcttaaggaggtgtggaaacctgccgtgcggtctggcggatctggcggaggctccaccagccccaagaaaaagagaaaagtctaagctgccttctgcggggcttgccttctggccatgcccttcttctctcccttgcacctgtacctcttggtctttgaataaagcctgagtaggaaggctagcaaaaaaaaaaaaaaaaaaaaaaaaaaaaaaaaaaaaaaaaaaaaaaaaaaaaaaaaaaaaaaaaaaaaaaaaaaaaaaaa

SEQ ID NO: 9349 - RNA, 8787 nt, synthetic construct
  source 1..8787: mol_type = other RNA
aggaaataagagagaaaagaagagtaagaagaaatataagagccaccatggcccctaagaagaagcgtaaagtgagccggatgaaccacgaccaggagttcgacccccctaaggtgtaccctcccgtccccgccgagaagagaaagcccatccgggtcctgagcctgttcgatggcatcgccaccggtctgctggtgctgaaggacctgggcatccaggtggataggtacattgcctccgaggtgtgcgaggactccatcaccgtgggaatggtgcgtcatcagggcaagatcatgtacgtgggcgacgtgcggagcgtgacacagaagcatatccaggagtggggccctttcgacctggtgatcggcggcagcccttgcaatgacctgagcatcgtgaacccagcccggaagggcctgtacgagggaaccggcagactgttcttcgagttttacagactgctgcacgacgcccggcctaaggaaggcgacgaccggcccttcttttggctgttcgagaatgtggtggccatgggagtcagcgacaagcgggatattagccggttcctggagagcaaccccgtgatgatcgatgccaaggaagtgagcgccgcccaccgggccagatacttctggggcaatctgcctggcatgaacagacccctggccagcaccgtgaacgacaagctggagctgcaggagtgcctggagcacggccggatcgccaagttcagcaaggtgagaaccatcaccacccgaagcaacagcatcaaacaaggcaaggaccagcactttcctgtgttcatgaacgagaaggaggacatcctgtggtgtaccgagatggagagagtgttcgggttcccagtccactacacagatgtcagcaacatgtctagactggccagacagagactgctgggaagaagctggtccgtccctgtgatcagacacctgttcgcccctctgaaggagtacttcgcctgcgtgagcagcggcaacagcaacgccaacagccggggccccagcttctctagcggcctggtgccactgtccctgagagggagccacatgggccccatggagatctacaaaaccgtgagcgcctggaagcggcagcctgtgcgcgtgctgagcctgtttcggaatatcgataaagtcctgaaaagcctgggattcctggagagcggctctggctccggcggtggcaccctgaagtacgtggaggatgtgacaaacgtggtcagacgggatgtggagaagtggggccccttcgatctggtgtacggcagcacccaacccctgggcagctcttgtgaccggtgccctggctggtacatgtttcagttccaccggatcctgcagtacgccctgccgagacaggagtcccagcggccattcttttggattttcatggacaacttgctgctgaccgaggatgaccaggaaactaccactcggttcctgcagaccgaagccgtgaccctgcaggacgtgagaggccgggactaccagaacgccatgcgggtgtggtccaacatccctggactgaaaagcaagcacgcacctctgacccctaaagaagaggagtacctgcaggcccaggtgcggagcagaagcaagctggacgcccctaaggtggatctgctggtgaagaattgcctcctgcccctgagagagtacttcaagtatttcagccagaatagtctgcccctgggaggcagcggcggcggccaggtgcccgtgaccttcgaggacatcaccatctacttcagccaggaggagtgggagggcctgcaggagtggcagaaggagctgtacaaggacgtgatgaaggagaactacgagatcctgatcagcctgggcgccagcagccccatcctgacccccgacgtgatcagccacatcgagaggggcgaggagccctacatcagggacgagcccaggagcgaggagagggagagcggcaagagcagcggcggcccaagcagcggcgcccctcctcccagcggcggcaggcggcccaagcagcggcgcccctcctcccagcggcggcagcccagccggctccccaacctctaccgaggagggcacctctgagtccgccacccccgagagcggccctggcacctccaccgagcccagcgagggcagcgcacccggcagccctgccggcagccccacctccacagaggagggaaccagcaccgagcccagcgaaggcagcgccccaggcaccagcaccgagcctagtgagcaggagattaaacggatcaacaagatcagaagaagacttgtgaaagacagcaacaccaagaaggccggcaagacaggccccatgaaaaccctgctggttagagtgatgacacccgatctgagagagcggctggaaaacctgagaaagaagcctgaaaatatcccccagcccatcagcaatacatctagagccaacctgaataagctgctgaccgattacaccgaaatgaagaaggcgatcctgcatgtgtactgggaagagttccagaaggaccctgtgggcctgatgagccgggtggcccagcctgccagcaagaagatcgatcagaacaagctgaaacctgagatggacgagaagggcaacctgaccaccgccggctttgcctgctctcagtgtggccagcccctgttcgtgtacaagctggagcaggtgtctgagaagggcaaggcttacaccaactacttcggacggtgcaatgtggccgagcacgaaaagctgatcctgctggcccagctgaagcccgagaaggatagcgacgaagccgtgacatatagcctgggaaagtttgggcagagggccctggatttctacagcattcatgtgaccaaggagtccacccaccccgtgaagcccctggcccagatcgccggaaacagatacgcctccggacctgtgggaaaggccctgagcgacgcatgtatgggcacaatcgcctccttcctgtctaagtaccaggacatcatcatcgaacaccagaaggtggtgaagggcaaccagaagagactggagagcctgcgggagctggccggcaaggaaaacctggaataccctagcgtgaccctgccacctcagcctcacaccaaggagggcgttgatgcctacaacgaagtgatcgcccgggtgcgaatgtgggtgaacctgaacctgtggcagaagctgaagctaagcagagatgatgccaagcctctgctgagactgaagggattcccttcctttcctctggtcgagagacaggccaacgaagtggactggtgggacatggtgtgtaacgtgaagaagctgatcaacgagaaaaaggaggatggcaaggtgttttggcagaatctggctggctacaagagacaggaagccctgagaccatacctgagcagcgaggaagatcggaagaagggaaagaaattcgctcggtaccagctgggcgacctgctgctgcacctggaaaagaagcacggcgaggactggggaaaggtgtacgacgaggcctgggagcggattgacaagaaagtggaaggcctgagcaagcacatcaagctggaagaggaacggagaagcgaggacgcccagagcaaggccgccctgaccgactggctgcgggctaaggccagcttcgtgatcgagggcctgaaggaggccgacaaggacgagttctgcagatgcgagctgaagctgcagaagtggtacggggacctgcggggaaagcccttcgccatcgaagccgagaacagcatcctggacatcagcggcttcagcaagcagtacaactgtgccttcatctggcagaaggacggcgtgaagaagctgaacctgtacctgatcatcaactacttcaagggcggcaagctgcggttcaagaagatcaaacctgaagccttcgaagccaacagattctacaccgtgatcaacaaaaagagcggcgagatcgtgcccatggaggtgaacttcaacttcgacgaccccaacctgatcatcctgcctctggcctttggcaagagacagggcagagaattcatctggaacgacctgctgtccctggaaaccggcagcctgaagctggccaacggaagagtgatcgagaagacactgtacaacagaagaacccggcaggatgagcctgccctgttcgtggccctgaccttcgagcggcgggaggtcctggactcctccaatatcaaaccaatgaacctgatcggcgtggcaagaggcgaaaacatccccgccgtgatcgccctgaccgaccccgagggctgcccactgagccggtttaaggatagcctgggaaacccaacccacatcctgagaatcggcgagagctataaggagaagcagcggaccatccaggccaagaaggaggtggagcagcggagagccggcggctacagccggaagtacgccagcaaagccaagaatctggcagacgatatggtgagaaacaccgctagagatctgctgtactacgccgtgacccaggatgccatgctgatcttcgccaacctgagccggggcttcggccggcagggcaagcggaccttcatggccgagagacagtacacacggatggaggactggctgaccgccaagctggcctacgagggcctgagcaagacctacctgtccaagacactggcccagtacacctccaagacatgcagcaactgtgggtttaccatcaccagcgccgactacgacagggtgctggagaagctgaagaagacagcaacaggctggatgaccacaattaacggcaaggagctgaaggtggagggccagattacctactacaacagatacaagagacagaacgtagtcaaggacctgtccgtcgagctggatagactgagcgaagaatctgtgaacaacgacatctcctcctggacaaagggcagaagcggagaagctctgagcctcctgaagaaaagattctcccatagacccgtgcaggagaagttcgtgtgcctgaactgcggcttcgagacacacgcagccgagcaagccgccctgaacatcgccagatcctggctgttcctgcggagccaggagtacaagaaataccagacaaacaagacaaccggcaacaccgataagagagccttcgtcgagacctggcagtccttttaccggaagaagcttaaggaggtgtggaaacctgccgtgcggtctggcggatctggcggaggctccaccagccccaagaaaaagagaaaagtctaagctgccttctgcggggcttgccttctggccatgcccttcttctctcccttgcacctgtacctcttggtctttgaataaagcctgagtaggaaggctagcaaaaaaaaaaaaaaaaaaaaaaaaaaaaaaaaaaaaaaaaaaaaaaaaaaaaaaaaaaaaaaaaaaaaaaaaaaaaaaaagcccagccggctccccaacctctaccgaggagggcacctctgagtccgccacccccgagagcggccctggcacctccaccgagcccagcgagggcagcgcacccggcagccctgccggcagccccacctccacagaggagggaaccagcaccgagcccagcgaaggcagcgccccaggcaccagcaccgagcctagtgagcaggagattaaacggatcaacaagatcagaagaagacttgtgaaagacagcaacaccaagaaggccggcaagacaggccccatgaaaaccctgctggttagagtgatgacacccgatctgagagagcggctggaaaacctgagaaagaagcctgaaaatatcccccagcccatcagcaatacatctagagccaacctgaataagctgctgaccgattacaccgaaatgaagaaggcgatcctgcatgtgtactgggaagagttccagaaggaccctgtgggcctgatgagccgggtggcccagcctgccagcaagaagatcgatcagaacaagctgaaacctgagatggacgagaagggcaacctgaccaccgccggctttgcctgctctcagtgtggccagcccctgttcgtgtacaagctggagcaggtgtctgagaagggcaaggcttacaccaactacttcggacggtgcaatgtggccgagcacgaaaagctgatcctgctggcccagctgaagcccgagaaggatagcgacgaagccgtgacatatagcctgggaaagtttgggcagagggccctggatttctacagcattcatgtgaccaaggagtccacccaccccgtgaagcccctggcccagatcgccggaaacagatacgcctccggacctgtgggaaaggccctgagcgacgcatgtatgggcacaatcgcctccttcctgtctaagtaccaggacatcatcatcgaacaccagaaggtggtgaagggcaaccagaagagactggagagcctgcgggagctggccggcaaggaaaacctggaataccctagcgtgaccctgccacctcagcctcacaccaaggagggcgttgatgcctacaacgaagtgatcgcccgggtgcgaatgtgggtgaacctgaacctgtggcagaagctgaagctaagcagagatgatgccaagcctctgctgagactgaagggattcccttcctttcctctggtcgagagacaggccaacgaagtggactggtgggacatggtgtgtaacgtgaagaagctgatcaacgagaaaaaggaggatggcaaggtgttttggcagaatctggctggctacaagagacaggaagccctgagaccatacctgagcagcgaggaagatcggaagaagggaaagaaattcgctcggtaccagctgggcgacctgctgctgcacctggaaaagaagcacggcgaggactggggaaaggtgtacgacgaggcctgggagcggattgacaagaaagtggaaggcctgagcaagcacatcaagctggaagaggaacggagaagcgaggacgcccagagcaaggccgccctgaccgactggctgcgggctaaggccagcttcgtgatcgagggcctgaaggaggccgacaaggacgagttctgcagatgcgagctgaagctgcagaagtggtacggggacctgcggggaaagcccttcgccatcgaagccgagaacagcatcctggacatcagcggcttcagcaagcagtacaactgtgccttcatctggcagaaggacggcgtgaagaagctgaacctgtacctgatcatcaactacttcaagggcggcaagctgcggttcaagaagatcaaacctgaagccttcgaagccaacagattctacaccgtgatcaacaaaaagagcggcgagatcgtgcccatggaggtgaacttcaacttcgacgaccccaacctgatcatcctgcctctggcctttggcaagagacagggcagagaattcatctggaacgacctgctgtccctggaaaccggcagcctgaagctggccaacggaagagtgatcgagaagacactgtacaacagaagaacccggcaggatgagcctgccctgttcgtggccctgaccttcgagcggcgggaggtcctggactcctccaatatcaaaccaatgaacctgatcggcgtggcaagaggcgaaaacatccccgccgtgatcgccctgaccgaccccgagggctgcccactgagccggtttaaggatagcctgggaaacccaacccacatcctgagaatcggcgagagctataaggagaagcagcggaccatccaggccaagaaggaggtggagcagcggagagccggcggctacagccggaagtacgccagcaaagccaagaatctggcagacgatatggtgagaaacaccgctagagatctgctgtactacgccgtgacccaggatgccatgctgatcttcgccaacctgagccggggcttcggccggcagggcaagcggaccttcatggccgagagacagtacacacggatggaggactggctgaccgccaagctggcctacgagggcctgagcaagacctacctgtccaagacactggcccagtacacctccaagacatgcagcaactgtgggtttaccatcaccagcgccgactacgacagggtgctggagaagctgaagaagacagcaacaggctggatgaccacaattaacggcaaggagctgaaggtggagggccagattacctactacaacagatacaagagacagaacgtagtcaaggacctgtccgtcgagctggatagactgagcgaagaatctgtgaacaacgacatctcctcctggacaaagggcagaagcggagaagctctgagcctcctgaagaaaagattctcccatagacccgtgcaggagaagttcgtgtgcctgaactgcggcttcgagacacacgcagccgagcaagccgccctgaacatcgccagatcctggctgttcctgcggagccaggagtacaagaaataccagacaaacaagacaaccggcaacaccgataagagagccttcgtcgagacctggcagtccttttaccggaagaagcttaaggaggtgtggaaacctgccgtgcggtctggcggatctggcggaggctccaccagccccaagaaaaagagaaaagtctaagctgccttctgcggggcttgccttctggccatgcccttcttctctcccttgcacctgtacctcttggtctttgaataaagcctgagtaggaaggctagcaaaaaaaaaaaaaaaaaaaaaaaaaaaaaaaaaaaaaaaaaaaaaaaaaaaaaaaaaaaaaaaaaaaaaaaaaaaaaaaa

SEQ ID NO: 9350 - RNA, 8787 nt, synthetic construct
  source 1..8787: mol_type = other RNA
aggaaataagagagaaaagaagagtaagaagaaatataagagccaccatggcccctaagaagaagcgtaaagtgagccggatgaaccacgaccaggagttcgacccccctaaggtgtaccctcccgtccccgccgagaagagaaagcccatccgggtcctgagcctgttcgatggcatcgccaccggtctgctggtgctgaaggacctgggcatccaggtggataggtacattgcctccgaggtgtgcgaggactccatcaccgtgggaatggtgcgtcatcagggcaagatcatgtacgtgggcgacgtgcggagcgtgacacagaagcatatccaggagtggggccctttcgacctggtgatcggcggcagcccttgcaatgacctgagcatcgtgaacccagcccggaagggcctgtacgagggaaccggcagactgttcttcgagttttacagactgctgcacgacgcccggcctaaggaaggcgacgaccggcccttcttttggctgttcgagaatgtggtggccatgggagtcagcgacaagcgggatattagccggttcctggagagcaaccccgtgatgatcgatgccaaggaagtgagcgccgcccaccgggccagatacttctggggcaatctgcctggcatgaacagacccctggccagcaccgtgaacgacaagctggagctgcaggagtgcctggagcacggccggatcgccaagttcagcaaggtgagaaccatcaccacccgaagcaacagcatcaaacaaggcaaggaccagcactttcctgtgttcatgaacgagaaggaggacatcctgtggtgtaccgagatggagagagtgttcgggttcccagtccactacacagatgtcagcaacatgtctagactggccagacagagactgctgggaagaagctggtccgtccctgtgatcagacacctgttcgcccctctgaaggagtacttcgcctgcgtgagcagcggcaacagcaacgccaacagccggggccccagcttctctagcggcctggtgccactgtccctgagagggagccacatgggccccatggagatctacaaaaccgtgagcgcctggaagcggcagcctgtgcgcgtgctgagcctgtttcggaatatcgataaagtcctgaaaagcctgggattcctggagagcggctctggctccggcggtggcaccctgaagtacgtggaggatgtgacaaacgtggtcagacgggatgtggagaagtggggccccttcgatctggtgtacggcagcacccaacccctgggcagctcttgtgaccggtgccctggctggtacatgtttcagttccaccggatcctgcagtacgccctgccgagacaggagtcccagcggccattcttttggattttcatggacaacttgctgctgaccgaggatgaccaggaaactaccactcggttcctgcagaccgaagccgtgaccctgcaggacgtgagaggccgggactaccagaacgccatgcgggtgtggtccaacatccctggactgaaaagcaagcacgcacctctgacccctaaagaagaggagtacctgcaggcccaggtgcggagcagaagcaagctggacgcccctaaggtggatctgctggtgaagaattgcctcctgcccctgagagagtacttcaagtatttcagccagaatagtctgcccctgggaggcagcggcggcggcgaggagctgcccgtggtgttcgaggacgtggccgtgtacttcaccagggaggagtggggcatgctggacaagaggcagaaggagctgtacagggacgtgatgaggatgaactacgagctgctggccagcctgggccccgccgccgccaagcccgacctgatcagcaagctggagaggagggccgccccctggatcaaggaccccaacggcgccaagagcggcggcaagggcaggccccccggcggcggcccaagcagcggcgcccctcctcccagcggcggcaggcggcccaagcagcggcgcccctcctcccagcggcggcagcccagccggctccccaacctctaccgaggagggcacctctgagtccgccacccccgagagcggccctggcacctccaccgagcccagcgagggcagcgcacccggcagccctgccggcagccccacctccacagaggagggaaccagcaccgagcccagcgaaggcagcgccccaggcaccagcaccgagcctagtgagcaggagattaaacggatcaacaagatcagaagaagacttgtgaaagacagcaacaccaagaaggccggcaagacaggccccatgaaaaccctgctggttagagtgatgacacccgatctgagagagcggctggaaaacctgagaaagaagcctgaaaatatcccccagcccatcagcaatacatctagagccaacctgaataagctgctgaccgattacaccgaaatgaagaaggcgatcctgcatgtgtactgggaagagttccagaaggaccctgtgggcctgatgagccgggtggcccagcctgccagcaagaagatcgatcagaacaagctgaaacctgagatggacgagaagggcaacctgaccaccgccggctttgcctgctctcagtgtggccagcccctgttcgtgtacaagctggagcaggtgtctgagaagggcaaggcttacaccaactacttcggacggtgcaatgtggccgagcacgaaaagctgatcctgctggcccagctgaagcccgagaaggatagcgacgaagccgtgacatatagcctgggaaagtttgggcagagggccctggatttctacagcattcatgtgaccaaggagtccacccaccccgtgaagcccctggcccagatcgccggaaacagatacgcctccggacctgtgggaaaggccctgagcgacgcatgtatgggcacaatcgcctccttcctgtctaagtaccaggacatcatcatcgaacaccagaaggtggtgaagggcaaccagaagagactggagagcctgcgggagctggccggcaaggaaaacctggaataccctagcgtgaccctgccacctcagcctcacaccaaggagggcgttgatgcctacaacgaagtgatcgcccgggtgcgaatgtgggtgaacctgaacctgtggcagaagctgaagctaagcagagatgatgccaagcctctgctgagactgaagggattcccttcctttcctctggtcgagagacaggccaacgaagtggactggtgggacatggtgtgtaacgtgaagaagctgatcaacgagaaaaaggaggatggcaaggtgttttggcagaatctggctggctacaagagacaggaagccctgagaccatacctgagcagcgaggaagatcggaagaagggaaagaaattcgctcggtaccagctgggcgacctgctgctgcacctggaaaagaagcacggcgaggactggggaaaggtgtacgacgaggcctgggagcggattgacaagaaagtggaaggcctgagcaagcacatcaagctggaagaggaacggagaagcgaggacgcccagagcaaggccgccctgaccgactggctgcgggctaaggccagcttcgtgatcgagggcctgaaggaggccgacaaggacgagttctgcagatgcgagctgaagctgcagaagtggtacggggacctgcggggaaagcccttcgccatcgaagccgagaacagcatcctggacatcagcggcttcagcaagcagtacaactgtgccttcatctggcagaaggacggcgtgaagaagctgaacctgtacctgatcatcaactacttcaagggcggcaagctgcggttcaagaagatcaaacctgaagccttcgaagccaacagattctacaccgtgatcaacaaaaagagcggcgagatcgtgcccatggaggtgaacttcaacttcgacgaccccaacctgatcatcctgcctctggcctttggcaagagacagggcagagaattcatctggaacgacctgctgtccctggaaaccggcagcctgaagctggccaacggaagagtgatcgagaagacactgtacaacagaagaacccggcaggatgagcctgccctgttcgtggccctgaccttcgagcggcgggaggtcctggactcctccaatatcaaaccaatgaacctgatcggcgtggcaagaggcgaaaacatccccgccgtgatcgccctgaccgaccccgagggctgcccactgagccggtttaaggatagcctgggaaacccaacccacatcctgagaatcggcgagagctataaggagaagcagcggaccatccaggccaagaaggaggtggagcagcggagagccggcggctacagccggaagtacgccagcaaagccaagaatctggcagacgatatggtgagaaacaccgctagagatctgctgtactacgccgtgacccaggatgccatgctgatcttcgccaacctgagccggggcttcggccggcagggcaagcggaccttcatggccgagagacagtacacacggatggaggactggctgaccgccaagctggcctacgagggcctgagcaagacctacctgtccaagacactggcccagtacacctccaagacatgcagcaactgtgggtttaccatcaccagcgccgactacgacagggtgctggagaagctgaagaagacagcaacaggctggatgaccacaattaacggcaaggagctgaaggtggagggccagattacctactacaacagatacaagagacagaacgtagtcaaggacctgtccgtcgagctggatagactgagcgaagaatctgtgaacaacgacatctcctcctggacaaagggcagaagcggagaagctctgagcctcctgaagaaaagattctcccatagacccgtgcaggagaagttcgtgtgcctgaactgcggcttcgagacacacgcagccgagcaagccgccctgaacatcgccagatcctggctgttcctgcggagccaggagtacaagaaataccagacaaacaagacaaccggcaacaccgataagagagccttcgtcgagacctggcagtccttttaccggaagaagcttaaggaggtgtggaaacctgccgtgcggtctggcggatctggcggaggctccaccagccccaagaaaaagagaaaagtctaagctgccttctgcggggcttgccttctggccatgcccttcttctctcccttgcacctgtacctcttggtctttgaataaagcctgagtaggaaggctagcaaaaaaaaaaaaaaaaaaaaaaaaaaaaaaaaaaaaaaaaaaaaaaaaaaaaaaaaaaaaaaaaaaaaaaaaaaaaaaaagcccagccggctccccaacctctaccgaggagggcacctctgagtccgccacccccgagagcggccctggcacctccaccgagcccagcgagggcagcgcacccggcagccctgccggcagccccacctccacagaggagggaaccagcaccgagcccagcgaaggcagcgccccaggcaccagcaccgagcctagtgagcaggagattaaacggatcaacaagatcagaagaagacttgtgaaagacagcaacaccaagaaggccggcaagacaggccccatgaaaaccctgctggttagagtgatgacacccgatctgagagagcggctggaaaacctgagaaagaagcctgaaaatatcccccagcccatcagcaatacatctagagccaacctgaataagctgctgaccgattacaccgaaatgaagaaggcgatcctgcatgtgtactgggaagagttccagaaggaccctgtgggcctgatgagccgggtggcccagcctgccagcaagaagatcgatcagaacaagctgaaacctgagatggacgagaagggcaacctgaccaccgccggctttgcctgctctcagtgtggccagcccctgttcgtgtacaagctggagcaggtgtctgagaagggcaaggcttacaccaactacttcggacggtgcaatgtggccgagcacgaaaagctgatcctgctggcccagctgaagcccgagaaggatagcgacgaagccgtgacatatagcctgggaaagtttgggcagagggccctggatttctacagcattcatgtgaccaaggagtccacccaccccgtgaagcccctggcccagatcgccggaaacagatacgcctccggacctgtgggaaaggccctgagcgacgcatgtatgggcacaatcgcctccttcctgtctaagtaccaggacatcatcatcgaacaccagaaggtggtgaagggcaaccagaagagactggagagcctgcgggagctggccggcaaggaaaacctggaataccctagcgtgaccctgccacctcagcctcacaccaaggagggcgttgatgcctacaacgaagtgatcgcccgggtgcgaatgtgggtgaacctgaacctgtggcagaagctgaagctaagcagagatgatgccaagcctctgctgagactgaagggattcccttcctttcctctggtcgagagacaggccaacgaagtggactggtgggacatggtgtgtaacgtgaagaagctgatcaacgagaaaaaggaggatggcaaggtgttttggcagaatctggctggctacaagagacaggaagccctgagaccatacctgagcagcgaggaagatcggaagaagggaaagaaattcgctcggtaccagctgggcgacctgctgctgcacctggaaaagaagcacggcgaggactggggaaaggtgtacgacgaggcctgggagcggattgacaagaaagtggaaggcctgagcaagcacatcaagctggaagaggaacggagaagcgaggacgcccagagcaaggccgccctgaccgactggctgcgggctaaggccagcttcgtgatcgagggcctgaaggaggccgacaaggacgagttctgcagatgcgagctgaagctgcagaagtggtacggggacctgcggggaaagcccttcgccatcgaagccgagaacagcatcctggacatcagcggcttcagcaagcagtacaactgtgccttcatctggcagaaggacggcgtgaagaagctgaacctgtacctgatcatcaactacttcaagggcggcaagctgcggttcaagaagatcaaacctgaagccttcgaagccaacagattctacaccgtgatcaacaaaaagagcggcgagatcgtgcccatggaggtgaacttcaacttcgacgaccccaacctgatcatcctgcctctggcctttggcaagagacagggcagagaattcatctggaacgacctgctgtccctggaaaccggcagcctgaagctggccaacggaagagtgatcgagaagacactgtacaacagaagaacccggcaggatgagcctgccctgttcgtggccctgaccttcgagcggcgggaggtcctggactcctccaatatcaaaccaatgaacctgatcggcgtggcaagaggcgaaaacatccccgccgtgatcgccctgaccgaccccgagggctgcccactgagccggtttaaggatagcctgggaaacccaacccacatcctgagaatcggcgagagctataaggagaagcagcggaccatccaggccaagaaggaggtggagcagcggagagccggcggctacagccggaagtacgccagcaaagccaagaatctggcagacgatatggtgagaaacaccgctagagatctgctgtactacgccgtgacccaggatgccatgctgatcttcgccaacctgagccggggcttcggccggcagggcaagcggaccttcatggccgagagacagtacacacggatggaggactggctgaccgccaagctggcctacgagggcctgagcaagacctacctgtccaagacactggcccagtacacctccaagacatgcagcaactgtgggtttaccatcaccagcgccgactacgacagggtgctggagaagctgaagaagacagcaacaggctggatgaccacaattaacggcaaggagctgaaggtggagggccagattacctactacaacagatacaagagacagaacgtagtcaaggacctgtccgtcgagctggatagactgagcgaagaatctgtgaacaacgacatctcctcctggacaaagggcagaagcggagaagctctgagcctcctgaagaaaagattctcccatagacccgtgcaggagaagttcgtgtgcctgaactgcggcttcgagacacacgcagccgagcaagccgccctgaacatcgccagatcctggctgttcctgcggagccaggagtacaagaaataccagacaaacaagacaaccggcaacaccgataagagagccttcgtcgagacctggcagtccttttaccggaagaagcttaaggaggtgtggaaacctgccgtgcggtctggcggatctggcggaggctccaccagccccaagaaaaagagaaaagtctaagctgccttctgcggggcttgccttctggccatgcccttcttctctcccttgcacctgtacctcttggtctttgaataaagcctgagtaggaaggctagcaaaaaaaaaaaaaaaaaaaaaaaaaaaaaaaaaaaaaaaaaaaaaaaaaaaaaaaaaaaaaaaaaaaaaaaaaaaaaaaa

SEQ ID NO: 9351 - RNA, 8787 nt, synthetic construct
  source 1..8787: mol_type = other RNA
aggaaataagagagaaaagaagagtaagaagaaatataagagccaccatggcccctaagaagaagcgtaaagtgagccggatgaaccacgaccaggagttcgacccccctaaggtgtaccctcccgtccccgccgagaagagaaagcccatccgggtcctgagcctgttcgatggcatcgccaccggtctgctggtgctgaaggacctgggcatccaggtggataggtacattgcctccgaggtgtgcgaggactccatcaccgtgggaatggtgcgtcatcagggcaagatcatgtacgtgggcgacgtgcggagcgtgacacagaagcatatccaggagtggggccctttcgacctggtgatcggcggcagcccttgcaatgacctgagcatcgtgaacccagcccggaagggcctgtacgagggaaccggcagactgttcttcgagttttacagactgctgcacgacgcccggcctaaggaaggcgacgaccggcccttcttttggctgttcgagaatgtggtggccatgggagtcagcgacaagcgggatattagccggttcctggagagcaaccccgtgatgatcgatgccaaggaagtgagcgccgcccaccgggccagatacttctggggcaatctgcctggcatgaacagacccctggccagcaccgtgaacgacaagctggagctgcaggagtgcctggagcacggccggatcgccaagttcagcaaggtgagaaccatcaccacccgaagcaacagcatcaaacaaggcaaggaccagcactttcctgtgttcatgaacgagaaggaggacatcctgtggtgtaccgagatggagagagtgttcgggttcccagtccactacacagatgtcagcaacatgtctagactggccagacagagactgctgggaagaagctggtccgtccctgtgatcagacacctgttcgcccctctgaaggagtacttcgcctgcgtgagcagcggcaacagcaacgccaacagccggggccccagcttctctagcggcctggtgccactgtccctgagagggagccacatgggccccatggagatctacaaaaccgtgagcgcctggaagcggcagcctgtgcgcgtgctgagcctgtttcggaatatcgataaagtcctgaaaagcctgggattcctggagagcggctctggctccggcggtggcaccctgaagtacgtggaggatgtgacaaacgtggtcagacgggatgtggagaagtggggccccttcgatctggtgtacggcagcacccaacccctgggcagctcttgtgaccggtgccctggctggtacatgtttcagttccaccggatcctgcagtacgccctgccgagacaggagtcccagcggccattcttttggattttcatggacaacttgctgctgaccgaggatgaccaggaaactaccactcggttcctgcagaccgaagccgtgaccctgcaggacgtgagaggccgggactaccagaacgccatgcgggtgtggtccaacatccctggactgaaaagcaagcacgcacctctgacccctaaagaagaggagtacctgcaggcccaggtgcggagcagaagcaagctggacgcccctaaggtggatctgctggtgaagaattgcctcctgcccctgagagagtacttcaagtatttcagccagaatagtctgcccctgggaggcagcggcggcggcaagcacggccccgtgaccttcgaggaggtggccgtgtacttcaccagggaggagtgggccctgctggaccccacccagagggccctgtacagggacgtgatgcaggagaactacgagatggtggtgctgctgggcttcctgaacagcaagcccgacgtgatcagccagctggagcagggcgaggagccctgcatcgtggacctgcagggcagcgagaaggaggtgctgcccagggccgcctgcggcggcccaagcagcggcgcccctcctcccagcggcggcaggcggcccaagcagcggcgcccctcctcccagcggcggcagcccagccggctccccaacctctaccgaggagggcacctctgagtccgccacccccgagagcggccctggcacctccaccgagcccagcgagggcagcgcacccggcagccctgccggcagccccacctccacagaggagggaaccagcaccgagcccagcgaaggcagcgccccaggcaccagcaccgagcctagtgagcaggagattaaacggatcaacaagatcagaagaagacttgtgaaagacagcaacaccaagaaggccggcaagacaggccccatgaaaaccctgctggttagagtgatgacacccgatctgagagagcggctggaaaacctgagaaagaagcctgaaaatatcccccagcccatcagcaatacatctagagccaacctgaataagctgctgaccgattacaccgaaatgaagaaggcgatcctgcatgtgtactgggaagagttccagaaggaccctgtgggcctgatgagccgggtggcccagcctgccagcaagaagatcgatcagaacaagctgaaacctgagatggacgagaagggcaacctgaccaccgccggctttgcctgctctcagtgtggccagcccctgttcgtgtacaagctggagcaggtgtctgagaagggcaaggcttacaccaactacttcggacggtgcaatgtggccgagcacgaaaagctgatcctgctggcccagctgaagcccgagaaggatagcgacgaagccgtgacatatagcctgggaaagtttgggcagagggccctggatttctacagcattcatgtgaccaaggagtccacccaccccgtgaagcccctggcccagatcgccggaaacagatacgcctccggacctgtgggaaaggccctgagcgacgcatgtatgggcacaatcgcctccttcctgtctaagtaccaggacatcatcatcgaacaccagaaggtggtgaagggcaaccagaagagactggagagcctgcgggagctggccggcaaggaaaacctggaataccctagcgtgaccctgccacctcagcctcacaccaaggagggcgttgatgcctacaacgaagtgatcgcccgggtgcgaatgtgggtgaacctgaacctgtggcagaagctgaagctaagcagagatgatgccaagcctctgctgagactgaagggattcccttcctttcctctggtcgagagacaggccaacgaagtggactggtgggacatggtgtgtaacgtgaagaagctgatcaacgagaaaaaggaggatggcaaggtgttttggcagaatctggctggctacaagagacaggaagccctgagaccatacctgagcagcgaggaagatcggaagaagggaaagaaattcgctcggtaccagctgggcgacctgctgctgcacctggaaaagaagcacggcgaggactggggaaaggtgtacgacgaggcctgggagcggattgacaagaaagtggaaggcctgagcaagcacatcaagctggaagaggaacggagaagcgaggacgcccagagcaaggccgccctgaccgactggctgcgggctaaggccagcttcgtgatcgagggcctgaaggaggccgacaaggacgagttctgcagatgcgagctgaagctgcagaagtggtacggggacctgcggggaaagcccttcgccatcgaagccgagaacagcatcctggacatcagcggcttcagcaagcagtacaactgtgccttcatctggcagaaggacggcgtgaagaagctgaacctgtacctgatcatcaactacttcaagggcggcaagctgcggttcaagaagatcaaacctgaagccttcgaagccaacagattctacaccgtgatcaacaaaaagagcggcgagatcgtgcccatggaggtgaacttcaacttcgacgaccccaacctgatcatcctgcctctggcctttggcaagagacagggcagagaattcatctggaacgacctgctgtccctggaaaccggcagcctgaagctggccaacggaagagtgatcgagaagacactgtacaacagaagaacccggcaggatgagcctgccctgttcgtggccctgaccttcgagcggcgggaggtcctggactcctccaatatcaaaccaatgaacctgatcggcgtggcaagaggcgaaaacatccccgccgtgatcgccctgaccgaccccgagggctgcccactgagccggtttaaggatagcctgggaaacccaacccacatcctgagaatcggcgagagctataaggagaagcagcggaccatccaggccaagaaggaggtggagcagcggagagccggcggctacagccggaagtacgccagcaaagccaagaatctggcagacgatatggtgagaaacaccgctagagatctgctgtactacgccgtgacccaggatgccatgctgatcttcgccaacctgagccggggcttcggccggcagggcaagcggaccttcatggccgagagacagtacacacggatggaggactggctgaccgccaagctggcctacgagggcctgagcaagacctacctgtccaagacactggcccagtacacctccaagacatgcagcaactgtgggtttaccatcaccagcgccgactacgacagggtgctggagaagctgaagaagacagcaacaggctggatgaccacaattaacggcaaggagctgaaggtggagggccagattacctactacaacagatacaagagacagaacgtagtcaaggacctgtccgtcgagctggatagactgagcgaagaatctgtgaacaacgacatctcctcctggacaaagggcagaagcggagaagctctgagcctcctgaagaaaagattctcccatagacccgtgcaggagaagttcgtgtgcctgaactgcggcttcgagacacacgcagccgagcaagccgccctgaacatcgccagatcctggctgttcctgcggagccaggagtacaagaaataccagacaaacaagacaaccggcaacaccgataagagagccttcgtcgagacctggcagtccttttaccggaagaagcttaaggaggtgtggaaacctgccgtgcggtctggcggatctggcggaggctccaccagccccaagaaaaagagaaaagtctaagctgccttctgcggggcttgccttctggccatgcccttcttctctcccttgcacctgtacctcttggtctttgaataaagcctgagtaggaaggctagcaaaaaaaaaaaaaaaaaaaaaaaaaaaaaaaaaaaaaaaaaaaaaaaaaaaaaaaaaaaaaaaaaaaaaaaaaaaaaaaagcccagccggctccccaacctctaccgaggagggcacctctgagtccgccacccccgagagcggccctggcacctccaccgagcccagcgagggcagcgcacccggcagccctgccggcagccccacctccacagaggagggaaccagcaccgagcccagcgaaggcagcgccccaggcaccagcaccgagcctagtgagcaggagattaaacggatcaacaagatcagaagaagacttgtgaaagacagcaacaccaagaaggccggcaagacaggccccatgaaaaccctgctggttagagtgatgacacccgatctgagagagcggctggaaaacctgagaaagaagcctgaaaatatcccccagcccatcagcaatacatctagagccaacctgaataagctgctgaccgattacaccgaaatgaagaaggcgatcctgcatgtgtactgggaagagttccagaaggaccctgtgggcctgatgagccgggtggcccagcctgccagcaagaagatcgatcagaacaagctgaaacctgagatggacgagaagggcaacctgaccaccgccggctttgcctgctctcagtgtggccagcccctgttcgtgtacaagctggagcaggtgtctgagaagggcaaggcttacaccaactacttcggacggtgcaatgtggccgagcacgaaaagctgatcctgctggcccagctgaagcccgagaaggatagcgacgaagccgtgacatatagcctgggaaagtttgggcagagggccctggatttctacagcattcatgtgaccaaggagtccacccaccccgtgaagcccctggcccagatcgccggaaacagatacgcctccggacctgtgggaaaggccctgagcgacgcatgtatgggcacaatcgcctccttcctgtctaagtaccaggacatcatcatcgaacaccagaaggtggtgaagggcaaccagaagagactggagagcctgcgggagctggccggcaaggaaaacctggaataccctagcgtgaccctgccacctcagcctcacaccaaggagggcgttgatgcctacaacgaagtgatcgcccgggtgcgaatgtgggtgaacctgaacctgtggcagaagctgaagctaagcagagatgatgccaagcctctgctgagactgaagggattcccttcctttcctctggtcgagagacaggccaacgaagtggactggtgggacatggtgtgtaacgtgaagaagctgatcaacgagaaaaaggaggatggcaaggtgttttggcagaatctggctggctacaagagacaggaagccctgagaccatacctgagcagcgaggaagatcggaagaagggaaagaaattcgctcggtaccagctgggcgacctgctgctgcacctggaaaagaagcacggcgaggactggggaaaggtgtacgacgaggcctgggagcggattgacaagaaagtggaaggcctgagcaagcacatcaagctggaagaggaacggagaagcgaggacgcccagagcaaggccgccctgaccgactggctgcgggctaaggccagcttcgtgatcgagggcctgaaggaggccgacaaggacgagttctgcagatgcgagctgaagctgcagaagtggtacggggacctgcggggaaagcccttcgccatcgaagccgagaacagcatcctggacatcagcggcttcagcaagcagtacaactgtgccttcatctggcagaaggacggcgtgaagaagctgaacctgtacctgatcatcaactacttcaagggcggcaagctgcggttcaagaagatcaaacctgaagccttcgaagccaacagattctacaccgtgatcaacaaaaagagcggcgagatcgtgcccatggaggtgaacttcaacttcgacgaccccaacctgatcatcctgcctctggcctttggcaagagacagggcagagaattcatctggaacgacctgctgtccctggaaaccggcagcctgaagctggccaacggaagagtgatcgagaagacactgtacaacagaagaacccggcaggatgagcctgccctgttcgtggccctgaccttcgagcggcgggaggtcctggactcctccaatatcaaaccaatgaacctgatcggcgtggcaagaggcgaaaacatccccgccgtgatcgccctgaccgaccccgagggctgcccactgagccggtttaaggatagcctgggaaacccaacccacatcctgagaatcggcgagagctataaggagaagcagcggaccatccaggccaagaaggaggtggagcagcggagagccggcggctacagccggaagtacgccagcaaagccaagaatctggcagacgatatggtgagaaacaccgctagagatctgctgtactacgccgtgacccaggatgccatgctgatcttcgccaacctgagccggggcttcggccggcagggcaagcggaccttcatggccgagagacagtacacacggatggaggactggctgaccgccaagctggcctacgagggcctgagcaagacctacctgtccaagacactggcccagtacacctccaagacatgcagcaactgtgggtttaccatcaccagcgccgactacgacagggtgctggagaagctgaagaagacagcaacaggctggatgaccacaattaacggcaaggagctgaaggtggagggccagattacctactacaacagatacaagagacagaacgtagtcaaggacctgtccgtcgagctggatagactgagcgaagaatctgtgaacaacgacatctcctcctggacaaagggcagaagcggagaagctctgagcctcctgaagaaaagattctcccatagacccgtgcaggagaagttcgtgtgcctgaactgcggcttcgagacacacgcagccgagcaagccgccctgaacatcgccagatcctggctgttcctgcggagccaggagtacaagaaataccagacaaacaagacaaccggcaacaccgataagagagccttcgtcgagacctggcagtccttttaccggaagaagcttaaggaggtgtggaaacctgccgtgcggtctggcggatctggcggaggctccaccagccccaagaaaaagagaaaagtctaagctgccttctgcggggcttgccttctggccatgcccttcttctctcccttgcacctgtacctcttggtctttgaataaagcctgagtaggaaggctagcaaaaaaaaaaaaaaaaaaaaaaaaaaaaaaaaaaaaaaaaaaaaaaaaaaaaaaaaaaaaaaaaaaaaaaaaaaaaaaaa

SEQ ID NO: 9352 - RNA, 8787 nt, synthetic construct
  source 1..8787: mol_type = other RNA
aggaaataagagagaaaagaagagtaagaagaaatataagagccaccatggcccctaagaagaagcgtaaagtgagccggatgaaccacgaccaggagttcgacccccctaaggtgtaccctcccgtccccgccgagaagagaaagcccatccgggtcctgagcctgttcgatggcatcgccaccggtctgctggtgctgaaggacctgggcatccaggtggataggtacattgcctccgaggtgtgcgaggactccatcaccgtgggaatggtgcgtcatcagggcaagatcatgtacgtgggcgacgtgcggagcgtgacacagaagcatatccaggagtggggccctttcgacctggtgatcggcggcagcccttgcaatgacctgagcatcgtgaacccagcccggaagggcctgtacgagggaaccggcagactgttcttcgagttttacagactgctgcacgacgcccggcctaaggaaggcgacgaccggcccttcttttggctgttcgagaatgtggtggccatgggagtcagcgacaagcgggatattagccggttcctggagagcaaccccgtgatgatcgatgccaaggaagtgagcgccgcccaccgggccagatacttctggggcaatctgcctggcatgaacagacccctggccagcaccgtgaacgacaagctggagctgcaggagtgcctggagcacggccggatcgccaagttcagcaaggtgagaaccatcaccacccgaagcaacagcatcaaacaaggcaaggaccagcactttcctgtgttcatgaacgagaaggaggacatcctgtggtgtaccgagatggagagagtgttcgggttcccagtccactacacagatgtcagcaacatgtctagactggccagacagagactgctgggaagaagctggtccgtccctgtgatcagacacctgttcgcccctctgaaggagtacttcgcctgcgtgagcagcggcaacagcaacgccaacagccggggccccagcttctctagcggcctggtgccactgtccctgagagggagccacatgggccccatggagatctacaaaaccgtgagcgcctggaagcggcagcctgtgcgcgtgctgagcctgtttcggaatatcgataaagtcctgaaaagcctgggattcctggagagcggctctggctccggcggtggcaccctgaagtacgtggaggatgtgacaaacgtggtcagacgggatgtggagaagtggggccccttcgatctggtgtacggcagcacccaacccctgggcagctcttgtgaccggtgccctggctggtacatgtttcagttccaccggatcctgcagtacgccctgccgagacaggagtcccagcggccattcttttggattttcatggacaacttgctgctgaccgaggatgaccaggaaactaccactcggttcctgcagaccgaagccgtgaccctgcaggacgtgagaggccgggactaccagaacgccatgcgggtgtggtccaacatccctggactgaaaagcaagcacgcacctctgacccctaaagaagaggagtacctgcaggcccaggtgcggagcagaagcaagctggacgcccctaaggtggatctgctggtgaagaattgcctcctgcccctgagagagtacttcaagtatttcagccagaatagtctgcccctgggaggcagcggcggcggcagccaggaggtggtgaccttccaggacgtggccgtgaacttcaccagggaggagtggaggctgctgagccccccccagaaggagctgtacagggaggtgatgctggagaacgccaggaacctgctgagcgtgggcctgcccgccagcatcgaggacgtgatcagcaacgtggagcagagggaggccctgtggatgctggagagggagggcctgaggagctgctgccccgaggaggacatcaggggcggcccaagcagcggcgcccctcctcccagcggcggcaggcggcccaagcagcggcgcccctcctcccagcggcggcagcccagccggctccccaacctctaccgaggagggcacctctgagtccgccacccccgagagcggccctggcacctccaccgagcccagcgagggcagcgcacccggcagccctgccggcagccccacctccacagaggagggaaccagcaccgagcccagcgaaggcagcgccccaggcaccagcaccgagcctagtgagcaggagattaaacggatcaacaagatcagaagaagacttgtgaaagacagcaacaccaagaaggccggcaagacaggccccatgaaaaccctgctggttagagtgatgacacccgatctgagagagcggctggaaaacctgagaaagaagcctgaaaatatcccccagcccatcagcaatacatctagagccaacctgaataagctgctgaccgattacaccgaaatgaagaaggcgatcctgcatgtgtactgggaagagttccagaaggaccctgtgggcctgatgagccgggtggcccagcctgccagcaagaagatcgatcagaacaagctgaaacctgagatggacgagaagggcaacctgaccaccgccggctttgcctgctctcagtgtggccagcccctgttcgtgtacaagctggagcaggtgtctgagaagggcaaggcttacaccaactacttcggacggtgcaatgtggccgagcacgaaaagctgatcctgctggcccagctgaagcccgagaaggatagcgacgaagccgtgacatatagcctgggaaagtttgggcagagggccctggatttctacagcattcatgtgaccaaggagtccacccaccccgtgaagcccctggcccagatcgccggaaacagatacgcctccggacctgtgggaaaggccctgagcgacgcatgtatgggcacaatcgcctccttcctgtctaagtaccaggacatcatcatcgaacaccagaaggtggtgaagggcaaccagaagagactggagagcctgcgggagctggccggcaaggaaaacctggaataccctagcgtgaccctgccacctcagcctcacaccaaggagggcgttgatgcctacaacgaagtgatcgcccgggtgcgaatgtgggtgaacctgaacctgtggcagaagctgaagctaagcagagatgatgccaagcctctgctgagactgaagggattcccttcctttcctctggtcgagagacaggccaacgaagtggactggtgggacatggtgtgtaacgtgaagaagctgatcaacgagaaaaaggaggatggcaaggtgttttggcagaatctggctggctacaagagacaggaagccctgagaccatacctgagcagcgaggaagatcggaagaagggaaagaaattcgctcggtaccagctgggcgacctgctgctgcacctggaaaagaagcacggcgaggactggggaaaggtgtacgacgaggcctgggagcggattgacaagaaagtggaaggcctgagcaagcacatcaagctggaagaggaacggagaagcgaggacgcccagagcaaggccgccctgaccgactggctgcgggctaaggccagcttcgtgatcgagggcctgaaggaggccgacaaggacgagttctgcagatgcgagctgaagctgcagaagtggtacggggacctgcggggaaagcccttcgccatcgaagccgagaacagcatcctggacatcagcggcttcagcaagcagtacaactgtgccttcatctggcagaaggacggcgtgaagaagctgaacctgtacctgatcatcaactacttcaagggcggcaagctgcggttcaagaagatcaaacctgaagccttcgaagccaacagattctacaccgtgatcaacaaaaagagcggcgagatcgtgcccatggaggtgaacttcaacttcgacgaccccaacctgatcatcctgcctctggcctttggcaagagacagggcagagaattcatctggaacgacctgctgtccctggaaaccggcagcctgaagctggccaacggaagagtgatcgagaagacactgtacaacagaagaacccggcaggatgagcctgccctgttcgtggccctgaccttcgagcggcgggaggtcctggactcctccaatatcaaaccaatgaacctgatcggcgtggcaagaggcgaaaacatccccgccgtgatcgccctgaccgaccccgagggctgcccactgagccggtttaaggatagcctgggaaacccaacccacatcctgagaatcggcgagagctataaggagaagcagcggaccatccaggccaagaaggaggtggagcagcggagagccggcggctacagccggaagtacgccagcaaagccaagaatctggcagacgatatggtgagaaacaccgctagagatctgctgtactacgccgtgacccaggatgccatgctgatcttcgccaacctgagccggggcttcggccggcagggcaagcggaccttcatggccgagagacagtacacacggatggaggactggctgaccgccaagctggcctacgagggcctgagcaagacctacctgtccaagacactggcccagtacacctccaagacatgcagcaactgtgggtttaccatcaccagcgccgactacgacagggtgctggagaagctgaagaagacagcaacaggctggatgaccacaattaacggcaaggagctgaaggtggagggccagattacctactacaacagatacaagagacagaacgtagtcaaggacctgtccgtcgagctggatagactgagcgaagaatctgtgaacaacgacatctcctcctggacaaagggcagaagcggagaagctctgagcctcctgaagaaaagattctcccatagacccgtgcaggagaagttcgtgtgcctgaactgcggcttcgagacacacgcagccgagcaagccgccctgaacatcgccagatcctggctgttcctgcggagccaggagtacaagaaataccagacaaacaagacaaccggcaacaccgataagagagccttcgtcgagacctggcagtccttttaccggaagaagcttaaggaggtgtggaaacctgccgtgcggtctggcggatctggcggaggctccaccagccccaagaaaaagagaaaagtctaagctgccttctgcggggcttgccttctggccatgcccttcttctctcccttgcacctgtacctcttggtctttgaataaagcctgagtaggaaggctagcaaaaaaaaaaaaaaaaaaaaaaaaaaaaaaaaaaaaaaaaaaaaaaaaaaaaaaaaaaaaaaaaaaaaaaaaaaaaaaaagcccagccggctccccaacctctaccgaggagggcacctctgagtccgccacccccgagagcggccctggcacctccaccgagcccagcgagggcagcgcacccggcagccctgccggcagccccacctccacagaggagggaaccagcaccgagcccagcgaaggcagcgccccaggcaccagcaccgagcctagtgagcaggagattaaacggatcaacaagatcagaagaagacttgtgaaagacagcaacaccaagaaggccggcaagacaggccccatgaaaaccctgctggttagagtgatgacacccgatctgagagagcggctggaaaacctgagaaagaagcctgaaaatatcccccagcccatcagcaatacatctagagccaacctgaataagctgctgaccgattacaccgaaatgaagaaggcgatcctgcatgtgtactgggaagagttccagaaggaccctgtgggcctgatgagccgggtggcccagcctgccagcaagaagatcgatcagaacaagctgaaacctgagatggacgagaagggcaacctgaccaccgccggctttgcctgctctcagtgtggccagcccctgttcgtgtacaagctggagcaggtgtctgagaagggcaaggcttacaccaactacttcggacggtgcaatgtggccgagcacgaaaagctgatcctgctggcccagctgaagcccgagaaggatagcgacgaagccgtgacatatagcctgggaaagtttgggcagagggccctggatttctacagcattcatgtgaccaaggagtccacccaccccgtgaagcccctggcccagatcgccggaaacagatacgcctccggacctgtgggaaaggccctgagcgacgcatgtatgggcacaatcgcctccttcctgtctaagtaccaggacatcatcatcgaacaccagaaggtggtgaagggcaaccagaagagactggagagcctgcgggagctggccggcaaggaaaacctggaataccctagcgtgaccctgccacctcagcctcacaccaaggagggcgttgatgcctacaacgaagtgatcgcccgggtgcgaatgtgggtgaacctgaacctgtggcagaagctgaagctaagcagagatgatgccaagcctctgctgagactgaagggattcccttcctttcctctggtcgagagacaggccaacgaagtggactggtgggacatggtgtgtaacgtgaagaagctgatcaacgagaaaaaggaggatggcaaggtgttttggcagaatctggctggctacaagagacaggaagccctgagaccatacctgagcagcgaggaagatcggaagaagggaaagaaattcgctcggtaccagctgggcgacctgctgctgcacctggaaaagaagcacggcgaggactggggaaaggtgtacgacgaggcctgggagcggattgacaagaaagtggaaggcctgagcaagcacatcaagctggaagaggaacggagaagcgaggacgcccagagcaaggccgccctgaccgactggctgcgggctaaggccagcttcgtgatcgagggcctgaaggaggccgacaaggacgagttctgcagatgcgagctgaagctgcagaagtggtacggggacctgcggggaaagcccttcgccatcgaagccgagaacagcatcctggacatcagcggcttcagcaagcagtacaactgtgccttcatctggcagaaggacggcgtgaagaagctgaacctgtacctgatcatcaactacttcaagggcggcaagctgcggttcaagaagatcaaacctgaagccttcgaagccaacagattctacaccgtgatcaacaaaaagagcggcgagatcgtgcccatggaggtgaacttcaacttcgacgaccccaacctgatcatcctgcctctggcctttggcaagagacagggcagagaattcatctggaacgacctgctgtccctggaaaccggcagcctgaagctggccaacggaagagtgatcgagaagacactgtacaacagaagaacccggcaggatgagcctgccctgttcgtggccctgaccttcgagcggcgggaggtcctggactcctccaatatcaaaccaatgaacctgatcggcgtggcaagaggcgaaaacatccccgccgtgatcgccctgaccgaccccgagggctgcccactgagccggtttaaggatagcctgggaaacccaacccacatcctgagaatcggcgagagctataaggagaagcagcggaccatccaggccaagaaggaggtggagcagcggagagccggcggctacagccggaagtacgccagcaaagccaagaatctggcagacgatatggtgagaaacaccgctagagatctgctgtactacgccgtgacccaggatgccatgctgatcttcgccaacctgagccggggcttcggccggcagggcaagcggaccttcatggccgagagacagtacacacggatggaggactggctgaccgccaagctggcctacgagggcctgagcaagacctacctgtccaagacactggcccagtacacctccaagacatgcagcaactgtgggtttaccatcaccagcgccgactacgacagggtgctggagaagctgaagaagacagcaacaggctggatgaccacaattaacggcaaggagctgaaggtggagggccagattacctactacaacagatacaagagacagaacgtagtcaaggacctgtccgtcgagctggatagactgagcgaagaatctgtgaacaacgacatctcctcctggacaaagggcagaagcggagaagctctgagcctcctgaagaaaagattctcccatagacccgtgcaggagaagttcgtgtgcctgaactgcggcttcgagacacacgcagccgagcaagccgccctgaacatcgccagatcctggctgttcctgcggagccaggagtacaagaaataccagacaaacaagacaaccggcaacaccgataagagagccttcgtcgagacctggcagtccttttaccggaagaagcttaaggaggtgtggaaacctgccgtgcggtctggcggatctggcggaggctccaccagccccaagaaaaagagaaaagtctaagctgccttctgcggggcttgccttctggccatgcccttcttctctcccttgcacctgtacctcttggtctttgaataaagcctgagtaggaaggctagcaaaaaaaaaaaaaaaaaaaaaaaaaaaaaaaaaaaaaaaaaaaaaaaaaaaaaaaaaaaaaaaaaaaaaaaaaaaaaaaa

SEQ ID NO: 9353 - RNA, 8787 nt, synthetic construct
  source 1..8787: mol_type = other RNA
aggaaataagagagaaaagaagagtaagaagaaatataagagccaccatggcccctaagaagaagcgtaaagtgagccggatgaaccacgaccaggagttcgacccccctaaggtgtaccctcccgtccccgccgagaagagaaagcccatccgggtcctgagcctgttcgatggcatcgccaccggtctgctggtgctgaaggacctgggcatccaggtggataggtacattgcctccgaggtgtgcgaggactccatcaccgtgggaatggtgcgtcatcagggcaagatcatgtacgtgggcgacgtgcggagcgtgacacagaagcatatccaggagtggggccctttcgacctggtgatcggcggcagcccttgcaatgacctgagcatcgtgaacccagcccggaagggcctgtacgagggaaccggcagactgttcttcgagttttacagactgctgcacgacgcccggcctaaggaaggcgacgaccggcccttcttttggctgttcgagaatgtggtggccatgggagtcagcgacaagcgggatattagccggttcctggagagcaaccccgtgatgatcgatgccaaggaagtgagcgccgcccaccgggccagatacttctggggcaatctgcctggcatgaacagacccctggccagcaccgtgaacgacaagctggagctgcaggagtgcctggagcacggccggatcgccaagttcagcaaggtgagaaccatcaccacccgaagcaacagcatcaaacaaggcaaggaccagcactttcctgtgttcatgaacgagaaggaggacatcctgtggtgtaccgagatggagagagtgttcgggttcccagtccactacacagatgtcagcaacatgtctagactggccagacagagactgctgggaagaagctggtccgtccctgtgatcagacacctgttcgcccctctgaaggagtacttcgcctgcgtgagcagcggcaacagcaacgccaacagccggggccccagcttctctagcggcctggtgccactgtccctgagagggagccacatgggccccatggagatctacaaaaccgtgagcgcctggaagcggcagcctgtgcgcgtgctgagcctgtttcggaatatcgataaagtcctgaaaagcctgggattcctggagagcggctctggctccggcggtggcaccctgaagtacgtggaggatgtgacaaacgtggtcagacgggatgtggagaagtggggccccttcgatctggtgtacggcagcacccaacccctgggcagctcttgtgaccggtgccctggctggtacatgtttcagttccaccggatcctgcagtacgccctgccgagacaggagtcccagcggccattcttttggattttcatggacaacttgctgctgaccgaggatgaccaggaaactaccactcggttcctgcagaccgaagccgtgaccctgcaggacgtgagaggccgggactaccagaacgccatgcgggtgtggtccaacatccctggactgaaaagcaagcacgcacctctgacccctaaagaagaggagtacctgcaggcccaggtgcggagcagaagcaagctggacgcccctaaggtggatctgctggtgaagaattgcctcctgcccctgagagagtacttcaagtatttcagccagaatagtctgcccctgggaggcagcggcggcggcgagagcgtggccttcgaggacgtggccgtgtacttcacccagaaccagtggggcagcctggaccccgcccagagggccctgtacagggaggtgatgctggagaactacgccaacgtggccagcctggtggccttccccttccccaagcccgccctgatcagccacctggagaagggcgaggccccctggggccccgacccctgggacgccgagatccccagcggcatcagccagggcggcgagggcggcccaagcagcggcgcccctcctcccagcggcggcaggcggcccaagcagcggcgcccctcctcccagcggcggcagcccagccggctccccaacctctaccgaggagggcacctctgagtccgccacccccgagagcggccctggcacctccaccgagcccagcgagggcagcgcacccggcagccctgccggcagccccacctccacagaggagggaaccagcaccgagcccagcgaaggcagcgccccaggcaccagcaccgagcctagtgagcaggagattaaacggatcaacaagatcagaagaagacttgtgaaagacagcaacaccaagaaggccggcaagacaggccccatgaaaaccctgctggttagagtgatgacacccgatctgagagagcggctggaaaacctgagaaagaagcctgaaaatatcccccagcccatcagcaatacatctagagccaacctgaataagctgctgaccgattacaccgaaatgaagaaggcgatcctgcatgtgtactgggaagagttccagaaggaccctgtgggcctgatgagccgggtggcccagcctgccagcaagaagatcgatcagaacaagctgaaacctgagatggacgagaagggcaacctgaccaccgccggctttgcctgctctcagtgtggccagcccctgttcgtgtacaagctggagcaggtgtctgagaagggcaaggcttacaccaactacttcggacggtgcaatgtggccgagcacgaaaagctgatcctgctggcccagctgaagcccgagaaggatagcgacgaagccgtgacatatagcctgggaaagtttgggcagagggccctggatttctacagcattcatgtgaccaaggagtccacccaccccgtgaagcccctggcccagatcgccggaaacagatacgcctccggacctgtgggaaaggccctgagcgacgcatgtatgggcacaatcgcctccttcctgtctaagtaccaggacatcatcatcgaacaccagaaggtggtgaagggcaaccagaagagactggagagcctgcgggagctggccggcaaggaaaacctggaataccctagcgtgaccctgccacctcagcctcacaccaaggagggcgttgatgcctacaacgaagtgatcgcccgggtgcgaatgtgggtgaacctgaacctgtggcagaagctgaagctaagcagagatgatgccaagcctctgctgagactgaagggattcccttcctttcctctggtcgagagacaggccaacgaagtggactggtgggacatggtgtgtaacgtgaagaagctgatcaacgagaaaaaggaggatggcaaggtgttttggcagaatctggctggctacaagagacaggaagccctgagaccatacctgagcagcgaggaagatcggaagaagggaaagaaattcgctcggtaccagctgggcgacctgctgctgcacctggaaaagaagcacggcgaggactggggaaaggtgtacgacgaggcctgggagcggattgacaagaaagtggaaggcctgagcaagcacatcaagctggaagaggaacggagaagcgaggacgcccagagcaaggccgccctgaccgactggctgcgggctaaggccagcttcgtgatcgagggcctgaaggaggccgacaaggacgagttctgcagatgcgagctgaagctgcagaagtggtacggggacctgcggggaaagcccttcgccatcgaagccgagaacagcatcctggacatcagcggcttcagcaagcagtacaactgtgccttcatctggcagaaggacggcgtgaagaagctgaacctgtacctgatcatcaactacttcaagggcggcaagctgcggttcaagaagatcaaacctgaagccttcgaagccaacagattctacaccgtgatcaacaaaaagagcggcgagatcgtgcccatggaggtgaacttcaacttcgacgaccccaacctgatcatcctgcctctggcctttggcaagagacagggcagagaattcatctggaacgacctgctgtccctggaaaccggcagcctgaagctggccaacggaagagtgatcgagaagacactgtacaacagaagaacccggcaggatgagcctgccctgttcgtggccctgaccttcgagcggcgggaggtcctggactcctccaatatcaaaccaatgaacctgatcggcgtggcaagaggcgaaaacatccccgccgtgatcgccctgaccgaccccgagggctgcccactgagccggtttaaggatagcctgggaaacccaacccacatcctgagaatcggcgagagctataaggagaagcagcggaccatccaggccaagaaggaggtggagcagcggagagccggcggctacagccggaagtacgccagcaaagccaagaatctggcagacgatatggtgagaaacaccgctagagatctgctgtactacgccgtgacccaggatgccatgctgatcttcgccaacctgagccggggcttcggccggcagggcaagcggaccttcatggccgagagacagtacacacggatggaggactggctgaccgccaagctggcctacgagggcctgagcaagacctacctgtccaagacactggcccagtacacctccaagacatgcagcaactgtgggtttaccatcaccagcgccgactacgacagggtgctggagaagctgaagaagacagcaacaggctggatgaccacaattaacggcaaggagctgaaggtggagggccagattacctactacaacagatacaagagacagaacgtagtcaaggacctgtccgtcgagctggatagactgagcgaagaatctgtgaacaacgacatctcctcctggacaaagggcagaagcggagaagctctgagcctcctgaagaaaagattctcccatagacccgtgcaggagaagttcgtgtgcctgaactgcggcttcgagacacacgcagccgagcaagccgccctgaacatcgccagatcctggctgttcctgcggagccaggagtacaagaaataccagacaaacaagacaaccggcaacaccgataagagagccttcgtcgagacctggcagtccttttaccggaagaagcttaaggaggtgtggaaacctgccgtgcggtctggcggatctggcggaggctccaccagccccaagaaaaagagaaaagtctaagctgccttctgcggggcttgccttctggccatgcccttcttctctcccttgcacctgtacctcttggtctttgaataaagcctgagtaggaaggctagcaaaaaaaaaaaaaaaaaaaaaaaaaaaaaaaaaaaaaaaaaaaaaaaaaaaaaaaaaaaaaaaaaaaaaaaaaaaaaaaagcccagccggctccccaacctctaccgaggagggcacctctgagtccgccacccccgagagcggccctggcacctccaccgagcccagcgagggcagcgcacccggcagccctgccggcagccccacctccacagaggagggaaccagcaccgagcccagcgaaggcagcgccccaggcaccagcaccgagcctagtgagcaggagattaaacggatcaacaagatcagaagaagacttgtgaaagacagcaacaccaagaaggccggcaagacaggccccatgaaaaccctgctggttagagtgatgacacccgatctgagagagcggctggaaaacctgagaaagaagcctgaaaatatcccccagcccatcagcaatacatctagagccaacctgaataagctgctgaccgattacaccgaaatgaagaaggcgatcctgcatgtgtactgggaagagttccagaaggaccctgtgggcctgatgagccgggtggcccagcctgccagcaagaagatcgatcagaacaagctgaaacctgagatggacgagaagggcaacctgaccaccgccggctttgcctgctctcagtgtggccagcccctgttcgtgtacaagctggagcaggtgtctgagaagggcaaggcttacaccaactacttcggacggtgcaatgtggccgagcacgaaaagctgatcctgctggcccagctgaagcccgagaaggatagcgacgaagccgtgacatatagcctgggaaagtttgggcagagggccctggatttctacagcattcatgtgaccaaggagtccacccaccccgtgaagcccctggcccagatcgccggaaacagatacgcctccggacctgtgggaaaggccctgagcgacgcatgtatgggcacaatcgcctccttcctgtctaagtaccaggacatcatcatcgaacaccagaaggtggtgaagggcaaccagaagagactggagagcctgcgggagctggccggcaaggaaaacctggaataccctagcgtgaccctgccacctcagcctcacaccaaggagggcgttgatgcctacaacgaagtgatcgcccgggtgcgaatgtgggtgaacctgaacctgtggcagaagctgaagctaagcagagatgatgccaagcctctgctgagactgaagggattcccttcctttcctctggtcgagagacaggccaacgaagtggactggtgggacatggtgtgtaacgtgaagaagctgatcaacgagaaaaaggaggatggcaaggtgttttggcagaatctggctggctacaagagacaggaagccctgagaccatacctgagcagcgaggaagatcggaagaagggaaagaaattcgctcggtaccagctgggcgacctgctgctgcacctggaaaagaagcacggcgaggactggggaaaggtgtacgacgaggcctgggagcggattgacaagaaagtggaaggcctgagcaagcacatcaagctggaagaggaacggagaagcgaggacgcccagagcaaggccgccctgaccgactggctgcgggctaaggccagcttcgtgatcgagggcctgaaggaggccgacaaggacgagttctgcagatgcgagctgaagctgcagaagtggtacggggacctgcggggaaagcccttcgccatcgaagccgagaacagcatcctggacatcagcggcttcagcaagcagtacaactgtgccttcatctggcagaaggacggcgtgaagaagctgaacctgtacctgatcatcaactacttcaagggcggcaagctgcggttcaagaagatcaaacctgaagccttcgaagccaacagattctacaccgtgatcaacaaaaagagcggcgagatcgtgcccatggaggtgaacttcaacttcgacgaccccaacctgatcatcctgcctctggcctttggcaagagacagggcagagaattcatctggaacgacctgctgtccctggaaaccggcagcctgaagctggccaacggaagagtgatcgagaagacactgtacaacagaagaacccggcaggatgagcctgccctgttcgtggccctgaccttcgagcggcgggaggtcctggactcctccaatatcaaaccaatgaacctgatcggcgtggcaagaggcgaaaacatccccgccgtgatcgccctgaccgaccccgagggctgcccactgagccggtttaaggatagcctgggaaacccaacccacatcctgagaatcggcgagagctataaggagaagcagcggaccatccaggccaagaaggaggtggagcagcggagagccggcggctacagccggaagtacgccagcaaagccaagaatctggcagacgatatggtgagaaacaccgctagagatctgctgtactacgccgtgacccaggatgccatgctgatcttcgccaacctgagccggggcttcggccggcagggcaagcggaccttcatggccgagagacagtacacacggatggaggactggctgaccgccaagctggcctacgagggcctgagcaagacctacctgtccaagacactggcccagtacacctccaagacatgcagcaactgtgggtttaccatcaccagcgccgactacgacagggtgctggagaagctgaagaagacagcaacaggctggatgaccacaattaacggcaaggagctgaaggtggagggccagattacctactacaacagatacaagagacagaacgtagtcaaggacctgtccgtcgagctggatagactgagcgaagaatctgtgaacaacgacatctcctcctggacaaagggcagaagcggagaagctctgagcctcctgaagaaaagattctcccatagacccgtgcaggagaagttcgtgtgcctgaactgcggcttcgagacacacgcagccgagcaagccgccctgaacatcgccagatcctggctgttcctgcggagccaggagtacaagaaataccagacaaacaagacaaccggcaacaccgataagagagccttcgtcgagacctggcagtccttttaccggaagaagcttaaggaggtgtggaaacctgccgtgcggtctggcggatctggcggaggctccaccagccccaagaaaaagagaaaagtctaagctgccttctgcggggcttgccttctggccatgcccttcttctctcccttgcacctgtacctcttggtctttgaataaagcctgagtaggaaggctagcaaaaaaaaaaaaaaaaaaaaaaaaaaaaaaaaaaaaaaaaaaaaaaaaaaaaaaaaaaaaaaaaaaaaaaaaaaaaaaaa

SEQ ID NO: 9354 - RNA, 8787 nt, synthetic construct
  source 1..8787: mol_type = other RNA
aggaaataagagagaaaagaagagtaagaagaaatataagagccaccatggcccctaagaagaagcgtaaagtgagccggatgaaccacgaccaggagttcgacccccctaaggtgtaccctcccgtccccgccgagaagagaaagcccatccgggtcctgagcctgttcgatggcatcgccaccggtctgctggtgctgaaggacctgggcatccaggtggataggtacattgcctccgaggtgtgcgaggactccatcaccgtgggaatggtgcgtcatcagggcaagatcatgtacgtgggcgacgtgcggagcgtgacacagaagcatatccaggagtggggccctttcgacctggtgatcggcggcagcccttgcaatgacctgagcatcgtgaacccagcccggaagggcctgtacgagggaaccggcagactgttcttcgagttttacagactgctgcacgacgcccggcctaaggaaggcgacgaccggcccttcttttggctgttcgagaatgtggtggccatgggagtcagcgacaagcgggatattagccggttcctggagagcaaccccgtgatgatcgatgccaaggaagtgagcgccgcccaccgggccagatacttctggggcaatctgcctggcatgaacagacccctggccagcaccgtgaacgacaagctggagctgcaggagtgcctggagcacggccggatcgccaagttcagcaaggtgagaaccatcaccacccgaagcaacagcatcaaacaaggcaaggaccagcactttcctgtgttcatgaacgagaaggaggacatcctgtggtgtaccgagatggagagagtgttcgggttcccagtccactacacagatgtcagcaacatgtctagactggccagacagagactgctgggaagaagctggtccgtccctgtgatcagacacctgttcgcccctctgaaggagtacttcgcctgcgtgagcagcggcaacagcaacgccaacagccggggccccagcttctctagcggcctggtgccactgtccctgagagggagccacatgggccccatggagatctacaaaaccgtgagcgcctggaagcggcagcctgtgcgcgtgctgagcctgtttcggaatatcgataaagtcctgaaaagcctgggattcctggagagcggctctggctccggcggtggcaccctgaagtacgtggaggatgtgacaaacgtggtcagacgggatgtggagaagtggggccccttcgatctggtgtacggcagcacccaacccctgggcagctcttgtgaccggtgccctggctggtacatgtttcagttccaccggatcctgcagtacgccctgccgagacaggagtcccagcggccattcttttggattttcatggacaacttgctgctgaccgaggatgaccaggaaactaccactcggttcctgcagaccgaagccgtgaccctgcaggacgtgagaggccgggactaccagaacgccatgcgggtgtggtccaacatccctggactgaaaagcaagcacgcacctctgacccctaaagaagaggagtacctgcaggcccaggtgcggagcagaagcaagctggacgcccctaaggtggatctgctggtgaagaattgcctcctgcccctgagagagtacttcaagtatttcagccagaatagtctgcccctgggaggcagcggcggcggcagcgagggcctggtgaccttcggcgacgtggccgtggacttcagccaggaggagtgggagtggctgaaccccgcccagaggagcctgtacaggaaggtgatgctggacaactacaggagcctggtgagcctgggcgtgagcgtgagcaagcccgacgtgatcagcctgctggagcagggcaaggagccctggctggtgaaggaggagggccccaggggcgccaggagcgactgggagtacgccggcggcccaagcagcggcgcccctcctcccagcggcggcaggcggcccaagcagcggcgcccctcctcccagcggcggcagcccagccggctccccaacctctaccgaggagggcacctctgagtccgccacccccgagagcggccctggcacctccaccgagcccagcgagggcagcgcacccggcagccctgccggcagccccacctccacagaggagggaaccagcaccgagcccagcgaaggcagcgccccaggcaccagcaccgagcctagtgagcaggagattaaacggatcaacaagatcagaagaagacttgtgaaagacagcaacaccaagaaggccggcaagacaggccccatgaaaaccctgctggttagagtgatgacacccgatctgagagagcggctggaaaacctgagaaagaagcctgaaaatatcccccagcccatcagcaatacatctagagccaacctgaataagctgctgaccgattacaccgaaatgaagaaggcgatcctgcatgtgtactgggaagagttccagaaggaccctgtgggcctgatgagccgggtggcccagcctgccagcaagaagatcgatcagaacaagctgaaacctgagatggacgagaagggcaacctgaccaccgccggctttgcctgctctcagtgtggccagcccctgttcgtgtacaagctggagcaggtgtctgagaagggcaaggcttacaccaactacttcggacggtgcaatgtggccgagcacgaaaagctgatcctgctggcccagctgaagcccgagaaggatagcgacgaagccgtgacatatagcctgggaaagtttgggcagagggccctggatttctacagcattcatgtgaccaaggagtccacccaccccgtgaagcccctggcccagatcgccggaaacagatacgcctccggacctgtgggaaaggccctgagcgacgcatgtatgggcacaatcgcctccttcctgtctaagtaccaggacatcatcatcgaacaccagaaggtggtgaagggcaaccagaagagactggagagcctgcgggagctggccggcaaggaaaacctggaataccctagcgtgaccctgccacctcagcctcacaccaaggagggcgttgatgcctacaacgaagtgatcgcccgggtgcgaatgtgggtgaacctgaacctgtggcagaagctgaagctaagcagagatgatgccaagcctctgctgagactgaagggattcccttcctttcctctggtcgagagacaggccaacgaagtggactggtgggacatggtgtgtaacgtgaagaagctgatcaacgagaaaaaggaggatggcaaggtgttttggcagaatctggctggctacaagagacaggaagccctgagaccatacctgagcagcgaggaagatcggaagaagggaaagaaattcgctcggtaccagctgggcgacctgctgctgcacctggaaaagaagcacggcgaggactggggaaaggtgtacgacgaggcctgggagcggattgacaagaaagtggaaggcctgagcaagcacatcaagctggaagaggaacggagaagcgaggacgcccagagcaaggccgccctgaccgactggctgcgggctaaggccagcttcgtgatcgagggcctgaaggaggccgacaaggacgagttctgcagatgcgagctgaagctgcagaagtggtacggggacctgcggggaaagcccttcgccatcgaagccgagaacagcatcctggacatcagcggcttcagcaagcagtacaactgtgccttcatctggcagaaggacggcgtgaagaagctgaacctgtacctgatcatcaactacttcaagggcggcaagctgcggttcaagaagatcaaacctgaagccttcgaagccaacagattctacaccgtgatcaacaaaaagagcggcgagatcgtgcccatggaggtgaacttcaacttcgacgaccccaacctgatcatcctgcctctggcctttggcaagagacagggcagagaattcatctggaacgacctgctgtccctggaaaccggcagcctgaagctggccaacggaagagtgatcgagaagacactgtacaacagaagaacccggcaggatgagcctgccctgttcgtggccctgaccttcgagcggcgggaggtcctggactcctccaatatcaaaccaatgaacctgatcggcgtggcaagaggcgaaaacatccccgccgtgatcgccctgaccgaccccgagggctgcccactgagccggtttaaggatagcctgggaaacccaacccacatcctgagaatcggcgagagctataaggagaagcagcggaccatccaggccaagaaggaggtggagcagcggagagccggcggctacagccggaagtacgccagcaaagccaagaatctggcagacgatatggtgagaaacaccgctagagatctgctgtactacgccgtgacccaggatgccatgctgatcttcgccaacctgagccggggcttcggccggcagggcaagcggaccttcatggccgagagacagtacacacggatggaggactggctgaccgccaagctggcctacgagggcctgagcaagacctacctgtccaagacactggcccagtacacctccaagacatgcagcaactgtgggtttaccatcaccagcgccgactacgacagggtgctggagaagctgaagaagacagcaacaggctggatgaccacaattaacggcaaggagctgaaggtggagggccagattacctactacaacagatacaagagacagaacgtagtcaaggacctgtccgtcgagctggatagactgagcgaagaatctgtgaacaacgacatctcctcctggacaaagggcagaagcggagaagctctgagcctcctgaagaaaagattctcccatagacccgtgcaggagaagttcgtgtgcctgaactgcggcttcgagacacacgcagccgagcaagccgccctgaacatcgccagatcctggctgttcctgcggagccaggagtacaagaaataccagacaaacaagacaaccggcaacaccgataagagagccttcgtcgagacctggcagtccttttaccggaagaagcttaaggaggtgtggaaacctgccgtgcggtctggcggatctggcggaggctccaccagccccaagaaaaagagaaaagtctaagctgccttctgcggggcttgccttctggccatgcccttcttctctcccttgcacctgtacctcttggtctttgaataaagcctgagtaggaaggctagcaaaaaaaaaaaaaaaaaaaaaaaaaaaaaaaaaaaaaaaaaaaaaaaaaaaaaaaaaaaaaaaaaaaaaaaaaaaaaaaagcccagccggctccccaacctctaccgaggagggcacctctgagtccgccacccccgagagcggccctggcacctccaccgagcccagcgagggcagcgcacccggcagccctgccggcagccccacctccacagaggagggaaccagcaccgagcccagcgaaggcagcgccccaggcaccagcaccgagcctagtgagcaggagattaaacggatcaacaagatcagaagaagacttgtgaaagacagcaacaccaagaaggccggcaagacaggccccatgaaaaccctgctggttagagtgatgacacccgatctgagagagcggctggaaaacctgagaaagaagcctgaaaatatcccccagcccatcagcaatacatctagagccaacctgaataagctgctgaccgattacaccgaaatgaagaaggcgatcctgcatgtgtactgggaagagttccagaaggaccctgtgggcctgatgagccgggtggcccagcctgccagcaagaagatcgatcagaacaagctgaaacctgagatggacgagaagggcaacctgaccaccgccggctttgcctgctctcagtgtggccagcccctgttcgtgtacaagctggagcaggtgtctgagaagggcaaggcttacaccaactacttcggacggtgcaatgtggccgagcacgaaaagctgatcctgctggcccagctgaagcccgagaaggatagcgacgaagccgtgacatatagcctgggaaagtttgggcagagggccctggatttctacagcattcatgtgaccaaggagtccacccaccccgtgaagcccctggcccagatcgccggaaacagatacgcctccggacctgtgggaaaggccctgagcgacgcatgtatgggcacaatcgcctccttcctgtctaagtaccaggacatcatcatcgaacaccagaaggtggtgaagggcaaccagaagagactggagagcctgcgggagctggccggcaaggaaaacctggaataccctagcgtgaccctgccacctcagcctcacaccaaggagggcgttgatgcctacaacgaagtgatcgcccgggtgcgaatgtgggtgaacctgaacctgtggcagaagctgaagctaagcagagatgatgccaagcctctgctgagactgaagggattcccttcctttcctctggtcgagagacaggccaacgaagtggactggtgggacatggtgtgtaacgtgaagaagctgatcaacgagaaaaaggaggatggcaaggtgttttggcagaatctggctggctacaagagacaggaagccctgagaccatacctgagcagcgaggaagatcggaagaagggaaagaaattcgctcggtaccagctgggcgacctgctgctgcacctggaaaagaagcacggcgaggactggggaaaggtgtacgacgaggcctgggagcggattgacaagaaagtggaaggcctgagcaagcacatcaagctggaagaggaacggagaagcgaggacgcccagagcaaggccgccctgaccgactggctgcgggctaaggccagcttcgtgatcgagggcctgaaggaggccgacaaggacgagttctgcagatgcgagctgaagctgcagaagtggtacggggacctgcggggaaagcccttcgccatcgaagccgagaacagcatcctggacatcagcggcttcagcaagcagtacaactgtgccttcatctggcagaaggacggcgtgaagaagctgaacctgtacctgatcatcaactacttcaagggcggcaagctgcggttcaagaagatcaaacctgaagccttcgaagccaacagattctacaccgtgatcaacaaaaagagcggcgagatcgtgcccatggaggtgaacttcaacttcgacgaccccaacctgatcatcctgcctctggcctttggcaagagacagggcagagaattcatctggaacgacctgctgtccctggaaaccggcagcctgaagctggccaacggaagagtgatcgagaagacactgtacaacagaagaacccggcaggatgagcctgccctgttcgtggccctgaccttcgagcggcgggaggtcctggactcctccaatatcaaaccaatgaacctgatcggcgtggcaagaggcgaaaacatccccgccgtgatcgccctgaccgaccccgagggctgcccactgagccggtttaaggatagcctgggaaacccaacccacatcctgagaatcggcgagagctataaggagaagcagcggaccatccaggccaagaaggaggtggagcagcggagagccggcggctacagccggaagtacgccagcaaagccaagaatctggcagacgatatggtgagaaacaccgctagagatctgctgtactacgccgtgacccaggatgccatgctgatcttcgccaacctgagccggggcttcggccggcagggcaagcggaccttcatggccgagagacagtacacacggatggaggactggctgaccgccaagctggcctacgagggcctgagcaagacctacctgtccaagacactggcccagtacacctccaagacatgcagcaactgtgggtttaccatcaccagcgccgactacgacagggtgctggagaagctgaagaagacagcaacaggctggatgaccacaattaacggcaaggagctgaaggtggagggccagattacctactacaacagatacaagagacagaacgtagtcaaggacctgtccgtcgagctggatagactgagcgaagaatctgtgaacaacgacatctcctcctggacaaagggcagaagcggagaagctctgagcctcctgaagaaaagattctcccatagacccgtgcaggagaagttcgtgtgcctgaactgcggcttcgagacacacgcagccgagcaagccgccctgaacatcgccagatcctggctgttcctgcggagccaggagtacaagaaataccagacaaacaagacaaccggcaacaccgataagagagccttcgtcgagacctggcagtccttttaccggaagaagcttaaggaggtgtggaaacctgccgtgcggtctggcggatctggcggaggctccaccagccccaagaaaaagagaaaagtctaagctgccttctgcggggcttgccttctggccatgcccttcttctctcccttgcacctgtacctcttggtctttgaataaagcctgagtaggaaggctagcaaaaaaaaaaaaaaaaaaaaaaaaaaaaaaaaaaaaaaaaaaaaaaaaaaaaaaaaaaaaaaaaaaaaaaaaaaaaaaaa

SEQ ID NO: 9355 - RNA, 8787 nt, synthetic construct
  source 1..8787: mol_type = other RNA
aggaaataagagagaaaagaagagtaagaagaaatataagagccaccatggcccctaagaagaagcgtaaagtgagccggatgaaccacgaccaggagttcgacccccctaaggtgtaccctcccgtccccgccgagaagagaaagcccatccgggtcctgagcctgttcgatggcatcgccaccggtctgctggtgctgaaggacctgggcatccaggtggataggtacattgcctccgaggtgtgcgaggactccatcaccgtgggaatggtgcgtcatcagggcaagatcatgtacgtgggcgacgtgcggagcgtgacacagaagcatatccaggagtggggccctttcgacctggtgatcggcggcagcccttgcaatgacctgagcatcgtgaacccagcccggaagggcctgtacgagggaaccggcagactgttcttcgagttttacagactgctgcacgacgcccggcctaaggaaggcgacgaccggcccttcttttggctgttcgagaatgtggtggccatgggagtcagcgacaagcgggatattagccggttcctggagagcaaccccgtgatgatcgatgccaaggaagtgagcgccgcccaccgggccagatacttctggggcaatctgcctggcatgaacagacccctggccagcaccgtgaacgacaagctggagctgcaggagtgcctggagcacggccggatcgccaagttcagcaaggtgagaaccatcaccacccgaagcaacagcatcaaacaaggcaaggaccagcactttcctgtgttcatgaacgagaaggaggacatcctgtggtgtaccgagatggagagagtgttcgggttcccagtccactacacagatgtcagcaacatgtctagactggccagacagagactgctgggaagaagctggtccgtccctgtgatcagacacctgttcgcccctctgaaggagtacttcgcctgcgtgagcagcggcaacagcaacgccaacagccggggccccagcttctctagcggcctggtgccactgtccctgagagggagccacatgggccccatggagatctacaaaaccgtgagcgcctggaagcggcagcctgtgcgcgtgctgagcctgtttcggaatatcgataaagtcctgaaaagcctgggattcctggagagcggctctggctccggcggtggcaccctgaagtacgtggaggatgtgacaaacgtggtcagacgggatgtggagaagtggggccccttcgatctggtgtacggcagcacccaacccctgggcagctcttgtgaccggtgccctggctggtacatgtttcagttccaccggatcctgcagtacgccctgccgagacaggagtcccagcggccattcttttggattttcatggacaacttgctgctgaccgaggatgaccaggaaactaccactcggttcctgcagaccgaagccgtgaccctgcaggacgtgagaggccgggactaccagaacgccatgcgggtgtggtccaacatccctggactgaaaagcaagcacgcacctctgacccctaaagaagaggagtacctgcaggcccaggtgcggagcagaagcaagctggacgcccctaaggtggatctgctggtgaagaattgcctcctgcccctgagagagtacttcaagtatttcagccagaatagtctgcccctgggaggcagcggcggcggcgaggagctgcccgtggtgttcgaggacgtggccgtgtacttcaccagggaggagtggggcatgctggtgaagaggcagaaggagctgtacagggacgtgatgaggatgaactacgagctgctggccagcctgggccccgccgccgccaagcccgacctgatcctgaagctggagaggagggccgccccctggatcaaggaccccaacggccccaagtggggcaagggcaggccccccggcaagggcggcccaagcagcggcgcccctcctcccagcggcggcaggcggcccaagcagcggcgcccctcctcccagcggcggcagcccagccggctccccaacctctaccgaggagggcacctctgagtccgccacccccgagagcggccctggcacctccaccgagcccagcgagggcagcgcacccggcagccctgccggcagccccacctccacagaggagggaaccagcaccgagcccagcgaaggcagcgccccaggcaccagcaccgagcctagtgagcaggagattaaacggatcaacaagatcagaagaagacttgtgaaagacagcaacaccaagaaggccggcaagacaggccccatgaaaaccctgctggttagagtgatgacacccgatctgagagagcggctggaaaacctgagaaagaagcctgaaaatatcccccagcccatcagcaatacatctagagccaacctgaataagctgctgaccgattacaccgaaatgaagaaggcgatcctgcatgtgtactgggaagagttccagaaggaccctgtgggcctgatgagccgggtggcccagcctgccagcaagaagatcgatcagaacaagctgaaacctgagatggacgagaagggcaacctgaccaccgccggctttgcctgctctcagtgtggccagcccctgttcgtgtacaagctggagcaggtgtctgagaagggcaaggcttacaccaactacttcggacggtgcaatgtggccgagcacgaaaagctgatcctgctggcccagctgaagcccgagaaggatagcgacgaagccgtgacatatagcctgggaaagtttgggcagagggccctggatttctacagcattcatgtgaccaaggagtccacccaccccgtgaagcccctggcccagatcgccggaaacagatacgcctccggacctgtgggaaaggccctgagcgacgcatgtatgggcacaatcgcctccttcctgtctaagtaccaggacatcatcatcgaacaccagaaggtggtgaagggcaaccagaagagactggagagcctgcgggagctggccggcaaggaaaacctggaataccctagcgtgaccctgccacctcagcctcacaccaaggagggcgttgatgcctacaacgaagtgatcgcccgggtgcgaatgtgggtgaacctgaacctgtggcagaagctgaagctaagcagagatgatgccaagcctctgctgagactgaagggattcccttcctttcctctggtcgagagacaggccaacgaagtggactggtgggacatggtgtgtaacgtgaagaagctgatcaacgagaaaaaggaggatggcaaggtgttttggcagaatctggctggctacaagagacaggaagccctgagaccatacctgagcagcgaggaagatcggaagaagggaaagaaattcgctcggtaccagctgggcgacctgctgctgcacctggaaaagaagcacggcgaggactggggaaaggtgtacgacgaggcctgggagcggattgacaagaaagtggaaggcctgagcaagcacatcaagctggaagaggaacggagaagcgaggacgcccagagcaaggccgccctgaccgactggctgcgggctaaggccagcttcgtgatcgagggcctgaaggaggccgacaaggacgagttctgcagatgcgagctgaagctgcagaagtggtacggggacctgcggggaaagcccttcgccatcgaagccgagaacagcatcctggacatcagcggcttcagcaagcagtacaactgtgccttcatctggcagaaggacggcgtgaagaagctgaacctgtacctgatcatcaactacttcaagggcggcaagctgcggttcaagaagatcaaacctgaagccttcgaagccaacagattctacaccgtgatcaacaaaaagagcggcgagatcgtgcccatggaggtgaacttcaacttcgacgaccccaacctgatcatcctgcctctggcctttggcaagagacagggcagagaattcatctggaacgacctgctgtccctggaaaccggcagcctgaagctggccaacggaagagtgatcgagaagacactgtacaacagaagaacccggcaggatgagcctgccctgttcgtggccctgaccttcgagcggcgggaggtcctggactcctccaatatcaaaccaatgaacctgatcggcgtggcaagaggcgaaaacatccccgccgtgatcgccctgaccgaccccgagggctgcccactgagccggtttaaggatagcctgggaaacccaacccacatcctgagaatcggcgagagctataaggagaagcagcggaccatccaggccaagaaggaggtggagcagcggagagccggcggctacagccggaagtacgccagcaaagccaagaatctggcagacgatatggtgagaaacaccgctagagatctgctgtactacgccgtgacccaggatgccatgctgatcttcgccaacctgagccggggcttcggccggcagggcaagcggaccttcatggccgagagacagtacacacggatggaggactggctgaccgccaagctggcctacgagggcctgagcaagacctacctgtccaagacactggcccagtacacctccaagacatgcagcaactgtgggtttaccatcaccagcgccgactacgacagggtgctggagaagctgaagaagacagcaacaggctggatgaccacaattaacggcaaggagctgaaggtggagggccagattacctactacaacagatacaagagacagaacgtagtcaaggacctgtccgtcgagctggatagactgagcgaagaatctgtgaacaacgacatctcctcctggacaaagggcagaagcggagaagctctgagcctcctgaagaaaagattctcccatagacccgtgcaggagaagttcgtgtgcctgaactgcggcttcgagacacacgcagccgagcaagccgccctgaacatcgccagatcctggctgttcctgcggagccaggagtacaagaaataccagacaaacaagacaaccggcaacaccgataagagagccttcgtcgagacctggcagtccttttaccggaagaagcttaaggaggtgtggaaacctgccgtgcggtctggcggatctggcggaggctccaccagccccaagaaaaagagaaaagtctaagctgccttctgcggggcttgccttctggccatgcccttcttctctcccttgcacctgtacctcttggtctttgaataaagcctgagtaggaaggctagcaaaaaaaaaaaaaaaaaaaaaaaaaaaaaaaaaaaaaaaaaaaaaaaaaaaaaaaaaaaaaaaaaaaaaaaaaaaaaaaagcccagccggctccccaacctctaccgaggagggcacctctgagtccgccacccccgagagcggccctggcacctccaccgagcccagcgagggcagcgcacccggcagccctgccggcagccccacctccacagaggagggaaccagcaccgagcccagcgaaggcagcgccccaggcaccagcaccgagcctagtgagcaggagattaaacggatcaacaagatcagaagaagacttgtgaaagacagcaacaccaagaaggccggcaagacaggccccatgaaaaccctgctggttagagtgatgacacccgatctgagagagcggctggaaaacctgagaaagaagcctgaaaatatcccccagcccatcagcaatacatctagagccaacctgaataagctgctgaccgattacaccgaaatgaagaaggcgatcctgcatgtgtactgggaagagttccagaaggaccctgtgggcctgatgagccgggtggcccagcctgccagcaagaagatcgatcagaacaagctgaaacctgagatggacgagaagggcaacctgaccaccgccggctttgcctgctctcagtgtggccagcccctgttcgtgtacaagctggagcaggtgtctgagaagggcaaggcttacaccaactacttcggacggtgcaatgtggccgagcacgaaaagctgatcctgctggcccagctgaagcccgagaaggatagcgacgaagccgtgacatatagcctgggaaagtttgggcagagggccctggatttctacagcattcatgtgaccaaggagtccacccaccccgtgaagcccctggcccagatcgccggaaacagatacgcctccggacctgtgggaaaggccctgagcgacgcatgtatgggcacaatcgcctccttcctgtctaagtaccaggacatcatcatcgaacaccagaaggtggtgaagggcaaccagaagagactggagagcctgcgggagctggccggcaaggaaaacctggaataccctagcgtgaccctgccacctcagcctcacaccaaggagggcgttgatgcctacaacgaagtgatcgcccgggtgcgaatgtgggtgaacctgaacctgtggcagaagctgaagctaagcagagatgatgccaagcctctgctgagactgaagggattcccttcctttcctctggtcgagagacaggccaacgaagtggactggtgggacatggtgtgtaacgtgaagaagctgatcaacgagaaaaaggaggatggcaaggtgttttggcagaatctggctggctacaagagacaggaagccctgagaccatacctgagcagcgaggaagatcggaagaagggaaagaaattcgctcggtaccagctgggcgacctgctgctgcacctggaaaagaagcacggcgaggactggggaaaggtgtacgacgaggcctgggagcggattgacaagaaagtggaaggcctgagcaagcacatcaagctggaagaggaacggagaagcgaggacgcccagagcaaggccgccctgaccgactggctgcgggctaaggccagcttcgtgatcgagggcctgaaggaggccgacaaggacgagttctgcagatgcgagctgaagctgcagaagtggtacggggacctgcggggaaagcccttcgccatcgaagccgagaacagcatcctggacatcagcggcttcagcaagcagtacaactgtgccttcatctggcagaaggacggcgtgaagaagctgaacctgtacctgatcatcaactacttcaagggcggcaagctgcggttcaagaagatcaaacctgaagccttcgaagccaacagattctacaccgtgatcaacaaaaagagcggcgagatcgtgcccatggaggtgaacttcaacttcgacgaccccaacctgatcatcctgcctctggcctttggcaagagacagggcagagaattcatctggaacgacctgctgtccctggaaaccggcagcctgaagctggccaacggaagagtgatcgagaagacactgtacaacagaagaacccggcaggatgagcctgccctgttcgtggccctgaccttcgagcggcgggaggtcctggactcctccaatatcaaaccaatgaacctgatcggcgtggcaagaggcgaaaacatccccgccgtgatcgccctgaccgaccccgagggctgcccactgagccggtttaaggatagcctgggaaacccaacccacatcctgagaatcggcgagagctataaggagaagcagcggaccatccaggccaagaaggaggtggagcagcggagagccggcggctacagccggaagtacgccagcaaagccaagaatctggcagacgatatggtgagaaacaccgctagagatctgctgtactacgccgtgacccaggatgccatgctgatcttcgccaacctgagccggggcttcggccggcagggcaagcggaccttcatggccgagagacagtacacacggatggaggactggctgaccgccaagctggcctacgagggcctgagcaagacctacctgtccaagacactggcccagtacacctccaagacatgcagcaactgtgggtttaccatcaccagcgccgactacgacagggtgctggagaagctgaagaagacagcaacaggctggatgaccacaattaacggcaaggagctgaaggtggagggccagattacctactacaacagatacaagagacagaacgtagtcaaggacctgtccgtcgagctggatagactgagcgaagaatctgtgaacaacgacatctcctcctggacaaagggcagaagcggagaagctctgagcctcctgaagaaaagattctcccatagacccgtgcaggagaagttcgtgtgcctgaactgcggcttcgagacacacgcagccgagcaagccgccctgaacatcgccagatcctggctgttcctgcggagccaggagtacaagaaataccagacaaacaagacaaccggcaacaccgataagagagccttcgtcgagacctggcagtccttttaccggaagaagcttaaggaggtgtggaaacctgccgtgcggtctggcggatctggcggaggctccaccagccccaagaaaaagagaaaagtctaagctgccttctgcggggcttgccttctggccatgcccttcttctctcccttgcacctgtacctcttggtctttgaataaagcctgagtaggaaggctagcaaaaaaaaaaaaaaaaaaaaaaaaaaaaaaaaaaaaaaaaaaaaaaaaaaaaaaaaaaaaaaaaaaaaaaaaaaaaaaaa

SEQ ID NO: 9356 - RNA, 8787 nt, synthetic construct
  source 1..8787: mol_type = other RNA
aggaaataagagagaaaagaagagtaagaagaaatataagagccaccatggcccctaagaagaagcgtaaagtgagccggatgaaccacgaccaggagttcgacccccctaaggtgtaccctcccgtccccgccgagaagagaaagcccatccgggtcctgagcctgttcgatggcatcgccaccggtctgctggtgctgaaggacctgggcatccaggtggataggtacattgcctccgaggtgtgcgaggactccatcaccgtgggaatggtgcgtcatcagggcaagatcatgtacgtgggcgacgtgcggagcgtgacacagaagcatatccaggagtggggccctttcgacctggtgatcggcggcagcccttgcaatgacctgagcatcgtgaacccagcccggaagggcctgtacgagggaaccggcagactgttcttcgagttttacagactgctgcacgacgcccggcctaaggaaggcgacgaccggcccttcttttggctgttcgagaatgtggtggccatgggagtcagcgacaagcgggatattagccggttcctggagagcaaccccgtgatgatcgatgccaaggaagtgagcgccgcccaccgggccagatacttctggggcaatctgcctggcatgaacagacccctggccagcaccgtgaacgacaagctggagctgcaggagtgcctggagcacggccggatcgccaagttcagcaaggtgagaaccatcaccacccgaagcaacagcatcaaacaaggcaaggaccagcactttcctgtgttcatgaacgagaaggaggacatcctgtggtgtaccgagatggagagagtgttcgggttcccagtccactacacagatgtcagcaacatgtctagactggccagacagagactgctgggaagaagctggtccgtccctgtgatcagacacctgttcgcccctctgaaggagtacttcgcctgcgtgagcagcggcaacagcaacgccaacagccggggccccagcttctctagcggcctggtgccactgtccctgagagggagccacatgggccccatggagatctacaaaaccgtgagcgcctggaagcggcagcctgtgcgcgtgctgagcctgtttcggaatatcgataaagtcctgaaaagcctgggattcctggagagcggctctggctccggcggtggcaccctgaagtacgtggaggatgtgacaaacgtggtcagacgggatgtggagaagtggggccccttcgatctggtgtacggcagcacccaacccctgggcagctcttgtgaccggtgccctggctggtacatgtttcagttccaccggatcctgcagtacgccctgccgagacaggagtcccagcggccattcttttggattttcatggacaacttgctgctgaccgaggatgaccaggaaactaccactcggttcctgcagaccgaagccgtgaccctgcaggacgtgagaggccgggactaccagaacgccatgcgggtgtggtccaacatccctggactgaaaagcaagcacgcacctctgacccctaaagaagaggagtacctgcaggcccaggtgcggagcagaagcaagctggacgcccctaaggtggatctgctggtgaagaattgcctcctgcccctgagagagtacttcaagtatttcagccagaatagtctgcccctgggaggcagcggcggcggcatggccgccgtgagccccaccaccaggtgccaggagagcgtgaccttcgaggacgtggccgtggtgttcaccgacgaggagtggagccacctggtgcccacccagagggacctgtacaaggaggtgatgctggagaactacaacagcatcgtgagcctgggcctgcccgtgccccagcccgacgtgatcttccagctgaagaggggcgacaagccctggatggtggacctgcacggcagcgagggcggcccaagcagcggcgcccctcctcccagcggcggcaggcggcccaagcagcggcgcccctcctcccagcggcggcagcccagccggctccccaacctctaccgaggagggcacctctgagtccgccacccccgagagcggccctggcacctccaccgagcccagcgagggcagcgcacccggcagccctgccggcagccccacctccacagaggagggaaccagcaccgagcccagcgaaggcagcgccccaggcaccagcaccgagcctagtgagcaggagattaaacggatcaacaagatcagaagaagacttgtgaaagacagcaacaccaagaaggccggcaagacaggccccatgaaaaccctgctggttagagtgatgacacccgatctgagagagcggctggaaaacctgagaaagaagcctgaaaatatcccccagcccatcagcaatacatctagagccaacctgaataagctgctgaccgattacaccgaaatgaagaaggcgatcctgcatgtgtactgggaagagttccagaaggaccctgtgggcctgatgagccgggtggcccagcctgccagcaagaagatcgatcagaacaagctgaaacctgagatggacgagaagggcaacctgaccaccgccggctttgcctgctctcagtgtggccagcccctgttcgtgtacaagctggagcaggtgtctgagaagggcaaggcttacaccaactacttcggacggtgcaatgtggccgagcacgaaaagctgatcctgctggcccagctgaagcccgagaaggatagcgacgaagccgtgacatatagcctgggaaagtttgggcagagggccctggatttctacagcattcatgtgaccaaggagtccacccaccccgtgaagcccctggcccagatcgccggaaacagatacgcctccggacctgtgggaaaggccctgagcgacgcatgtatgggcacaatcgcctccttcctgtctaagtaccaggacatcatcatcgaacaccagaaggtggtgaagggcaaccagaagagactggagagcctgcgggagctggccggcaaggaaaacctggaataccctagcgtgaccctgccacctcagcctcacaccaaggagggcgttgatgcctacaacgaagtgatcgcccgggtgcgaatgtgggtgaacctgaacctgtggcagaagctgaagctaagcagagatgatgccaagcctctgctgagactgaagggattcccttcctttcctctggtcgagagacaggccaacgaagtggactggtgggacatggtgtgtaacgtgaagaagctgatcaacgagaaaaaggaggatggcaaggtgttttggcagaatctggctggctacaagagacaggaagccctgagaccatacctgagcagcgaggaagatcggaagaagggaaagaaattcgctcggtaccagctgggcgacctgctgctgcacctggaaaagaagcacggcgaggactggggaaaggtgtacgacgaggcctgggagcggattgacaagaaagtggaaggcctgagcaagcacatcaagctggaagaggaacggagaagcgaggacgcccagagcaaggccgccctgaccgactggctgcgggctaaggccagcttcgtgatcgagggcctgaaggaggccgacaaggacgagttctgcagatgcgagctgaagctgcagaagtggtacggggacctgcggggaaagcccttcgccatcgaagccgagaacagcatcctggacatcagcggcttcagcaagcagtacaactgtgccttcatctggcagaaggacggcgtgaagaagctgaacctgtacctgatcatcaactacttcaagggcggcaagctgcggttcaagaagatcaaacctgaagccttcgaagccaacagattctacaccgtgatcaacaaaaagagcggcgagatcgtgcccatggaggtgaacttcaacttcgacgaccccaacctgatcatcctgcctctggcctttggcaagagacagggcagagaattcatctggaacgacctgctgtccctggaaaccggcagcctgaagctggccaacggaagagtgatcgagaagacactgtacaacagaagaacccggcaggatgagcctgccctgttcgtggccctgaccttcgagcggcgggaggtcctggactcctccaatatcaaaccaatgaacctgatcggcgtggcaagaggcgaaaacatccccgccgtgatcgccctgaccgaccccgagggctgcccactgagccggtttaaggatagcctgggaaacccaacccacatcctgagaatcggcgagagctataaggagaagcagcggaccatccaggccaagaaggaggtggagcagcggagagccggcggctacagccggaagtacgccagcaaagccaagaatctggcagacgatatggtgagaaacaccgctagagatctgctgtactacgccgtgacccaggatgccatgctgatcttcgccaacctgagccggggcttcggccggcagggcaagcggaccttcatggccgagagacagtacacacggatggaggactggctgaccgccaagctggcctacgagggcctgagcaagacctacctgtccaagacactggcccagtacacctccaagacatgcagcaactgtgggtttaccatcaccagcgccgactacgacagggtgctggagaagctgaagaagacagcaacaggctggatgaccacaattaacggcaaggagctgaaggtggagggccagattacctactacaacagatacaagagacagaacgtagtcaaggacctgtccgtcgagctggatagactgagcgaagaatctgtgaacaacgacatctcctcctggacaaagggcagaagcggagaagctctgagcctcctgaagaaaagattctcccatagacccgtgcaggagaagttcgtgtgcctgaactgcggcttcgagacacacgcagccgagcaagccgccctgaacatcgccagatcctggctgttcctgcggagccaggagtacaagaaataccagacaaacaagacaaccggcaacaccgataagagagccttcgtcgagacctggcagtccttttaccggaagaagcttaaggaggtgtggaaacctgccgtgcggtctggcggatctggcggaggctccaccagccccaagaaaaagagaaaagtctaagctgccttctgcggggcttgccttctggccatgcccttcttctctcccttgcacctgtacctcttggtctttgaataaagcctgagtaggaaggctagcaaaaaaaaaaaaaaaaaaaaaaaaaaaaaaaaaaaaaaaaaaaaaaaaaaaaaaaaaaaaaaaaaaaaaaaaaaaaaaaagcccagccggctccccaacctctaccgaggagggcacctctgagtccgccacccccgagagcggccctggcacctccaccgagcccagcgagggcagcgcacccggcagccctgccggcagccccacctccacagaggagggaaccagcaccgagcccagcgaaggcagcgccccaggcaccagcaccgagcctagtgagcaggagattaaacggatcaacaagatcagaagaagacttgtgaaagacagcaacaccaagaaggccggcaagacaggccccatgaaaaccctgctggttagagtgatgacacccgatctgagagagcggctggaaaacctgagaaagaagcctgaaaatatcccccagcccatcagcaatacatctagagccaacctgaataagctgctgaccgattacaccgaaatgaagaaggcgatcctgcatgtgtactgggaagagttccagaaggaccctgtgggcctgatgagccgggtggcccagcctgccagcaagaagatcgatcagaacaagctgaaacctgagatggacgagaagggcaacctgaccaccgccggctttgcctgctctcagtgtggccagcccctgttcgtgtacaagctggagcaggtgtctgagaagggcaaggcttacaccaactacttcggacggtgcaatgtggccgagcacgaaaagctgatcctgctggcccagctgaagcccgagaaggatagcgacgaagccgtgacatatagcctgggaaagtttgggcagagggccctggatttctacagcattcatgtgaccaaggagtccacccaccccgtgaagcccctggcccagatcgccggaaacagatacgcctccggacctgtgggaaaggccctgagcgacgcatgtatgggcacaatcgcctccttcctgtctaagtaccaggacatcatcatcgaacaccagaaggtggtgaagggcaaccagaagagactggagagcctgcgggagctggccggcaaggaaaacctggaataccctagcgtgaccctgccacctcagcctcacaccaaggagggcgttgatgcctacaacgaagtgatcgcccgggtgcgaatgtgggtgaacctgaacctgtggcagaagctgaagctaagcagagatgatgccaagcctctgctgagactgaagggattcccttcctttcctctggtcgagagacaggccaacgaagtggactggtgggacatggtgtgtaacgtgaagaagctgatcaacgagaaaaaggaggatggcaaggtgttttggcagaatctggctggctacaagagacaggaagccctgagaccatacctgagcagcgaggaagatcggaagaagggaaagaaattcgctcggtaccagctgggcgacctgctgctgcacctggaaaagaagcacggcgaggactggggaaaggtgtacgacgaggcctgggagcggattgacaagaaagtggaaggcctgagcaagcacatcaagctggaagaggaacggagaagcgaggacgcccagagcaaggccgccctgaccgactggctgcgggctaaggccagcttcgtgatcgagggcctgaaggaggccgacaaggacgagttctgcagatgcgagctgaagctgcagaagtggtacggggacctgcggggaaagcccttcgccatcgaagccgagaacagcatcctggacatcagcggcttcagcaagcagtacaactgtgccttcatctggcagaaggacggcgtgaagaagctgaacctgtacctgatcatcaactacttcaagggcggcaagctgcggttcaagaagatcaaacctgaagccttcgaagccaacagattctacaccgtgatcaacaaaaagagcggcgagatcgtgcccatggaggtgaacttcaacttcgacgaccccaacctgatcatcctgcctctggcctttggcaagagacagggcagagaattcatctggaacgacctgctgtccctggaaaccggcagcctgaagctggccaacggaagagtgatcgagaagacactgtacaacagaagaacccggcaggatgagcctgccctgttcgtggccctgaccttcgagcggcgggaggtcctggactcctccaatatcaaaccaatgaacctgatcggcgtggcaagaggcgaaaacatccccgccgtgatcgccctgaccgaccccgagggctgcccactgagccggtttaaggatagcctgggaaacccaacccacatcctgagaatcggcgagagctataaggagaagcagcggaccatccaggccaagaaggaggtggagcagcggagagccggcggctacagccggaagtacgccagcaaagccaagaatctggcagacgatatggtgagaaacaccgctagagatctgctgtactacgccgtgacccaggatgccatgctgatcttcgccaacctgagccggggcttcggccggcagggcaagcggaccttcatggccgagagacagtacacacggatggaggactggctgaccgccaagctggcctacgagggcctgagcaagacctacctgtccaagacactggcccagtacacctccaagacatgcagcaactgtgggtttaccatcaccagcgccgactacgacagggtgctggagaagctgaagaagacagcaacaggctggatgaccacaattaacggcaaggagctgaaggtggagggccagattacctactacaacagatacaagagacagaacgtagtcaaggacctgtccgtcgagctggatagactgagcgaagaatctgtgaacaacgacatctcctcctggacaaagggcagaagcggagaagctctgagcctcctgaagaaaagattctcccatagacccgtgcaggagaagttcgtgtgcctgaactgcggcttcgagacacacgcagccgagcaagccgccctgaacatcgccagatcctggctgttcctgcggagccaggagtacaagaaataccagacaaacaagacaaccggcaacaccgataagagagccttcgtcgagacctggcagtccttttaccggaagaagcttaaggaggtgtggaaacctgccgtgcggtctggcggatctggcggaggctccaccagccccaagaaaaagagaaaagtctaagctgccttctgcggggcttgccttctggccatgcccttcttctctcccttgcacctgtacctcttggtctttgaataaagcctgagtaggaaggctagcaaaaaaaaaaaaaaaaaaaaaaaaaaaaaaaaaaaaaaaaaaaaaaaaaaaaaaaaaaaaaaaaaaaaaaaaaaaaaaaa

SEQ ID NO: 9357 - RNA, 8787 nt, synthetic construct
  source 1..8787: mol_type = other RNA
aggaaataagagagaaaagaagagtaagaagaaatataagagccaccatggcccctaagaagaagcgtaaagtgagccggatgaaccacgaccaggagttcgacccccctaaggtgtaccctcccgtccccgccgagaagagaaagcccatccgggtcctgagcctgttcgatggcatcgccaccggtctgctggtgctgaaggacctgggcatccaggtggataggtacattgcctccgaggtgtgcgaggactccatcaccgtgggaatggtgcgtcatcagggcaagatcatgtacgtgggcgacgtgcggagcgtgacacagaagcatatccaggagtggggccctttcgacctggtgatcggcggcagcccttgcaatgacctgagcatcgtgaacccagcccggaagggcctgtacgagggaaccggcagactgttcttcgagttttacagactgctgcacgacgcccggcctaaggaaggcgacgaccggcccttcttttggctgttcgagaatgtggtggccatgggagtcagcgacaagcgggatattagccggttcctggagagcaaccccgtgatgatcgatgccaaggaagtgagcgccgcccaccgggccagatacttctggggcaatctgcctggcatgaacagacccctggccagcaccgtgaacgacaagctggagctgcaggagtgcctggagcacggccggatcgccaagttcagcaaggtgagaaccatcaccacccgaagcaacagcatcaaacaaggcaaggaccagcactttcctgtgttcatgaacgagaaggaggacatcctgtggtgtaccgagatggagagagtgttcgggttcccagtccactacacagatgtcagcaacatgtctagactggccagacagagactgctgggaagaagctggtccgtccctgtgatcagacacctgttcgcccctctgaaggagtacttcgcctgcgtgagcagcggcaacagcaacgccaacagccggggccccagcttctctagcggcctggtgccactgtccctgagagggagccacatgggccccatggagatctacaaaaccgtgagcgcctggaagcggcagcctgtgcgcgtgctgagcctgtttcggaatatcgataaagtcctgaaaagcctgggattcctggagagcggctctggctccggcggtggcaccctgaagtacgtggaggatgtgacaaacgtggtcagacgggatgtggagaagtggggccccttcgatctggtgtacggcagcacccaacccctgggcagctcttgtgaccggtgccctggctggtacatgtttcagttccaccggatcctgcagtacgccctgccgagacaggagtcccagcggccattcttttggattttcatggacaacttgctgctgaccgaggatgaccaggaaactaccactcggttcctgcagaccgaagccgtgaccctgcaggacgtgagaggccgggactaccagaacgccatgcgggtgtggtccaacatccctggactgaaaagcaagcacgcacctctgacccctaaagaagaggagtacctgcaggcccaggtgcggagcagaagcaagctggacgcccctaaggtggatctgctggtgaagaattgcctcctgcccctgagagagtacttcaagtatttcagccagaatagtctgcccctgggaggcagcggcggcggcgcccaggtgagcgtgaccttcgacgacgtggccgtgaccttcacccaggaggagtggggccacctggagcccgcccagaggaccctgtaccaggaggtgatgctggagacctgcaggctgctgatgagcctgggctgccccgtgcccaggcccgagctgatctaccagctggagcacggccaggagctgtggaccgtgaagagggacctgagcaggagcacctgccccggctacagcagcgagggcggcccaagcagcggcgcccctcctcccagcggcggcaggcggcccaagcagcggcgcccctcctcccagcggcggcagcccagccggctccccaacctctaccgaggagggcacctctgagtccgccacccccgagagcggccctggcacctccaccgagcccagcgagggcagcgcacccggcagccctgccggcagccccacctccacagaggagggaaccagcaccgagcccagcgaaggcagcgccccaggcaccagcaccgagcctagtgagcaggagattaaacggatcaacaagatcagaagaagacttgtgaaagacagcaacaccaagaaggccggcaagacaggccccatgaaaaccctgctggttagagtgatgacacccgatctgagagagcggctggaaaacctgagaaagaagcctgaaaatatcccccagcccatcagcaatacatctagagccaacctgaataagctgctgaccgattacaccgaaatgaagaaggcgatcctgcatgtgtactgggaagagttccagaaggaccctgtgggcctgatgagccgggtggcccagcctgccagcaagaagatcgatcagaacaagctgaaacctgagatggacgagaagggcaacctgaccaccgccggctttgcctgctctcagtgtggccagcccctgttcgtgtacaagctggagcaggtgtctgagaagggcaaggcttacaccaactacttcggacggtgcaatgtggccgagcacgaaaagctgatcctgctggcccagctgaagcccgagaaggatagcgacgaagccgtgacatatagcctgggaaagtttgggcagagggccctggatttctacagcattcatgtgaccaaggagtccacccaccccgtgaagcccctggcccagatcgccggaaacagatacgcctccggacctgtgggaaaggccctgagcgacgcatgtatgggcacaatcgcctccttcctgtctaagtaccaggacatcatcatcgaacaccagaaggtggtgaagggcaaccagaagagactggagagcctgcgggagctggccggcaaggaaaacctggaataccctagcgtgaccctgccacctcagcctcacaccaaggagggcgttgatgcctacaacgaagtgatcgcccgggtgcgaatgtgggtgaacctgaacctgtggcagaagctgaagctaagcagagatgatgccaagcctctgctgagactgaagggattcccttcctttcctctggtcgagagacaggccaacgaagtggactggtgggacatggtgtgtaacgtgaagaagctgatcaacgagaaaaaggaggatggcaaggtgttttggcagaatctggctggctacaagagacaggaagccctgagaccatacctgagcagcgaggaagatcggaagaagggaaagaaattcgctcggtaccagctgggcgacctgctgctgcacctggaaaagaagcacggcgaggactggggaaaggtgtacgacgaggcctgggagcggattgacaagaaagtggaaggcctgagcaagcacatcaagctggaagaggaacggagaagcgaggacgcccagagcaaggccgccctgaccgactggctgcgggctaaggccagcttcgtgatcgagggcctgaaggaggccgacaaggacgagttctgcagatgcgagctgaagctgcagaagtggtacggggacctgcggggaaagcccttcgccatcgaagccgagaacagcatcctggacatcagcggcttcagcaagcagtacaactgtgccttcatctggcagaaggacggcgtgaagaagctgaacctgtacctgatcatcaactacttcaagggcggcaagctgcggttcaagaagatcaaacctgaagccttcgaagccaacagattctacaccgtgatcaacaaaaagagcggcgagatcgtgcccatggaggtgaacttcaacttcgacgaccccaacctgatcatcctgcctctggcctttggcaagagacagggcagagaattcatctggaacgacctgctgtccctggaaaccggcagcctgaagctggccaacggaagagtgatcgagaagacactgtacaacagaagaacccggcaggatgagcctgccctgttcgtggccctgaccttcgagcggcgggaggtcctggactcctccaatatcaaaccaatgaacctgatcggcgtggcaagaggcgaaaacatccccgccgtgatcgccctgaccgaccccgagggctgcccactgagccggtttaaggatagcctgggaaacccaacccacatcctgagaatcggcgagagctataaggagaagcagcggaccatccaggccaagaaggaggtggagcagcggagagccggcggctacagccggaagtacgccagcaaagccaagaatctggcagacgatatggtgagaaacaccgctagagatctgctgtactacgccgtgacccaggatgccatgctgatcttcgccaacctgagccggggcttcggccggcagggcaagcggaccttcatggccgagagacagtacacacggatggaggactggctgaccgccaagctggcctacgagggcctgagcaagacctacctgtccaagacactggcccagtacacctccaagacatgcagcaactgtgggtttaccatcaccagcgccgactacgacagggtgctggagaagctgaagaagacagcaacaggctggatgaccacaattaacggcaaggagctgaaggtggagggccagattacctactacaacagatacaagagacagaacgtagtcaaggacctgtccgtcgagctggatagactgagcgaagaatctgtgaacaacgacatctcctcctggacaaagggcagaagcggagaagctctgagcctcctgaagaaaagattctcccatagacccgtgcaggagaagttcgtgtgcctgaactgcggcttcgagacacacgcagccgagcaagccgccctgaacatcgccagatcctggctgttcctgcggagccaggagtacaagaaataccagacaaacaagacaaccggcaacaccgataagagagccttcgtcgagacctggcagtccttttaccggaagaagcttaaggaggtgtggaaacctgccgtgcggtctggcggatctggcggaggctccaccagccccaagaaaaagagaaaagtctaagctgccttctgcggggcttgccttctggccatgcccttcttctctcccttgcacctgtacctcttggtctttgaataaagcctgagtaggaaggctagcaaaaaaaaaaaaaaaaaaaaaaaaaaaaaaaaaaaaaaaaaaaaaaaaaaaaaaaaaaaaaaaaaaaaaaaaaaaaaaaagcccagccggctccccaacctctaccgaggagggcacctctgagtccgccacccccgagagcggccctggcacctccaccgagcccagcgagggcagcgcacccggcagccctgccggcagccccacctccacagaggagggaaccagcaccgagcccagcgaaggcagcgccccaggcaccagcaccgagcctagtgagcaggagattaaacggatcaacaagatcagaagaagacttgtgaaagacagcaacaccaagaaggccggcaagacaggccccatgaaaaccctgctggttagagtgatgacacccgatctgagagagcggctggaaaacctgagaaagaagcctgaaaatatcccccagcccatcagcaatacatctagagccaacctgaataagctgctgaccgattacaccgaaatgaagaaggcgatcctgcatgtgtactgggaagagttccagaaggaccctgtgggcctgatgagccgggtggcccagcctgccagcaagaagatcgatcagaacaagctgaaacctgagatggacgagaagggcaacctgaccaccgccggctttgcctgctctcagtgtggccagcccctgttcgtgtacaagctggagcaggtgtctgagaagggcaaggcttacaccaactacttcggacggtgcaatgtggccgagcacgaaaagctgatcctgctggcccagctgaagcccgagaaggatagcgacgaagccgtgacatatagcctgggaaagtttgggcagagggccctggatttctacagcattcatgtgaccaaggagtccacccaccccgtgaagcccctggcccagatcgccggaaacagatacgcctccggacctgtgggaaaggccctgagcgacgcatgtatgggcacaatcgcctccttcctgtctaagtaccaggacatcatcatcgaacaccagaaggtggtgaagggcaaccagaagagactggagagcctgcgggagctggccggcaaggaaaacctggaataccctagcgtgaccctgccacctcagcctcacaccaaggagggcgttgatgcctacaacgaagtgatcgcccgggtgcgaatgtgggtgaacctgaacctgtggcagaagctgaagctaagcagagatgatgccaagcctctgctgagactgaagggattcccttcctttcctctggtcgagagacaggccaacgaagtggactggtgggacatggtgtgtaacgtgaagaagctgatcaacgagaaaaaggaggatggcaaggtgttttggcagaatctggctggctacaagagacaggaagccctgagaccatacctgagcagcgaggaagatcggaagaagggaaagaaattcgctcggtaccagctgggcgacctgctgctgcacctggaaaagaagcacggcgaggactggggaaaggtgtacgacgaggcctgggagcggattgacaagaaagtggaaggcctgagcaagcacatcaagctggaagaggaacggagaagcgaggacgcccagagcaaggccgccctgaccgactggctgcgggctaaggccagcttcgtgatcgagggcctgaaggaggccgacaaggacgagttctgcagatgcgagctgaagctgcagaagtggtacggggacctgcggggaaagcccttcgccatcgaagccgagaacagcatcctggacatcagcggcttcagcaagcagtacaactgtgccttcatctggcagaaggacggcgtgaagaagctgaacctgtacctgatcatcaactacttcaagggcggcaagctgcggttcaagaagatcaaacctgaagccttcgaagccaacagattctacaccgtgatcaacaaaaagagcggcgagatcgtgcccatggaggtgaacttcaacttcgacgaccccaacctgatcatcctgcctctggcctttggcaagagacagggcagagaattcatctggaacgacctgctgtccctggaaaccggcagcctgaagctggccaacggaagagtgatcgagaagacactgtacaacagaagaacccggcaggatgagcctgccctgttcgtggccctgaccttcgagcggcgggaggtcctggactcctccaatatcaaaccaatgaacctgatcggcgtggcaagaggcgaaaacatccccgccgtgatcgccctgaccgaccccgagggctgcccactgagccggtttaaggatagcctgggaaacccaacccacatcctgagaatcggcgagagctataaggagaagcagcggaccatccaggccaagaaggaggtggagcagcggagagccggcggctacagccggaagtacgccagcaaagccaagaatctggcagacgatatggtgagaaacaccgctagagatctgctgtactacgccgtgacccaggatgccatgctgatcttcgccaacctgagccggggcttcggccggcagggcaagcggaccttcatggccgagagacagtacacacggatggaggactggctgaccgccaagctggcctacgagggcctgagcaagacctacctgtccaagacactggcccagtacacctccaagacatgcagcaactgtgggtttaccatcaccagcgccgactacgacagggtgctggagaagctgaagaagacagcaacaggctggatgaccacaattaacggcaaggagctgaaggtggagggccagattacctactacaacagatacaagagacagaacgtagtcaaggacctgtccgtcgagctggatagactgagcgaagaatctgtgaacaacgacatctcctcctggacaaagggcagaagcggagaagctctgagcctcctgaagaaaagattctcccatagacccgtgcaggagaagttcgtgtgcctgaactgcggcttcgagacacacgcagccgagcaagccgccctgaacatcgccagatcctggctgttcctgcggagccaggagtacaagaaataccagacaaacaagacaaccggcaacaccgataagagagccttcgtcgagacctggcagtccttttaccggaagaagcttaaggaggtgtggaaacctgccgtgcggtctggcggatctggcggaggctccaccagccccaagaaaaagagaaaagtctaagctgccttctgcggggcttgccttctggccatgcccttcttctctcccttgcacctgtacctcttggtctttgaataaagcctgagtaggaaggctagcaaaaaaaaaaaaaaaaaaaaaaaaaaaaaaaaaaaaaaaaaaaaaaaaaaaaaaaaaaaaaaaaaaaaaaaaaaaaaaaa

SEQ ID NO: 9358 - RNA, 8787 nt, synthetic construct
  source 1..8787: mol_type = other RNA
aggaaataagagagaaaagaagagtaagaagaaatataagagccaccatggcccctaagaagaagcgtaaagtgagccggatgaaccacgaccaggagttcgacccccctaaggtgtaccctcccgtccccgccgagaagagaaagcccatccgggtcctgagcctgttcgatggcatcgccaccggtctgctggtgctgaaggacctgggcatccaggtggataggtacattgcctccgaggtgtgcgaggactccatcaccgtgggaatggtgcgtcatcagggcaagatcatgtacgtgggcgacgtgcggagcgtgacacagaagcatatccaggagtggggccctttcgacctggtgatcggcggcagcccttgcaatgacctgagcatcgtgaacccagcccggaagggcctgtacgagggaaccggcagactgttcttcgagttttacagactgctgcacgacgcccggcctaaggaaggcgacgaccggcccttcttttggctgttcgagaatgtggtggccatgggagtcagcgacaagcgggatattagccggttcctggagagcaaccccgtgatgatcgatgccaaggaagtgagcgccgcccaccgggccagatacttctggggcaatctgcctggcatgaacagacccctggccagcaccgtgaacgacaagctggagctgcaggagtgcctggagcacggccggatcgccaagttcagcaaggtgagaaccatcaccacccgaagcaacagcatcaaacaaggcaaggaccagcactttcctgtgttcatgaacgagaaggaggacatcctgtggtgtaccgagatggagagagtgttcgggttcccagtccactacacagatgtcagcaacatgtctagactggccagacagagactgctgggaagaagctggtccgtccctgtgatcagacacctgttcgcccctctgaaggagtacttcgcctgcgtgagcagcggcaacagcaacgccaacagccggggccccagcttctctagcggcctggtgccactgtccctgagagggagccacatgggccccatggagatctacaaaaccgtgagcgcctggaagcggcagcctgtgcgcgtgctgagcctgtttcggaatatcgataaagtcctgaaaagcctgggattcctggagagcggctctggctccggcggtggcaccctgaagtacgtggaggatgtgacaaacgtggtcagacgggatgtggagaagtggggccccttcgatctggtgtacggcagcacccaacccctgggcagctcttgtgaccggtgccctggctggtacatgtttcagttccaccggatcctgcagtacgccctgccgagacaggagtcccagcggccattcttttggattttcatggacaacttgctgctgaccgaggatgaccaggaaactaccactcggttcctgcagaccgaagccgtgaccctgcaggacgtgagaggccgggactaccagaacgccatgcgggtgtggtccaacatccctggactgaaaagcaagcacgcacctctgacccctaaagaagaggagtacctgcaggcccaggtgcggagcagaagcaagctggacgcccctaaggtggatctgctggtgaagaattgcctcctgcccctgagagagtacttcaagtatttcagccagaatagtctgcccctgggaggcagcggcggcggcccccaggtgctggtgagcttcgaggacgtggccgtgttcctgagcagggaggagtggggctgcctgggccccgcccagaggggcctgtacagcaacgtgatgctggagacctacaggaacctgatcagcctgggcctgcagggcagcaagcccgacgtgatcagcaggctggagaagggcgaggagccctgggccccctacagccccaagatcgaggagggctggatcaggagccacaggagcggcggcccaagcagcggcgcccctcctcccagcggcggcaggcggcccaagcagcggcgcccctcctcccagcggcggcagcccagccggctccccaacctctaccgaggagggcacctctgagtccgccacccccgagagcggccctggcacctccaccgagcccagcgagggcagcgcacccggcagccctgccggcagccccacctccacagaggagggaaccagcaccgagcccagcgaaggcagcgccccaggcaccagcaccgagcctagtgagcaggagattaaacggatcaacaagatcagaagaagacttgtgaaagacagcaacaccaagaaggccggcaagacaggccccatgaaaaccctgctggttagagtgatgacacccgatctgagagagcggctggaaaacctgagaaagaagcctgaaaatatcccccagcccatcagcaatacatctagagccaacctgaataagctgctgaccgattacaccgaaatgaagaaggcgatcctgcatgtgtactgggaagagttccagaaggaccctgtgggcctgatgagccgggtggcccagcctgccagcaagaagatcgatcagaacaagctgaaacctgagatggacgagaagggcaacctgaccaccgccggctttgcctgctctcagtgtggccagcccctgttcgtgtacaagctggagcaggtgtctgagaagggcaaggcttacaccaactacttcggacggtgcaatgtggccgagcacgaaaagctgatcctgctggcccagctgaagcccgagaaggatagcgacgaagccgtgacatatagcctgggaaagtttgggcagagggccctggatttctacagcattcatgtgaccaaggagtccacccaccccgtgaagcccctggcccagatcgccggaaacagatacgcctccggacctgtgggaaaggccctgagcgacgcatgtatgggcacaatcgcctccttcctgtctaagtaccaggacatcatcatcgaacaccagaaggtggtgaagggcaaccagaagagactggagagcctgcgggagctggccggcaaggaaaacctggaataccctagcgtgaccctgccacctcagcctcacaccaaggagggcgttgatgcctacaacgaagtgatcgcccgggtgcgaatgtgggtgaacctgaacctgtggcagaagctgaagctaagcagagatgatgccaagcctctgctgagactgaagggattcccttcctttcctctggtcgagagacaggccaacgaagtggactggtgggacatggtgtgtaacgtgaagaagctgatcaacgagaaaaaggaggatggcaaggtgttttggcagaatctggctggctacaagagacaggaagccctgagaccatacctgagcagcgaggaagatcggaagaagggaaagaaattcgctcggtaccagctgggcgacctgctgctgcacctggaaaagaagcacggcgaggactggggaaaggtgtacgacgaggcctgggagcggattgacaagaaagtggaaggcctgagcaagcacatcaagctggaagaggaacggagaagcgaggacgcccagagcaaggccgccctgaccgactggctgcgggctaaggccagcttcgtgatcgagggcctgaaggaggccgacaaggacgagttctgcagatgcgagctgaagctgcagaagtggtacggggacctgcggggaaagcccttcgccatcgaagccgagaacagcatcctggacatcagcggcttcagcaagcagtacaactgtgccttcatctggcagaaggacggcgtgaagaagctgaacctgtacctgatcatcaactacttcaagggcggcaagctgcggttcaagaagatcaaacctgaagccttcgaagccaacagattctacaccgtgatcaacaaaaagagcggcgagatcgtgcccatggaggtgaacttcaacttcgacgaccccaacctgatcatcctgcctctggcctttggcaagagacagggcagagaattcatctggaacgacctgctgtccctggaaaccggcagcctgaagctggccaacggaagagtgatcgagaagacactgtacaacagaagaacccggcaggatgagcctgccctgttcgtggccctgaccttcgagcggcgggaggtcctggactcctccaatatcaaaccaatgaacctgatcggcgtggcaagaggcgaaaacatccccgccgtgatcgccctgaccgaccccgagggctgcccactgagccggtttaaggatagcctgggaaacccaacccacatcctgagaatcggcgagagctataaggagaagcagcggaccatccaggccaagaaggaggtggagcagcggagagccggcggctacagccggaagtacgccagcaaagccaagaatctggcagacgatatggtgagaaacaccgctagagatctgctgtactacgccgtgacccaggatgccatgctgatcttcgccaacctgagccggggcttcggccggcagggcaagcggaccttcatggccgagagacagtacacacggatggaggactggctgaccgccaagctggcctacgagggcctgagcaagacctacctgtccaagacactggcccagtacacctccaagacatgcagcaactgtgggtttaccatcaccagcgccgactacgacagggtgctggagaagctgaagaagacagcaacaggctggatgaccacaattaacggcaaggagctgaaggtggagggccagattacctactacaacagatacaagagacagaacgtagtcaaggacctgtccgtcgagctggatagactgagcgaagaatctgtgaacaacgacatctcctcctggacaaagggcagaagcggagaagctctgagcctcctgaagaaaagattctcccatagacccgtgcaggagaagttcgtgtgcctgaactgcggcttcgagacacacgcagccgagcaagccgccctgaacatcgccagatcctggctgttcctgcggagccaggagtacaagaaataccagacaaacaagacaaccggcaacaccgataagagagccttcgtcgagacctggcagtccttttaccggaagaagcttaaggaggtgtggaaacctgccgtgcggtctggcggatctggcggaggctccaccagccccaagaaaaagagaaaagtctaagctgccttctgcggggcttgccttctggccatgcccttcttctctcccttgcacctgtacctcttggtctttgaataaagcctgagtaggaaggctagcaaaaaaaaaaaaaaaaaaaaaaaaaaaaaaaaaaaaaaaaaaaaaaaaaaaaaaaaaaaaaaaaaaaaaaaaaaaaaaaagcccagccggctccccaacctctaccgaggagggcacctctgagtccgccacccccgagagcggccctggcacctccaccgagcccagcgagggcagcgcacccggcagccctgccggcagccccacctccacagaggagggaaccagcaccgagcccagcgaaggcagcgccccaggcaccagcaccgagcctagtgagcaggagattaaacggatcaacaagatcagaagaagacttgtgaaagacagcaacaccaagaaggccggcaagacaggccccatgaaaaccctgctggttagagtgatgacacccgatctgagagagcggctggaaaacctgagaaagaagcctgaaaatatcccccagcccatcagcaatacatctagagccaacctgaataagctgctgaccgattacaccgaaatgaagaaggcgatcctgcatgtgtactgggaagagttccagaaggaccctgtgggcctgatgagccgggtggcccagcctgccagcaagaagatcgatcagaacaagctgaaacctgagatggacgagaagggcaacctgaccaccgccggctttgcctgctctcagtgtggccagcccctgttcgtgtacaagctggagcaggtgtctgagaagggcaaggcttacaccaactacttcggacggtgcaatgtggccgagcacgaaaagctgatcctgctggcccagctgaagcccgagaaggatagcgacgaagccgtgacatatagcctgggaaagtttgggcagagggccctggatttctacagcattcatgtgaccaaggagtccacccaccccgtgaagcccctggcccagatcgccggaaacagatacgcctccggacctgtgggaaaggccctgagcgacgcatgtatgggcacaatcgcctccttcctgtctaagtaccaggacatcatcatcgaacaccagaaggtggtgaagggcaaccagaagagactggagagcctgcgggagctggccggcaaggaaaacctggaataccctagcgtgaccctgccacctcagcctcacaccaaggagggcgttgatgcctacaacgaagtgatcgcccgggtgcgaatgtgggtgaacctgaacctgtggcagaagctgaagctaagcagagatgatgccaagcctctgctgagactgaagggattcccttcctttcctctggtcgagagacaggccaacgaagtggactggtgggacatggtgtgtaacgtgaagaagctgatcaacgagaaaaaggaggatggcaaggtgttttggcagaatctggctggctacaagagacaggaagccctgagaccatacctgagcagcgaggaagatcggaagaagggaaagaaattcgctcggtaccagctgggcgacctgctgctgcacctggaaaagaagcacggcgaggactggggaaaggtgtacgacgaggcctgggagcggattgacaagaaagtggaaggcctgagcaagcacatcaagctggaagaggaacggagaagcgaggacgcccagagcaaggccgccctgaccgactggctgcgggctaaggccagcttcgtgatcgagggcctgaaggaggccgacaaggacgagttctgcagatgcgagctgaagctgcagaagtggtacggggacctgcggggaaagcccttcgccatcgaagccgagaacagcatcctggacatcagcggcttcagcaagcagtacaactgtgccttcatctggcagaaggacggcgtgaagaagctgaacctgtacctgatcatcaactacttcaagggcggcaagctgcggttcaagaagatcaaacctgaagccttcgaagccaacagattctacaccgtgatcaacaaaaagagcggcgagatcgtgcccatggaggtgaacttcaacttcgacgaccccaacctgatcatcctgcctctggcctttggcaagagacagggcagagaattcatctggaacgacctgctgtccctggaaaccggcagcctgaagctggccaacggaagagtgatcgagaagacactgtacaacagaagaacccggcaggatgagcctgccctgttcgtggccctgaccttcgagcggcgggaggtcctggactcctccaatatcaaaccaatgaacctgatcggcgtggcaagaggcgaaaacatccccgccgtgatcgccctgaccgaccccgagggctgcccactgagccggtttaaggatagcctgggaaacccaacccacatcctgagaatcggcgagagctataaggagaagcagcggaccatccaggccaagaaggaggtggagcagcggagagccggcggctacagccggaagtacgccagcaaagccaagaatctggcagacgatatggtgagaaacaccgctagagatctgctgtactacgccgtgacccaggatgccatgctgatcttcgccaacctgagccggggcttcggccggcagggcaagcggaccttcatggccgagagacagtacacacggatggaggactggctgaccgccaagctggcctacgagggcctgagcaagacctacctgtccaagacactggcccagtacacctccaagacatgcagcaactgtgggtttaccatcaccagcgccgactacgacagggtgctggagaagctgaagaagacagcaacaggctggatgaccacaattaacggcaaggagctgaaggtggagggccagattacctactacaacagatacaagagacagaacgtagtcaaggacctgtccgtcgagctggatagactgagcgaagaatctgtgaacaacgacatctcctcctggacaaagggcagaagcggagaagctctgagcctcctgaagaaaagattctcccatagacccgtgcaggagaagttcgtgtgcctgaactgcggcttcgagacacacgcagccgagcaagccgccctgaacatcgccagatcctggctgttcctgcggagccaggagtacaagaaataccagacaaacaagacaaccggcaacaccgataagagagccttcgtcgagacctggcagtccttttaccggaagaagcttaaggaggtgtggaaacctgccgtgcggtctggcggatctggcggaggctccaccagccccaagaaaaagagaaaagtctaagctgccttctgcggggcttgccttctggccatgcccttcttctctcccttgcacctgtacctcttggtctttgaataaagcctgagtaggaaggctagcaaaaaaaaaaaaaaaaaaaaaaaaaaaaaaaaaaaaaaaaaaaaaaaaaaaaaaaaaaaaaaaaaaaaaaaaaaaaaaaa

SEQ ID NO: 9359 - RNA, 8787 nt, synthetic construct
  source 1..8787: mol_type = other RNA
aggaaataagagagaaaagaagagtaagaagaaatataagagccaccatggcccctaagaagaagcgtaaagtgagccggatgaaccacgaccaggagttcgacccccctaaggtgtaccctcccgtccccgccgagaagagaaagcccatccgggtcctgagcctgttcgatggcatcgccaccggtctgctggtgctgaaggacctgggcatccaggtggataggtacattgcctccgaggtgtgcgaggactccatcaccgtgggaatggtgcgtcatcagggcaagatcatgtacgtgggcgacgtgcggagcgtgacacagaagcatatccaggagtggggccctttcgacctggtgatcggcggcagcccttgcaatgacctgagcatcgtgaacccagcccggaagggcctgtacgagggaaccggcagactgttcttcgagttttacagactgctgcacgacgcccggcctaaggaaggcgacgaccggcccttcttttggctgttcgagaatgtggtggccatgggagtcagcgacaagcgggatattagccggttcctggagagcaaccccgtgatgatcgatgccaaggaagtgagcgccgcccaccgggccagatacttctggggcaatctgcctggcatgaacagacccctggccagcaccgtgaacgacaagctggagctgcaggagtgcctggagcacggccggatcgccaagttcagcaaggtgagaaccatcaccacccgaagcaacagcatcaaacaaggcaaggaccagcactttcctgtgttcatgaacgagaaggaggacatcctgtggtgtaccgagatggagagagtgttcgggttcccagtccactacacagatgtcagcaacatgtctagactggccagacagagactgctgggaagaagctggtccgtccctgtgatcagacacctgttcgcccctctgaaggagtacttcgcctgcgtgagcagcggcaacagcaacgccaacagccggggccccagcttctctagcggcctggtgccactgtccctgagagggagccacatgggccccatggagatctacaaaaccgtgagcgcctggaagcggcagcctgtgcgcgtgctgagcctgtttcggaatatcgataaagtcctgaaaagcctgggattcctggagagcggctctggctccggcggtggcaccctgaagtacgtggaggatgtgacaaacgtggtcagacgggatgtggagaagtggggccccttcgatctggtgtacggcagcacccaacccctgggcagctcttgtgaccggtgccctggctggtacatgtttcagttccaccggatcctgcagtacgccctgccgagacaggagtcccagcggccattcttttggattttcatggacaacttgctgctgaccgaggatgaccaggaaactaccactcggttcctgcagaccgaagccgtgaccctgcaggacgtgagaggccgggactaccagaacgccatgcgggtgtggtccaacatccctggactgaaaagcaagcacgcacctctgacccctaaagaagaggagtacctgcaggcccaggtgcggagcagaagcaagctggacgcccctaaggtggatctgctggtgaagaattgcctcctgcccctgagagagtacttcaagtatttcagccagaatagtctgcccctgggaggcagcggcggcggccaggagatccccgtgagcttcaaggacgtggtggtgggcttcacccaggaggagtggcactggctgaaccccgtgcagagggccctgtacagggacgtgatgctggagacctacagcaacctggtgagcgtgggctacgagggcaccaagcccgacgtgatcctgaggctggagcaggaggaggccccctgggtgtgcgaggccccctgccccggctgctgctgctgggaggacatctggcagggcggcccaagcagcggcgcccctcctcccagcggcggcaggcggcccaagcagcggcgcccctcctcccagcggcggcagcccagccggctccccaacctctaccgaggagggcacctctgagtccgccacccccgagagcggccctggcacctccaccgagcccagcgagggcagcgcacccggcagccctgccggcagccccacctccacagaggagggaaccagcaccgagcccagcgaaggcagcgccccaggcaccagcaccgagcctagtgagcaggagattaaacggatcaacaagatcagaagaagacttgtgaaagacagcaacaccaagaaggccggcaagacaggccccatgaaaaccctgctggttagagtgatgacacccgatctgagagagcggctggaaaacctgagaaagaagcctgaaaatatcccccagcccatcagcaatacatctagagccaacctgaataagctgctgaccgattacaccgaaatgaagaaggcgatcctgcatgtgtactgggaagagttccagaaggaccctgtgggcctgatgagccgggtggcccagcctgccagcaagaagatcgatcagaacaagctgaaacctgagatggacgagaagggcaacctgaccaccgccggctttgcctgctctcagtgtggccagcccctgttcgtgtacaagctggagcaggtgtctgagaagggcaaggcttacaccaactacttcggacggtgcaatgtggccgagcacgaaaagctgatcctgctggcccagctgaagcccgagaaggatagcgacgaagccgtgacatatagcctgggaaagtttgggcagagggccctggatttctacagcattcatgtgaccaaggagtccacccaccccgtgaagcccctggcccagatcgccggaaacagatacgcctccggacctgtgggaaaggccctgagcgacgcatgtatgggcacaatcgcctccttcctgtctaagtaccaggacatcatcatcgaacaccagaaggtggtgaagggcaaccagaagagactggagagcctgcgggagctggccggcaaggaaaacctggaataccctagcgtgaccctgccacctcagcctcacaccaaggagggcgttgatgcctacaacgaagtgatcgcccgggtgcgaatgtgggtgaacctgaacctgtggcagaagctgaagctaagcagagatgatgccaagcctctgctgagactgaagggattcccttcctttcctctggtcgagagacaggccaacgaagtggactggtgggacatggtgtgtaacgtgaagaagctgatcaacgagaaaaaggaggatggcaaggtgttttggcagaatctggctggctacaagagacaggaagccctgagaccatacctgagcagcgaggaagatcggaagaagggaaagaaattcgctcggtaccagctgggcgacctgctgctgcacctggaaaagaagcacggcgaggactggggaaaggtgtacgacgaggcctgggagcggattgacaagaaagtggaaggcctgagcaagcacatcaagctggaagaggaacggagaagcgaggacgcccagagcaaggccgccctgaccgactggctgcgggctaaggccagcttcgtgatcgagggcctgaaggaggccgacaaggacgagttctgcagatgcgagctgaagctgcagaagtggtacggggacctgcggggaaagcccttcgccatcgaagccgagaacagcatcctggacatcagcggcttcagcaagcagtacaactgtgccttcatctggcagaaggacggcgtgaagaagctgaacctgtacctgatcatcaactacttcaagggcggcaagctgcggttcaagaagatcaaacctgaagccttcgaagccaacagattctacaccgtgatcaacaaaaagagcggcgagatcgtgcccatggaggtgaacttcaacttcgacgaccccaacctgatcatcctgcctctggcctttggcaagagacagggcagagaattcatctggaacgacctgctgtccctggaaaccggcagcctgaagctggccaacggaagagtgatcgagaagacactgtacaacagaagaacccggcaggatgagcctgccctgttcgtggccctgaccttcgagcggcgggaggtcctggactcctccaatatcaaaccaatgaacctgatcggcgtggcaagaggcgaaaacatccccgccgtgatcgccctgaccgaccccgagggctgcccactgagccggtttaaggatagcctgggaaacccaacccacatcctgagaatcggcgagagctataaggagaagcagcggaccatccaggccaagaaggaggtggagcagcggagagccggcggctacagccggaagtacgccagcaaagccaagaatctggcagacgatatggtgagaaacaccgctagagatctgctgtactacgccgtgacccaggatgccatgctgatcttcgccaacctgagccggggcttcggccggcagggcaagcggaccttcatggccgagagacagtacacacggatggaggactggctgaccgccaagctggcctacgagggcctgagcaagacctacctgtccaagacactggcccagtacacctccaagacatgcagcaactgtgggtttaccatcaccagcgccgactacgacagggtgctggagaagctgaagaagacagcaacaggctggatgaccacaattaacggcaaggagctgaaggtggagggccagattacctactacaacagatacaagagacagaacgtagtcaaggacctgtccgtcgagctggatagactgagcgaagaatctgtgaacaacgacatctcctcctggacaaagggcagaagcggagaagctctgagcctcctgaagaaaagattctcccatagacccgtgcaggagaagttcgtgtgcctgaactgcggcttcgagacacacgcagccgagcaagccgccctgaacatcgccagatcctggctgttcctgcggagccaggagtacaagaaataccagacaaacaagacaaccggcaacaccgataagagagccttcgtcgagacctggcagtccttttaccggaagaagcttaaggaggtgtggaaacctgccgtgcggtctggcggatctggcggaggctccaccagccccaagaaaaagagaaaagtctaagctgccttctgcggggcttgccttctggccatgcccttcttctctcccttgcacctgtacctcttggtctttgaataaagcctgagtaggaaggctagcaaaaaaaaaaaaaaaaaaaaaaaaaaaaaaaaaaaaaaaaaaaaaaaaaaaaaaaaaaaaaaaaaaaaaaaaaaaaaaaagcccagccggctccccaacctctaccgaggagggcacctctgagtccgccacccccgagagcggccctggcacctccaccgagcccagcgagggcagcgcacccggcagccctgccggcagccccacctccacagaggagggaaccagcaccgagcccagcgaaggcagcgccccaggcaccagcaccgagcctagtgagcaggagattaaacggatcaacaagatcagaagaagacttgtgaaagacagcaacaccaagaaggccggcaagacaggccccatgaaaaccctgctggttagagtgatgacacccgatctgagagagcggctggaaaacctgagaaagaagcctgaaaatatcccccagcccatcagcaatacatctagagccaacctgaataagctgctgaccgattacaccgaaatgaagaaggcgatcctgcatgtgtactgggaagagttccagaaggaccctgtgggcctgatgagccgggtggcccagcctgccagcaagaagatcgatcagaacaagctgaaacctgagatggacgagaagggcaacctgaccaccgccggctttgcctgctctcagtgtggccagcccctgttcgtgtacaagctggagcaggtgtctgagaagggcaaggcttacaccaactacttcggacggtgcaatgtggccgagcacgaaaagctgatcctgctggcccagctgaagcccgagaaggatagcgacgaagccgtgacatatagcctgggaaagtttgggcagagggccctggatttctacagcattcatgtgaccaaggagtccacccaccccgtgaagcccctggcccagatcgccggaaacagatacgcctccggacctgtgggaaaggccctgagcgacgcatgtatgggcacaatcgcctccttcctgtctaagtaccaggacatcatcatcgaacaccagaaggtggtgaagggcaaccagaagagactggagagcctgcgggagctggccggcaaggaaaacctggaataccctagcgtgaccctgccacctcagcctcacaccaaggagggcgttgatgcctacaacgaagtgatcgcccgggtgcgaatgtgggtgaacctgaacctgtggcagaagctgaagctaagcagagatgatgccaagcctctgctgagactgaagggattcccttcctttcctctggtcgagagacaggccaacgaagtggactggtgggacatggtgtgtaacgtgaagaagctgatcaacgagaaaaaggaggatggcaaggtgttttggcagaatctggctggctacaagagacaggaagccctgagaccatacctgagcagcgaggaagatcggaagaagggaaagaaattcgctcggtaccagctgggcgacctgctgctgcacctggaaaagaagcacggcgaggactggggaaaggtgtacgacgaggcctgggagcggattgacaagaaagtggaaggcctgagcaagcacatcaagctggaagaggaacggagaagcgaggacgcccagagcaaggccgccctgaccgactggctgcgggctaaggccagcttcgtgatcgagggcctgaaggaggccgacaaggacgagttctgcagatgcgagctgaagctgcagaagtggtacggggacctgcggggaaagcccttcgccatcgaagccgagaacagcatcctggacatcagcggcttcagcaagcagtacaactgtgccttcatctggcagaaggacggcgtgaagaagctgaacctgtacctgatcatcaactacttcaagggcggcaagctgcggttcaagaagatcaaacctgaagccttcgaagccaacagattctacaccgtgatcaacaaaaagagcggcgagatcgtgcccatggaggtgaacttcaacttcgacgaccccaacctgatcatcctgcctctggcctttggcaagagacagggcagagaattcatctggaacgacctgctgtccctggaaaccggcagcctgaagctggccaacggaagagtgatcgagaagacactgtacaacagaagaacccggcaggatgagcctgccctgttcgtggccctgaccttcgagcggcgggaggtcctggactcctccaatatcaaaccaatgaacctgatcggcgtggcaagaggcgaaaacatccccgccgtgatcgccctgaccgaccccgagggctgcccactgagccggtttaaggatagcctgggaaacccaacccacatcctgagaatcggcgagagctataaggagaagcagcggaccatccaggccaagaaggaggtggagcagcggagagccggcggctacagccggaagtacgccagcaaagccaagaatctggcagacgatatggtgagaaacaccgctagagatctgctgtactacgccgtgacccaggatgccatgctgatcttcgccaacctgagccggggcttcggccggcagggcaagcggaccttcatggccgagagacagtacacacggatggaggactggctgaccgccaagctggcctacgagggcctgagcaagacctacctgtccaagacactggcccagtacacctccaagacatgcagcaactgtgggtttaccatcaccagcgccgactacgacagggtgctggagaagctgaagaagacagcaacaggctggatgaccacaattaacggcaaggagctgaaggtggagggccagattacctactacaacagatacaagagacagaacgtagtcaaggacctgtccgtcgagctggatagactgagcgaagaatctgtgaacaacgacatctcctcctggacaaagggcagaagcggagaagctctgagcctcctgaagaaaagattctcccatagacccgtgcaggagaagttcgtgtgcctgaactgcggcttcgagacacacgcagccgagcaagccgccctgaacatcgccagatcctggctgttcctgcggagccaggagtacaagaaataccagacaaacaagacaaccggcaacaccgataagagagccttcgtcgagacctggcagtccttttaccggaagaagcttaaggaggtgtggaaacctgccgtgcggtctggcggatctggcggaggctccaccagccccaagaaaaagagaaaagtctaagctgccttctgcggggcttgccttctggccatgcccttcttctctcccttgcacctgtacctcttggtctttgaataaagcctgagtaggaaggctagcaaaaaaaaaaaaaaaaaaaaaaaaaaaaaaaaaaaaaaaaaaaaaaaaaaaaaaaaaaaaaaaaaaaaaaaaaaaaaaaa

SEQ ID NO: 9360 - RNA, 8787 nt, synthetic construct
  source 1..8787: mol_type = other RNA
aggaaataagagagaaaagaagagtaagaagaaatataagagccaccatggcccctaagaagaagcgtaaagtgagccggatgaaccacgaccaggagttcgacccccctaaggtgtaccctcccgtccccgccgagaagagaaagcccatccgggtcctgagcctgttcgatggcatcgccaccggtctgctggtgctgaaggacctgggcatccaggtggataggtacattgcctccgaggtgtgcgaggactccatcaccgtgggaatggtgcgtcatcagggcaagatcatgtacgtgggcgacgtgcggagcgtgacacagaagcatatccaggagtggggccctttcgacctggtgatcggcggcagcccttgcaatgacctgagcatcgtgaacccagcccggaagggcctgtacgagggaaccggcagactgttcttcgagttttacagactgctgcacgacgcccggcctaaggaaggcgacgaccggcccttcttttggctgttcgagaatgtggtggccatgggagtcagcgacaagcgggatattagccggttcctggagagcaaccccgtgatgatcgatgccaaggaagtgagcgccgcccaccgggccagatacttctggggcaatctgcctggcatgaacagacccctggccagcaccgtgaacgacaagctggagctgcaggagtgcctggagcacggccggatcgccaagttcagcaaggtgagaaccatcaccacccgaagcaacagcatcaaacaaggcaaggaccagcactttcctgtgttcatgaacgagaaggaggacatcctgtggtgtaccgagatggagagagtgttcgggttcccagtccactacacagatgtcagcaacatgtctagactggccagacagagactgctgggaagaagctggtccgtccctgtgatcagacacctgttcgcccctctgaaggagtacttcgcctgcgtgagcagcggcaacagcaacgccaacagccggggccccagcttctctagcggcctggtgccactgtccctgagagggagccacatgggccccatggagatctacaaaaccgtgagcgcctggaagcggcagcctgtgcgcgtgctgagcctgtttcggaatatcgataaagtcctgaaaagcctgggattcctggagagcggctctggctccggcggtggcaccctgaagtacgtggaggatgtgacaaacgtggtcagacgggatgtggagaagtggggccccttcgatctggtgtacggcagcacccaacccctgggcagctcttgtgaccggtgccctggctggtacatgtttcagttccaccggatcctgcagtacgccctgccgagacaggagtcccagcggccattcttttggattttcatggacaacttgctgctgaccgaggatgaccaggaaactaccactcggttcctgcagaccgaagccgtgaccctgcaggacgtgagaggccgggactaccagaacgccatgcgggtgtggtccaacatccctggactgaaaagcaagcacgcacctctgacccctaaagaagaggagtacctgcaggcccaggtgcggagcagaagcaagctggacgcccctaaggtggatctgctggtgaagaattgcctcctgcccctgagagagtacttcaagtatttcagccagaatagtctgcccctgggaggcagcggcggcggcagccagggcagcgtgaccttcagggacgtggccatcgacttcagccaggaggagtggaagtggctgcagcccgcccagagggacctgtacaggtgcgtgatgctggagaactacggccacctggtgagcctgggcctgagcatcagcaagcccgacgtggtgagcctgctggagcagggcaaggagccctggctgggcaagagggacgtgaagagggacctgttccccgccctgagcccccagggcggcccaagcagcggcgcccctcctcccagcggcggcaggcggcccaagcagcggcgcccctcctcccagcggcggcagcccagccggctccccaacctctaccgaggagggcacctctgagtccgccacccccgagagcggccctggcacctccaccgagcccagcgagggcagcgcacccggcagccctgccggcagccccacctccacagaggagggaaccagcaccgagcccagcgaaggcagcgccccaggcaccagcaccgagcctagtgagcaggagattaaacggatcaacaagatcagaagaagacttgtgaaagacagcaacaccaagaaggccggcaagacaggccccatgaaaaccctgctggttagagtgatgacacccgatctgagagagcggctggaaaacctgagaaagaagcctgaaaatatcccccagcccatcagcaatacatctagagccaacctgaataagctgctgaccgattacaccgaaatgaagaaggcgatcctgcatgtgtactgggaagagttccagaaggaccctgtgggcctgatgagccgggtggcccagcctgccagcaagaagatcgatcagaacaagctgaaacctgagatggacgagaagggcaacctgaccaccgccggctttgcctgctctcagtgtggccagcccctgttcgtgtacaagctggagcaggtgtctgagaagggcaaggcttacaccaactacttcggacggtgcaatgtggccgagcacgaaaagctgatcctgctggcccagctgaagcccgagaaggatagcgacgaagccgtgacatatagcctgggaaagtttgggcagagggccctggatttctacagcattcatgtgaccaaggagtccacccaccccgtgaagcccctggcccagatcgccggaaacagatacgcctccggacctgtgggaaaggccctgagcgacgcatgtatgggcacaatcgcctccttcctgtctaagtaccaggacatcatcatcgaacaccagaaggtggtgaagggcaaccagaagagactggagagcctgcgggagctggccggcaaggaaaacctggaataccctagcgtgaccctgccacctcagcctcacaccaaggagggcgttgatgcctacaacgaagtgatcgcccgggtgcgaatgtgggtgaacctgaacctgtggcagaagctgaagctaagcagagatgatgccaagcctctgctgagactgaagggattcccttcctttcctctggtcgagagacaggccaacgaagtggactggtgggacatggtgtgtaacgtgaagaagctgatcaacgagaaaaaggaggatggcaaggtgttttggcagaatctggctggctacaagagacaggaagccctgagaccatacctgagcagcgaggaagatcggaagaagggaaagaaattcgctcggtaccagctgggcgacctgctgctgcacctggaaaagaagcacggcgaggactggggaaaggtgtacgacgaggcctgggagcggattgacaagaaagtggaaggcctgagcaagcacatcaagctggaagaggaacggagaagcgaggacgcccagagcaaggccgccctgaccgactggctgcgggctaaggccagcttcgtgatcgagggcctgaaggaggccgacaaggacgagttctgcagatgcgagctgaagctgcagaagtggtacggggacctgcggggaaagcccttcgccatcgaagccgagaacagcatcctggacatcagcggcttcagcaagcagtacaactgtgccttcatctggcagaaggacggcgtgaagaagctgaacctgtacctgatcatcaactacttcaagggcggcaagctgcggttcaagaagatcaaacctgaagccttcgaagccaacagattctacaccgtgatcaacaaaaagagcggcgagatcgtgcccatggaggtgaacttcaacttcgacgaccccaacctgatcatcctgcctctggcctttggcaagagacagggcagagaattcatctggaacgacctgctgtccctggaaaccggcagcctgaagctggccaacggaagagtgatcgagaagacactgtacaacagaagaacccggcaggatgagcctgccctgttcgtggccctgaccttcgagcggcgggaggtcctggactcctccaatatcaaaccaatgaacctgatcggcgtggcaagaggcgaaaacatccccgccgtgatcgccctgaccgaccccgagggctgcccactgagccggtttaaggatagcctgggaaacccaacccacatcctgagaatcggcgagagctataaggagaagcagcggaccatccaggccaagaaggaggtggagcagcggagagccggcggctacagccggaagtacgccagcaaagccaagaatctggcagacgatatggtgagaaacaccgctagagatctgctgtactacgccgtgacccaggatgccatgctgatcttcgccaacctgagccggggcttcggccggcagggcaagcggaccttcatggccgagagacagtacacacggatggaggactggctgaccgccaagctggcctacgagggcctgagcaagacctacctgtccaagacactggcccagtacacctccaagacatgcagcaactgtgggtttaccatcaccagcgccgactacgacagggtgctggagaagctgaagaagacagcaacaggctggatgaccacaattaacggcaaggagctgaaggtggagggccagattacctactacaacagatacaagagacagaacgtagtcaaggacctgtccgtcgagctggatagactgagcgaagaatctgtgaacaacgacatctcctcctggacaaagggcagaagcggagaagctctgagcctcctgaagaaaagattctcccatagacccgtgcaggagaagttcgtgtgcctgaactgcggcttcgagacacacgcagccgagcaagccgccctgaacatcgccagatcctggctgttcctgcggagccaggagtacaagaaataccagacaaacaagacaaccggcaacaccgataagagagccttcgtcgagacctggcagtccttttaccggaagaagcttaaggaggtgtggaaacctgccgtgcggtctggcggatctggcggaggctccaccagccccaagaaaaagagaaaagtctaagctgccttctgcggggcttgccttctggccatgcccttcttctctcccttgcacctgtacctcttggtctttgaataaagcctgagtaggaaggctagcaaaaaaaaaaaaaaaaaaaaaaaaaaaaaaaaaaaaaaaaaaaaaaaaaaaaaaaaaaaaaaaaaaaaaaaaaaaaaaaagcccagccggctccccaacctctaccgaggagggcacctctgagtccgccacccccgagagcggccctggcacctccaccgagcccagcgagggcagcgcacccggcagccctgccggcagccccacctccacagaggagggaaccagcaccgagcccagcgaaggcagcgccccaggcaccagcaccgagcctagtgagcaggagattaaacggatcaacaagatcagaagaagacttgtgaaagacagcaacaccaagaaggccggcaagacaggccccatgaaaaccctgctggttagagtgatgacacccgatctgagagagcggctggaaaacctgagaaagaagcctgaaaatatcccccagcccatcagcaatacatctagagccaacctgaataagctgctgaccgattacaccgaaatgaagaaggcgatcctgcatgtgtactgggaagagttccagaaggaccctgtgggcctgatgagccgggtggcccagcctgccagcaagaagatcgatcagaacaagctgaaacctgagatggacgagaagggcaacctgaccaccgccggctttgcctgctctcagtgtggccagcccctgttcgtgtacaagctggagcaggtgtctgagaagggcaaggcttacaccaactacttcggacggtgcaatgtggccgagcacgaaaagctgatcctgctggcccagctgaagcccgagaaggatagcgacgaagccgtgacatatagcctgggaaagtttgggcagagggccctggatttctacagcattcatgtgaccaaggagtccacccaccccgtgaagcccctggcccagatcgccggaaacagatacgcctccggacctgtgggaaaggccctgagcgacgcatgtatgggcacaatcgcctccttcctgtctaagtaccaggacatcatcatcgaacaccagaaggtggtgaagggcaaccagaagagactggagagcctgcgggagctggccggcaaggaaaacctggaataccctagcgtgaccctgccacctcagcctcacaccaaggagggcgttgatgcctacaacgaagtgatcgcccgggtgcgaatgtgggtgaacctgaacctgtggcagaagctgaagctaagcagagatgatgccaagcctctgctgagactgaagggattcccttcctttcctctggtcgagagacaggccaacgaagtggactggtgggacatggtgtgtaacgtgaagaagctgatcaacgagaaaaaggaggatggcaaggtgttttggcagaatctggctggctacaagagacaggaagccctgagaccatacctgagcagcgaggaagatcggaagaagggaaagaaattcgctcggtaccagctgggcgacctgctgctgcacctggaaaagaagcacggcgaggactggggaaaggtgtacgacgaggcctgggagcggattgacaagaaagtggaaggcctgagcaagcacatcaagctggaagaggaacggagaagcgaggacgcccagagcaaggccgccctgaccgactggctgcgggctaaggccagcttcgtgatcgagggcctgaaggaggccgacaaggacgagttctgcagatgcgagctgaagctgcagaagtggtacggggacctgcggggaaagcccttcgccatcgaagccgagaacagcatcctggacatcagcggcttcagcaagcagtacaactgtgccttcatctggcagaaggacggcgtgaagaagctgaacctgtacctgatcatcaactacttcaagggcggcaagctgcggttcaagaagatcaaacctgaagccttcgaagccaacagattctacaccgtgatcaacaaaaagagcggcgagatcgtgcccatggaggtgaacttcaacttcgacgaccccaacctgatcatcctgcctctggcctttggcaagagacagggcagagaattcatctggaacgacctgctgtccctggaaaccggcagcctgaagctggccaacggaagagtgatcgagaagacactgtacaacagaagaacccggcaggatgagcctgccctgttcgtggccctgaccttcgagcggcgggaggtcctggactcctccaatatcaaaccaatgaacctgatcggcgtggcaagaggcgaaaacatccccgccgtgatcgccctgaccgaccccgagggctgcccactgagccggtttaaggatagcctgggaaacccaacccacatcctgagaatcggcgagagctataaggagaagcagcggaccatccaggccaagaaggaggtggagcagcggagagccggcggctacagccggaagtacgccagcaaagccaagaatctggcagacgatatggtgagaaacaccgctagagatctgctgtactacgccgtgacccaggatgccatgctgatcttcgccaacctgagccggggcttcggccggcagggcaagcggaccttcatggccgagagacagtacacacggatggaggactggctgaccgccaagctggcctacgagggcctgagcaagacctacctgtccaagacactggcccagtacacctccaagacatgcagcaactgtgggtttaccatcaccagcgccgactacgacagggtgctggagaagctgaagaagacagcaacaggctggatgaccacaattaacggcaaggagctgaaggtggagggccagattacctactacaacagatacaagagacagaacgtagtcaaggacctgtccgtcgagctggatagactgagcgaagaatctgtgaacaacgacatctcctcctggacaaagggcagaagcggagaagctctgagcctcctgaagaaaagattctcccatagacccgtgcaggagaagttcgtgtgcctgaactgcggcttcgagacacacgcagccgagcaagccgccctgaacatcgccagatcctggctgttcctgcggagccaggagtacaagaaataccagacaaacaagacaaccggcaacaccgataagagagccttcgtcgagacctggcagtccttttaccggaagaagcttaaggaggtgtggaaacctgccgtgcggtctggcggatctggcggaggctccaccagccccaagaaaaagagaaaagtctaagctgccttctgcggggcttgccttctggccatgcccttcttctctcccttgcacctgtacctcttggtctttgaataaagcctgagtaggaaggctagcaaaaaaaaaaaaaaaaaaaaaaaaaaaaaaaaaaaaaaaaaaaaaaaaaaaaaaaaaaaaaaaaaaaaaaaaaaaaaaaa

SEQ ID NO: 9361 - RNA, 8787 nt, synthetic construct
  source 1..8787: mol_type = other RNA
aggaaataagagagaaaagaagagtaagaagaaatataagagccaccatggcccctaagaagaagcgtaaagtgagccggatgaaccacgaccaggagttcgacccccctaaggtgtaccctcccgtccccgccgagaagagaaagcccatccgggtcctgagcctgttcgatggcatcgccaccggtctgctggtgctgaaggacctgggcatccaggtggataggtacattgcctccgaggtgtgcgaggactccatcaccgtgggaatggtgcgtcatcagggcaagatcatgtacgtgggcgacgtgcggagcgtgacacagaagcatatccaggagtggggccctttcgacctggtgatcggcggcagcccttgcaatgacctgagcatcgtgaacccagcccggaagggcctgtacgagggaaccggcagactgttcttcgagttttacagactgctgcacgacgcccggcctaaggaaggcgacgaccggcccttcttttggctgttcgagaatgtggtggccatgggagtcagcgacaagcgggatattagccggttcctggagagcaaccccgtgatgatcgatgccaaggaagtgagcgccgcccaccgggccagatacttctggggcaatctgcctggcatgaacagacccctggccagcaccgtgaacgacaagctggagctgcaggagtgcctggagcacggccggatcgccaagttcagcaaggtgagaaccatcaccacccgaagcaacagcatcaaacaaggcaaggaccagcactttcctgtgttcatgaacgagaaggaggacatcctgtggtgtaccgagatggagagagtgttcgggttcccagtccactacacagatgtcagcaacatgtctagactggccagacagagactgctgggaagaagctggtccgtccctgtgatcagacacctgttcgcccctctgaaggagtacttcgcctgcgtgagcagcggcaacagcaacgccaacagccggggccccagcttctctagcggcctggtgccactgtccctgagagggagccacatgggccccatggagatctacaaaaccgtgagcgcctggaagcggcagcctgtgcgcgtgctgagcctgtttcggaatatcgataaagtcctgaaaagcctgggattcctggagagcggctctggctccggcggtggcaccctgaagtacgtggaggatgtgacaaacgtggtcagacgggatgtggagaagtggggccccttcgatctggtgtacggcagcacccaacccctgggcagctcttgtgaccggtgccctggctggtacatgtttcagttccaccggatcctgcagtacgccctgccgagacaggagtcccagcggccattcttttggattttcatggacaacttgctgctgaccgaggatgaccaggaaactaccactcggttcctgcagaccgaagccgtgaccctgcaggacgtgagaggccgggactaccagaacgccatgcgggtgtggtccaacatccctggactgaaaagcaagcacgcacctctgacccctaaagaagaggagtacctgcaggcccaggtgcggagcagaagcaagctggacgcccctaaggtggatctgctggtgaagaattgcctcctgcccctgagagagtacttcaagtatttcagccagaatagtctgcccctgggaggcagcggcggcggcaggcccggcgccgtgagcttcgccgacgtggccgtgtacttcagccccgaggagtggggctgcctgaggcccgcccagagggccctgtacagggacgtgatgagggagacctacggccacctgggcgccctgggcttcgccgacgccaagcccgtgctgatcgcctggctggagaggaaggccgaggtgtggacccccgaggccgaggaccccgaggagggcgccaggcaccccggcagcggcggcggcccaagcagcggcgcccctcctcccagcggcggcaggcggcccaagcagcggcgcccctcctcccagcggcggcagcccagccggctccccaacctctaccgaggagggcacctctgagtccgccacccccgagagcggccctggcacctccaccgagcccagcgagggcagcgcacccggcagccctgccggcagccccacctccacagaggagggaaccagcaccgagcccagcgaaggcagcgccccaggcaccagcaccgagcctagtgagcaggagattaaacggatcaacaagatcagaagaagacttgtgaaagacagcaacaccaagaaggccggcaagacaggccccatgaaaaccctgctggttagagtgatgacacccgatctgagagagcggctggaaaacctgagaaagaagcctgaaaatatcccccagcccatcagcaatacatctagagccaacctgaataagctgctgaccgattacaccgaaatgaagaaggcgatcctgcatgtgtactgggaagagttccagaaggaccctgtgggcctgatgagccgggtggcccagcctgccagcaagaagatcgatcagaacaagctgaaacctgagatggacgagaagggcaacctgaccaccgccggctttgcctgctctcagtgtggccagcccctgttcgtgtacaagctggagcaggtgtctgagaagggcaaggcttacaccaactacttcggacggtgcaatgtggccgagcacgaaaagctgatcctgctggcccagctgaagcccgagaaggatagcgacgaagccgtgacatatagcctgggaaagtttgggcagagggccctggatttctacagcattcatgtgaccaaggagtccacccaccccgtgaagcccctggcccagatcgccggaaacagatacgcctccggacctgtgggaaaggccctgagcgacgcatgtatgggcacaatcgcctccttcctgtctaagtaccaggacatcatcatcgaacaccagaaggtggtgaagggcaaccagaagagactggagagcctgcgggagctggccggcaaggaaaacctggaataccctagcgtgaccctgccacctcagcctcacaccaaggagggcgttgatgcctacaacgaagtgatcgcccgggtgcgaatgtgggtgaacctgaacctgtggcagaagctgaagctaagcagagatgatgccaagcctctgctgagactgaagggattcccttcctttcctctggtcgagagacaggccaacgaagtggactggtgggacatggtgtgtaacgtgaagaagctgatcaacgagaaaaaggaggatggcaaggtgttttggcagaatctggctggctacaagagacaggaagccctgagaccatacctgagcagcgaggaagatcggaagaagggaaagaaattcgctcggtaccagctgggcgacctgctgctgcacctggaaaagaagcacggcgaggactggggaaaggtgtacgacgaggcctgggagcggattgacaagaaagtggaaggcctgagcaagcacatcaagctggaagaggaacggagaagcgaggacgcccagagcaaggccgccctgaccgactggctgcgggctaaggccagcttcgtgatcgagggcctgaaggaggccgacaaggacgagttctgcagatgcgagctgaagctgcagaagtggtacggggacctgcggggaaagcccttcgccatcgaagccgagaacagcatcctggacatcagcggcttcagcaagcagtacaactgtgccttcatctggcagaaggacggcgtgaagaagctgaacctgtacctgatcatcaactacttcaagggcggcaagctgcggttcaagaagatcaaacctgaagccttcgaagccaacagattctacaccgtgatcaacaaaaagagcggcgagatcgtgcccatggaggtgaacttcaacttcgacgaccccaacctgatcatcctgcctctggcctttggcaagagacagggcagagaattcatctggaacgacctgctgtccctggaaaccggcagcctgaagctggccaacggaagagtgatcgagaagacactgtacaacagaagaacccggcaggatgagcctgccctgttcgtggccctgaccttcgagcggcgggaggtcctggactcctccaatatcaaaccaatgaacctgatcggcgtggcaagaggcgaaaacatccccgccgtgatcgccctgaccgaccccgagggctgcccactgagccggtttaaggatagcctgggaaacccaacccacatcctgagaatcggcgagagctataaggagaagcagcggaccatccaggccaagaaggaggtggagcagcggagagccggcggctacagccggaagtacgccagcaaagccaagaatctggcagacgatatggtgagaaacaccgctagagatctgctgtactacgccgtgacccaggatgccatgctgatcttcgccaacctgagccggggcttcggccggcagggcaagcggaccttcatggccgagagacagtacacacggatggaggactggctgaccgccaagctggcctacgagggcctgagcaagacctacctgtccaagacactggcccagtacacctccaagacatgcagcaactgtgggtttaccatcaccagcgccgactacgacagggtgctggagaagctgaagaagacagcaacaggctggatgaccacaattaacggcaaggagctgaaggtggagggccagattacctactacaacagatacaagagacagaacgtagtcaaggacctgtccgtcgagctggatagactgagcgaagaatctgtgaacaacgacatctcctcctggacaaagggcagaagcggagaagctctgagcctcctgaagaaaagattctcccatagacccgtgcaggagaagttcgtgtgcctgaactgcggcttcgagacacacgcagccgagcaagccgccctgaacatcgccagatcctggctgttcctgcggagccaggagtacaagaaataccagacaaacaagacaaccggcaacaccgataagagagccttcgtcgagacctggcagtccttttaccggaagaagcttaaggaggtgtggaaacctgccgtgcggtctggcggatctggcggaggctccaccagccccaagaaaaagagaaaagtctaagctgccttctgcggggcttgccttctggccatgcccttcttctctcccttgcacctgtacctcttggtctttgaataaagcctgagtaggaaggctagcaaaaaaaaaaaaaaaaaaaaaaaaaaaaaaaaaaaaaaaaaaaaaaaaaaaaaaaaaaaaaaaaaaaaaaaaaaaaaaaagcccagccggctccccaacctctaccgaggagggcacctctgagtccgccacccccgagagcggccctggcacctccaccgagcccagcgagggcagcgcacccggcagccctgccggcagccccacctccacagaggagggaaccagcaccgagcccagcgaaggcagcgccccaggcaccagcaccgagcctagtgagcaggagattaaacggatcaacaagatcagaagaagacttgtgaaagacagcaacaccaagaaggccggcaagacaggccccatgaaaaccctgctggttagagtgatgacacccgatctgagagagcggctggaaaacctgagaaagaagcctgaaaatatcccccagcccatcagcaatacatctagagccaacctgaataagctgctgaccgattacaccgaaatgaagaaggcgatcctgcatgtgtactgggaagagttccagaaggaccctgtgggcctgatgagccgggtggcccagcctgccagcaagaagatcgatcagaacaagctgaaacctgagatggacgagaagggcaacctgaccaccgccggctttgcctgctctcagtgtggccagcccctgttcgtgtacaagctggagcaggtgtctgagaagggcaaggcttacaccaactacttcggacggtgcaatgtggccgagcacgaaaagctgatcctgctggcccagctgaagcccgagaaggatagcgacgaagccgtgacatatagcctgggaaagtttgggcagagggccctggatttctacagcattcatgtgaccaaggagtccacccaccccgtgaagcccctggcccagatcgccggaaacagatacgcctccggacctgtgggaaaggccctgagcgacgcatgtatgggcacaatcgcctccttcctgtctaagtaccaggacatcatcatcgaacaccagaaggtggtgaagggcaaccagaagagactggagagcctgcgggagctggccggcaaggaaaacctggaataccctagcgtgaccctgccacctcagcctcacaccaaggagggcgttgatgcctacaacgaagtgatcgcccgggtgcgaatgtgggtgaacctgaacctgtggcagaagctgaagctaagcagagatgatgccaagcctctgctgagactgaagggattcccttcctttcctctggtcgagagacaggccaacgaagtggactggtgggacatggtgtgtaacgtgaagaagctgatcaacgagaaaaaggaggatggcaaggtgttttggcagaatctggctggctacaagagacaggaagccctgagaccatacctgagcagcgaggaagatcggaagaagggaaagaaattcgctcggtaccagctgggcgacctgctgctgcacctggaaaagaagcacggcgaggactggggaaaggtgtacgacgaggcctgggagcggattgacaagaaagtggaaggcctgagcaagcacatcaagctggaagaggaacggagaagcgaggacgcccagagcaaggccgccctgaccgactggctgcgggctaaggccagcttcgtgatcgagggcctgaaggaggccgacaaggacgagttctgcagatgcgagctgaagctgcagaagtggtacggggacctgcggggaaagcccttcgccatcgaagccgagaacagcatcctggacatcagcggcttcagcaagcagtacaactgtgccttcatctggcagaaggacggcgtgaagaagctgaacctgtacctgatcatcaactacttcaagggcggcaagctgcggttcaagaagatcaaacctgaagccttcgaagccaacagattctacaccgtgatcaacaaaaagagcggcgagatcgtgcccatggaggtgaacttcaacttcgacgaccccaacctgatcatcctgcctctggcctttggcaagagacagggcagagaattcatctggaacgacctgctgtccctggaaaccggcagcctgaagctggccaacggaagagtgatcgagaagacactgtacaacagaagaacccggcaggatgagcctgccctgttcgtggccctgaccttcgagcggcgggaggtcctggactcctccaatatcaaaccaatgaacctgatcggcgtggcaagaggcgaaaacatccccgccgtgatcgccctgaccgaccccgagggctgcccactgagccggtttaaggatagcctgggaaacccaacccacatcctgagaatcggcgagagctataaggagaagcagcggaccatccaggccaagaaggaggtggagcagcggagagccggcggctacagccggaagtacgccagcaaagccaagaatctggcagacgatatggtgagaaacaccgctagagatctgctgtactacgccgtgacccaggatgccatgctgatcttcgccaacctgagccggggcttcggccggcagggcaagcggaccttcatggccgagagacagtacacacggatggaggactggctgaccgccaagctggcctacgagggcctgagcaagacctacctgtccaagacactggcccagtacacctccaagacatgcagcaactgtgggtttaccatcaccagcgccgactacgacagggtgctggagaagctgaagaagacagcaacaggctggatgaccacaattaacggcaaggagctgaaggtggagggccagattacctactacaacagatacaagagacagaacgtagtcaaggacctgtccgtcgagctggatagactgagcgaagaatctgtgaacaacgacatctcctcctggacaaagggcagaagcggagaagctctgagcctcctgaagaaaagattctcccatagacccgtgcaggagaagttcgtgtgcctgaactgcggcttcgagacacacgcagccgagcaagccgccctgaacatcgccagatcctggctgttcctgcggagccaggagtacaagaaataccagacaaacaagacaaccggcaacaccgataagagagccttcgtcgagacctggcagtccttttaccggaagaagcttaaggaggtgtggaaacctgccgtgcggtctggcggatctggcggaggctccaccagccccaagaaaaagagaaaagtctaagctgccttctgcggggcttgccttctggccatgcccttcttctctcccttgcacctgtacctcttggtctttgaataaagcctgagtaggaaggctagcaaaaaaaaaaaaaaaaaaaaaaaaaaaaaaaaaaaaaaaaaaaaaaaaaaaaaaaaaaaaaaaaaaaaaaaaaaaaaaaa

SEQ ID NO: 9362 - RNA, 8787 nt, synthetic construct
  source 1..8787: mol_type = other RNA
aggaaataagagagaaaagaagagtaagaagaaatataagagccaccatggcccctaagaagaagcgtaaagtgagccggatgaaccacgaccaggagttcgacccccctaaggtgtaccctcccgtccccgccgagaagagaaagcccatccgggtcctgagcctgttcgatggcatcgccaccggtctgctggtgctgaaggacctgggcatccaggtggataggtacattgcctccgaggtgtgcgaggactccatcaccgtgggaatggtgcgtcatcagggcaagatcatgtacgtgggcgacgtgcggagcgtgacacagaagcatatccaggagtggggccctttcgacctggtgatcggcggcagcccttgcaatgacctgagcatcgtgaacccagcccggaagggcctgtacgagggaaccggcagactgttcttcgagttttacagactgctgcacgacgcccggcctaaggaaggcgacgaccggcccttcttttggctgttcgagaatgtggtggccatgggagtcagcgacaagcgggatattagccggttcctggagagcaaccccgtgatgatcgatgccaaggaagtgagcgccgcccaccgggccagatacttctggggcaatctgcctggcatgaacagacccctggccagcaccgtgaacgacaagctggagctgcaggagtgcctggagcacggccggatcgccaagttcagcaaggtgagaaccatcaccacccgaagcaacagcatcaaacaaggcaaggaccagcactttcctgtgttcatgaacgagaaggaggacatcctgtggtgtaccgagatggagagagtgttcgggttcccagtccactacacagatgtcagcaacatgtctagactggccagacagagactgctgggaagaagctggtccgtccctgtgatcagacacctgttcgcccctctgaaggagtacttcgcctgcgtgagcagcggcaacagcaacgccaacagccggggccccagcttctctagcggcctggtgccactgtccctgagagggagccacatgggccccatggagatctacaaaaccgtgagcgcctggaagcggcagcctgtgcgcgtgctgagcctgtttcggaatatcgataaagtcctgaaaagcctgggattcctggagagcggctctggctccggcggtggcaccctgaagtacgtggaggatgtgacaaacgtggtcagacgggatgtggagaagtggggccccttcgatctggtgtacggcagcacccaacccctgggcagctcttgtgaccggtgccctggctggtacatgtttcagttccaccggatcctgcagtacgccctgccgagacaggagtcccagcggccattcttttggattttcatggacaacttgctgctgaccgaggatgaccaggaaactaccactcggttcctgcagaccgaagccgtgaccctgcaggacgtgagaggccgggactaccagaacgccatgcgggtgtggtccaacatccctggactgaaaagcaagcacgcacctctgacccctaaagaagaggagtacctgcaggcccaggtgcggagcagaagcaagctggacgcccctaaggtggatctgctggtgaagaattgcctcctgcccctgagagagtacttcaagtatttcagccagaatagtctgcccctgggaggcagcggcggcggcagcctgggcagcgagctgttcagggacgtggccatcgtgttcagccaggaggagtggcagtggctggcccccgcccagagggacctgtacagggacgtgatgctggagacctacagcaacctggtgagcctgggcctggccgtgagcaagcccgacgtgatcagcttcctggagcagggcaaggagccctggatggtggagagggtggtgagcggcggcctgtgccccgtgctggagagcaggggcggcccaagcagcggcgcccctcctcccagcggcggcaggcggcccaagcagcggcgcccctcctcccagcggcggcagcccagccggctccccaacctctaccgaggagggcacctctgagtccgccacccccgagagcggccctggcacctccaccgagcccagcgagggcagcgcacccggcagccctgccggcagccccacctccacagaggagggaaccagcaccgagcccagcgaaggcagcgccccaggcaccagcaccgagcctagtgagcaggagattaaacggatcaacaagatcagaagaagacttgtgaaagacagcaacaccaagaaggccggcaagacaggccccatgaaaaccctgctggttagagtgatgacacccgatctgagagagcggctggaaaacctgagaaagaagcctgaaaatatcccccagcccatcagcaatacatctagagccaacctgaataagctgctgaccgattacaccgaaatgaagaaggcgatcctgcatgtgtactgggaagagttccagaaggaccctgtgggcctgatgagccgggtggcccagcctgccagcaagaagatcgatcagaacaagctgaaacctgagatggacgagaagggcaacctgaccaccgccggctttgcctgctctcagtgtggccagcccctgttcgtgtacaagctggagcaggtgtctgagaagggcaaggcttacaccaactacttcggacggtgcaatgtggccgagcacgaaaagctgatcctgctggcccagctgaagcccgagaaggatagcgacgaagccgtgacatatagcctgggaaagtttgggcagagggccctggatttctacagcattcatgtgaccaaggagtccacccaccccgtgaagcccctggcccagatcgccggaaacagatacgcctccggacctgtgggaaaggccctgagcgacgcatgtatgggcacaatcgcctccttcctgtctaagtaccaggacatcatcatcgaacaccagaaggtggtgaagggcaaccagaagagactggagagcctgcgggagctggccggcaaggaaaacctggaataccctagcgtgaccctgccacctcagcctcacaccaaggagggcgttgatgcctacaacgaagtgatcgcccgggtgcgaatgtgggtgaacctgaacctgtggcagaagctgaagctaagcagagatgatgccaagcctctgctgagactgaagggattcccttcctttcctctggtcgagagacaggccaacgaagtggactggtgggacatggtgtgtaacgtgaagaagctgatcaacgagaaaaaggaggatggcaaggtgttttggcagaatctggctggctacaagagacaggaagccctgagaccatacctgagcagcgaggaagatcggaagaagggaaagaaattcgctcggtaccagctgggcgacctgctgctgcacctggaaaagaagcacggcgaggactggggaaaggtgtacgacgaggcctgggagcggattgacaagaaagtggaaggcctgagcaagcacatcaagctggaagaggaacggagaagcgaggacgcccagagcaaggccgccctgaccgactggctgcgggctaaggccagcttcgtgatcgagggcctgaaggaggccgacaaggacgagttctgcagatgcgagctgaagctgcagaagtggtacggggacctgcggggaaagcccttcgccatcgaagccgagaacagcatcctggacatcagcggcttcagcaagcagtacaactgtgccttcatctggcagaaggacggcgtgaagaagctgaacctgtacctgatcatcaactacttcaagggcggcaagctgcggttcaagaagatcaaacctgaagccttcgaagccaacagattctacaccgtgatcaacaaaaagagcggcgagatcgtgcccatggaggtgaacttcaacttcgacgaccccaacctgatcatcctgcctctggcctttggcaagagacagggcagagaattcatctggaacgacctgctgtccctggaaaccggcagcctgaagctggccaacggaagagtgatcgagaagacactgtacaacagaagaacccggcaggatgagcctgccctgttcgtggccctgaccttcgagcggcgggaggtcctggactcctccaatatcaaaccaatgaacctgatcggcgtggcaagaggcgaaaacatccccgccgtgatcgccctgaccgaccccgagggctgcccactgagccggtttaaggatagcctgggaaacccaacccacatcctgagaatcggcgagagctataaggagaagcagcggaccatccaggccaagaaggaggtggagcagcggagagccggcggctacagccggaagtacgccagcaaagccaagaatctggcagacgatatggtgagaaacaccgctagagatctgctgtactacgccgtgacccaggatgccatgctgatcttcgccaacctgagccggggcttcggccggcagggcaagcggaccttcatggccgagagacagtacacacggatggaggactggctgaccgccaagctggcctacgagggcctgagcaagacctacctgtccaagacactggcccagtacacctccaagacatgcagcaactgtgggtttaccatcaccagcgccgactacgacagggtgctggagaagctgaagaagacagcaacaggctggatgaccacaattaacggcaaggagctgaaggtggagggccagattacctactacaacagatacaagagacagaacgtagtcaaggacctgtccgtcgagctggatagactgagcgaagaatctgtgaacaacgacatctcctcctggacaaagggcagaagcggagaagctctgagcctcctgaagaaaagattctcccatagacccgtgcaggagaagttcgtgtgcctgaactgcggcttcgagacacacgcagccgagcaagccgccctgaacatcgccagatcctggctgttcctgcggagccaggagtacaagaaataccagacaaacaagacaaccggcaacaccgataagagagccttcgtcgagacctggcagtccttttaccggaagaagcttaaggaggtgtggaaacctgccgtgcggtctggcggatctggcggaggctccaccagccccaagaaaaagagaaaagtctaagctgccttctgcggggcttgccttctggccatgcccttcttctctcccttgcacctgtacctcttggtctttgaataaagcctgagtaggaaggctagcaaaaaaaaaaaaaaaaaaaaaaaaaaaaaaaaaaaaaaaaaaaaaaaaaaaaaaaaaaaaaaaaaaaaaaaaaaaaaaaagcccagccggctccccaacctctaccgaggagggcacctctgagtccgccacccccgagagcggccctggcacctccaccgagcccagcgagggcagcgcacccggcagccctgccggcagccccacctccacagaggagggaaccagcaccgagcccagcgaaggcagcgccccaggcaccagcaccgagcctagtgagcaggagattaaacggatcaacaagatcagaagaagacttgtgaaagacagcaacaccaagaaggccggcaagacaggccccatgaaaaccctgctggttagagtgatgacacccgatctgagagagcggctggaaaacctgagaaagaagcctgaaaatatcccccagcccatcagcaatacatctagagccaacctgaataagctgctgaccgattacaccgaaatgaagaaggcgatcctgcatgtgtactgggaagagttccagaaggaccctgtgggcctgatgagccgggtggcccagcctgccagcaagaagatcgatcagaacaagctgaaacctgagatggacgagaagggcaacctgaccaccgccggctttgcctgctctcagtgtggccagcccctgttcgtgtacaagctggagcaggtgtctgagaagggcaaggcttacaccaactacttcggacggtgcaatgtggccgagcacgaaaagctgatcctgctggcccagctgaagcccgagaaggatagcgacgaagccgtgacatatagcctgggaaagtttgggcagagggccctggatttctacagcattcatgtgaccaaggagtccacccaccccgtgaagcccctggcccagatcgccggaaacagatacgcctccggacctgtgggaaaggccctgagcgacgcatgtatgggcacaatcgcctccttcctgtctaagtaccaggacatcatcatcgaacaccagaaggtggtgaagggcaaccagaagagactggagagcctgcgggagctggccggcaaggaaaacctggaataccctagcgtgaccctgccacctcagcctcacaccaaggagggcgttgatgcctacaacgaagtgatcgcccgggtgcgaatgtgggtgaacctgaacctgtggcagaagctgaagctaagcagagatgatgccaagcctctgctgagactgaagggattcccttcctttcctctggtcgagagacaggccaacgaagtggactggtgggacatggtgtgtaacgtgaagaagctgatcaacgagaaaaaggaggatggcaaggtgttttggcagaatctggctggctacaagagacaggaagccctgagaccatacctgagcagcgaggaagatcggaagaagggaaagaaattcgctcggtaccagctgggcgacctgctgctgcacctggaaaagaagcacggcgaggactggggaaaggtgtacgacgaggcctgggagcggattgacaagaaagtggaaggcctgagcaagcacatcaagctggaagaggaacggagaagcgaggacgcccagagcaaggccgccctgaccgactggctgcgggctaaggccagcttcgtgatcgagggcctgaaggaggccgacaaggacgagttctgcagatgcgagctgaagctgcagaagtggtacggggacctgcggggaaagcccttcgccatcgaagccgagaacagcatcctggacatcagcggcttcagcaagcagtacaactgtgccttcatctggcagaaggacggcgtgaagaagctgaacctgtacctgatcatcaactacttcaagggcggcaagctgcggttcaagaagatcaaacctgaagccttcgaagccaacagattctacaccgtgatcaacaaaaagagcggcgagatcgtgcccatggaggtgaacttcaacttcgacgaccccaacctgatcatcctgcctctggcctttggcaagagacagggcagagaattcatctggaacgacctgctgtccctggaaaccggcagcctgaagctggccaacggaagagtgatcgagaagacactgtacaacagaagaacccggcaggatgagcctgccctgttcgtggccctgaccttcgagcggcgggaggtcctggactcctccaatatcaaaccaatgaacctgatcggcgtggcaagaggcgaaaacatccccgccgtgatcgccctgaccgaccccgagggctgcccactgagccggtttaaggatagcctgggaaacccaacccacatcctgagaatcggcgagagctataaggagaagcagcggaccatccaggccaagaaggaggtggagcagcggagagccggcggctacagccggaagtacgccagcaaagccaagaatctggcagacgatatggtgagaaacaccgctagagatctgctgtactacgccgtgacccaggatgccatgctgatcttcgccaacctgagccggggcttcggccggcagggcaagcggaccttcatggccgagagacagtacacacggatggaggactggctgaccgccaagctggcctacgagggcctgagcaagacctacctgtccaagacactggcccagtacacctccaagacatgcagcaactgtgggtttaccatcaccagcgccgactacgacagggtgctggagaagctgaagaagacagcaacaggctggatgaccacaattaacggcaaggagctgaaggtggagggccagattacctactacaacagatacaagagacagaacgtagtcaaggacctgtccgtcgagctggatagactgagcgaagaatctgtgaacaacgacatctcctcctggacaaagggcagaagcggagaagctctgagcctcctgaagaaaagattctcccatagacccgtgcaggagaagttcgtgtgcctgaactgcggcttcgagacacacgcagccgagcaagccgccctgaacatcgccagatcctggctgttcctgcggagccaggagtacaagaaataccagacaaacaagacaaccggcaacaccgataagagagccttcgtcgagacctggcagtccttttaccggaagaagcttaaggaggtgtggaaacctgccgtgcggtctggcggatctggcggaggctccaccagccccaagaaaaagagaaaagtctaagctgccttctgcggggcttgccttctggccatgcccttcttctctcccttgcacctgtacctcttggtctttgaataaagcctgagtaggaaggctagcaaaaaaaaaaaaaaaaaaaaaaaaaaaaaaaaaaaaaaaaaaaaaaaaaaaaaaaaaaaaaaaaaaaaaaaaaaaaaaaa

SEQ ID NO: 9363 - RNA, 8787 nt, synthetic construct
  source 1..8787: mol_type = other RNA
aggaaataagagagaaaagaagagtaagaagaaatataagagccaccatggcccctaagaagaagcgtaaagtgagccggatgaaccacgaccaggagttcgacccccctaaggtgtaccctcccgtccccgccgagaagagaaagcccatccgggtcctgagcctgttcgatggcatcgccaccggtctgctggtgctgaaggacctgggcatccaggtggataggtacattgcctccgaggtgtgcgaggactccatcaccgtgggaatggtgcgtcatcagggcaagatcatgtacgtgggcgacgtgcggagcgtgacacagaagcatatccaggagtggggccctttcgacctggtgatcggcggcagcccttgcaatgacctgagcatcgtgaacccagcccggaagggcctgtacgagggaaccggcagactgttcttcgagttttacagactgctgcacgacgcccggcctaaggaaggcgacgaccggcccttcttttggctgttcgagaatgtggtggccatgggagtcagcgacaagcgggatattagccggttcctggagagcaaccccgtgatgatcgatgccaaggaagtgagcgccgcccaccgggccagatacttctggggcaatctgcctggcatgaacagacccctggccagcaccgtgaacgacaagctggagctgcaggagtgcctggagcacggccggatcgccaagttcagcaaggtgagaaccatcaccacccgaagcaacagcatcaaacaaggcaaggaccagcactttcctgtgttcatgaacgagaaggaggacatcctgtggtgtaccgagatggagagagtgttcgggttcccagtccactacacagatgtcagcaacatgtctagactggccagacagagactgctgggaagaagctggtccgtccctgtgatcagacacctgttcgcccctctgaaggagtacttcgcctgcgtgagcagcggcaacagcaacgccaacagccggggccccagcttctctagcggcctggtgccactgtccctgagagggagccacatgggccccatggagatctacaaaaccgtgagcgcctggaagcggcagcctgtgcgcgtgctgagcctgtttcggaatatcgataaagtcctgaaaagcctgggattcctggagagcggctctggctccggcggtggcaccctgaagtacgtggaggatgtgacaaacgtggtcagacgggatgtggagaagtggggccccttcgatctggtgtacggcagcacccaacccctgggcagctcttgtgaccggtgccctggctggtacatgtttcagttccaccggatcctgcagtacgccctgccgagacaggagtcccagcggccattcttttggattttcatggacaacttgctgctgaccgaggatgaccaggaaactaccactcggttcctgcagaccgaagccgtgaccctgcaggacgtgagaggccgggactaccagaacgccatgcgggtgtggtccaacatccctggactgaaaagcaagcacgcacctctgacccctaaagaagaggagtacctgcaggcccaggtgcggagcagaagcaagctggacgcccctaaggtggatctgctggtgaagaattgcctcctgcccctgagagagtacttcaagtatttcagccagaatagtctgcccctgggaggcagcggcggcggccccctgggcagcgagctgttcagggacgtggccatcgtgttcagccaggaggagtggcagtggctggcccccgcccagagggacctgtacagggacgtgatgctggagacctacagcaacctggtgagcctgggcctggccatcagcaagcccgacgtgatcagcttcctggagcagggcaaggagccctggatggtggagagggtggtggccggcggcctgtgccccgtgctggagagcaggggcggcccaagcagcggcgcccctcctcccagcggcggcaggcggcccaagcagcggcgcccctcctcccagcggcggcagcccagccggctccccaacctctaccgaggagggcacctctgagtccgccacccccgagagcggccctggcacctccaccgagcccagcgagggcagcgcacccggcagccctgccggcagccccacctccacagaggagggaaccagcaccgagcccagcgaaggcagcgccccaggcaccagcaccgagcctagtgagcaggagattaaacggatcaacaagatcagaagaagacttgtgaaagacagcaacaccaagaaggccggcaagacaggccccatgaaaaccctgctggttagagtgatgacacccgatctgagagagcggctggaaaacctgagaaagaagcctgaaaatatcccccagcccatcagcaatacatctagagccaacctgaataagctgctgaccgattacaccgaaatgaagaaggcgatcctgcatgtgtactgggaagagttccagaaggaccctgtgggcctgatgagccgggtggcccagcctgccagcaagaagatcgatcagaacaagctgaaacctgagatggacgagaagggcaacctgaccaccgccggctttgcctgctctcagtgtggccagcccctgttcgtgtacaagctggagcaggtgtctgagaagggcaaggcttacaccaactacttcggacggtgcaatgtggccgagcacgaaaagctgatcctgctggcccagctgaagcccgagaaggatagcgacgaagccgtgacatatagcctgggaaagtttgggcagagggccctggatttctacagcattcatgtgaccaaggagtccacccaccccgtgaagcccctggcccagatcgccggaaacagatacgcctccggacctgtgggaaaggccctgagcgacgcatgtatgggcacaatcgcctccttcctgtctaagtaccaggacatcatcatcgaacaccagaaggtggtgaagggcaaccagaagagactggagagcctgcgggagctggccggcaaggaaaacctggaataccctagcgtgaccctgccacctcagcctcacaccaaggagggcgttgatgcctacaacgaagtgatcgcccgggtgcgaatgtgggtgaacctgaacctgtggcagaagctgaagctaagcagagatgatgccaagcctctgctgagactgaagggattcccttcctttcctctggtcgagagacaggccaacgaagtggactggtgggacatggtgtgtaacgtgaagaagctgatcaacgagaaaaaggaggatggcaaggtgttttggcagaatctggctggctacaagagacaggaagccctgagaccatacctgagcagcgaggaagatcggaagaagggaaagaaattcgctcggtaccagctgggcgacctgctgctgcacctggaaaagaagcacggcgaggactggggaaaggtgtacgacgaggcctgggagcggattgacaagaaagtggaaggcctgagcaagcacatcaagctggaagaggaacggagaagcgaggacgcccagagcaaggccgccctgaccgactggctgcgggctaaggccagcttcgtgatcgagggcctgaaggaggccgacaaggacgagttctgcagatgcgagctgaagctgcagaagtggtacggggacctgcggggaaagcccttcgccatcgaagccgagaacagcatcctggacatcagcggcttcagcaagcagtacaactgtgccttcatctggcagaaggacggcgtgaagaagctgaacctgtacctgatcatcaactacttcaagggcggcaagctgcggttcaagaagatcaaacctgaagccttcgaagccaacagattctacaccgtgatcaacaaaaagagcggcgagatcgtgcccatggaggtgaacttcaacttcgacgaccccaacctgatcatcctgcctctggcctttggcaagagacagggcagagaattcatctggaacgacctgctgtccctggaaaccggcagcctgaagctggccaacggaagagtgatcgagaagacactgtacaacagaagaacccggcaggatgagcctgccctgttcgtggccctgaccttcgagcggcgggaggtcctggactcctccaatatcaaaccaatgaacctgatcggcgtggcaagaggcgaaaacatccccgccgtgatcgccctgaccgaccccgagggctgcccactgagccggtttaaggatagcctgggaaacccaacccacatcctgagaatcggcgagagctataaggagaagcagcggaccatccaggccaagaaggaggtggagcagcggagagccggcggctacagccggaagtacgccagcaaagccaagaatctggcagacgatatggtgagaaacaccgctagagatctgctgtactacgccgtgacccaggatgccatgctgatcttcgccaacctgagccggggcttcggccggcagggcaagcggaccttcatggccgagagacagtacacacggatggaggactggctgaccgccaagctggcctacgagggcctgagcaagacctacctgtccaagacactggcccagtacacctccaagacatgcagcaactgtgggtttaccatcaccagcgccgactacgacagggtgctggagaagctgaagaagacagcaacaggctggatgaccacaattaacggcaaggagctgaaggtggagggccagattacctactacaacagatacaagagacagaacgtagtcaaggacctgtccgtcgagctggatagactgagcgaagaatctgtgaacaacgacatctcctcctggacaaagggcagaagcggagaagctctgagcctcctgaagaaaagattctcccatagacccgtgcaggagaagttcgtgtgcctgaactgcggcttcgagacacacgcagccgagcaagccgccctgaacatcgccagatcctggctgttcctgcggagccaggagtacaagaaataccagacaaacaagacaaccggcaacaccgataagagagccttcgtcgagacctggcagtccttttaccggaagaagcttaaggaggtgtggaaacctgccgtgcggtctggcggatctggcggaggctccaccagccccaagaaaaagagaaaagtctaagctgccttctgcggggcttgccttctggccatgcccttcttctctcccttgcacctgtacctcttggtctttgaataaagcctgagtaggaaggctagcaaaaaaaaaaaaaaaaaaaaaaaaaaaaaaaaaaaaaaaaaaaaaaaaaaaaaaaaaaaaaaaaaaaaaaaaaaaaaaaagcccagccggctccccaacctctaccgaggagggcacctctgagtccgccacccccgagagcggccctggcacctccaccgagcccagcgagggcagcgcacccggcagccctgccggcagccccacctccacagaggagggaaccagcaccgagcccagcgaaggcagcgccccaggcaccagcaccgagcctagtgagcaggagattaaacggatcaacaagatcagaagaagacttgtgaaagacagcaacaccaagaaggccggcaagacaggccccatgaaaaccctgctggttagagtgatgacacccgatctgagagagcggctggaaaacctgagaaagaagcctgaaaatatcccccagcccatcagcaatacatctagagccaacctgaataagctgctgaccgattacaccgaaatgaagaaggcgatcctgcatgtgtactgggaagagttccagaaggaccctgtgggcctgatgagccgggtggcccagcctgccagcaagaagatcgatcagaacaagctgaaacctgagatggacgagaagggcaacctgaccaccgccggctttgcctgctctcagtgtggccagcccctgttcgtgtacaagctggagcaggtgtctgagaagggcaaggcttacaccaactacttcggacggtgcaatgtggccgagcacgaaaagctgatcctgctggcccagctgaagcccgagaaggatagcgacgaagccgtgacatatagcctgggaaagtttgggcagagggccctggatttctacagcattcatgtgaccaaggagtccacccaccccgtgaagcccctggcccagatcgccggaaacagatacgcctccggacctgtgggaaaggccctgagcgacgcatgtatgggcacaatcgcctccttcctgtctaagtaccaggacatcatcatcgaacaccagaaggtggtgaagggcaaccagaagagactggagagcctgcgggagctggccggcaaggaaaacctggaataccctagcgtgaccctgccacctcagcctcacaccaaggagggcgttgatgcctacaacgaagtgatcgcccgggtgcgaatgtgggtgaacctgaacctgtggcagaagctgaagctaagcagagatgatgccaagcctctgctgagactgaagggattcccttcctttcctctggtcgagagacaggccaacgaagtggactggtgggacatggtgtgtaacgtgaagaagctgatcaacgagaaaaaggaggatggcaaggtgttttggcagaatctggctggctacaagagacaggaagccctgagaccatacctgagcagcgaggaagatcggaagaagggaaagaaattcgctcggtaccagctgggcgacctgctgctgcacctggaaaagaagcacggcgaggactggggaaaggtgtacgacgaggcctgggagcggattgacaagaaagtggaaggcctgagcaagcacatcaagctggaagaggaacggagaagcgaggacgcccagagcaaggccgccctgaccgactggctgcgggctaaggccagcttcgtgatcgagggcctgaaggaggccgacaaggacgagttctgcagatgcgagctgaagctgcagaagtggtacggggacctgcggggaaagcccttcgccatcgaagccgagaacagcatcctggacatcagcggcttcagcaagcagtacaactgtgccttcatctggcagaaggacggcgtgaagaagctgaacctgtacctgatcatcaactacttcaagggcggcaagctgcggttcaagaagatcaaacctgaagccttcgaagccaacagattctacaccgtgatcaacaaaaagagcggcgagatcgtgcccatggaggtgaacttcaacttcgacgaccccaacctgatcatcctgcctctggcctttggcaagagacagggcagagaattcatctggaacgacctgctgtccctggaaaccggcagcctgaagctggccaacggaagagtgatcgagaagacactgtacaacagaagaacccggcaggatgagcctgccctgttcgtggccctgaccttcgagcggcgggaggtcctggactcctccaatatcaaaccaatgaacctgatcggcgtggcaagaggcgaaaacatccccgccgtgatcgccctgaccgaccccgagggctgcccactgagccggtttaaggatagcctgggaaacccaacccacatcctgagaatcggcgagagctataaggagaagcagcggaccatccaggccaagaaggaggtggagcagcggagagccggcggctacagccggaagtacgccagcaaagccaagaatctggcagacgatatggtgagaaacaccgctagagatctgctgtactacgccgtgacccaggatgccatgctgatcttcgccaacctgagccggggcttcggccggcagggcaagcggaccttcatggccgagagacagtacacacggatggaggactggctgaccgccaagctggcctacgagggcctgagcaagacctacctgtccaagacactggcccagtacacctccaagacatgcagcaactgtgggtttaccatcaccagcgccgactacgacagggtgctggagaagctgaagaagacagcaacaggctggatgaccacaattaacggcaaggagctgaaggtggagggccagattacctactacaacagatacaagagacagaacgtagtcaaggacctgtccgtcgagctggatagactgagcgaagaatctgtgaacaacgacatctcctcctggacaaagggcagaagcggagaagctctgagcctcctgaagaaaagattctcccatagacccgtgcaggagaagttcgtgtgcctgaactgcggcttcgagacacacgcagccgagcaagccgccctgaacatcgccagatcctggctgttcctgcggagccaggagtacaagaaataccagacaaacaagacaaccggcaacaccgataagagagccttcgtcgagacctggcagtccttttaccggaagaagcttaaggaggtgtggaaacctgccgtgcggtctggcggatctggcggaggctccaccagccccaagaaaaagagaaaagtctaagctgccttctgcggggcttgccttctggccatgcccttcttctctcccttgcacctgtacctcttggtctttgaataaagcctgagtaggaaggctagcaaaaaaaaaaaaaaaaaaaaaaaaaaaaaaaaaaaaaaaaaaaaaaaaaaaaaaaaaaaaaaaaaaaaaaaaaaaaaaaa

SEQ ID NO: 9364 - RNA, 8787 nt, synthetic construct
  source 1..8787: mol_type = other RNA
aggaaataagagagaaaagaagagtaagaagaaatataagagccaccatggcccctaagaagaagcgtaaagtgagccggatgaaccacgaccaggagttcgacccccctaaggtgtaccctcccgtccccgccgagaagagaaagcccatccgggtcctgagcctgttcgatggcatcgccaccggtctgctggtgctgaaggacctgggcatccaggtggataggtacattgcctccgaggtgtgcgaggactccatcaccgtgggaatggtgcgtcatcagggcaagatcatgtacgtgggcgacgtgcggagcgtgacacagaagcatatccaggagtggggccctttcgacctggtgatcggcggcagcccttgcaatgacctgagcatcgtgaacccagcccggaagggcctgtacgagggaaccggcagactgttcttcgagttttacagactgctgcacgacgcccggcctaaggaaggcgacgaccggcccttcttttggctgttcgagaatgtggtggccatgggagtcagcgacaagcgggatattagccggttcctggagagcaaccccgtgatgatcgatgccaaggaagtgagcgccgcccaccgggccagatacttctggggcaatctgcctggcatgaacagacccctggccagcaccgtgaacgacaagctggagctgcaggagtgcctggagcacggccggatcgccaagttcagcaaggtgagaaccatcaccacccgaagcaacagcatcaaacaaggcaaggaccagcactttcctgtgttcatgaacgagaaggaggacatcctgtggtgtaccgagatggagagagtgttcgggttcccagtccactacacagatgtcagcaacatgtctagactggccagacagagactgctgggaagaagctggtccgtccctgtgatcagacacctgttcgcccctctgaaggagtacttcgcctgcgtgagcagcggcaacagcaacgccaacagccggggccccagcttctctagcggcctggtgccactgtccctgagagggagccacatgggccccatggagatctacaaaaccgtgagcgcctggaagcggcagcctgtgcgcgtgctgagcctgtttcggaatatcgataaagtcctgaaaagcctgggattcctggagagcggctctggctccggcggtggcaccctgaagtacgtggaggatgtgacaaacgtggtcagacgggatgtggagaagtggggccccttcgatctggtgtacggcagcacccaacccctgggcagctcttgtgaccggtgccctggctggtacatgtttcagttccaccggatcctgcagtacgccctgccgagacaggagtcccagcggccattcttttggattttcatggacaacttgctgctgaccgaggatgaccaggaaactaccactcggttcctgcagaccgaagccgtgaccctgcaggacgtgagaggccgggactaccagaacgccatgcgggtgtggtccaacatccctggactgaaaagcaagcacgcacctctgacccctaaagaagaggagtacctgcaggcccaggtgcggagcagaagcaagctggacgcccctaaggtggatctgctggtgaagaattgcctcctgcccctgagagagtacttcaagtatttcagccagaatagtctgcccctgggaggcagcggcggcggcctgctgaccttcgaggacgtggccgtgagcttcagcgaggaggagtggaggctgctggaccccacccagaagagcctgtacaacgacgtgatgcaggagaactacgagaccgtggtgagcctgggcctgaagctgaagaacgacaccggcaacgaccagcccatcagcctgagcgccctggagatccaggccagcggctgcagggtgctgaggaaggccaggatgaaggtggcccagaagaccggcggcccaagcagcggcgcccctcctcccagcggcggcaggcggcccaagcagcggcgcccctcctcccagcggcggcagcccagccggctccccaacctctaccgaggagggcacctctgagtccgccacccccgagagcggccctggcacctccaccgagcccagcgagggcagcgcacccggcagccctgccggcagccccacctccacagaggagggaaccagcaccgagcccagcgaaggcagcgccccaggcaccagcaccgagcctagtgagcaggagattaaacggatcaacaagatcagaagaagacttgtgaaagacagcaacaccaagaaggccggcaagacaggccccatgaaaaccctgctggttagagtgatgacacccgatctgagagagcggctggaaaacctgagaaagaagcctgaaaatatcccccagcccatcagcaatacatctagagccaacctgaataagctgctgaccgattacaccgaaatgaagaaggcgatcctgcatgtgtactgggaagagttccagaaggaccctgtgggcctgatgagccgggtggcccagcctgccagcaagaagatcgatcagaacaagctgaaacctgagatggacgagaagggcaacctgaccaccgccggctttgcctgctctcagtgtggccagcccctgttcgtgtacaagctggagcaggtgtctgagaagggcaaggcttacaccaactacttcggacggtgcaatgtggccgagcacgaaaagctgatcctgctggcccagctgaagcccgagaaggatagcgacgaagccgtgacatatagcctgggaaagtttgggcagagggccctggatttctacagcattcatgtgaccaaggagtccacccaccccgtgaagcccctggcccagatcgccggaaacagatacgcctccggacctgtgggaaaggccctgagcgacgcatgtatgggcacaatcgcctccttcctgtctaagtaccaggacatcatcatcgaacaccagaaggtggtgaagggcaaccagaagagactggagagcctgcgggagctggccggcaaggaaaacctggaataccctagcgtgaccctgccacctcagcctcacaccaaggagggcgttgatgcctacaacgaagtgatcgcccgggtgcgaatgtgggtgaacctgaacctgtggcagaagctgaagctaagcagagatgatgccaagcctctgctgagactgaagggattcccttcctttcctctggtcgagagacaggccaacgaagtggactggtgggacatggtgtgtaacgtgaagaagctgatcaacgagaaaaaggaggatggcaaggtgttttggcagaatctggctggctacaagagacaggaagccctgagaccatacctgagcagcgaggaagatcggaagaagggaaagaaattcgctcggtaccagctgggcgacctgctgctgcacctggaaaagaagcacggcgaggactggggaaaggtgtacgacgaggcctgggagcggattgacaagaaagtggaaggcctgagcaagcacatcaagctggaagaggaacggagaagcgaggacgcccagagcaaggccgccctgaccgactggctgcgggctaaggccagcttcgtgatcgagggcctgaaggaggccgacaaggacgagttctgcagatgcgagctgaagctgcagaagtggtacggggacctgcggggaaagcccttcgccatcgaagccgagaacagcatcctggacatcagcggcttcagcaagcagtacaactgtgccttcatctggcagaaggacggcgtgaagaagctgaacctgtacctgatcatcaactacttcaagggcggcaagctgcggttcaagaagatcaaacctgaagccttcgaagccaacagattctacaccgtgatcaacaaaaagagcggcgagatcgtgcccatggaggtgaacttcaacttcgacgaccccaacctgatcatcctgcctctggcctttggcaagagacagggcagagaattcatctggaacgacctgctgtccctggaaaccggcagcctgaagctggccaacggaagagtgatcgagaagacactgtacaacagaagaacccggcaggatgagcctgccctgttcgtggccctgaccttcgagcggcgggaggtcctggactcctccaatatcaaaccaatgaacctgatcggcgtggcaagaggcgaaaacatccccgccgtgatcgccctgaccgaccccgagggctgcccactgagccggtttaaggatagcctgggaaacccaacccacatcctgagaatcggcgagagctataaggagaagcagcggaccatccaggccaagaaggaggtggagcagcggagagccggcggctacagccggaagtacgccagcaaagccaagaatctggcagacgatatggtgagaaacaccgctagagatctgctgtactacgccgtgacccaggatgccatgctgatcttcgccaacctgagccggggcttcggccggcagggcaagcggaccttcatggccgagagacagtacacacggatggaggactggctgaccgccaagctggcctacgagggcctgagcaagacctacctgtccaagacactggcccagtacacctccaagacatgcagcaactgtgggtttaccatcaccagcgccgactacgacagggtgctggagaagctgaagaagacagcaacaggctggatgaccacaattaacggcaaggagctgaaggtggagggccagattacctactacaacagatacaagagacagaacgtagtcaaggacctgtccgtcgagctggatagactgagcgaagaatctgtgaacaacgacatctcctcctggacaaagggcagaagcggagaagctctgagcctcctgaagaaaagattctcccatagacccgtgcaggagaagttcgtgtgcctgaactgcggcttcgagacacacgcagccgagcaagccgccctgaacatcgccagatcctggctgttcctgcggagccaggagtacaagaaataccagacaaacaagacaaccggcaacaccgataagagagccttcgtcgagacctggcagtccttttaccggaagaagcttaaggaggtgtggaaacctgccgtgcggtctggcggatctggcggaggctccaccagccccaagaaaaagagaaaagtctaagctgccttctgcggggcttgccttctggccatgcccttcttctctcccttgcacctgtacctcttggtctttgaataaagcctgagtaggaaggctagcaaaaaaaaaaaaaaaaaaaaaaaaaaaaaaaaaaaaaaaaaaaaaaaaaaaaaaaaaaaaaaaaaaaaaaaaaaaaaaaagcccagccggctccccaacctctaccgaggagggcacctctgagtccgccacccccgagagcggccctggcacctccaccgagcccagcgagggcagcgcacccggcagccctgccggcagccccacctccacagaggagggaaccagcaccgagcccagcgaaggcagcgccccaggcaccagcaccgagcctagtgagcaggagattaaacggatcaacaagatcagaagaagacttgtgaaagacagcaacaccaagaaggccggcaagacaggccccatgaaaaccctgctggttagagtgatgacacccgatctgagagagcggctggaaaacctgagaaagaagcctgaaaatatcccccagcccatcagcaatacatctagagccaacctgaataagctgctgaccgattacaccgaaatgaagaaggcgatcctgcatgtgtactgggaagagttccagaaggaccctgtgggcctgatgagccgggtggcccagcctgccagcaagaagatcgatcagaacaagctgaaacctgagatggacgagaagggcaacctgaccaccgccggctttgcctgctctcagtgtggccagcccctgttcgtgtacaagctggagcaggtgtctgagaagggcaaggcttacaccaactacttcggacggtgcaatgtggccgagcacgaaaagctgatcctgctggcccagctgaagcccgagaaggatagcgacgaagccgtgacatatagcctgggaaagtttgggcagagggccctggatttctacagcattcatgtgaccaaggagtccacccaccccgtgaagcccctggcccagatcgccggaaacagatacgcctccggacctgtgggaaaggccctgagcgacgcatgtatgggcacaatcgcctccttcctgtctaagtaccaggacatcatcatcgaacaccagaaggtggtgaagggcaaccagaagagactggagagcctgcgggagctggccggcaaggaaaacctggaataccctagcgtgaccctgccacctcagcctcacaccaaggagggcgttgatgcctacaacgaagtgatcgcccgggtgcgaatgtgggtgaacctgaacctgtggcagaagctgaagctaagcagagatgatgccaagcctctgctgagactgaagggattcccttcctttcctctggtcgagagacaggccaacgaagtggactggtgggacatggtgtgtaacgtgaagaagctgatcaacgagaaaaaggaggatggcaaggtgttttggcagaatctggctggctacaagagacaggaagccctgagaccatacctgagcagcgaggaagatcggaagaagggaaagaaattcgctcggtaccagctgggcgacctgctgctgcacctggaaaagaagcacggcgaggactggggaaaggtgtacgacgaggcctgggagcggattgacaagaaagtggaaggcctgagcaagcacatcaagctggaagaggaacggagaagcgaggacgcccagagcaaggccgccctgaccgactggctgcgggctaaggccagcttcgtgatcgagggcctgaaggaggccgacaaggacgagttctgcagatgcgagctgaagctgcagaagtggtacggggacctgcggggaaagcccttcgccatcgaagccgagaacagcatcctggacatcagcggcttcagcaagcagtacaactgtgccttcatctggcagaaggacggcgtgaagaagctgaacctgtacctgatcatcaactacttcaagggcggcaagctgcggttcaagaagatcaaacctgaagccttcgaagccaacagattctacaccgtgatcaacaaaaagagcggcgagatcgtgcccatggaggtgaacttcaacttcgacgaccccaacctgatcatcctgcctctggcctttggcaagagacagggcagagaattcatctggaacgacctgctgtccctggaaaccggcagcctgaagctggccaacggaagagtgatcgagaagacactgtacaacagaagaacccggcaggatgagcctgccctgttcgtggccctgaccttcgagcggcgggaggtcctggactcctccaatatcaaaccaatgaacctgatcggcgtggcaagaggcgaaaacatccccgccgtgatcgccctgaccgaccccgagggctgcccactgagccggtttaaggatagcctgggaaacccaacccacatcctgagaatcggcgagagctataaggagaagcagcggaccatccaggccaagaaggaggtggagcagcggagagccggcggctacagccggaagtacgccagcaaagccaagaatctggcagacgatatggtgagaaacaccgctagagatctgctgtactacgccgtgacccaggatgccatgctgatcttcgccaacctgagccggggcttcggccggcagggcaagcggaccttcatggccgagagacagtacacacggatggaggactggctgaccgccaagctggcctacgagggcctgagcaagacctacctgtccaagacactggcccagtacacctccaagacatgcagcaactgtgggtttaccatcaccagcgccgactacgacagggtgctggagaagctgaagaagacagcaacaggctggatgaccacaattaacggcaaggagctgaaggtggagggccagattacctactacaacagatacaagagacagaacgtagtcaaggacctgtccgtcgagctggatagactgagcgaagaatctgtgaacaacgacatctcctcctggacaaagggcagaagcggagaagctctgagcctcctgaagaaaagattctcccatagacccgtgcaggagaagttcgtgtgcctgaactgcggcttcgagacacacgcagccgagcaagccgccctgaacatcgccagatcctggctgttcctgcggagccaggagtacaagaaataccagacaaacaagacaaccggcaacaccgataagagagccttcgtcgagacctggcagtccttttaccggaagaagcttaaggaggtgtggaaacctgccgtgcggtctggcggatctggcggaggctccaccagccccaagaaaaagagaaaagtctaagctgccttctgcggggcttgccttctggccatgcccttcttctctcccttgcacctgtacctcttggtctttgaataaagcctgagtaggaaggctagcaaaaaaaaaaaaaaaaaaaaaaaaaaaaaaaaaaaaaaaaaaaaaaaaaaaaaaaaaaaaaaaaaaaaaaaaaaaaaaaa

SEQ ID NO: 9365 - RNA, 8787 nt, synthetic construct
  source 1..8787: mol_type = other RNA
aggaaataagagagaaaagaagagtaagaagaaatataagagccaccatggcccctaagaagaagcgtaaagtgagccggatgaaccacgaccaggagttcgacccccctaaggtgtaccctcccgtccccgccgagaagagaaagcccatccgggtcctgagcctgttcgatggcatcgccaccggtctgctggtgctgaaggacctgggcatccaggtggataggtacattgcctccgaggtgtgcgaggactccatcaccgtgggaatggtgcgtcatcagggcaagatcatgtacgtgggcgacgtgcggagcgtgacacagaagcatatccaggagtggggccctttcgacctggtgatcggcggcagcccttgcaatgacctgagcatcgtgaacccagcccggaagggcctgtacgagggaaccggcagactgttcttcgagttttacagactgctgcacgacgcccggcctaaggaaggcgacgaccggcccttcttttggctgttcgagaatgtggtggccatgggagtcagcgacaagcgggatattagccggttcctggagagcaaccccgtgatgatcgatgccaaggaagtgagcgccgcccaccgggccagatacttctggggcaatctgcctggcatgaacagacccctggccagcaccgtgaacgacaagctggagctgcaggagtgcctggagcacggccggatcgccaagttcagcaaggtgagaaccatcaccacccgaagcaacagcatcaaacaaggcaaggaccagcactttcctgtgttcatgaacgagaaggaggacatcctgtggtgtaccgagatggagagagtgttcgggttcccagtccactacacagatgtcagcaacatgtctagactggccagacagagactgctgggaagaagctggtccgtccctgtgatcagacacctgttcgcccctctgaaggagtacttcgcctgcgtgagcagcggcaacagcaacgccaacagccggggccccagcttctctagcggcctggtgccactgtccctgagagggagccacatgggccccatggagatctacaaaaccgtgagcgcctggaagcggcagcctgtgcgcgtgctgagcctgtttcggaatatcgataaagtcctgaaaagcctgggattcctggagagcggctctggctccggcggtggcaccctgaagtacgtggaggatgtgacaaacgtggtcagacgggatgtggagaagtggggccccttcgatctggtgtacggcagcacccaacccctgggcagctcttgtgaccggtgccctggctggtacatgtttcagttccaccggatcctgcagtacgccctgccgagacaggagtcccagcggccattcttttggattttcatggacaacttgctgctgaccgaggatgaccaggaaactaccactcggttcctgcagaccgaagccgtgaccctgcaggacgtgagaggccgggactaccagaacgccatgcgggtgtggtccaacatccctggactgaaaagcaagcacgcacctctgacccctaaagaagaggagtacctgcaggcccaggtgcggagcagaagcaagctggacgcccctaaggtggatctgctggtgaagaattgcctcctgcccctgagagagtacttcaagtatttcagccagaatagtctgcccctgggaggcagcggcggcggcaccgagggccccctgaccttcagggacgtggccatcgagttcagccaggaggagtggaagttcctggtgcccgcccagagggccctgtacagggacgtgatgctggagacctacaggaacctggtgttcctgggcacctgccccagcgacctgagcgtgctgagctggctggagcagggcagggagctgtggaccgtgaacggccccgaggagatcagcaggcccgccaacgagtgggcctgcggcggcccaagcagcggcgcccctcctcccagcggcggcaggcggcccaagcagcggcgcccctcctcccagcggcggcagcccagccggctccccaacctctaccgaggagggcacctctgagtccgccacccccgagagcggccctggcacctccaccgagcccagcgagggcagcgcacccggcagccctgccggcagccccacctccacagaggagggaaccagcaccgagcccagcgaaggcagcgccccaggcaccagcaccgagcctagtgagcaggagattaaacggatcaacaagatcagaagaagacttgtgaaagacagcaacaccaagaaggccggcaagacaggccccatgaaaaccctgctggttagagtgatgacacccgatctgagagagcggctggaaaacctgagaaagaagcctgaaaatatcccccagcccatcagcaatacatctagagccaacctgaataagctgctgaccgattacaccgaaatgaagaaggcgatcctgcatgtgtactgggaagagttccagaaggaccctgtgggcctgatgagccgggtggcccagcctgccagcaagaagatcgatcagaacaagctgaaacctgagatggacgagaagggcaacctgaccaccgccggctttgcctgctctcagtgtggccagcccctgttcgtgtacaagctggagcaggtgtctgagaagggcaaggcttacaccaactacttcggacggtgcaatgtggccgagcacgaaaagctgatcctgctggcccagctgaagcccgagaaggatagcgacgaagccgtgacatatagcctgggaaagtttgggcagagggccctggatttctacagcattcatgtgaccaaggagtccacccaccccgtgaagcccctggcccagatcgccggaaacagatacgcctccggacctgtgggaaaggccctgagcgacgcatgtatgggcacaatcgcctccttcctgtctaagtaccaggacatcatcatcgaacaccagaaggtggtgaagggcaaccagaagagactggagagcctgcgggagctggccggcaaggaaaacctggaataccctagcgtgaccctgccacctcagcctcacaccaaggagggcgttgatgcctacaacgaagtgatcgcccgggtgcgaatgtgggtgaacctgaacctgtggcagaagctgaagctaagcagagatgatgccaagcctctgctgagactgaagggattcccttcctttcctctggtcgagagacaggccaacgaagtggactggtgggacatggtgtgtaacgtgaagaagctgatcaacgagaaaaaggaggatggcaaggtgttttggcagaatctggctggctacaagagacaggaagccctgagaccatacctgagcagcgaggaagatcggaagaagggaaagaaattcgctcggtaccagctgggcgacctgctgctgcacctggaaaagaagcacggcgaggactggggaaaggtgtacgacgaggcctgggagcggattgacaagaaagtggaaggcctgagcaagcacatcaagctggaagaggaacggagaagcgaggacgcccagagcaaggccgccctgaccgactggctgcgggctaaggccagcttcgtgatcgagggcctgaaggaggccgacaaggacgagttctgcagatgcgagctgaagctgcagaagtggtacggggacctgcggggaaagcccttcgccatcgaagccgagaacagcatcctggacatcagcggcttcagcaagcagtacaactgtgccttcatctggcagaaggacggcgtgaagaagctgaacctgtacctgatcatcaactacttcaagggcggcaagctgcggttcaagaagatcaaacctgaagccttcgaagccaacagattctacaccgtgatcaacaaaaagagcggcgagatcgtgcccatggaggtgaacttcaacttcgacgaccccaacctgatcatcctgcctctggcctttggcaagagacagggcagagaattcatctggaacgacctgctgtccctggaaaccggcagcctgaagctggccaacggaagagtgatcgagaagacactgtacaacagaagaacccggcaggatgagcctgccctgttcgtggccctgaccttcgagcggcgggaggtcctggactcctccaatatcaaaccaatgaacctgatcggcgtggcaagaggcgaaaacatccccgccgtgatcgccctgaccgaccccgagggctgcccactgagccggtttaaggatagcctgggaaacccaacccacatcctgagaatcggcgagagctataaggagaagcagcggaccatccaggccaagaaggaggtggagcagcggagagccggcggctacagccggaagtacgccagcaaagccaagaatctggcagacgatatggtgagaaacaccgctagagatctgctgtactacgccgtgacccaggatgccatgctgatcttcgccaacctgagccggggcttcggccggcagggcaagcggaccttcatggccgagagacagtacacacggatggaggactggctgaccgccaagctggcctacgagggcctgagcaagacctacctgtccaagacactggcccagtacacctccaagacatgcagcaactgtgggtttaccatcaccagcgccgactacgacagggtgctggagaagctgaagaagacagcaacaggctggatgaccacaattaacggcaaggagctgaaggtggagggccagattacctactacaacagatacaagagacagaacgtagtcaaggacctgtccgtcgagctggatagactgagcgaagaatctgtgaacaacgacatctcctcctggacaaagggcagaagcggagaagctctgagcctcctgaagaaaagattctcccatagacccgtgcaggagaagttcgtgtgcctgaactgcggcttcgagacacacgcagccgagcaagccgccctgaacatcgccagatcctggctgttcctgcggagccaggagtacaagaaataccagacaaacaagacaaccggcaacaccgataagagagccttcgtcgagacctggcagtccttttaccggaagaagcttaaggaggtgtggaaacctgccgtgcggtctggcggatctggcggaggctccaccagccccaagaaaaagagaaaagtctaagctgccttctgcggggcttgccttctggccatgcccttcttctctcccttgcacctgtacctcttggtctttgaataaagcctgagtaggaaggctagcaaaaaaaaaaaaaaaaaaaaaaaaaaaaaaaaaaaaaaaaaaaaaaaaaaaaaaaaaaaaaaaaaaaaaaaaaaaaaaaagcccagccggctccccaacctctaccgaggagggcacctctgagtccgccacccccgagagcggccctggcacctccaccgagcccagcgagggcagcgcacccggcagccctgccggcagccccacctccacagaggagggaaccagcaccgagcccagcgaaggcagcgccccaggcaccagcaccgagcctagtgagcaggagattaaacggatcaacaagatcagaagaagacttgtgaaagacagcaacaccaagaaggccggcaagacaggccccatgaaaaccctgctggttagagtgatgacacccgatctgagagagcggctggaaaacctgagaaagaagcctgaaaatatcccccagcccatcagcaatacatctagagccaacctgaataagctgctgaccgattacaccgaaatgaagaaggcgatcctgcatgtgtactgggaagagttccagaaggaccctgtgggcctgatgagccgggtggcccagcctgccagcaagaagatcgatcagaacaagctgaaacctgagatggacgagaagggcaacctgaccaccgccggctttgcctgctctcagtgtggccagcccctgttcgtgtacaagctggagcaggtgtctgagaagggcaaggcttacaccaactacttcggacggtgcaatgtggccgagcacgaaaagctgatcctgctggcccagctgaagcccgagaaggatagcgacgaagccgtgacatatagcctgggaaagtttgggcagagggccctggatttctacagcattcatgtgaccaaggagtccacccaccccgtgaagcccctggcccagatcgccggaaacagatacgcctccggacctgtgggaaaggccctgagcgacgcatgtatgggcacaatcgcctccttcctgtctaagtaccaggacatcatcatcgaacaccagaaggtggtgaagggcaaccagaagagactggagagcctgcgggagctggccggcaaggaaaacctggaataccctagcgtgaccctgccacctcagcctcacaccaaggagggcgttgatgcctacaacgaagtgatcgcccgggtgcgaatgtgggtgaacctgaacctgtggcagaagctgaagctaagcagagatgatgccaagcctctgctgagactgaagggattcccttcctttcctctggtcgagagacaggccaacgaagtggactggtgggacatggtgtgtaacgtgaagaagctgatcaacgagaaaaaggaggatggcaaggtgttttggcagaatctggctggctacaagagacaggaagccctgagaccatacctgagcagcgaggaagatcggaagaagggaaagaaattcgctcggtaccagctgggcgacctgctgctgcacctggaaaagaagcacggcgaggactggggaaaggtgtacgacgaggcctgggagcggattgacaagaaagtggaaggcctgagcaagcacatcaagctggaagaggaacggagaagcgaggacgcccagagcaaggccgccctgaccgactggctgcgggctaaggccagcttcgtgatcgagggcctgaaggaggccgacaaggacgagttctgcagatgcgagctgaagctgcagaagtggtacggggacctgcggggaaagcccttcgccatcgaagccgagaacagcatcctggacatcagcggcttcagcaagcagtacaactgtgccttcatctggcagaaggacggcgtgaagaagctgaacctgtacctgatcatcaactacttcaagggcggcaagctgcggttcaagaagatcaaacctgaagccttcgaagccaacagattctacaccgtgatcaacaaaaagagcggcgagatcgtgcccatggaggtgaacttcaacttcgacgaccccaacctgatcatcctgcctctggcctttggcaagagacagggcagagaattcatctggaacgacctgctgtccctggaaaccggcagcctgaagctggccaacggaagagtgatcgagaagacactgtacaacagaagaacccggcaggatgagcctgccctgttcgtggccctgaccttcgagcggcgggaggtcctggactcctccaatatcaaaccaatgaacctgatcggcgtggcaagaggcgaaaacatccccgccgtgatcgccctgaccgaccccgagggctgcccactgagccggtttaaggatagcctgggaaacccaacccacatcctgagaatcggcgagagctataaggagaagcagcggaccatccaggccaagaaggaggtggagcagcggagagccggcggctacagccggaagtacgccagcaaagccaagaatctggcagacgatatggtgagaaacaccgctagagatctgctgtactacgccgtgacccaggatgccatgctgatcttcgccaacctgagccggggcttcggccggcagggcaagcggaccttcatggccgagagacagtacacacggatggaggactggctgaccgccaagctggcctacgagggcctgagcaagacctacctgtccaagacactggcccagtacacctccaagacatgcagcaactgtgggtttaccatcaccagcgccgactacgacagggtgctggagaagctgaagaagacagcaacaggctggatgaccacaattaacggcaaggagctgaaggtggagggccagattacctactacaacagatacaagagacagaacgtagtcaaggacctgtccgtcgagctggatagactgagcgaagaatctgtgaacaacgacatctcctcctggacaaagggcagaagcggagaagctctgagcctcctgaagaaaagattctcccatagacccgtgcaggagaagttcgtgtgcctgaactgcggcttcgagacacacgcagccgagcaagccgccctgaacatcgccagatcctggctgttcctgcggagccaggagtacaagaaataccagacaaacaagacaaccggcaacaccgataagagagccttcgtcgagacctggcagtccttttaccggaagaagcttaaggaggtgtggaaacctgccgtgcggtctggcggatctggcggaggctccaccagccccaagaaaaagagaaaagtctaagctgccttctgcggggcttgccttctggccatgcccttcttctctcccttgcacctgtacctcttggtctttgaataaagcctgagtaggaaggctagcaaaaaaaaaaaaaaaaaaaaaaaaaaaaaaaaaaaaaaaaaaaaaaaaaaaaaaaaaaaaaaaaaaaaaaaaaaaaaaaa

SEQ ID NO: 9366 - RNA, 8787 nt, synthetic construct
  source 1..8787: mol_type = other RNA
aggaaataagagagaaaagaagagtaagaagaaatataagagccaccatggcccctaagaagaagcgtaaagtgagccggatgaaccacgaccaggagttcgacccccctaaggtgtaccctcccgtccccgccgagaagagaaagcccatccgggtcctgagcctgttcgatggcatcgccaccggtctgctggtgctgaaggacctgggcatccaggtggataggtacattgcctccgaggtgtgcgaggactccatcaccgtgggaatggtgcgtcatcagggcaagatcatgtacgtgggcgacgtgcggagcgtgacacagaagcatatccaggagtggggccctttcgacctggtgatcggcggcagcccttgcaatgacctgagcatcgtgaacccagcccggaagggcctgtacgagggaaccggcagactgttcttcgagttttacagactgctgcacgacgcccggcctaaggaaggcgacgaccggcccttcttttggctgttcgagaatgtggtggccatgggagtcagcgacaagcgggatattagccggttcctggagagcaaccccgtgatgatcgatgccaaggaagtgagcgccgcccaccgggccagatacttctggggcaatctgcctggcatgaacagacccctggccagcaccgtgaacgacaagctggagctgcaggagtgcctggagcacggccggatcgccaagttcagcaaggtgagaaccatcaccacccgaagcaacagcatcaaacaaggcaaggaccagcactttcctgtgttcatgaacgagaaggaggacatcctgtggtgtaccgagatggagagagtgttcgggttcccagtccactacacagatgtcagcaacatgtctagactggccagacagagactgctgggaagaagctggtccgtccctgtgatcagacacctgttcgcccctctgaaggagtacttcgcctgcgtgagcagcggcaacagcaacgccaacagccggggccccagcttctctagcggcctggtgccactgtccctgagagggagccacatgggccccatggagatctacaaaaccgtgagcgcctggaagcggcagcctgtgcgcgtgctgagcctgtttcggaatatcgataaagtcctgaaaagcctgggattcctggagagcggctctggctccggcggtggcaccctgaagtacgtggaggatgtgacaaacgtggtcagacgggatgtggagaagtggggccccttcgatctggtgtacggcagcacccaacccctgggcagctcttgtgaccggtgccctggctggtacatgtttcagttccaccggatcctgcagtacgccctgccgagacaggagtcccagcggccattcttttggattttcatggacaacttgctgctgaccgaggatgaccaggaaactaccactcggttcctgcagaccgaagccgtgaccctgcaggacgtgagaggccgggactaccagaacgccatgcgggtgtggtccaacatccctggactgaaaagcaagcacgcacctctgacccctaaagaagaggagtacctgcaggcccaggtgcggagcagaagcaagctggacgcccctaaggtggatctgctggtgaagaattgcctcctgcccctgagagagtacttcaagtatttcagccagaatagtctgcccctgggaggcagcggcggcggcgccgagggccacgtgaccttcgaggacgtggccgtgtacttcagctgggaggagtggggcctgctggacgaggcccagaggctgctgtacagggacgtgatgctggagaacctggccctgatggccagcctgggcctggccagcagcaggacccacgagatcacccagctggagtggtggagggagcccttcctgcccccctgcggcgtggtgaccgccgccatgcccaggggctggaggaggggcggcccaagcagcggcgcccctcctcccagcggcggcaggcggcccaagcagcggcgcccctcctcccagcggcggcagcccagccggctccccaacctctaccgaggagggcacctctgagtccgccacccccgagagcggccctggcacctccaccgagcccagcgagggcagcgcacccggcagccctgccggcagccccacctccacagaggagggaaccagcaccgagcccagcgaaggcagcgccccaggcaccagcaccgagcctagtgagcaggagattaaacggatcaacaagatcagaagaagacttgtgaaagacagcaacaccaagaaggccggcaagacaggccccatgaaaaccctgctggttagagtgatgacacccgatctgagagagcggctggaaaacctgagaaagaagcctgaaaatatcccccagcccatcagcaatacatctagagccaacctgaataagctgctgaccgattacaccgaaatgaagaaggcgatcctgcatgtgtactgggaagagttccagaaggaccctgtgggcctgatgagccgggtggcccagcctgccagcaagaagatcgatcagaacaagctgaaacctgagatggacgagaagggcaacctgaccaccgccggctttgcctgctctcagtgtggccagcccctgttcgtgtacaagctggagcaggtgtctgagaagggcaaggcttacaccaactacttcggacggtgcaatgtggccgagcacgaaaagctgatcctgctggcccagctgaagcccgagaaggatagcgacgaagccgtgacatatagcctgggaaagtttgggcagagggccctggatttctacagcattcatgtgaccaaggagtccacccaccccgtgaagcccctggcccagatcgccggaaacagatacgcctccggacctgtgggaaaggccctgagcgacgcatgtatgggcacaatcgcctccttcctgtctaagtaccaggacatcatcatcgaacaccagaaggtggtgaagggcaaccagaagagactggagagcctgcgggagctggccggcaaggaaaacctggaataccctagcgtgaccctgccacctcagcctcacaccaaggagggcgttgatgcctacaacgaagtgatcgcccgggtgcgaatgtgggtgaacctgaacctgtggcagaagctgaagctaagcagagatgatgccaagcctctgctgagactgaagggattcccttcctttcctctggtcgagagacaggccaacgaagtggactggtgggacatggtgtgtaacgtgaagaagctgatcaacgagaaaaaggaggatggcaaggtgttttggcagaatctggctggctacaagagacaggaagccctgagaccatacctgagcagcgaggaagatcggaagaagggaaagaaattcgctcggtaccagctgggcgacctgctgctgcacctggaaaagaagcacggcgaggactggggaaaggtgtacgacgaggcctgggagcggattgacaagaaagtggaaggcctgagcaagcacatcaagctggaagaggaacggagaagcgaggacgcccagagcaaggccgccctgaccgactggctgcgggctaaggccagcttcgtgatcgagggcctgaaggaggccgacaaggacgagttctgcagatgcgagctgaagctgcagaagtggtacggggacctgcggggaaagcccttcgccatcgaagccgagaacagcatcctggacatcagcggcttcagcaagcagtacaactgtgccttcatctggcagaaggacggcgtgaagaagctgaacctgtacctgatcatcaactacttcaagggcggcaagctgcggttcaagaagatcaaacctgaagccttcgaagccaacagattctacaccgtgatcaacaaaaagagcggcgagatcgtgcccatggaggtgaacttcaacttcgacgaccccaacctgatcatcctgcctctggcctttggcaagagacagggcagagaattcatctggaacgacctgctgtccctggaaaccggcagcctgaagctggccaacggaagagtgatcgagaagacactgtacaacagaagaacccggcaggatgagcctgccctgttcgtggccctgaccttcgagcggcgggaggtcctggactcctccaatatcaaaccaatgaacctgatcggcgtggcaagaggcgaaaacatccccgccgtgatcgccctgaccgaccccgagggctgcccactgagccggtttaaggatagcctgggaaacccaacccacatcctgagaatcggcgagagctataaggagaagcagcggaccatccaggccaagaaggaggtggagcagcggagagccggcggctacagccggaagtacgccagcaaagccaagaatctggcagacgatatggtgagaaacaccgctagagatctgctgtactacgccgtgacccaggatgccatgctgatcttcgccaacctgagccggggcttcggccggcagggcaagcggaccttcatggccgagagacagtacacacggatggaggactggctgaccgccaagctggcctacgagggcctgagcaagacctacctgtccaagacactggcccagtacacctccaagacatgcagcaactgtgggtttaccatcaccagcgccgactacgacagggtgctggagaagctgaagaagacagcaacaggctggatgaccacaattaacggcaaggagctgaaggtggagggccagattacctactacaacagatacaagagacagaacgtagtcaaggacctgtccgtcgagctggatagactgagcgaagaatctgtgaacaacgacatctcctcctggacaaagggcagaagcggagaagctctgagcctcctgaagaaaagattctcccatagacccgtgcaggagaagttcgtgtgcctgaactgcggcttcgagacacacgcagccgagcaagccgccctgaacatcgccagatcctggctgttcctgcggagccaggagtacaagaaataccagacaaacaagacaaccggcaacaccgataagagagccttcgtcgagacctggcagtccttttaccggaagaagcttaaggaggtgtggaaacctgccgtgcggtctggcggatctggcggaggctccaccagccccaagaaaaagagaaaagtctaagctgccttctgcggggcttgccttctggccatgcccttcttctctcccttgcacctgtacctcttggtctttgaataaagcctgagtaggaaggctagcaaaaaaaaaaaaaaaaaaaaaaaaaaaaaaaaaaaaaaaaaaaaaaaaaaaaaaaaaaaaaaaaaaaaaaaaaaaaaaaagcccagccggctccccaacctctaccgaggagggcacctctgagtccgccacccccgagagcggccctggcacctccaccgagcccagcgagggcagcgcacccggcagccctgccggcagccccacctccacagaggagggaaccagcaccgagcccagcgaaggcagcgccccaggcaccagcaccgagcctagtgagcaggagattaaacggatcaacaagatcagaagaagacttgtgaaagacagcaacaccaagaaggccggcaagacaggccccatgaaaaccctgctggttagagtgatgacacccgatctgagagagcggctggaaaacctgagaaagaagcctgaaaatatcccccagcccatcagcaatacatctagagccaacctgaataagctgctgaccgattacaccgaaatgaagaaggcgatcctgcatgtgtactgggaagagttccagaaggaccctgtgggcctgatgagccgggtggcccagcctgccagcaagaagatcgatcagaacaagctgaaacctgagatggacgagaagggcaacctgaccaccgccggctttgcctgctctcagtgtggccagcccctgttcgtgtacaagctggagcaggtgtctgagaagggcaaggcttacaccaactacttcggacggtgcaatgtggccgagcacgaaaagctgatcctgctggcccagctgaagcccgagaaggatagcgacgaagccgtgacatatagcctgggaaagtttgggcagagggccctggatttctacagcattcatgtgaccaaggagtccacccaccccgtgaagcccctggcccagatcgccggaaacagatacgcctccggacctgtgggaaaggccctgagcgacgcatgtatgggcacaatcgcctccttcctgtctaagtaccaggacatcatcatcgaacaccagaaggtggtgaagggcaaccagaagagactggagagcctgcgggagctggccggcaaggaaaacctggaataccctagcgtgaccctgccacctcagcctcacaccaaggagggcgttgatgcctacaacgaagtgatcgcccgggtgcgaatgtgggtgaacctgaacctgtggcagaagctgaagctaagcagagatgatgccaagcctctgctgagactgaagggattcccttcctttcctctggtcgagagacaggccaacgaagtggactggtgggacatggtgtgtaacgtgaagaagctgatcaacgagaaaaaggaggatggcaaggtgttttggcagaatctggctggctacaagagacaggaagccctgagaccatacctgagcagcgaggaagatcggaagaagggaaagaaattcgctcggtaccagctgggcgacctgctgctgcacctggaaaagaagcacggcgaggactggggaaaggtgtacgacgaggcctgggagcggattgacaagaaagtggaaggcctgagcaagcacatcaagctggaagaggaacggagaagcgaggacgcccagagcaaggccgccctgaccgactggctgcgggctaaggccagcttcgtgatcgagggcctgaaggaggccgacaaggacgagttctgcagatgcgagctgaagctgcagaagtggtacggggacctgcggggaaagcccttcgccatcgaagccgagaacagcatcctggacatcagcggcttcagcaagcagtacaactgtgccttcatctggcagaaggacggcgtgaagaagctgaacctgtacctgatcatcaactacttcaagggcggcaagctgcggttcaagaagatcaaacctgaagccttcgaagccaacagattctacaccgtgatcaacaaaaagagcggcgagatcgtgcccatggaggtgaacttcaacttcgacgaccccaacctgatcatcctgcctctggcctttggcaagagacagggcagagaattcatctggaacgacctgctgtccctggaaaccggcagcctgaagctggccaacggaagagtgatcgagaagacactgtacaacagaagaacccggcaggatgagcctgccctgttcgtggccctgaccttcgagcggcgggaggtcctggactcctccaatatcaaaccaatgaacctgatcggcgtggcaagaggcgaaaacatccccgccgtgatcgccctgaccgaccccgagggctgcccactgagccggtttaaggatagcctgggaaacccaacccacatcctgagaatcggcgagagctataaggagaagcagcggaccatccaggccaagaaggaggtggagcagcggagagccggcggctacagccggaagtacgccagcaaagccaagaatctggcagacgatatggtgagaaacaccgctagagatctgctgtactacgccgtgacccaggatgccatgctgatcttcgccaacctgagccggggcttcggccggcagggcaagcggaccttcatggccgagagacagtacacacggatggaggactggctgaccgccaagctggcctacgagggcctgagcaagacctacctgtccaagacactggcccagtacacctccaagacatgcagcaactgtgggtttaccatcaccagcgccgactacgacagggtgctggagaagctgaagaagacagcaacaggctggatgaccacaattaacggcaaggagctgaaggtggagggccagattacctactacaacagatacaagagacagaacgtagtcaaggacctgtccgtcgagctggatagactgagcgaagaatctgtgaacaacgacatctcctcctggacaaagggcagaagcggagaagctctgagcctcctgaagaaaagattctcccatagacccgtgcaggagaagttcgtgtgcctgaactgcggcttcgagacacacgcagccgagcaagccgccctgaacatcgccagatcctggctgttcctgcggagccaggagtacaagaaataccagacaaacaagacaaccggcaacaccgataagagagccttcgtcgagacctggcagtccttttaccggaagaagcttaaggaggtgtggaaacctgccgtgcggtctggcggatctggcggaggctccaccagccccaagaaaaagagaaaagtctaagctgccttctgcggggcttgccttctggccatgcccttcttctctcccttgcacctgtacctcttggtctttgaataaagcctgagtaggaaggctagcaaaaaaaaaaaaaaaaaaaaaaaaaaaaaaaaaaaaaaaaaaaaaaaaaaaaaaaaaaaaaaaaaaaaaaaaaaaaaaaa

SEQ ID NO: 9367 - RNA, 8787 nt, synthetic construct
  source 1..8787: mol_type = other RNA
aggaaataagagagaaaagaagagtaagaagaaatataagagccaccatggcccctaagaagaagcgtaaagtgagccggatgaaccacgaccaggagttcgacccccctaaggtgtaccctcccgtccccgccgagaagagaaagcccatccgggtcctgagcctgttcgatggcatcgccaccggtctgctggtgctgaaggacctgggcatccaggtggataggtacattgcctccgaggtgtgcgaggactccatcaccgtgggaatggtgcgtcatcagggcaagatcatgtacgtgggcgacgtgcggagcgtgacacagaagcatatccaggagtggggccctttcgacctggtgatcggcggcagcccttgcaatgacctgagcatcgtgaacccagcccggaagggcctgtacgagggaaccggcagactgttcttcgagttttacagactgctgcacgacgcccggcctaaggaaggcgacgaccggcccttcttttggctgttcgagaatgtggtggccatgggagtcagcgacaagcgggatattagccggttcctggagagcaaccccgtgatgatcgatgccaaggaagtgagcgccgcccaccgggccagatacttctggggcaatctgcctggcatgaacagacccctggccagcaccgtgaacgacaagctggagctgcaggagtgcctggagcacggccggatcgccaagttcagcaaggtgagaaccatcaccacccgaagcaacagcatcaaacaaggcaaggaccagcactttcctgtgttcatgaacgagaaggaggacatcctgtggtgtaccgagatggagagagtgttcgggttcccagtccactacacagatgtcagcaacatgtctagactggccagacagagactgctgggaagaagctggtccgtccctgtgatcagacacctgttcgcccctctgaaggagtacttcgcctgcgtgagcagcggcaacagcaacgccaacagccggggccccagcttctctagcggcctggtgccactgtccctgagagggagccacatgggccccatggagatctacaaaaccgtgagcgcctggaagcggcagcctgtgcgcgtgctgagcctgtttcggaatatcgataaagtcctgaaaagcctgggattcctggagagcggctctggctccggcggtggcaccctgaagtacgtggaggatgtgacaaacgtggtcagacgggatgtggagaagtggggccccttcgatctggtgtacggcagcacccaacccctgggcagctcttgtgaccggtgccctggctggtacatgtttcagttccaccggatcctgcagtacgccctgccgagacaggagtcccagcggccattcttttggattttcatggacaacttgctgctgaccgaggatgaccaggaaactaccactcggttcctgcagaccgaagccgtgaccctgcaggacgtgagaggccgggactaccagaacgccatgcgggtgtggtccaacatccctggactgaaaagcaagcacgcacctctgacccctaaagaagaggagtacctgcaggcccaggtgcggagcagaagcaagctggacgcccctaaggtggatctgctggtgaagaattgcctcctgcccctgagagagtacttcaagtatttcagccagaatagtctgcccctgggaggcagcggcggcggcccccaggacctggtgaccttcaaggacgtggccatcgacttcagccaggaggagtgggagtggctgaaccccgcccagaggagcctgtacaggagcatgatgctggagaactaccagagcctggtgagcgtgggcctgtgcgtgagcaagccctacgtgatcagcctgctggagcagggcaaggagccctgggagatgaagagcgagatgaggaggacccccttccccgactgggagagcgtgggcggcccaagcagcggcgcccctcctcccagcggcggcaggcggcccaagcagcggcgcccctcctcccagcggcggcagcccagccggctccccaacctctaccgaggagggcacctctgagtccgccacccccgagagcggccctggcacctccaccgagcccagcgagggcagcgcacccggcagccctgccggcagccccacctccacagaggagggaaccagcaccgagcccagcgaaggcagcgccccaggcaccagcaccgagcctagtgagcaggagattaaacggatcaacaagatcagaagaagacttgtgaaagacagcaacaccaagaaggccggcaagacaggccccatgaaaaccctgctggttagagtgatgacacccgatctgagagagcggctggaaaacctgagaaagaagcctgaaaatatcccccagcccatcagcaatacatctagagccaacctgaataagctgctgaccgattacaccgaaatgaagaaggcgatcctgcatgtgtactgggaagagttccagaaggaccctgtgggcctgatgagccgggtggcccagcctgccagcaagaagatcgatcagaacaagctgaaacctgagatggacgagaagggcaacctgaccaccgccggctttgcctgctctcagtgtggccagcccctgttcgtgtacaagctggagcaggtgtctgagaagggcaaggcttacaccaactacttcggacggtgcaatgtggccgagcacgaaaagctgatcctgctggcccagctgaagcccgagaaggatagcgacgaagccgtgacatatagcctgggaaagtttgggcagagggccctggatttctacagcattcatgtgaccaaggagtccacccaccccgtgaagcccctggcccagatcgccggaaacagatacgcctccggacctgtgggaaaggccctgagcgacgcatgtatgggcacaatcgcctccttcctgtctaagtaccaggacatcatcatcgaacaccagaaggtggtgaagggcaaccagaagagactggagagcctgcgggagctggccggcaaggaaaacctggaataccctagcgtgaccctgccacctcagcctcacaccaaggagggcgttgatgcctacaacgaagtgatcgcccgggtgcgaatgtgggtgaacctgaacctgtggcagaagctgaagctaagcagagatgatgccaagcctctgctgagactgaagggattcccttcctttcctctggtcgagagacaggccaacgaagtggactggtgggacatggtgtgtaacgtgaagaagctgatcaacgagaaaaaggaggatggcaaggtgttttggcagaatctggctggctacaagagacaggaagccctgagaccatacctgagcagcgaggaagatcggaagaagggaaagaaattcgctcggtaccagctgggcgacctgctgctgcacctggaaaagaagcacggcgaggactggggaaaggtgtacgacgaggcctgggagcggattgacaagaaagtggaaggcctgagcaagcacatcaagctggaagaggaacggagaagcgaggacgcccagagcaaggccgccctgaccgactggctgcgggctaaggccagcttcgtgatcgagggcctgaaggaggccgacaaggacgagttctgcagatgcgagctgaagctgcagaagtggtacggggacctgcggggaaagcccttcgccatcgaagccgagaacagcatcctggacatcagcggcttcagcaagcagtacaactgtgccttcatctggcagaaggacggcgtgaagaagctgaacctgtacctgatcatcaactacttcaagggcggcaagctgcggttcaagaagatcaaacctgaagccttcgaagccaacagattctacaccgtgatcaacaaaaagagcggcgagatcgtgcccatggaggtgaacttcaacttcgacgaccccaacctgatcatcctgcctctggcctttggcaagagacagggcagagaattcatctggaacgacctgctgtccctggaaaccggcagcctgaagctggccaacggaagagtgatcgagaagacactgtacaacagaagaacccggcaggatgagcctgccctgttcgtggccctgaccttcgagcggcgggaggtcctggactcctccaatatcaaaccaatgaacctgatcggcgtggcaagaggcgaaaacatccccgccgtgatcgccctgaccgaccccgagggctgcccactgagccggtttaaggatagcctgggaaacccaacccacatcctgagaatcggcgagagctataaggagaagcagcggaccatccaggccaagaaggaggtggagcagcggagagccggcggctacagccggaagtacgccagcaaagccaagaatctggcagacgatatggtgagaaacaccgctagagatctgctgtactacgccgtgacccaggatgccatgctgatcttcgccaacctgagccggggcttcggccggcagggcaagcggaccttcatggccgagagacagtacacacggatggaggactggctgaccgccaagctggcctacgagggcctgagcaagacctacctgtccaagacactggcccagtacacctccaagacatgcagcaactgtgggtttaccatcaccagcgccgactacgacagggtgctggagaagctgaagaagacagcaacaggctggatgaccacaattaacggcaaggagctgaaggtggagggccagattacctactacaacagatacaagagacagaacgtagtcaaggacctgtccgtcgagctggatagactgagcgaagaatctgtgaacaacgacatctcctcctggacaaagggcagaagcggagaagctctgagcctcctgaagaaaagattctcccatagacccgtgcaggagaagttcgtgtgcctgaactgcggcttcgagacacacgcagccgagcaagccgccctgaacatcgccagatcctggctgttcctgcggagccaggagtacaagaaataccagacaaacaagacaaccggcaacaccgataagagagccttcgtcgagacctggcagtccttttaccggaagaagcttaaggaggtgtggaaacctgccgtgcggtctggcggatctggcggaggctccaccagccccaagaaaaagagaaaagtctaagctgccttctgcggggcttgccttctggccatgcccttcttctctcccttgcacctgtacctcttggtctttgaataaagcctgagtaggaaggctagcaaaaaaaaaaaaaaaaaaaaaaaaaaaaaaaaaaaaaaaaaaaaaaaaaaaaaaaaaaaaaaaaaaaaaaaaaaaaaaaagcccagccggctccccaacctctaccgaggagggcacctctgagtccgccacccccgagagcggccctggcacctccaccgagcccagcgagggcagcgcacccggcagccctgccggcagccccacctccacagaggagggaaccagcaccgagcccagcgaaggcagcgccccaggcaccagcaccgagcctagtgagcaggagattaaacggatcaacaagatcagaagaagacttgtgaaagacagcaacaccaagaaggccggcaagacaggccccatgaaaaccctgctggttagagtgatgacacccgatctgagagagcggctggaaaacctgagaaagaagcctgaaaatatcccccagcccatcagcaatacatctagagccaacctgaataagctgctgaccgattacaccgaaatgaagaaggcgatcctgcatgtgtactgggaagagttccagaaggaccctgtgggcctgatgagccgggtggcccagcctgccagcaagaagatcgatcagaacaagctgaaacctgagatggacgagaagggcaacctgaccaccgccggctttgcctgctctcagtgtggccagcccctgttcgtgtacaagctggagcaggtgtctgagaagggcaaggcttacaccaactacttcggacggtgcaatgtggccgagcacgaaaagctgatcctgctggcccagctgaagcccgagaaggatagcgacgaagccgtgacatatagcctgggaaagtttgggcagagggccctggatttctacagcattcatgtgaccaaggagtccacccaccccgtgaagcccctggcccagatcgccggaaacagatacgcctccggacctgtgggaaaggccctgagcgacgcatgtatgggcacaatcgcctccttcctgtctaagtaccaggacatcatcatcgaacaccagaaggtggtgaagggcaaccagaagagactggagagcctgcgggagctggccggcaaggaaaacctggaataccctagcgtgaccctgccacctcagcctcacaccaaggagggcgttgatgcctacaacgaagtgatcgcccgggtgcgaatgtgggtgaacctgaacctgtggcagaagctgaagctaagcagagatgatgccaagcctctgctgagactgaagggattcccttcctttcctctggtcgagagacaggccaacgaagtggactggtgggacatggtgtgtaacgtgaagaagctgatcaacgagaaaaaggaggatggcaaggtgttttggcagaatctggctggctacaagagacaggaagccctgagaccatacctgagcagcgaggaagatcggaagaagggaaagaaattcgctcggtaccagctgggcgacctgctgctgcacctggaaaagaagcacggcgaggactggggaaaggtgtacgacgaggcctgggagcggattgacaagaaagtggaaggcctgagcaagcacatcaagctggaagaggaacggagaagcgaggacgcccagagcaaggccgccctgaccgactggctgcgggctaaggccagcttcgtgatcgagggcctgaaggaggccgacaaggacgagttctgcagatgcgagctgaagctgcagaagtggtacggggacctgcggggaaagcccttcgccatcgaagccgagaacagcatcctggacatcagcggcttcagcaagcagtacaactgtgccttcatctggcagaaggacggcgtgaagaagctgaacctgtacctgatcatcaactacttcaagggcggcaagctgcggttcaagaagatcaaacctgaagccttcgaagccaacagattctacaccgtgatcaacaaaaagagcggcgagatcgtgcccatggaggtgaacttcaacttcgacgaccccaacctgatcatcctgcctctggcctttggcaagagacagggcagagaattcatctggaacgacctgctgtccctggaaaccggcagcctgaagctggccaacggaagagtgatcgagaagacactgtacaacagaagaacccggcaggatgagcctgccctgttcgtggccctgaccttcgagcggcgggaggtcctggactcctccaatatcaaaccaatgaacctgatcggcgtggcaagaggcgaaaacatccccgccgtgatcgccctgaccgaccccgagggctgcccactgagccggtttaaggatagcctgggaaacccaacccacatcctgagaatcggcgagagctataaggagaagcagcggaccatccaggccaagaaggaggtggagcagcggagagccggcggctacagccggaagtacgccagcaaagccaagaatctggcagacgatatggtgagaaacaccgctagagatctgctgtactacgccgtgacccaggatgccatgctgatcttcgccaacctgagccggggcttcggccggcagggcaagcggaccttcatggccgagagacagtacacacggatggaggactggctgaccgccaagctggcctacgagggcctgagcaagacctacctgtccaagacactggcccagtacacctccaagacatgcagcaactgtgggtttaccatcaccagcgccgactacgacagggtgctggagaagctgaagaagacagcaacaggctggatgaccacaattaacggcaaggagctgaaggtggagggccagattacctactacaacagatacaagagacagaacgtagtcaaggacctgtccgtcgagctggatagactgagcgaagaatctgtgaacaacgacatctcctcctggacaaagggcagaagcggagaagctctgagcctcctgaagaaaagattctcccatagacccgtgcaggagaagttcgtgtgcctgaactgcggcttcgagacacacgcagccgagcaagccgccctgaacatcgccagatcctggctgttcctgcggagccaggagtacaagaaataccagacaaacaagacaaccggcaacaccgataagagagccttcgtcgagacctggcagtccttttaccggaagaagcttaaggaggtgtggaaacctgccgtgcggtctggcggatctggcggaggctccaccagccccaagaaaaagagaaaagtctaagctgccttctgcggggcttgccttctggccatgcccttcttctctcccttgcacctgtacctcttggtctttgaataaagcctgagtaggaaggctagcaaaaaaaaaaaaaaaaaaaaaaaaaaaaaaaaaaaaaaaaaaaaaaaaaaaaaaaaaaaaaaaaaaaaaaaaaaaaaaaa

SEQ ID NO: 9368 - RNA, 8787 nt, synthetic construct
  source 1..8787: mol_type = other RNA
aggaaataagagagaaaagaagagtaagaagaaatataagagccaccatggcccctaagaagaagcgtaaagtgagccggatgaaccacgaccaggagttcgacccccctaaggtgtaccctcccgtccccgccgagaagagaaagcccatccgggtcctgagcctgttcgatggcatcgccaccggtctgctggtgctgaaggacctgggcatccaggtggataggtacattgcctccgaggtgtgcgaggactccatcaccgtgggaatggtgcgtcatcagggcaagatcatgtacgtgggcgacgtgcggagcgtgacacagaagcatatccaggagtggggccctttcgacctggtgatcggcggcagcccttgcaatgacctgagcatcgtgaacccagcccggaagggcctgtacgagggaaccggcagactgttcttcgagttttacagactgctgcacgacgcccggcctaaggaaggcgacgaccggcccttcttttggctgttcgagaatgtggtggccatgggagtcagcgacaagcgggatattagccggttcctggagagcaaccccgtgatgatcgatgccaaggaagtgagcgccgcccaccgggccagatacttctggggcaatctgcctggcatgaacagacccctggccagcaccgtgaacgacaagctggagctgcaggagtgcctggagcacggccggatcgccaagttcagcaaggtgagaaccatcaccacccgaagcaacagcatcaaacaaggcaaggaccagcactttcctgtgttcatgaacgagaaggaggacatcctgtggtgtaccgagatggagagagtgttcgggttcccagtccactacacagatgtcagcaacatgtctagactggccagacagagactgctgggaagaagctggtccgtccctgtgatcagacacctgttcgcccctctgaaggagtacttcgcctgcgtgagcagcggcaacagcaacgccaacagccggggccccagcttctctagcggcctggtgccactgtccctgagagggagccacatgggccccatggagatctacaaaaccgtgagcgcctggaagcggcagcctgtgcgcgtgctgagcctgtttcggaatatcgataaagtcctgaaaagcctgggattcctggagagcggctctggctccggcggtggcaccctgaagtacgtggaggatgtgacaaacgtggtcagacgggatgtggagaagtggggccccttcgatctggtgtacggcagcacccaacccctgggcagctcttgtgaccggtgccctggctggtacatgtttcagttccaccggatcctgcagtacgccctgccgagacaggagtcccagcggccattcttttggattttcatggacaacttgctgctgaccgaggatgaccaggaaactaccactcggttcctgcagaccgaagccgtgaccctgcaggacgtgagaggccgggactaccagaacgccatgcgggtgtggtccaacatccctggactgaaaagcaagcacgcacctctgacccctaaagaagaggagtacctgcaggcccaggtgcggagcagaagcaagctggacgcccctaaggtggatctgctggtgaagaattgcctcctgcccctgagagagtacttcaagtatttcagccagaatagtctgcccctgggaggcagcggcggcggcttccagggcagcatcagcttcaaggacgtgaccgtgggcttcagccaggaggagtggcagcacctgaaccccagccagagggccctgtacagggacgtgatgctggagaactacagcaacctggtgagcgtgggctactgcgtgcacaagcccgaggtgatcagcaggctggagcagggcgaggagccctggaggctggaggaggagttccccagccagagcttcagcgaggtgtggaccgccggcggcccaagcagcggcgcccctcctcccagcggcggcaggcggcccaagcagcggcgcccctcctcccagcggcggcagcccagccggctccccaacctctaccgaggagggcacctctgagtccgccacccccgagagcggccctggcacctccaccgagcccagcgagggcagcgcacccggcagccctgccggcagccccacctccacagaggagggaaccagcaccgagcccagcgaaggcagcgccccaggcaccagcaccgagcctagtgagcaggagattaaacggatcaacaagatcagaagaagacttgtgaaagacagcaacaccaagaaggccggcaagacaggccccatgaaaaccctgctggttagagtgatgacacccgatctgagagagcggctggaaaacctgagaaagaagcctgaaaatatcccccagcccatcagcaatacatctagagccaacctgaataagctgctgaccgattacaccgaaatgaagaaggcgatcctgcatgtgtactgggaagagttccagaaggaccctgtgggcctgatgagccgggtggcccagcctgccagcaagaagatcgatcagaacaagctgaaacctgagatggacgagaagggcaacctgaccaccgccggctttgcctgctctcagtgtggccagcccctgttcgtgtacaagctggagcaggtgtctgagaagggcaaggcttacaccaactacttcggacggtgcaatgtggccgagcacgaaaagctgatcctgctggcccagctgaagcccgagaaggatagcgacgaagccgtgacatatagcctgggaaagtttgggcagagggccctggatttctacagcattcatgtgaccaaggagtccacccaccccgtgaagcccctggcccagatcgccggaaacagatacgcctccggacctgtgggaaaggccctgagcgacgcatgtatgggcacaatcgcctccttcctgtctaagtaccaggacatcatcatcgaacaccagaaggtggtgaagggcaaccagaagagactggagagcctgcgggagctggccggcaaggaaaacctggaataccctagcgtgaccctgccacctcagcctcacaccaaggagggcgttgatgcctacaacgaagtgatcgcccgggtgcgaatgtgggtgaacctgaacctgtggcagaagctgaagctaagcagagatgatgccaagcctctgctgagactgaagggattcccttcctttcctctggtcgagagacaggccaacgaagtggactggtgggacatggtgtgtaacgtgaagaagctgatcaacgagaaaaaggaggatggcaaggtgttttggcagaatctggctggctacaagagacaggaagccctgagaccatacctgagcagcgaggaagatcggaagaagggaaagaaattcgctcggtaccagctgggcgacctgctgctgcacctggaaaagaagcacggcgaggactggggaaaggtgtacgacgaggcctgggagcggattgacaagaaagtggaaggcctgagcaagcacatcaagctggaagaggaacggagaagcgaggacgcccagagcaaggccgccctgaccgactggctgcgggctaaggccagcttcgtgatcgagggcctgaaggaggccgacaaggacgagttctgcagatgcgagctgaagctgcagaagtggtacggggacctgcggggaaagcccttcgccatcgaagccgagaacagcatcctggacatcagcggcttcagcaagcagtacaactgtgccttcatctggcagaaggacggcgtgaagaagctgaacctgtacctgatcatcaactacttcaagggcggcaagctgcggttcaagaagatcaaacctgaagccttcgaagccaacagattctacaccgtgatcaacaaaaagagcggcgagatcgtgcccatggaggtgaacttcaacttcgacgaccccaacctgatcatcctgcctctggcctttggcaagagacagggcagagaattcatctggaacgacctgctgtccctggaaaccggcagcctgaagctggccaacggaagagtgatcgagaagacactgtacaacagaagaacccggcaggatgagcctgccctgttcgtggccctgaccttcgagcggcgggaggtcctggactcctccaatatcaaaccaatgaacctgatcggcgtggcaagaggcgaaaacatccccgccgtgatcgccctgaccgaccccgagggctgcccactgagccggtttaaggatagcctgggaaacccaacccacatcctgagaatcggcgagagctataaggagaagcagcggaccatccaggccaagaaggaggtggagcagcggagagccggcggctacagccggaagtacgccagcaaagccaagaatctggcagacgatatggtgagaaacaccgctagagatctgctgtactacgccgtgacccaggatgccatgctgatcttcgccaacctgagccggggcttcggccggcagggcaagcggaccttcatggccgagagacagtacacacggatggaggactggctgaccgccaagctggcctacgagggcctgagcaagacctacctgtccaagacactggcccagtacacctccaagacatgcagcaactgtgggtttaccatcaccagcgccgactacgacagggtgctggagaagctgaagaagacagcaacaggctggatgaccacaattaacggcaaggagctgaaggtggagggccagattacctactacaacagatacaagagacagaacgtagtcaaggacctgtccgtcgagctggatagactgagcgaagaatctgtgaacaacgacatctcctcctggacaaagggcagaagcggagaagctctgagcctcctgaagaaaagattctcccatagacccgtgcaggagaagttcgtgtgcctgaactgcggcttcgagacacacgcagccgagcaagccgccctgaacatcgccagatcctggctgttcctgcggagccaggagtacaagaaataccagacaaacaagacaaccggcaacaccgataagagagccttcgtcgagacctggcagtccttttaccggaagaagcttaaggaggtgtggaaacctgccgtgcggtctggcggatctggcggaggctccaccagccccaagaaaaagagaaaagtctaagctgccttctgcggggcttgccttctggccatgcccttcttctctcccttgcacctgtacctcttggtctttgaataaagcctgagtaggaaggctagcaaaaaaaaaaaaaaaaaaaaaaaaaaaaaaaaaaaaaaaaaaaaaaaaaaaaaaaaaaaaaaaaaaaaaaaaaaaaaaaagcccagccggctccccaacctctaccgaggagggcacctctgagtccgccacccccgagagcggccctggcacctccaccgagcccagcgagggcagcgcacccggcagccctgccggcagccccacctccacagaggagggaaccagcaccgagcccagcgaaggcagcgccccaggcaccagcaccgagcctagtgagcaggagattaaacggatcaacaagatcagaagaagacttgtgaaagacagcaacaccaagaaggccggcaagacaggccccatgaaaaccctgctggttagagtgatgacacccgatctgagagagcggctggaaaacctgagaaagaagcctgaaaatatcccccagcccatcagcaatacatctagagccaacctgaataagctgctgaccgattacaccgaaatgaagaaggcgatcctgcatgtgtactgggaagagttccagaaggaccctgtgggcctgatgagccgggtggcccagcctgccagcaagaagatcgatcagaacaagctgaaacctgagatggacgagaagggcaacctgaccaccgccggctttgcctgctctcagtgtggccagcccctgttcgtgtacaagctggagcaggtgtctgagaagggcaaggcttacaccaactacttcggacggtgcaatgtggccgagcacgaaaagctgatcctgctggcccagctgaagcccgagaaggatagcgacgaagccgtgacatatagcctgggaaagtttgggcagagggccctggatttctacagcattcatgtgaccaaggagtccacccaccccgtgaagcccctggcccagatcgccggaaacagatacgcctccggacctgtgggaaaggccctgagcgacgcatgtatgggcacaatcgcctccttcctgtctaagtaccaggacatcatcatcgaacaccagaaggtggtgaagggcaaccagaagagactggagagcctgcgggagctggccggcaaggaaaacctggaataccctagcgtgaccctgccacctcagcctcacaccaaggagggcgttgatgcctacaacgaagtgatcgcccgggtgcgaatgtgggtgaacctgaacctgtggcagaagctgaagctaagcagagatgatgccaagcctctgctgagactgaagggattcccttcctttcctctggtcgagagacaggccaacgaagtggactggtgggacatggtgtgtaacgtgaagaagctgatcaacgagaaaaaggaggatggcaaggtgttttggcagaatctggctggctacaagagacaggaagccctgagaccatacctgagcagcgaggaagatcggaagaagggaaagaaattcgctcggtaccagctgggcgacctgctgctgcacctggaaaagaagcacggcgaggactggggaaaggtgtacgacgaggcctgggagcggattgacaagaaagtggaaggcctgagcaagcacatcaagctggaagaggaacggagaagcgaggacgcccagagcaaggccgccctgaccgactggctgcgggctaaggccagcttcgtgatcgagggcctgaaggaggccgacaaggacgagttctgcagatgcgagctgaagctgcagaagtggtacggggacctgcggggaaagcccttcgccatcgaagccgagaacagcatcctggacatcagcggcttcagcaagcagtacaactgtgccttcatctggcagaaggacggcgtgaagaagctgaacctgtacctgatcatcaactacttcaagggcggcaagctgcggttcaagaagatcaaacctgaagccttcgaagccaacagattctacaccgtgatcaacaaaaagagcggcgagatcgtgcccatggaggtgaacttcaacttcgacgaccccaacctgatcatcctgcctctggcctttggcaagagacagggcagagaattcatctggaacgacctgctgtccctggaaaccggcagcctgaagctggccaacggaagagtgatcgagaagacactgtacaacagaagaacccggcaggatgagcctgccctgttcgtggccctgaccttcgagcggcgggaggtcctggactcctccaatatcaaaccaatgaacctgatcggcgtggcaagaggcgaaaacatccccgccgtgatcgccctgaccgaccccgagggctgcccactgagccggtttaaggatagcctgggaaacccaacccacatcctgagaatcggcgagagctataaggagaagcagcggaccatccaggccaagaaggaggtggagcagcggagagccggcggctacagccggaagtacgccagcaaagccaagaatctggcagacgatatggtgagaaacaccgctagagatctgctgtactacgccgtgacccaggatgccatgctgatcttcgccaacctgagccggggcttcggccggcagggcaagcggaccttcatggccgagagacagtacacacggatggaggactggctgaccgccaagctggcctacgagggcctgagcaagacctacctgtccaagacactggcccagtacacctccaagacatgcagcaactgtgggtttaccatcaccagcgccgactacgacagggtgctggagaagctgaagaagacagcaacaggctggatgaccacaattaacggcaaggagctgaaggtggagggccagattacctactacaacagatacaagagacagaacgtagtcaaggacctgtccgtcgagctggatagactgagcgaagaatctgtgaacaacgacatctcctcctggacaaagggcagaagcggagaagctctgagcctcctgaagaaaagattctcccatagacccgtgcaggagaagttcgtgtgcctgaactgcggcttcgagacacacgcagccgagcaagccgccctgaacatcgccagatcctggctgttcctgcggagccaggagtacaagaaataccagacaaacaagacaaccggcaacaccgataagagagccttcgtcgagacctggcagtccttttaccggaagaagcttaaggaggtgtggaaacctgccgtgcggtctggcggatctggcggaggctccaccagccccaagaaaaagagaaaagtctaagctgccttctgcggggcttgccttctggccatgcccttcttctctcccttgcacctgtacctcttggtctttgaataaagcctgagtaggaaggctagcaaaaaaaaaaaaaaaaaaaaaaaaaaaaaaaaaaaaaaaaaaaaaaaaaaaaaaaaaaaaaaaaaaaaaaaaaaaaaaaa

SEQ ID NO: 9369 - RNA, 8787 nt, synthetic construct
  source 1..8787: mol_type = other RNA
aggaaataagagagaaaagaagagtaagaagaaatataagagccaccatggcccctaagaagaagcgtaaagtgagccggatgaaccacgaccaggagttcgacccccctaaggtgtaccctcccgtccccgccgagaagagaaagcccatccgggtcctgagcctgttcgatggcatcgccaccggtctgctggtgctgaaggacctgggcatccaggtggataggtacattgcctccgaggtgtgcgaggactccatcaccgtgggaatggtgcgtcatcagggcaagatcatgtacgtgggcgacgtgcggagcgtgacacagaagcatatccaggagtggggccctttcgacctggtgatcggcggcagcccttgcaatgacctgagcatcgtgaacccagcccggaagggcctgtacgagggaaccggcagactgttcttcgagttttacagactgctgcacgacgcccggcctaaggaaggcgacgaccggcccttcttttggctgttcgagaatgtggtggccatgggagtcagcgacaagcgggatattagccggttcctggagagcaaccccgtgatgatcgatgccaaggaagtgagcgccgcccaccgggccagatacttctggggcaatctgcctggcatgaacagacccctggccagcaccgtgaacgacaagctggagctgcaggagtgcctggagcacggccggatcgccaagttcagcaaggtgagaaccatcaccacccgaagcaacagcatcaaacaaggcaaggaccagcactttcctgtgttcatgaacgagaaggaggacatcctgtggtgtaccgagatggagagagtgttcgggttcccagtccactacacagatgtcagcaacatgtctagactggccagacagagactgctgggaagaagctggtccgtccctgtgatcagacacctgttcgcccctctgaaggagtacttcgcctgcgtgagcagcggcaacagcaacgccaacagccggggccccagcttctctagcggcctggtgccactgtccctgagagggagccacatgggccccatggagatctacaaaaccgtgagcgcctggaagcggcagcctgtgcgcgtgctgagcctgtttcggaatatcgataaagtcctgaaaagcctgggattcctggagagcggctctggctccggcggtggcaccctgaagtacgtggaggatgtgacaaacgtggtcagacgggatgtggagaagtggggccccttcgatctggtgtacggcagcacccaacccctgggcagctcttgtgaccggtgccctggctggtacatgtttcagttccaccggatcctgcagtacgccctgccgagacaggagtcccagcggccattcttttggattttcatggacaacttgctgctgaccgaggatgaccaggaaactaccactcggttcctgcagaccgaagccgtgaccctgcaggacgtgagaggccgggactaccagaacgccatgcgggtgtggtccaacatccctggactgaaaagcaagcacgcacctctgacccctaaagaagaggagtacctgcaggcccaggtgcggagcagaagcaagctggacgcccctaaggtggatctgctggtgaagaattgcctcctgcccctgagagagtacttcaagtatttcagccagaatagtctgcccctgggaggcagcggcggcggcacccagcccgacgaggacctgcacctgcaggtggaggagacccagctggtgaaggagagcgtgaccttcaaggacgtggccatcgacttcaccctggaggagtggaggctgatggaccccacccagaggaacctgcacaaggacgtgatgctggagaactacaggaacctggtgagcctgggcctggccgtgagcaagcccgacatgatcagccacctggagaacggcaagggcccctgggtgggcggcccaagcagcggcgcccctcctcccagcggcggcaggcggcccaagcagcggcgcccctcctcccagcggcggcagcccagccggctccccaacctctaccgaggagggcacctctgagtccgccacccccgagagcggccctggcacctccaccgagcccagcgagggcagcgcacccggcagccctgccggcagccccacctccacagaggagggaaccagcaccgagcccagcgaaggcagcgccccaggcaccagcaccgagcctagtgagcaggagattaaacggatcaacaagatcagaagaagacttgtgaaagacagcaacaccaagaaggccggcaagacaggccccatgaaaaccctgctggttagagtgatgacacccgatctgagagagcggctggaaaacctgagaaagaagcctgaaaatatcccccagcccatcagcaatacatctagagccaacctgaataagctgctgaccgattacaccgaaatgaagaaggcgatcctgcatgtgtactgggaagagttccagaaggaccctgtgggcctgatgagccgggtggcccagcctgccagcaagaagatcgatcagaacaagctgaaacctgagatggacgagaagggcaacctgaccaccgccggctttgcctgctctcagtgtggccagcccctgttcgtgtacaagctggagcaggtgtctgagaagggcaaggcttacaccaactacttcggacggtgcaatgtggccgagcacgaaaagctgatcctgctggcccagctgaagcccgagaaggatagcgacgaagccgtgacatatagcctgggaaagtttgggcagagggccctggatttctacagcattcatgtgaccaaggagtccacccaccccgtgaagcccctggcccagatcgccggaaacagatacgcctccggacctgtgggaaaggccctgagcgacgcatgtatgggcacaatcgcctccttcctgtctaagtaccaggacatcatcatcgaacaccagaaggtggtgaagggcaaccagaagagactggagagcctgcgggagctggccggcaaggaaaacctggaataccctagcgtgaccctgccacctcagcctcacaccaaggagggcgttgatgcctacaacgaagtgatcgcccgggtgcgaatgtgggtgaacctgaacctgtggcagaagctgaagctaagcagagatgatgccaagcctctgctgagactgaagggattcccttcctttcctctggtcgagagacaggccaacgaagtggactggtgggacatggtgtgtaacgtgaagaagctgatcaacgagaaaaaggaggatggcaaggtgttttggcagaatctggctggctacaagagacaggaagccctgagaccatacctgagcagcgaggaagatcggaagaagggaaagaaattcgctcggtaccagctgggcgacctgctgctgcacctggaaaagaagcacggcgaggactggggaaaggtgtacgacgaggcctgggagcggattgacaagaaagtggaaggcctgagcaagcacatcaagctggaagaggaacggagaagcgaggacgcccagagcaaggccgccctgaccgactggctgcgggctaaggccagcttcgtgatcgagggcctgaaggaggccgacaaggacgagttctgcagatgcgagctgaagctgcagaagtggtacggggacctgcggggaaagcccttcgccatcgaagccgagaacagcatcctggacatcagcggcttcagcaagcagtacaactgtgccttcatctggcagaaggacggcgtgaagaagctgaacctgtacctgatcatcaactacttcaagggcggcaagctgcggttcaagaagatcaaacctgaagccttcgaagccaacagattctacaccgtgatcaacaaaaagagcggcgagatcgtgcccatggaggtgaacttcaacttcgacgaccccaacctgatcatcctgcctctggcctttggcaagagacagggcagagaattcatctggaacgacctgctgtccctggaaaccggcagcctgaagctggccaacggaagagtgatcgagaagacactgtacaacagaagaacccggcaggatgagcctgccctgttcgtggccctgaccttcgagcggcgggaggtcctggactcctccaatatcaaaccaatgaacctgatcggcgtggcaagaggcgaaaacatccccgccgtgatcgccctgaccgaccccgagggctgcccactgagccggtttaaggatagcctgggaaacccaacccacatcctgagaatcggcgagagctataaggagaagcagcggaccatccaggccaagaaggaggtggagcagcggagagccggcggctacagccggaagtacgccagcaaagccaagaatctggcagacgatatggtgagaaacaccgctagagatctgctgtactacgccgtgacccaggatgccatgctgatcttcgccaacctgagccggggcttcggccggcagggcaagcggaccttcatggccgagagacagtacacacggatggaggactggctgaccgccaagctggcctacgagggcctgagcaagacctacctgtccaagacactggcccagtacacctccaagacatgcagcaactgtgggtttaccatcaccagcgccgactacgacagggtgctggagaagctgaagaagacagcaacaggctggatgaccacaattaacggcaaggagctgaaggtggagggccagattacctactacaacagatacaagagacagaacgtagtcaaggacctgtccgtcgagctggatagactgagcgaagaatctgtgaacaacgacatctcctcctggacaaagggcagaagcggagaagctctgagcctcctgaagaaaagattctcccatagacccgtgcaggagaagttcgtgtgcctgaactgcggcttcgagacacacgcagccgagcaagccgccctgaacatcgccagatcctggctgttcctgcggagccaggagtacaagaaataccagacaaacaagacaaccggcaacaccgataagagagccttcgtcgagacctggcagtccttttaccggaagaagcttaaggaggtgtggaaacctgccgtgcggtctggcggatctggcggaggctccaccagccccaagaaaaagagaaaagtctaagctgccttctgcggggcttgccttctggccatgcccttcttctctcccttgcacctgtacctcttggtctttgaataaagcctgagtaggaaggctagcaaaaaaaaaaaaaaaaaaaaaaaaaaaaaaaaaaaaaaaaaaaaaaaaaaaaaaaaaaaaaaaaaaaaaaaaaaaaaaaagcccagccggctccccaacctctaccgaggagggcacctctgagtccgccacccccgagagcggccctggcacctccaccgagcccagcgagggcagcgcacccggcagccctgccggcagccccacctccacagaggagggaaccagcaccgagcccagcgaaggcagcgccccaggcaccagcaccgagcctagtgagcaggagattaaacggatcaacaagatcagaagaagacttgtgaaagacagcaacaccaagaaggccggcaagacaggccccatgaaaaccctgctggttagagtgatgacacccgatctgagagagcggctggaaaacctgagaaagaagcctgaaaatatcccccagcccatcagcaatacatctagagccaacctgaataagctgctgaccgattacaccgaaatgaagaaggcgatcctgcatgtgtactgggaagagttccagaaggaccctgtgggcctgatgagccgggtggcccagcctgccagcaagaagatcgatcagaacaagctgaaacctgagatggacgagaagggcaacctgaccaccgccggctttgcctgctctcagtgtggccagcccctgttcgtgtacaagctggagcaggtgtctgagaagggcaaggcttacaccaactacttcggacggtgcaatgtggccgagcacgaaaagctgatcctgctggcccagctgaagcccgagaaggatagcgacgaagccgtgacatatagcctgggaaagtttgggcagagggccctggatttctacagcattcatgtgaccaaggagtccacccaccccgtgaagcccctggcccagatcgccggaaacagatacgcctccggacctgtgggaaaggccctgagcgacgcatgtatgggcacaatcgcctccttcctgtctaagtaccaggacatcatcatcgaacaccagaaggtggtgaagggcaaccagaagagactggagagcctgcgggagctggccggcaaggaaaacctggaataccctagcgtgaccctgccacctcagcctcacaccaaggagggcgttgatgcctacaacgaagtgatcgcccgggtgcgaatgtgggtgaacctgaacctgtggcagaagctgaagctaagcagagatgatgccaagcctctgctgagactgaagggattcccttcctttcctctggtcgagagacaggccaacgaagtggactggtgggacatggtgtgtaacgtgaagaagctgatcaacgagaaaaaggaggatggcaaggtgttttggcagaatctggctggctacaagagacaggaagccctgagaccatacctgagcagcgaggaagatcggaagaagggaaagaaattcgctcggtaccagctgggcgacctgctgctgcacctggaaaagaagcacggcgaggactggggaaaggtgtacgacgaggcctgggagcggattgacaagaaagtggaaggcctgagcaagcacatcaagctggaagaggaacggagaagcgaggacgcccagagcaaggccgccctgaccgactggctgcgggctaaggccagcttcgtgatcgagggcctgaaggaggccgacaaggacgagttctgcagatgcgagctgaagctgcagaagtggtacggggacctgcggggaaagcccttcgccatcgaagccgagaacagcatcctggacatcagcggcttcagcaagcagtacaactgtgccttcatctggcagaaggacggcgtgaagaagctgaacctgtacctgatcatcaactacttcaagggcggcaagctgcggttcaagaagatcaaacctgaagccttcgaagccaacagattctacaccgtgatcaacaaaaagagcggcgagatcgtgcccatggaggtgaacttcaacttcgacgaccccaacctgatcatcctgcctctggcctttggcaagagacagggcagagaattcatctggaacgacctgctgtccctggaaaccggcagcctgaagctggccaacggaagagtgatcgagaagacactgtacaacagaagaacccggcaggatgagcctgccctgttcgtggccctgaccttcgagcggcgggaggtcctggactcctccaatatcaaaccaatgaacctgatcggcgtggcaagaggcgaaaacatccccgccgtgatcgccctgaccgaccccgagggctgcccactgagccggtttaaggatagcctgggaaacccaacccacatcctgagaatcggcgagagctataaggagaagcagcggaccatccaggccaagaaggaggtggagcagcggagagccggcggctacagccggaagtacgccagcaaagccaagaatctggcagacgatatggtgagaaacaccgctagagatctgctgtactacgccgtgacccaggatgccatgctgatcttcgccaacctgagccggggcttcggccggcagggcaagcggaccttcatggccgagagacagtacacacggatggaggactggctgaccgccaagctggcctacgagggcctgagcaagacctacctgtccaagacactggcccagtacacctccaagacatgcagcaactgtgggtttaccatcaccagcgccgactacgacagggtgctggagaagctgaagaagacagcaacaggctggatgaccacaattaacggcaaggagctgaaggtggagggccagattacctactacaacagatacaagagacagaacgtagtcaaggacctgtccgtcgagctggatagactgagcgaagaatctgtgaacaacgacatctcctcctggacaaagggcagaagcggagaagctctgagcctcctgaagaaaagattctcccatagacccgtgcaggagaagttcgtgtgcctgaactgcggcttcgagacacacgcagccgagcaagccgccctgaacatcgccagatcctggctgttcctgcggagccaggagtacaagaaataccagacaaacaagacaaccggcaacaccgataagagagccttcgtcgagacctggcagtccttttaccggaagaagcttaaggaggtgtggaaacctgccgtgcggtctggcggatctggcggaggctccaccagccccaagaaaaagagaaaagtctaagctgccttctgcggggcttgccttctggccatgcccttcttctctcccttgcacctgtacctcttggtctttgaataaagcctgagtaggaaggctagcaaaaaaaaaaaaaaaaaaaaaaaaaaaaaaaaaaaaaaaaaaaaaaaaaaaaaaaaaaaaaaaaaaaaaaaaaaaaaaaa

SEQ ID NO: 9370 - RNA, 8787 nt, synthetic construct
  source 1..8787: mol_type = other RNA
aggaaataagagagaaaagaagagtaagaagaaatataagagccaccatggcccctaagaagaagcgtaaagtgagccggatgaaccacgaccaggagttcgacccccctaaggtgtaccctcccgtccccgccgagaagagaaagcccatccgggtcctgagcctgttcgatggcatcgccaccggtctgctggtgctgaaggacctgggcatccaggtggataggtacattgcctccgaggtgtgcgaggactccatcaccgtgggaatggtgcgtcatcagggcaagatcatgtacgtgggcgacgtgcggagcgtgacacagaagcatatccaggagtggggccctttcgacctggtgatcggcggcagcccttgcaatgacctgagcatcgtgaacccagcccggaagggcctgtacgagggaaccggcagactgttcttcgagttttacagactgctgcacgacgcccggcctaaggaaggcgacgaccggcccttcttttggctgttcgagaatgtggtggccatgggagtcagcgacaagcgggatattagccggttcctggagagcaaccccgtgatgatcgatgccaaggaagtgagcgccgcccaccgggccagatacttctggggcaatctgcctggcatgaacagacccctggccagcaccgtgaacgacaagctggagctgcaggagtgcctggagcacggccggatcgccaagttcagcaaggtgagaaccatcaccacccgaagcaacagcatcaaacaaggcaaggaccagcactttcctgtgttcatgaacgagaaggaggacatcctgtggtgtaccgagatggagagagtgttcgggttcccagtccactacacagatgtcagcaacatgtctagactggccagacagagactgctgggaagaagctggtccgtccctgtgatcagacacctgttcgcccctctgaaggagtacttcgcctgcgtgagcagcggcaacagcaacgccaacagccggggccccagcttctctagcggcctggtgccactgtccctgagagggagccacatgggccccatggagatctacaaaaccgtgagcgcctggaagcggcagcctgtgcgcgtgctgagcctgtttcggaatatcgataaagtcctgaaaagcctgggattcctggagagcggctctggctccggcggtggcaccctgaagtacgtggaggatgtgacaaacgtggtcagacgggatgtggagaagtggggccccttcgatctggtgtacggcagcacccaacccctgggcagctcttgtgaccggtgccctggctggtacatgtttcagttccaccggatcctgcagtacgccctgccgagacaggagtcccagcggccattcttttggattttcatggacaacttgctgctgaccgaggatgaccaggaaactaccactcggttcctgcagaccgaagccgtgaccctgcaggacgtgagaggccgggactaccagaacgccatgcgggtgtggtccaacatccctggactgaaaagcaagcacgcacctctgacccctaaagaagaggagtacctgcaggcccaggtgcggagcagaagcaagctggacgcccctaaggtggatctgctggtgaagaattgcctcctgcccctgagagagtacttcaagtatttcagccagaatagtctgcccctgggaggcagcggcggcggcgcccaggagttcgtgatgttcagggacgtggccgtgttcttcagccaggaggagtggggccacctggaccccgcccagagggccctgtacagggaggtgatgctggagaactacagcaacctggtgagcctgggcatcaggttcagcaagcccaaggtgatcagccagctgcagcagggcgaggacccctggatggtggacaggggcgtgccccagggcgcctgccagggctggaagagcctgggcggcccaagcagcggcgcccctcctcccagcggcggcaggcggcccaagcagcggcgcccctcctcccagcggcggcagcccagccggctccccaacctctaccgaggagggcacctctgagtccgccacccccgagagcggccctggcacctccaccgagcccagcgagggcagcgcacccggcagccctgccggcagccccacctccacagaggagggaaccagcaccgagcccagcgaaggcagcgccccaggcaccagcaccgagcctagtgagcaggagattaaacggatcaacaagatcagaagaagacttgtgaaagacagcaacaccaagaaggccggcaagacaggccccatgaaaaccctgctggttagagtgatgacacccgatctgagagagcggctggaaaacctgagaaagaagcctgaaaatatcccccagcccatcagcaatacatctagagccaacctgaataagctgctgaccgattacaccgaaatgaagaaggcgatcctgcatgtgtactgggaagagttccagaaggaccctgtgggcctgatgagccgggtggcccagcctgccagcaagaagatcgatcagaacaagctgaaacctgagatggacgagaagggcaacctgaccaccgccggctttgcctgctctcagtgtggccagcccctgttcgtgtacaagctggagcaggtgtctgagaagggcaaggcttacaccaactacttcggacggtgcaatgtggccgagcacgaaaagctgatcctgctggcccagctgaagcccgagaaggatagcgacgaagccgtgacatatagcctgggaaagtttgggcagagggccctggatttctacagcattcatgtgaccaaggagtccacccaccccgtgaagcccctggcccagatcgccggaaacagatacgcctccggacctgtgggaaaggccctgagcgacgcatgtatgggcacaatcgcctccttcctgtctaagtaccaggacatcatcatcgaacaccagaaggtggtgaagggcaaccagaagagactggagagcctgcgggagctggccggcaaggaaaacctggaataccctagcgtgaccctgccacctcagcctcacaccaaggagggcgttgatgcctacaacgaagtgatcgcccgggtgcgaatgtgggtgaacctgaacctgtggcagaagctgaagctaagcagagatgatgccaagcctctgctgagactgaagggattcccttcctttcctctggtcgagagacaggccaacgaagtggactggtgggacatggtgtgtaacgtgaagaagctgatcaacgagaaaaaggaggatggcaaggtgttttggcagaatctggctggctacaagagacaggaagccctgagaccatacctgagcagcgaggaagatcggaagaagggaaagaaattcgctcggtaccagctgggcgacctgctgctgcacctggaaaagaagcacggcgaggactggggaaaggtgtacgacgaggcctgggagcggattgacaagaaagtggaaggcctgagcaagcacatcaagctggaagaggaacggagaagcgaggacgcccagagcaaggccgccctgaccgactggctgcgggctaaggccagcttcgtgatcgagggcctgaaggaggccgacaaggacgagttctgcagatgcgagctgaagctgcagaagtggtacggggacctgcggggaaagcccttcgccatcgaagccgagaacagcatcctggacatcagcggcttcagcaagcagtacaactgtgccttcatctggcagaaggacggcgtgaagaagctgaacctgtacctgatcatcaactacttcaagggcggcaagctgcggttcaagaagatcaaacctgaagccttcgaagccaacagattctacaccgtgatcaacaaaaagagcggcgagatcgtgcccatggaggtgaacttcaacttcgacgaccccaacctgatcatcctgcctctggcctttggcaagagacagggcagagaattcatctggaacgacctgctgtccctggaaaccggcagcctgaagctggccaacggaagagtgatcgagaagacactgtacaacagaagaacccggcaggatgagcctgccctgttcgtggccctgaccttcgagcggcgggaggtcctggactcctccaatatcaaaccaatgaacctgatcggcgtggcaagaggcgaaaacatccccgccgtgatcgccctgaccgaccccgagggctgcccactgagccggtttaaggatagcctgggaaacccaacccacatcctgagaatcggcgagagctataaggagaagcagcggaccatccaggccaagaaggaggtggagcagcggagagccggcggctacagccggaagtacgccagcaaagccaagaatctggcagacgatatggtgagaaacaccgctagagatctgctgtactacgccgtgacccaggatgccatgctgatcttcgccaacctgagccggggcttcggccggcagggcaagcggaccttcatggccgagagacagtacacacggatggaggactggctgaccgccaagctggcctacgagggcctgagcaagacctacctgtccaagacactggcccagtacacctccaagacatgcagcaactgtgggtttaccatcaccagcgccgactacgacagggtgctggagaagctgaagaagacagcaacaggctggatgaccacaattaacggcaaggagctgaaggtggagggccagattacctactacaacagatacaagagacagaacgtagtcaaggacctgtccgtcgagctggatagactgagcgaagaatctgtgaacaacgacatctcctcctggacaaagggcagaagcggagaagctctgagcctcctgaagaaaagattctcccatagacccgtgcaggagaagttcgtgtgcctgaactgcggcttcgagacacacgcagccgagcaagccgccctgaacatcgccagatcctggctgttcctgcggagccaggagtacaagaaataccagacaaacaagacaaccggcaacaccgataagagagccttcgtcgagacctggcagtccttttaccggaagaagcttaaggaggtgtggaaacctgccgtgcggtctggcggatctggcggaggctccaccagccccaagaaaaagagaaaagtctaagctgccttctgcggggcttgccttctggccatgcccttcttctctcccttgcacctgtacctcttggtctttgaataaagcctgagtaggaaggctagcaaaaaaaaaaaaaaaaaaaaaaaaaaaaaaaaaaaaaaaaaaaaaaaaaaaaaaaaaaaaaaaaaaaaaaaaaaaaaaaagcccagccggctccccaacctctaccgaggagggcacctctgagtccgccacccccgagagcggccctggcacctccaccgagcccagcgagggcagcgcacccggcagccctgccggcagccccacctccacagaggagggaaccagcaccgagcccagcgaaggcagcgccccaggcaccagcaccgagcctagtgagcaggagattaaacggatcaacaagatcagaagaagacttgtgaaagacagcaacaccaagaaggccggcaagacaggccccatgaaaaccctgctggttagagtgatgacacccgatctgagagagcggctggaaaacctgagaaagaagcctgaaaatatcccccagcccatcagcaatacatctagagccaacctgaataagctgctgaccgattacaccgaaatgaagaaggcgatcctgcatgtgtactgggaagagttccagaaggaccctgtgggcctgatgagccgggtggcccagcctgccagcaagaagatcgatcagaacaagctgaaacctgagatggacgagaagggcaacctgaccaccgccggctttgcctgctctcagtgtggccagcccctgttcgtgtacaagctggagcaggtgtctgagaagggcaaggcttacaccaactacttcggacggtgcaatgtggccgagcacgaaaagctgatcctgctggcccagctgaagcccgagaaggatagcgacgaagccgtgacatatagcctgggaaagtttgggcagagggccctggatttctacagcattcatgtgaccaaggagtccacccaccccgtgaagcccctggcccagatcgccggaaacagatacgcctccggacctgtgggaaaggccctgagcgacgcatgtatgggcacaatcgcctccttcctgtctaagtaccaggacatcatcatcgaacaccagaaggtggtgaagggcaaccagaagagactggagagcctgcgggagctggccggcaaggaaaacctggaataccctagcgtgaccctgccacctcagcctcacaccaaggagggcgttgatgcctacaacgaagtgatcgcccgggtgcgaatgtgggtgaacctgaacctgtggcagaagctgaagctaagcagagatgatgccaagcctctgctgagactgaagggattcccttcctttcctctggtcgagagacaggccaacgaagtggactggtgggacatggtgtgtaacgtgaagaagctgatcaacgagaaaaaggaggatggcaaggtgttttggcagaatctggctggctacaagagacaggaagccctgagaccatacctgagcagcgaggaagatcggaagaagggaaagaaattcgctcggtaccagctgggcgacctgctgctgcacctggaaaagaagcacggcgaggactggggaaaggtgtacgacgaggcctgggagcggattgacaagaaagtggaaggcctgagcaagcacatcaagctggaagaggaacggagaagcgaggacgcccagagcaaggccgccctgaccgactggctgcgggctaaggccagcttcgtgatcgagggcctgaaggaggccgacaaggacgagttctgcagatgcgagctgaagctgcagaagtggtacggggacctgcggggaaagcccttcgccatcgaagccgagaacagcatcctggacatcagcggcttcagcaagcagtacaactgtgccttcatctggcagaaggacggcgtgaagaagctgaacctgtacctgatcatcaactacttcaagggcggcaagctgcggttcaagaagatcaaacctgaagccttcgaagccaacagattctacaccgtgatcaacaaaaagagcggcgagatcgtgcccatggaggtgaacttcaacttcgacgaccccaacctgatcatcctgcctctggcctttggcaagagacagggcagagaattcatctggaacgacctgctgtccctggaaaccggcagcctgaagctggccaacggaagagtgatcgagaagacactgtacaacagaagaacccggcaggatgagcctgccctgttcgtggccctgaccttcgagcggcgggaggtcctggactcctccaatatcaaaccaatgaacctgatcggcgtggcaagaggcgaaaacatccccgccgtgatcgccctgaccgaccccgagggctgcccactgagccggtttaaggatagcctgggaaacccaacccacatcctgagaatcggcgagagctataaggagaagcagcggaccatccaggccaagaaggaggtggagcagcggagagccggcggctacagccggaagtacgccagcaaagccaagaatctggcagacgatatggtgagaaacaccgctagagatctgctgtactacgccgtgacccaggatgccatgctgatcttcgccaacctgagccggggcttcggccggcagggcaagcggaccttcatggccgagagacagtacacacggatggaggactggctgaccgccaagctggcctacgagggcctgagcaagacctacctgtccaagacactggcccagtacacctccaagacatgcagcaactgtgggtttaccatcaccagcgccgactacgacagggtgctggagaagctgaagaagacagcaacaggctggatgaccacaattaacggcaaggagctgaaggtggagggccagattacctactacaacagatacaagagacagaacgtagtcaaggacctgtccgtcgagctggatagactgagcgaagaatctgtgaacaacgacatctcctcctggacaaagggcagaagcggagaagctctgagcctcctgaagaaaagattctcccatagacccgtgcaggagaagttcgtgtgcctgaactgcggcttcgagacacacgcagccgagcaagccgccctgaacatcgccagatcctggctgttcctgcggagccaggagtacaagaaataccagacaaacaagacaaccggcaacaccgataagagagccttcgtcgagacctggcagtccttttaccggaagaagcttaaggaggtgtggaaacctgccgtgcggtctggcggatctggcggaggctccaccagccccaagaaaaagagaaaagtctaagctgccttctgcggggcttgccttctggccatgcccttcttctctcccttgcacctgtacctcttggtctttgaataaagcctgagtaggaaggctagcaaaaaaaaaaaaaaaaaaaaaaaaaaaaaaaaaaaaaaaaaaaaaaaaaaaaaaaaaaaaaaaaaaaaaaaaaaaaaaaa

SEQ ID NO: 9371 - RNA, 8787 nt, synthetic construct
  source 1..8787: mol_type = other RNA
aggaaataagagagaaaagaagagtaagaagaaatataagagccaccatggcccctaagaagaagcgtaaagtgagccggatgaaccacgaccaggagttcgacccccctaaggtgtaccctcccgtccccgccgagaagagaaagcccatccgggtcctgagcctgttcgatggcatcgccaccggtctgctggtgctgaaggacctgggcatccaggtggataggtacattgcctccgaggtgtgcgaggactccatcaccgtgggaatggtgcgtcatcagggcaagatcatgtacgtgggcgacgtgcggagcgtgacacagaagcatatccaggagtggggccctttcgacctggtgatcggcggcagcccttgcaatgacctgagcatcgtgaacccagcccggaagggcctgtacgagggaaccggcagactgttcttcgagttttacagactgctgcacgacgcccggcctaaggaaggcgacgaccggcccttcttttggctgttcgagaatgtggtggccatgggagtcagcgacaagcgggatattagccggttcctggagagcaaccccgtgatgatcgatgccaaggaagtgagcgccgcccaccgggccagatacttctggggcaatctgcctggcatgaacagacccctggccagcaccgtgaacgacaagctggagctgcaggagtgcctggagcacggccggatcgccaagttcagcaaggtgagaaccatcaccacccgaagcaacagcatcaaacaaggcaaggaccagcactttcctgtgttcatgaacgagaaggaggacatcctgtggtgtaccgagatggagagagtgttcgggttcccagtccactacacagatgtcagcaacatgtctagactggccagacagagactgctgggaagaagctggtccgtccctgtgatcagacacctgttcgcccctctgaaggagtacttcgcctgcgtgagcagcggcaacagcaacgccaacagccggggccccagcttctctagcggcctggtgccactgtccctgagagggagccacatgggccccatggagatctacaaaaccgtgagcgcctggaagcggcagcctgtgcgcgtgctgagcctgtttcggaatatcgataaagtcctgaaaagcctgggattcctggagagcggctctggctccggcggtggcaccctgaagtacgtggaggatgtgacaaacgtggtcagacgggatgtggagaagtggggccccttcgatctggtgtacggcagcacccaacccctgggcagctcttgtgaccggtgccctggctggtacatgtttcagttccaccggatcctgcagtacgccctgccgagacaggagtcccagcggccattcttttggattttcatggacaacttgctgctgaccgaggatgaccaggaaactaccactcggttcctgcagaccgaagccgtgaccctgcaggacgtgagaggccgggactaccagaacgccatgcgggtgtggtccaacatccctggactgaaaagcaagcacgcacctctgacccctaaagaagaggagtacctgcaggcccaggtgcggagcagaagcaagctggacgcccctaaggtggatctgctggtgaagaattgcctcctgcccctgagagagtacttcaagtatttcagccagaatagtctgcccctgggaggcagcggcggcggcatggacagcgtggccttcgaggacgtggccgtgagcttcacccaggaggagtgggccctgctggaccccagccagaagaacctgtacagggacgtgatgcaggagaccttcaagaacctgaccagcgtgggcaagacctggaaggtgcagaacatcgaggacgagtacaagaaccccaggaggaacctgaggaggagcttcaccctggtggcccaggccggcgtgaggcaggacctgggcagcggcggcccaagcagcggcgcccctcctcccagcggcggcaggcggcccaagcagcggcgcccctcctcccagcggcggcagcccagccggctccccaacctctaccgaggagggcacctctgagtccgccacccccgagagcggccctggcacctccaccgagcccagcgagggcagcgcacccggcagccctgccggcagccccacctccacagaggagggaaccagcaccgagcccagcgaaggcagcgccccaggcaccagcaccgagcctagtgagcaggagattaaacggatcaacaagatcagaagaagacttgtgaaagacagcaacaccaagaaggccggcaagacaggccccatgaaaaccctgctggttagagtgatgacacccgatctgagagagcggctggaaaacctgagaaagaagcctgaaaatatcccccagcccatcagcaatacatctagagccaacctgaataagctgctgaccgattacaccgaaatgaagaaggcgatcctgcatgtgtactgggaagagttccagaaggaccctgtgggcctgatgagccgggtggcccagcctgccagcaagaagatcgatcagaacaagctgaaacctgagatggacgagaagggcaacctgaccaccgccggctttgcctgctctcagtgtggccagcccctgttcgtgtacaagctggagcaggtgtctgagaagggcaaggcttacaccaactacttcggacggtgcaatgtggccgagcacgaaaagctgatcctgctggcccagctgaagcccgagaaggatagcgacgaagccgtgacatatagcctgggaaagtttgggcagagggccctggatttctacagcattcatgtgaccaaggagtccacccaccccgtgaagcccctggcccagatcgccggaaacagatacgcctccggacctgtgggaaaggccctgagcgacgcatgtatgggcacaatcgcctccttcctgtctaagtaccaggacatcatcatcgaacaccagaaggtggtgaagggcaaccagaagagactggagagcctgcgggagctggccggcaaggaaaacctggaataccctagcgtgaccctgccacctcagcctcacaccaaggagggcgttgatgcctacaacgaagtgatcgcccgggtgcgaatgtgggtgaacctgaacctgtggcagaagctgaagctaagcagagatgatgccaagcctctgctgagactgaagggattcccttcctttcctctggtcgagagacaggccaacgaagtggactggtgggacatggtgtgtaacgtgaagaagctgatcaacgagaaaaaggaggatggcaaggtgttttggcagaatctggctggctacaagagacaggaagccctgagaccatacctgagcagcgaggaagatcggaagaagggaaagaaattcgctcggtaccagctgggcgacctgctgctgcacctggaaaagaagcacggcgaggactggggaaaggtgtacgacgaggcctgggagcggattgacaagaaagtggaaggcctgagcaagcacatcaagctggaagaggaacggagaagcgaggacgcccagagcaaggccgccctgaccgactggctgcgggctaaggccagcttcgtgatcgagggcctgaaggaggccgacaaggacgagttctgcagatgcgagctgaagctgcagaagtggtacggggacctgcggggaaagcccttcgccatcgaagccgagaacagcatcctggacatcagcggcttcagcaagcagtacaactgtgccttcatctggcagaaggacggcgtgaagaagctgaacctgtacctgatcatcaactacttcaagggcggcaagctgcggttcaagaagatcaaacctgaagccttcgaagccaacagattctacaccgtgatcaacaaaaagagcggcgagatcgtgcccatggaggtgaacttcaacttcgacgaccccaacctgatcatcctgcctctggcctttggcaagagacagggcagagaattcatctggaacgacctgctgtccctggaaaccggcagcctgaagctggccaacggaagagtgatcgagaagacactgtacaacagaagaacccggcaggatgagcctgccctgttcgtggccctgaccttcgagcggcgggaggtcctggactcctccaatatcaaaccaatgaacctgatcggcgtggcaagaggcgaaaacatccccgccgtgatcgccctgaccgaccccgagggctgcccactgagccggtttaaggatagcctgggaaacccaacccacatcctgagaatcggcgagagctataaggagaagcagcggaccatccaggccaagaaggaggtggagcagcggagagccggcggctacagccggaagtacgccagcaaagccaagaatctggcagacgatatggtgagaaacaccgctagagatctgctgtactacgccgtgacccaggatgccatgctgatcttcgccaacctgagccggggcttcggccggcagggcaagcggaccttcatggccgagagacagtacacacggatggaggactggctgaccgccaagctggcctacgagggcctgagcaagacctacctgtccaagacactggcccagtacacctccaagacatgcagcaactgtgggtttaccatcaccagcgccgactacgacagggtgctggagaagctgaagaagacagcaacaggctggatgaccacaattaacggcaaggagctgaaggtggagggccagattacctactacaacagatacaagagacagaacgtagtcaaggacctgtccgtcgagctggatagactgagcgaagaatctgtgaacaacgacatctcctcctggacaaagggcagaagcggagaagctctgagcctcctgaagaaaagattctcccatagacccgtgcaggagaagttcgtgtgcctgaactgcggcttcgagacacacgcagccgagcaagccgccctgaacatcgccagatcctggctgttcctgcggagccaggagtacaagaaataccagacaaacaagacaaccggcaacaccgataagagagccttcgtcgagacctggcagtccttttaccggaagaagcttaaggaggtgtggaaacctgccgtgcggtctggcggatctggcggaggctccaccagccccaagaaaaagagaaaagtctaagctgccttctgcggggcttgccttctggccatgcccttcttctctcccttgcacctgtacctcttggtctttgaataaagcctgagtaggaaggctagcaaaaaaaaaaaaaaaaaaaaaaaaaaaaaaaaaaaaaaaaaaaaaaaaaaaaaaaaaaaaaaaaaaaaaaaaaaaaaaaagcccagccggctccccaacctctaccgaggagggcacctctgagtccgccacccccgagagcggccctggcacctccaccgagcccagcgagggcagcgcacccggcagccctgccggcagccccacctccacagaggagggaaccagcaccgagcccagcgaaggcagcgccccaggcaccagcaccgagcctagtgagcaggagattaaacggatcaacaagatcagaagaagacttgtgaaagacagcaacaccaagaaggccggcaagacaggccccatgaaaaccctgctggttagagtgatgacacccgatctgagagagcggctggaaaacctgagaaagaagcctgaaaatatcccccagcccatcagcaatacatctagagccaacctgaataagctgctgaccgattacaccgaaatgaagaaggcgatcctgcatgtgtactgggaagagttccagaaggaccctgtgggcctgatgagccgggtggcccagcctgccagcaagaagatcgatcagaacaagctgaaacctgagatggacgagaagggcaacctgaccaccgccggctttgcctgctctcagtgtggccagcccctgttcgtgtacaagctggagcaggtgtctgagaagggcaaggcttacaccaactacttcggacggtgcaatgtggccgagcacgaaaagctgatcctgctggcccagctgaagcccgagaaggatagcgacgaagccgtgacatatagcctgggaaagtttgggcagagggccctggatttctacagcattcatgtgaccaaggagtccacccaccccgtgaagcccctggcccagatcgccggaaacagatacgcctccggacctgtgggaaaggccctgagcgacgcatgtatgggcacaatcgcctccttcctgtctaagtaccaggacatcatcatcgaacaccagaaggtggtgaagggcaaccagaagagactggagagcctgcgggagctggccggcaaggaaaacctggaataccctagcgtgaccctgccacctcagcctcacaccaaggagggcgttgatgcctacaacgaagtgatcgcccgggtgcgaatgtgggtgaacctgaacctgtggcagaagctgaagctaagcagagatgatgccaagcctctgctgagactgaagggattcccttcctttcctctggtcgagagacaggccaacgaagtggactggtgggacatggtgtgtaacgtgaagaagctgatcaacgagaaaaaggaggatggcaaggtgttttggcagaatctggctggctacaagagacaggaagccctgagaccatacctgagcagcgaggaagatcggaagaagggaaagaaattcgctcggtaccagctgggcgacctgctgctgcacctggaaaagaagcacggcgaggactggggaaaggtgtacgacgaggcctgggagcggattgacaagaaagtggaaggcctgagcaagcacatcaagctggaagaggaacggagaagcgaggacgcccagagcaaggccgccctgaccgactggctgcgggctaaggccagcttcgtgatcgagggcctgaaggaggccgacaaggacgagttctgcagatgcgagctgaagctgcagaagtggtacggggacctgcggggaaagcccttcgccatcgaagccgagaacagcatcctggacatcagcggcttcagcaagcagtacaactgtgccttcatctggcagaaggacggcgtgaagaagctgaacctgtacctgatcatcaactacttcaagggcggcaagctgcggttcaagaagatcaaacctgaagccttcgaagccaacagattctacaccgtgatcaacaaaaagagcggcgagatcgtgcccatggaggtgaacttcaacttcgacgaccccaacctgatcatcctgcctctggcctttggcaagagacagggcagagaattcatctggaacgacctgctgtccctggaaaccggcagcctgaagctggccaacggaagagtgatcgagaagacactgtacaacagaagaacccggcaggatgagcctgccctgttcgtggccctgaccttcgagcggcgggaggtcctggactcctccaatatcaaaccaatgaacctgatcggcgtggcaagaggcgaaaacatccccgccgtgatcgccctgaccgaccccgagggctgcccactgagccggtttaaggatagcctgggaaacccaacccacatcctgagaatcggcgagagctataaggagaagcagcggaccatccaggccaagaaggaggtggagcagcggagagccggcggctacagccggaagtacgccagcaaagccaagaatctggcagacgatatggtgagaaacaccgctagagatctgctgtactacgccgtgacccaggatgccatgctgatcttcgccaacctgagccggggcttcggccggcagggcaagcggaccttcatggccgagagacagtacacacggatggaggactggctgaccgccaagctggcctacgagggcctgagcaagacctacctgtccaagacactggcccagtacacctccaagacatgcagcaactgtgggtttaccatcaccagcgccgactacgacagggtgctggagaagctgaagaagacagcaacaggctggatgaccacaattaacggcaaggagctgaaggtggagggccagattacctactacaacagatacaagagacagaacgtagtcaaggacctgtccgtcgagctggatagactgagcgaagaatctgtgaacaacgacatctcctcctggacaaagggcagaagcggagaagctctgagcctcctgaagaaaagattctcccatagacccgtgcaggagaagttcgtgtgcctgaactgcggcttcgagacacacgcagccgagcaagccgccctgaacatcgccagatcctggctgttcctgcggagccaggagtacaagaaataccagacaaacaagacaaccggcaacaccgataagagagccttcgtcgagacctggcagtccttttaccggaagaagcttaaggaggtgtggaaacctgccgtgcggtctggcggatctggcggaggctccaccagccccaagaaaaagagaaaagtctaagctgccttctgcggggcttgccttctggccatgcccttcttctctcccttgcacctgtacctcttggtctttgaataaagcctgagtaggaaggctagcaaaaaaaaaaaaaaaaaaaaaaaaaaaaaaaaaaaaaaaaaaaaaaaaaaaaaaaaaaaaaaaaaaaaaaaaaaaaaaaa

SEQ ID NO: 9372 - RNA, 8787 nt, synthetic construct
  source 1..8787: mol_type = other RNA
aggaaataagagagaaaagaagagtaagaagaaatataagagccaccatggcccctaagaagaagcgtaaagtgagccggatgaaccacgaccaggagttcgacccccctaaggtgtaccctcccgtccccgccgagaagagaaagcccatccgggtcctgagcctgttcgatggcatcgccaccggtctgctggtgctgaaggacctgggcatccaggtggataggtacattgcctccgaggtgtgcgaggactccatcaccgtgggaatggtgcgtcatcagggcaagatcatgtacgtgggcgacgtgcggagcgtgacacagaagcatatccaggagtggggccctttcgacctggtgatcggcggcagcccttgcaatgacctgagcatcgtgaacccagcccggaagggcctgtacgagggaaccggcagactgttcttcgagttttacagactgctgcacgacgcccggcctaaggaaggcgacgaccggcccttcttttggctgttcgagaatgtggtggccatgggagtcagcgacaagcgggatattagccggttcctggagagcaaccccgtgatgatcgatgccaaggaagtgagcgccgcccaccgggccagatacttctggggcaatctgcctggcatgaacagacccctggccagcaccgtgaacgacaagctggagctgcaggagtgcctggagcacggccggatcgccaagttcagcaaggtgagaaccatcaccacccgaagcaacagcatcaaacaaggcaaggaccagcactttcctgtgttcatgaacgagaaggaggacatcctgtggtgtaccgagatggagagagtgttcgggttcccagtccactacacagatgtcagcaacatgtctagactggccagacagagactgctgggaagaagctggtccgtccctgtgatcagacacctgttcgcccctctgaaggagtacttcgcctgcgtgagcagcggcaacagcaacgccaacagccggggccccagcttctctagcggcctggtgccactgtccctgagagggagccacatgggccccatggagatctacaaaaccgtgagcgcctggaagcggcagcctgtgcgcgtgctgagcctgtttcggaatatcgataaagtcctgaaaagcctgggattcctggagagcggctctggctccggcggtggcaccctgaagtacgtggaggatgtgacaaacgtggtcagacgggatgtggagaagtggggccccttcgatctggtgtacggcagcacccaacccctgggcagctcttgtgaccggtgccctggctggtacatgtttcagttccaccggatcctgcagtacgccctgccgagacaggagtcccagcggccattcttttggattttcatggacaacttgctgctgaccgaggatgaccaggaaactaccactcggttcctgcagaccgaagccgtgaccctgcaggacgtgagaggccgggactaccagaacgccatgcgggtgtggtccaacatccctggactgaaaagcaagcacgcacctctgacccctaaagaagaggagtacctgcaggcccaggtgcggagcagaagcaagctggacgcccctaaggtggatctgctggtgaagaattgcctcctgcccctgagagagtacttcaagtatttcagccagaatagtctgcccctgggaggcagcggcggcggcacccaggaccccgtggtgttcgaggacgtggccgtggacttcacccaggaggagtgggccctgctgaacctggcccagaggaacctgtacagggacgtgatgctggagaacttccagaacctggccagcctgggctaccccctgcacatcccctacctgatcagccagtggaagcaggaggaggacctgggcaccgtggagaggggcaccatccagggcgagcaccaggagggcttcgagaccggcggcccaagcagcggcgcccctcctcccagcggcggcaggcggcccaagcagcggcgcccctcctcccagcggcggcagcccagccggctccccaacctctaccgaggagggcacctctgagtccgccacccccgagagcggccctggcacctccaccgagcccagcgagggcagcgcacccggcagccctgccggcagccccacctccacagaggagggaaccagcaccgagcccagcgaaggcagcgccccaggcaccagcaccgagcctagtgagcaggagattaaacggatcaacaagatcagaagaagacttgtgaaagacagcaacaccaagaaggccggcaagacaggccccatgaaaaccctgctggttagagtgatgacacccgatctgagagagcggctggaaaacctgagaaagaagcctgaaaatatcccccagcccatcagcaatacatctagagccaacctgaataagctgctgaccgattacaccgaaatgaagaaggcgatcctgcatgtgtactgggaagagttccagaaggaccctgtgggcctgatgagccgggtggcccagcctgccagcaagaagatcgatcagaacaagctgaaacctgagatggacgagaagggcaacctgaccaccgccggctttgcctgctctcagtgtggccagcccctgttcgtgtacaagctggagcaggtgtctgagaagggcaaggcttacaccaactacttcggacggtgcaatgtggccgagcacgaaaagctgatcctgctggcccagctgaagcccgagaaggatagcgacgaagccgtgacatatagcctgggaaagtttgggcagagggccctggatttctacagcattcatgtgaccaaggagtccacccaccccgtgaagcccctggcccagatcgccggaaacagatacgcctccggacctgtgggaaaggccctgagcgacgcatgtatgggcacaatcgcctccttcctgtctaagtaccaggacatcatcatcgaacaccagaaggtggtgaagggcaaccagaagagactggagagcctgcgggagctggccggcaaggaaaacctggaataccctagcgtgaccctgccacctcagcctcacaccaaggagggcgttgatgcctacaacgaagtgatcgcccgggtgcgaatgtgggtgaacctgaacctgtggcagaagctgaagctaagcagagatgatgccaagcctctgctgagactgaagggattcccttcctttcctctggtcgagagacaggccaacgaagtggactggtgggacatggtgtgtaacgtgaagaagctgatcaacgagaaaaaggaggatggcaaggtgttttggcagaatctggctggctacaagagacaggaagccctgagaccatacctgagcagcgaggaagatcggaagaagggaaagaaattcgctcggtaccagctgggcgacctgctgctgcacctggaaaagaagcacggcgaggactggggaaaggtgtacgacgaggcctgggagcggattgacaagaaagtggaaggcctgagcaagcacatcaagctggaagaggaacggagaagcgaggacgcccagagcaaggccgccctgaccgactggctgcgggctaaggccagcttcgtgatcgagggcctgaaggaggccgacaaggacgagttctgcagatgcgagctgaagctgcagaagtggtacggggacctgcggggaaagcccttcgccatcgaagccgagaacagcatcctggacatcagcggcttcagcaagcagtacaactgtgccttcatctggcagaaggacggcgtgaagaagctgaacctgtacctgatcatcaactacttcaagggcggcaagctgcggttcaagaagatcaaacctgaagccttcgaagccaacagattctacaccgtgatcaacaaaaagagcggcgagatcgtgcccatggaggtgaacttcaacttcgacgaccccaacctgatcatcctgcctctggcctttggcaagagacagggcagagaattcatctggaacgacctgctgtccctggaaaccggcagcctgaagctggccaacggaagagtgatcgagaagacactgtacaacagaagaacccggcaggatgagcctgccctgttcgtggccctgaccttcgagcggcgggaggtcctggactcctccaatatcaaaccaatgaacctgatcggcgtggcaagaggcgaaaacatccccgccgtgatcgccctgaccgaccccgagggctgcccactgagccggtttaaggatagcctgggaaacccaacccacatcctgagaatcggcgagagctataaggagaagcagcggaccatccaggccaagaaggaggtggagcagcggagagccggcggctacagccggaagtacgccagcaaagccaagaatctggcagacgatatggtgagaaacaccgctagagatctgctgtactacgccgtgacccaggatgccatgctgatcttcgccaacctgagccggggcttcggccggcagggcaagcggaccttcatggccgagagacagtacacacggatggaggactggctgaccgccaagctggcctacgagggcctgagcaagacctacctgtccaagacactggcccagtacacctccaagacatgcagcaactgtgggtttaccatcaccagcgccgactacgacagggtgctggagaagctgaagaagacagcaacaggctggatgaccacaattaacggcaaggagctgaaggtggagggccagattacctactacaacagatacaagagacagaacgtagtcaaggacctgtccgtcgagctggatagactgagcgaagaatctgtgaacaacgacatctcctcctggacaaagggcagaagcggagaagctctgagcctcctgaagaaaagattctcccatagacccgtgcaggagaagttcgtgtgcctgaactgcggcttcgagacacacgcagccgagcaagccgccctgaacatcgccagatcctggctgttcctgcggagccaggagtacaagaaataccagacaaacaagacaaccggcaacaccgataagagagccttcgtcgagacctggcagtccttttaccggaagaagcttaaggaggtgtggaaacctgccgtgcggtctggcggatctggcggaggctccaccagccccaagaaaaagagaaaagtctaagctgccttctgcggggcttgccttctggccatgcccttcttctctcccttgcacctgtacctcttggtctttgaataaagcctgagtaggaaggctagcaaaaaaaaaaaaaaaaaaaaaaaaaaaaaaaaaaaaaaaaaaaaaaaaaaaaaaaaaaaaaaaaaaaaaaaaaaaaaaaagcccagccggctccccaacctctaccgaggagggcacctctgagtccgccacccccgagagcggccctggcacctccaccgagcccagcgagggcagcgcacccggcagccctgccggcagccccacctccacagaggagggaaccagcaccgagcccagcgaaggcagcgccccaggcaccagcaccgagcctagtgagcaggagattaaacggatcaacaagatcagaagaagacttgtgaaagacagcaacaccaagaaggccggcaagacaggccccatgaaaaccctgctggttagagtgatgacacccgatctgagagagcggctggaaaacctgagaaagaagcctgaaaatatcccccagcccatcagcaatacatctagagccaacctgaataagctgctgaccgattacaccgaaatgaagaaggcgatcctgcatgtgtactgggaagagttccagaaggaccctgtgggcctgatgagccgggtggcccagcctgccagcaagaagatcgatcagaacaagctgaaacctgagatggacgagaagggcaacctgaccaccgccggctttgcctgctctcagtgtggccagcccctgttcgtgtacaagctggagcaggtgtctgagaagggcaaggcttacaccaactacttcggacggtgcaatgtggccgagcacgaaaagctgatcctgctggcccagctgaagcccgagaaggatagcgacgaagccgtgacatatagcctgggaaagtttgggcagagggccctggatttctacagcattcatgtgaccaaggagtccacccaccccgtgaagcccctggcccagatcgccggaaacagatacgcctccggacctgtgggaaaggccctgagcgacgcatgtatgggcacaatcgcctccttcctgtctaagtaccaggacatcatcatcgaacaccagaaggtggtgaagggcaaccagaagagactggagagcctgcgggagctggccggcaaggaaaacctggaataccctagcgtgaccctgccacctcagcctcacaccaaggagggcgttgatgcctacaacgaagtgatcgcccgggtgcgaatgtgggtgaacctgaacctgtggcagaagctgaagctaagcagagatgatgccaagcctctgctgagactgaagggattcccttcctttcctctggtcgagagacaggccaacgaagtggactggtgggacatggtgtgtaacgtgaagaagctgatcaacgagaaaaaggaggatggcaaggtgttttggcagaatctggctggctacaagagacaggaagccctgagaccatacctgagcagcgaggaagatcggaagaagggaaagaaattcgctcggtaccagctgggcgacctgctgctgcacctggaaaagaagcacggcgaggactggggaaaggtgtacgacgaggcctgggagcggattgacaagaaagtggaaggcctgagcaagcacatcaagctggaagaggaacggagaagcgaggacgcccagagcaaggccgccctgaccgactggctgcgggctaaggccagcttcgtgatcgagggcctgaaggaggccgacaaggacgagttctgcagatgcgagctgaagctgcagaagtggtacggggacctgcggggaaagcccttcgccatcgaagccgagaacagcatcctggacatcagcggcttcagcaagcagtacaactgtgccttcatctggcagaaggacggcgtgaagaagctgaacctgtacctgatcatcaactacttcaagggcggcaagctgcggttcaagaagatcaaacctgaagccttcgaagccaacagattctacaccgtgatcaacaaaaagagcggcgagatcgtgcccatggaggtgaacttcaacttcgacgaccccaacctgatcatcctgcctctggcctttggcaagagacagggcagagaattcatctggaacgacctgctgtccctggaaaccggcagcctgaagctggccaacggaagagtgatcgagaagacactgtacaacagaagaacccggcaggatgagcctgccctgttcgtggccctgaccttcgagcggcgggaggtcctggactcctccaatatcaaaccaatgaacctgatcggcgtggcaagaggcgaaaacatccccgccgtgatcgccctgaccgaccccgagggctgcccactgagccggtttaaggatagcctgggaaacccaacccacatcctgagaatcggcgagagctataaggagaagcagcggaccatccaggccaagaaggaggtggagcagcggagagccggcggctacagccggaagtacgccagcaaagccaagaatctggcagacgatatggtgagaaacaccgctagagatctgctgtactacgccgtgacccaggatgccatgctgatcttcgccaacctgagccggggcttcggccggcagggcaagcggaccttcatggccgagagacagtacacacggatggaggactggctgaccgccaagctggcctacgagggcctgagcaagacctacctgtccaagacactggcccagtacacctccaagacatgcagcaactgtgggtttaccatcaccagcgccgactacgacagggtgctggagaagctgaagaagacagcaacaggctggatgaccacaattaacggcaaggagctgaaggtggagggccagattacctactacaacagatacaagagacagaacgtagtcaaggacctgtccgtcgagctggatagactgagcgaagaatctgtgaacaacgacatctcctcctggacaaagggcagaagcggagaagctctgagcctcctgaagaaaagattctcccatagacccgtgcaggagaagttcgtgtgcctgaactgcggcttcgagacacacgcagccgagcaagccgccctgaacatcgccagatcctggctgttcctgcggagccaggagtacaagaaataccagacaaacaagacaaccggcaacaccgataagagagccttcgtcgagacctggcagtccttttaccggaagaagcttaaggaggtgtggaaacctgccgtgcggtctggcggatctggcggaggctccaccagccccaagaaaaagagaaaagtctaagctgccttctgcggggcttgccttctggccatgcccttcttctctcccttgcacctgtacctcttggtctttgaataaagcctgagtaggaaggctagcaaaaaaaaaaaaaaaaaaaaaaaaaaaaaaaaaaaaaaaaaaaaaaaaaaaaaaaaaaaaaaaaaaaaaaaaaaaaaaaa

SEQ ID NO: 9373 - RNA, 8787 nt, synthetic construct
  source 1..8787: mol_type = other RNA
aggaaataagagagaaaagaagagtaagaagaaatataagagccaccatggcccctaagaagaagcgtaaagtgagccggatgaaccacgaccaggagttcgacccccctaaggtgtaccctcccgtccccgccgagaagagaaagcccatccgggtcctgagcctgttcgatggcatcgccaccggtctgctggtgctgaaggacctgggcatccaggtggataggtacattgcctccgaggtgtgcgaggactccatcaccgtgggaatggtgcgtcatcagggcaagatcatgtacgtgggcgacgtgcggagcgtgacacagaagcatatccaggagtggggccctttcgacctggtgatcggcggcagcccttgcaatgacctgagcatcgtgaacccagcccggaagggcctgtacgagggaaccggcagactgttcttcgagttttacagactgctgcacgacgcccggcctaaggaaggcgacgaccggcccttcttttggctgttcgagaatgtggtggccatgggagtcagcgacaagcgggatattagccggttcctggagagcaaccccgtgatgatcgatgccaaggaagtgagcgccgcccaccgggccagatacttctggggcaatctgcctggcatgaacagacccctggccagcaccgtgaacgacaagctggagctgcaggagtgcctggagcacggccggatcgccaagttcagcaaggtgagaaccatcaccacccgaagcaacagcatcaaacaaggcaaggaccagcactttcctgtgttcatgaacgagaaggaggacatcctgtggtgtaccgagatggagagagtgttcgggttcccagtccactacacagatgtcagcaacatgtctagactggccagacagagactgctgggaagaagctggtccgtccctgtgatcagacacctgttcgcccctctgaaggagtacttcgcctgcgtgagcagcggcaacagcaacgccaacagccggggccccagcttctctagcggcctggtgccactgtccctgagagggagccacatgggccccatggagatctacaaaaccgtgagcgcctggaagcggcagcctgtgcgcgtgctgagcctgtttcggaatatcgataaagtcctgaaaagcctgggattcctggagagcggctctggctccggcggtggcaccctgaagtacgtggaggatgtgacaaacgtggtcagacgggatgtggagaagtggggccccttcgatctggtgtacggcagcacccaacccctgggcagctcttgtgaccggtgccctggctggtacatgtttcagttccaccggatcctgcagtacgccctgccgagacaggagtcccagcggccattcttttggattttcatggacaacttgctgctgaccgaggatgaccaggaaactaccactcggttcctgcagaccgaagccgtgaccctgcaggacgtgagaggccgggactaccagaacgccatgcgggtgtggtccaacatccctggactgaaaagcaagcacgcacctctgacccctaaagaagaggagtacctgcaggcccaggtgcggagcagaagcaagctggacgcccctaaggtggatctgctggtgaagaattgcctcctgcccctgagagagtacttcaagtatttcagccagaatagtctgcccctgggaggcagcggcggcggcagcaaggtgcccgtgaccttcggcgacctggccatctacttcagccaggaggagtgggagtggctgagccccatccagaaggacctgtacgaggacgtgatgctggagaactaccagaacctggtgagcctgggcctgagcttcaggaggcccaacgtgatcaccctgctggagaagggcagggccccctggatggtggagcccgtgaggaagaggaggggcctggacagcaggagcaagtacggcggcccaagcagcggcgcccctcctcccagcggcggcaggcggcccaagcagcggcgcccctcctcccagcggcggcagcccagccggctccccaacctctaccgaggagggcacctctgagtccgccacccccgagagcggccctggcacctccaccgagcccagcgagggcagcgcacccggcagccctgccggcagccccacctccacagaggagggaaccagcaccgagcccagcgaaggcagcgccccaggcaccagcaccgagcctagtgagcaggagattaaacggatcaacaagatcagaagaagacttgtgaaagacagcaacaccaagaaggccggcaagacaggccccatgaaaaccctgctggttagagtgatgacacccgatctgagagagcggctggaaaacctgagaaagaagcctgaaaatatcccccagcccatcagcaatacatctagagccaacctgaataagctgctgaccgattacaccgaaatgaagaaggcgatcctgcatgtgtactgggaagagttccagaaggaccctgtgggcctgatgagccgggtggcccagcctgccagcaagaagatcgatcagaacaagctgaaacctgagatggacgagaagggcaacctgaccaccgccggctttgcctgctctcagtgtggccagcccctgttcgtgtacaagctggagcaggtgtctgagaagggcaaggcttacaccaactacttcggacggtgcaatgtggccgagcacgaaaagctgatcctgctggcccagctgaagcccgagaaggatagcgacgaagccgtgacatatagcctgggaaagtttgggcagagggccctggatttctacagcattcatgtgaccaaggagtccacccaccccgtgaagcccctggcccagatcgccggaaacagatacgcctccggacctgtgggaaaggccctgagcgacgcatgtatgggcacaatcgcctccttcctgtctaagtaccaggacatcatcatcgaacaccagaaggtggtgaagggcaaccagaagagactggagagcctgcgggagctggccggcaaggaaaacctggaataccctagcgtgaccctgccacctcagcctcacaccaaggagggcgttgatgcctacaacgaagtgatcgcccgggtgcgaatgtgggtgaacctgaacctgtggcagaagctgaagctaagcagagatgatgccaagcctctgctgagactgaagggattcccttcctttcctctggtcgagagacaggccaacgaagtggactggtgggacatggtgtgtaacgtgaagaagctgatcaacgagaaaaaggaggatggcaaggtgttttggcagaatctggctggctacaagagacaggaagccctgagaccatacctgagcagcgaggaagatcggaagaagggaaagaaattcgctcggtaccagctgggcgacctgctgctgcacctggaaaagaagcacggcgaggactggggaaaggtgtacgacgaggcctgggagcggattgacaagaaagtggaaggcctgagcaagcacatcaagctggaagaggaacggagaagcgaggacgcccagagcaaggccgccctgaccgactggctgcgggctaaggccagcttcgtgatcgagggcctgaaggaggccgacaaggacgagttctgcagatgcgagctgaagctgcagaagtggtacggggacctgcggggaaagcccttcgccatcgaagccgagaacagcatcctggacatcagcggcttcagcaagcagtacaactgtgccttcatctggcagaaggacggcgtgaagaagctgaacctgtacctgatcatcaactacttcaagggcggcaagctgcggttcaagaagatcaaacctgaagccttcgaagccaacagattctacaccgtgatcaacaaaaagagcggcgagatcgtgcccatggaggtgaacttcaacttcgacgaccccaacctgatcatcctgcctctggcctttggcaagagacagggcagagaattcatctggaacgacctgctgtccctggaaaccggcagcctgaagctggccaacggaagagtgatcgagaagacactgtacaacagaagaacccggcaggatgagcctgccctgttcgtggccctgaccttcgagcggcgggaggtcctggactcctccaatatcaaaccaatgaacctgatcggcgtggcaagaggcgaaaacatccccgccgtgatcgccctgaccgaccccgagggctgcccactgagccggtttaaggatagcctgggaaacccaacccacatcctgagaatcggcgagagctataaggagaagcagcggaccatccaggccaagaaggaggtggagcagcggagagccggcggctacagccggaagtacgccagcaaagccaagaatctggcagacgatatggtgagaaacaccgctagagatctgctgtactacgccgtgacccaggatgccatgctgatcttcgccaacctgagccggggcttcggccggcagggcaagcggaccttcatggccgagagacagtacacacggatggaggactggctgaccgccaagctggcctacgagggcctgagcaagacctacctgtccaagacactggcccagtacacctccaagacatgcagcaactgtgggtttaccatcaccagcgccgactacgacagggtgctggagaagctgaagaagacagcaacaggctggatgaccacaattaacggcaaggagctgaaggtggagggccagattacctactacaacagatacaagagacagaacgtagtcaaggacctgtccgtcgagctggatagactgagcgaagaatctgtgaacaacgacatctcctcctggacaaagggcagaagcggagaagctctgagcctcctgaagaaaagattctcccatagacccgtgcaggagaagttcgtgtgcctgaactgcggcttcgagacacacgcagccgagcaagccgccctgaacatcgccagatcctggctgttcctgcggagccaggagtacaagaaataccagacaaacaagacaaccggcaacaccgataagagagccttcgtcgagacctggcagtccttttaccggaagaagcttaaggaggtgtggaaacctgccgtgcggtctggcggatctggcggaggctccaccagccccaagaaaaagagaaaagtctaagctgccttctgcggggcttgccttctggccatgcccttcttctctcccttgcacctgtacctcttggtctttgaataaagcctgagtaggaaggctagcaaaaaaaaaaaaaaaaaaaaaaaaaaaaaaaaaaaaaaaaaaaaaaaaaaaaaaaaaaaaaaaaaaaaaaaaaaaaaaaagcccagccggctccccaacctctaccgaggagggcacctctgagtccgccacccccgagagcggccctggcacctccaccgagcccagcgagggcagcgcacccggcagccctgccggcagccccacctccacagaggagggaaccagcaccgagcccagcgaaggcagcgccccaggcaccagcaccgagcctagtgagcaggagattaaacggatcaacaagatcagaagaagacttgtgaaagacagcaacaccaagaaggccggcaagacaggccccatgaaaaccctgctggttagagtgatgacacccgatctgagagagcggctggaaaacctgagaaagaagcctgaaaatatcccccagcccatcagcaatacatctagagccaacctgaataagctgctgaccgattacaccgaaatgaagaaggcgatcctgcatgtgtactgggaagagttccagaaggaccctgtgggcctgatgagccgggtggcccagcctgccagcaagaagatcgatcagaacaagctgaaacctgagatggacgagaagggcaacctgaccaccgccggctttgcctgctctcagtgtggccagcccctgttcgtgtacaagctggagcaggtgtctgagaagggcaaggcttacaccaactacttcggacggtgcaatgtggccgagcacgaaaagctgatcctgctggcccagctgaagcccgagaaggatagcgacgaagccgtgacatatagcctgggaaagtttgggcagagggccctggatttctacagcattcatgtgaccaaggagtccacccaccccgtgaagcccctggcccagatcgccggaaacagatacgcctccggacctgtgggaaaggccctgagcgacgcatgtatgggcacaatcgcctccttcctgtctaagtaccaggacatcatcatcgaacaccagaaggtggtgaagggcaaccagaagagactggagagcctgcgggagctggccggcaaggaaaacctggaataccctagcgtgaccctgccacctcagcctcacaccaaggagggcgttgatgcctacaacgaagtgatcgcccgggtgcgaatgtgggtgaacctgaacctgtggcagaagctgaagctaagcagagatgatgccaagcctctgctgagactgaagggattcccttcctttcctctggtcgagagacaggccaacgaagtggactggtgggacatggtgtgtaacgtgaagaagctgatcaacgagaaaaaggaggatggcaaggtgttttggcagaatctggctggctacaagagacaggaagccctgagaccatacctgagcagcgaggaagatcggaagaagggaaagaaattcgctcggtaccagctgggcgacctgctgctgcacctggaaaagaagcacggcgaggactggggaaaggtgtacgacgaggcctgggagcggattgacaagaaagtggaaggcctgagcaagcacatcaagctggaagaggaacggagaagcgaggacgcccagagcaaggccgccctgaccgactggctgcgggctaaggccagcttcgtgatcgagggcctgaaggaggccgacaaggacgagttctgcagatgcgagctgaagctgcagaagtggtacggggacctgcggggaaagcccttcgccatcgaagccgagaacagcatcctggacatcagcggcttcagcaagcagtacaactgtgccttcatctggcagaaggacggcgtgaagaagctgaacctgtacctgatcatcaactacttcaagggcggcaagctgcggttcaagaagatcaaacctgaagccttcgaagccaacagattctacaccgtgatcaacaaaaagagcggcgagatcgtgcccatggaggtgaacttcaacttcgacgaccccaacctgatcatcctgcctctggcctttggcaagagacagggcagagaattcatctggaacgacctgctgtccctggaaaccggcagcctgaagctggccaacggaagagtgatcgagaagacactgtacaacagaagaacccggcaggatgagcctgccctgttcgtggccctgaccttcgagcggcgggaggtcctggactcctccaatatcaaaccaatgaacctgatcggcgtggcaagaggcgaaaacatccccgccgtgatcgccctgaccgaccccgagggctgcccactgagccggtttaaggatagcctgggaaacccaacccacatcctgagaatcggcgagagctataaggagaagcagcggaccatccaggccaagaaggaggtggagcagcggagagccggcggctacagccggaagtacgccagcaaagccaagaatctggcagacgatatggtgagaaacaccgctagagatctgctgtactacgccgtgacccaggatgccatgctgatcttcgccaacctgagccggggcttcggccggcagggcaagcggaccttcatggccgagagacagtacacacggatggaggactggctgaccgccaagctggcctacgagggcctgagcaagacctacctgtccaagacactggcccagtacacctccaagacatgcagcaactgtgggtttaccatcaccagcgccgactacgacagggtgctggagaagctgaagaagacagcaacaggctggatgaccacaattaacggcaaggagctgaaggtggagggccagattacctactacaacagatacaagagacagaacgtagtcaaggacctgtccgtcgagctggatagactgagcgaagaatctgtgaacaacgacatctcctcctggacaaagggcagaagcggagaagctctgagcctcctgaagaaaagattctcccatagacccgtgcaggagaagttcgtgtgcctgaactgcggcttcgagacacacgcagccgagcaagccgccctgaacatcgccagatcctggctgttcctgcggagccaggagtacaagaaataccagacaaacaagacaaccggcaacaccgataagagagccttcgtcgagacctggcagtccttttaccggaagaagcttaaggaggtgtggaaacctgccgtgcggtctggcggatctggcggaggctccaccagccccaagaaaaagagaaaagtctaagctgccttctgcggggcttgccttctggccatgcccttcttctctcccttgcacctgtacctcttggtctttgaataaagcctgagtaggaaggctagcaaaaaaaaaaaaaaaaaaaaaaaaaaaaaaaaaaaaaaaaaaaaaaaaaaaaaaaaaaaaaaaaaaaaaaaaaaaaaaaa

SEQ ID NO: 9374 - RNA, 8787 nt, synthetic construct
  source 1..8787: mol_type = other RNA
aggaaataagagagaaaagaagagtaagaagaaatataagagccaccatggcccctaagaagaagcgtaaagtgagccggatgaaccacgaccaggagttcgacccccctaaggtgtaccctcccgtccccgccgagaagagaaagcccatccgggtcctgagcctgttcgatggcatcgccaccggtctgctggtgctgaaggacctgggcatccaggtggataggtacattgcctccgaggtgtgcgaggactccatcaccgtgggaatggtgcgtcatcagggcaagatcatgtacgtgggcgacgtgcggagcgtgacacagaagcatatccaggagtggggccctttcgacctggtgatcggcggcagcccttgcaatgacctgagcatcgtgaacccagcccggaagggcctgtacgagggaaccggcagactgttcttcgagttttacagactgctgcacgacgcccggcctaaggaaggcgacgaccggcccttcttttggctgttcgagaatgtggtggccatgggagtcagcgacaagcgggatattagccggttcctggagagcaaccccgtgatgatcgatgccaaggaagtgagcgccgcccaccgggccagatacttctggggcaatctgcctggcatgaacagacccctggccagcaccgtgaacgacaagctggagctgcaggagtgcctggagcacggccggatcgccaagttcagcaaggtgagaaccatcaccacccgaagcaacagcatcaaacaaggcaaggaccagcactttcctgtgttcatgaacgagaaggaggacatcctgtggtgtaccgagatggagagagtgttcgggttcccagtccactacacagatgtcagcaacatgtctagactggccagacagagactgctgggaagaagctggtccgtccctgtgatcagacacctgttcgcccctctgaaggagtacttcgcctgcgtgagcagcggcaacagcaacgccaacagccggggccccagcttctctagcggcctggtgccactgtccctgagagggagccacatgggccccatggagatctacaaaaccgtgagcgcctggaagcggcagcctgtgcgcgtgctgagcctgtttcggaatatcgataaagtcctgaaaagcctgggattcctggagagcggctctggctccggcggtggcaccctgaagtacgtggaggatgtgacaaacgtggtcagacgggatgtggagaagtggggccccttcgatctggtgtacggcagcacccaacccctgggcagctcttgtgaccggtgccctggctggtacatgtttcagttccaccggatcctgcagtacgccctgccgagacaggagtcccagcggccattcttttggattttcatggacaacttgctgctgaccgaggatgaccaggaaactaccactcggttcctgcagaccgaagccgtgaccctgcaggacgtgagaggccgggactaccagaacgccatgcgggtgtggtccaacatccctggactgaaaagcaagcacgcacctctgacccctaaagaagaggagtacctgcaggcccaggtgcggagcagaagcaagctggacgcccctaaggtggatctgctggtgaagaattgcctcctgcccctgagagagtacttcaagtatttcagccagaatagtctgcccctgggaggcagcggcggcggcttccaggagcccgtgaccttcgaggacgtggccgtgtacttcacccagaacgagtgggccagcctgcaccccacccagagggccctgtacaggggcgtgatgctggagaactacgccaacgtgaccagcctgagcgccttccccttccccaagcccgacctgatcttccagctggagcagggcgaggccgcctggggccccgacccctggaccctggacggcggcgaggccctgaggggcatgggcggcccaagcagcggcgcccctcctcccagcggcggcaggcggcccaagcagcggcgcccctcctcccagcggcggcagcccagccggctccccaacctctaccgaggagggcacctctgagtccgccacccccgagagcggccctggcacctccaccgagcccagcgagggcagcgcacccggcagccctgccggcagccccacctccacagaggagggaaccagcaccgagcccagcgaaggcagcgccccaggcaccagcaccgagcctagtgagcaggagattaaacggatcaacaagatcagaagaagacttgtgaaagacagcaacaccaagaaggccggcaagacaggccccatgaaaaccctgctggttagagtgatgacacccgatctgagagagcggctggaaaacctgagaaagaagcctgaaaatatcccccagcccatcagcaatacatctagagccaacctgaataagctgctgaccgattacaccgaaatgaagaaggcgatcctgcatgtgtactgggaagagttccagaaggaccctgtgggcctgatgagccgggtggcccagcctgccagcaagaagatcgatcagaacaagctgaaacctgagatggacgagaagggcaacctgaccaccgccggctttgcctgctctcagtgtggccagcccctgttcgtgtacaagctggagcaggtgtctgagaagggcaaggcttacaccaactacttcggacggtgcaatgtggccgagcacgaaaagctgatcctgctggcccagctgaagcccgagaaggatagcgacgaagccgtgacatatagcctgggaaagtttgggcagagggccctggatttctacagcattcatgtgaccaaggagtccacccaccccgtgaagcccctggcccagatcgccggaaacagatacgcctccggacctgtgggaaaggccctgagcgacgcatgtatgggcacaatcgcctccttcctgtctaagtaccaggacatcatcatcgaacaccagaaggtggtgaagggcaaccagaagagactggagagcctgcgggagctggccggcaaggaaaacctggaataccctagcgtgaccctgccacctcagcctcacaccaaggagggcgttgatgcctacaacgaagtgatcgcccgggtgcgaatgtgggtgaacctgaacctgtggcagaagctgaagctaagcagagatgatgccaagcctctgctgagactgaagggattcccttcctttcctctggtcgagagacaggccaacgaagtggactggtgggacatggtgtgtaacgtgaagaagctgatcaacgagaaaaaggaggatggcaaggtgttttggcagaatctggctggctacaagagacaggaagccctgagaccatacctgagcagcgaggaagatcggaagaagggaaagaaattcgctcggtaccagctgggcgacctgctgctgcacctggaaaagaagcacggcgaggactggggaaaggtgtacgacgaggcctgggagcggattgacaagaaagtggaaggcctgagcaagcacatcaagctggaagaggaacggagaagcgaggacgcccagagcaaggccgccctgaccgactggctgcgggctaaggccagcttcgtgatcgagggcctgaaggaggccgacaaggacgagttctgcagatgcgagctgaagctgcagaagtggtacggggacctgcggggaaagcccttcgccatcgaagccgagaacagcatcctggacatcagcggcttcagcaagcagtacaactgtgccttcatctggcagaaggacggcgtgaagaagctgaacctgtacctgatcatcaactacttcaagggcggcaagctgcggttcaagaagatcaaacctgaagccttcgaagccaacagattctacaccgtgatcaacaaaaagagcggcgagatcgtgcccatggaggtgaacttcaacttcgacgaccccaacctgatcatcctgcctctggcctttggcaagagacagggcagagaattcatctggaacgacctgctgtccctggaaaccggcagcctgaagctggccaacggaagagtgatcgagaagacactgtacaacagaagaacccggcaggatgagcctgccctgttcgtggccctgaccttcgagcggcgggaggtcctggactcctccaatatcaaaccaatgaacctgatcggcgtggcaagaggcgaaaacatccccgccgtgatcgccctgaccgaccccgagggctgcccactgagccggtttaaggatagcctgggaaacccaacccacatcctgagaatcggcgagagctataaggagaagcagcggaccatccaggccaagaaggaggtggagcagcggagagccggcggctacagccggaagtacgccagcaaagccaagaatctggcagacgatatggtgagaaacaccgctagagatctgctgtactacgccgtgacccaggatgccatgctgatcttcgccaacctgagccggggcttcggccggcagggcaagcggaccttcatggccgagagacagtacacacggatggaggactggctgaccgccaagctggcctacgagggcctgagcaagacctacctgtccaagacactggcccagtacacctccaagacatgcagcaactgtgggtttaccatcaccagcgccgactacgacagggtgctggagaagctgaagaagacagcaacaggctggatgaccacaattaacggcaaggagctgaaggtggagggccagattacctactacaacagatacaagagacagaacgtagtcaaggacctgtccgtcgagctggatagactgagcgaagaatctgtgaacaacgacatctcctcctggacaaagggcagaagcggagaagctctgagcctcctgaagaaaagattctcccatagacccgtgcaggagaagttcgtgtgcctgaactgcggcttcgagacacacgcagccgagcaagccgccctgaacatcgccagatcctggctgttcctgcggagccaggagtacaagaaataccagacaaacaagacaaccggcaacaccgataagagagccttcgtcgagacctggcagtccttttaccggaagaagcttaaggaggtgtggaaacctgccgtgcggtctggcggatctggcggaggctccaccagccccaagaaaaagagaaaagtctaagctgccttctgcggggcttgccttctggccatgcccttcttctctcccttgcacctgtacctcttggtctttgaataaagcctgagtaggaaggctagcaaaaaaaaaaaaaaaaaaaaaaaaaaaaaaaaaaaaaaaaaaaaaaaaaaaaaaaaaaaaaaaaaaaaaaaaaaaaaaaagcccagccggctccccaacctctaccgaggagggcacctctgagtccgccacccccgagagcggccctggcacctccaccgagcccagcgagggcagcgcacccggcagccctgccggcagccccacctccacagaggagggaaccagcaccgagcccagcgaaggcagcgccccaggcaccagcaccgagcctagtgagcaggagattaaacggatcaacaagatcagaagaagacttgtgaaagacagcaacaccaagaaggccggcaagacaggccccatgaaaaccctgctggttagagtgatgacacccgatctgagagagcggctggaaaacctgagaaagaagcctgaaaatatcccccagcccatcagcaatacatctagagccaacctgaataagctgctgaccgattacaccgaaatgaagaaggcgatcctgcatgtgtactgggaagagttccagaaggaccctgtgggcctgatgagccgggtggcccagcctgccagcaagaagatcgatcagaacaagctgaaacctgagatggacgagaagggcaacctgaccaccgccggctttgcctgctctcagtgtggccagcccctgttcgtgtacaagctggagcaggtgtctgagaagggcaaggcttacaccaactacttcggacggtgcaatgtggccgagcacgaaaagctgatcctgctggcccagctgaagcccgagaaggatagcgacgaagccgtgacatatagcctgggaaagtttgggcagagggccctggatttctacagcattcatgtgaccaaggagtccacccaccccgtgaagcccctggcccagatcgccggaaacagatacgcctccggacctgtgggaaaggccctgagcgacgcatgtatgggcacaatcgcctccttcctgtctaagtaccaggacatcatcatcgaacaccagaaggtggtgaagggcaaccagaagagactggagagcctgcgggagctggccggcaaggaaaacctggaataccctagcgtgaccctgccacctcagcctcacaccaaggagggcgttgatgcctacaacgaagtgatcgcccgggtgcgaatgtgggtgaacctgaacctgtggcagaagctgaagctaagcagagatgatgccaagcctctgctgagactgaagggattcccttcctttcctctggtcgagagacaggccaacgaagtggactggtgggacatggtgtgtaacgtgaagaagctgatcaacgagaaaaaggaggatggcaaggtgttttggcagaatctggctggctacaagagacaggaagccctgagaccatacctgagcagcgaggaagatcggaagaagggaaagaaattcgctcggtaccagctgggcgacctgctgctgcacctggaaaagaagcacggcgaggactggggaaaggtgtacgacgaggcctgggagcggattgacaagaaagtggaaggcctgagcaagcacatcaagctggaagaggaacggagaagcgaggacgcccagagcaaggccgccctgaccgactggctgcgggctaaggccagcttcgtgatcgagggcctgaaggaggccgacaaggacgagttctgcagatgcgagctgaagctgcagaagtggtacggggacctgcggggaaagcccttcgccatcgaagccgagaacagcatcctggacatcagcggcttcagcaagcagtacaactgtgccttcatctggcagaaggacggcgtgaagaagctgaacctgtacctgatcatcaactacttcaagggcggcaagctgcggttcaagaagatcaaacctgaagccttcgaagccaacagattctacaccgtgatcaacaaaaagagcggcgagatcgtgcccatggaggtgaacttcaacttcgacgaccccaacctgatcatcctgcctctggcctttggcaagagacagggcagagaattcatctggaacgacctgctgtccctggaaaccggcagcctgaagctggccaacggaagagtgatcgagaagacactgtacaacagaagaacccggcaggatgagcctgccctgttcgtggccctgaccttcgagcggcgggaggtcctggactcctccaatatcaaaccaatgaacctgatcggcgtggcaagaggcgaaaacatccccgccgtgatcgccctgaccgaccccgagggctgcccactgagccggtttaaggatagcctgggaaacccaacccacatcctgagaatcggcgagagctataaggagaagcagcggaccatccaggccaagaaggaggtggagcagcggagagccggcggctacagccggaagtacgccagcaaagccaagaatctggcagacgatatggtgagaaacaccgctagagatctgctgtactacgccgtgacccaggatgccatgctgatcttcgccaacctgagccggggcttcggccggcagggcaagcggaccttcatggccgagagacagtacacacggatggaggactggctgaccgccaagctggcctacgagggcctgagcaagacctacctgtccaagacactggcccagtacacctccaagacatgcagcaactgtgggtttaccatcaccagcgccgactacgacagggtgctggagaagctgaagaagacagcaacaggctggatgaccacaattaacggcaaggagctgaaggtggagggccagattacctactacaacagatacaagagacagaacgtagtcaaggacctgtccgtcgagctggatagactgagcgaagaatctgtgaacaacgacatctcctcctggacaaagggcagaagcggagaagctctgagcctcctgaagaaaagattctcccatagacccgtgcaggagaagttcgtgtgcctgaactgcggcttcgagacacacgcagccgagcaagccgccctgaacatcgccagatcctggctgttcctgcggagccaggagtacaagaaataccagacaaacaagacaaccggcaacaccgataagagagccttcgtcgagacctggcagtccttttaccggaagaagcttaaggaggtgtggaaacctgccgtgcggtctggcggatctggcggaggctccaccagccccaagaaaaagagaaaagtctaagctgccttctgcggggcttgccttctggccatgcccttcttctctcccttgcacctgtacctcttggtctttgaataaagcctgagtaggaaggctagcaaaaaaaaaaaaaaaaaaaaaaaaaaaaaaaaaaaaaaaaaaaaaaaaaaaaaaaaaaaaaaaaaaaaaaaaaaaaaaaa

SEQ ID NO: 9375 - RNA, 8787 nt, synthetic construct
  source 1..8787: mol_type = other RNA
aggaaataagagagaaaagaagagtaagaagaaatataagagccaccatggcccctaagaagaagcgtaaagtgagccggatgaaccacgaccaggagttcgacccccctaaggtgtaccctcccgtccccgccgagaagagaaagcccatccgggtcctgagcctgttcgatggcatcgccaccggtctgctggtgctgaaggacctgggcatccaggtggataggtacattgcctccgaggtgtgcgaggactccatcaccgtgggaatggtgcgtcatcagggcaagatcatgtacgtgggcgacgtgcggagcgtgacacagaagcatatccaggagtggggccctttcgacctggtgatcggcggcagcccttgcaatgacctgagcatcgtgaacccagcccggaagggcctgtacgagggaaccggcagactgttcttcgagttttacagactgctgcacgacgcccggcctaaggaaggcgacgaccggcccttcttttggctgttcgagaatgtggtggccatgggagtcagcgacaagcgggatattagccggttcctggagagcaaccccgtgatgatcgatgccaaggaagtgagcgccgcccaccgggccagatacttctggggcaatctgcctggcatgaacagacccctggccagcaccgtgaacgacaagctggagctgcaggagtgcctggagcacggccggatcgccaagttcagcaaggtgagaaccatcaccacccgaagcaacagcatcaaacaaggcaaggaccagcactttcctgtgttcatgaacgagaaggaggacatcctgtggtgtaccgagatggagagagtgttcgggttcccagtccactacacagatgtcagcaacatgtctagactggccagacagagactgctgggaagaagctggtccgtccctgtgatcagacacctgttcgcccctctgaaggagtacttcgcctgcgtgagcagcggcaacagcaacgccaacagccggggccccagcttctctagcggcctggtgccactgtccctgagagggagccacatgggccccatggagatctacaaaaccgtgagcgcctggaagcggcagcctgtgcgcgtgctgagcctgtttcggaatatcgataaagtcctgaaaagcctgggattcctggagagcggctctggctccggcggtggcaccctgaagtacgtggaggatgtgacaaacgtggtcagacgggatgtggagaagtggggccccttcgatctggtgtacggcagcacccaacccctgggcagctcttgtgaccggtgccctggctggtacatgtttcagttccaccggatcctgcagtacgccctgccgagacaggagtcccagcggccattcttttggattttcatggacaacttgctgctgaccgaggatgaccaggaaactaccactcggttcctgcagaccgaagccgtgaccctgcaggacgtgagaggccgggactaccagaacgccatgcgggtgtggtccaacatccctggactgaaaagcaagcacgcacctctgacccctaaagaagaggagtacctgcaggcccaggtgcggagcagaagcaagctggacgcccctaaggtggatctgctggtgaagaattgcctcctgcccctgagagagtacttcaagtatttcagccagaatagtctgcccctgggaggcagcggcggcggcatgaccttcgaggacgtgaccgtggagttcaccccctgggagtggggccagctggaccccgcccagaaggacctgtacagggaggtgatgctggagaacttcaggaacctggccagcctgggcctgcccgtgagcaagccccacgtgatctgccagctggaggagggcgaggagccctgcgtgctggagagggagatcagcgtgggcgcccagagcgacctgaagaggaggcccaaggccaagggcggcccaagcagcggcgcccctcctcccagcggcggcaggcggcccaagcagcggcgcccctcctcccagcggcggcagcccagccggctccccaacctctaccgaggagggcacctctgagtccgccacccccgagagcggccctggcacctccaccgagcccagcgagggcagcgcacccggcagccctgccggcagccccacctccacagaggagggaaccagcaccgagcccagcgaaggcagcgccccaggcaccagcaccgagcctagtgagcaggagattaaacggatcaacaagatcagaagaagacttgtgaaagacagcaacaccaagaaggccggcaagacaggccccatgaaaaccctgctggttagagtgatgacacccgatctgagagagcggctggaaaacctgagaaagaagcctgaaaatatcccccagcccatcagcaatacatctagagccaacctgaataagctgctgaccgattacaccgaaatgaagaaggcgatcctgcatgtgtactgggaagagttccagaaggaccctgtgggcctgatgagccgggtggcccagcctgccagcaagaagatcgatcagaacaagctgaaacctgagatggacgagaagggcaacctgaccaccgccggctttgcctgctctcagtgtggccagcccctgttcgtgtacaagctggagcaggtgtctgagaagggcaaggcttacaccaactacttcggacggtgcaatgtggccgagcacgaaaagctgatcctgctggcccagctgaagcccgagaaggatagcgacgaagccgtgacatatagcctgggaaagtttgggcagagggccctggatttctacagcattcatgtgaccaaggagtccacccaccccgtgaagcccctggcccagatcgccggaaacagatacgcctccggacctgtgggaaaggccctgagcgacgcatgtatgggcacaatcgcctccttcctgtctaagtaccaggacatcatcatcgaacaccagaaggtggtgaagggcaaccagaagagactggagagcctgcgggagctggccggcaaggaaaacctggaataccctagcgtgaccctgccacctcagcctcacaccaaggagggcgttgatgcctacaacgaagtgatcgcccgggtgcgaatgtgggtgaacctgaacctgtggcagaagctgaagctaagcagagatgatgccaagcctctgctgagactgaagggattcccttcctttcctctggtcgagagacaggccaacgaagtggactggtgggacatggtgtgtaacgtgaagaagctgatcaacgagaaaaaggaggatggcaaggtgttttggcagaatctggctggctacaagagacaggaagccctgagaccatacctgagcagcgaggaagatcggaagaagggaaagaaattcgctcggtaccagctgggcgacctgctgctgcacctggaaaagaagcacggcgaggactggggaaaggtgtacgacgaggcctgggagcggattgacaagaaagtggaaggcctgagcaagcacatcaagctggaagaggaacggagaagcgaggacgcccagagcaaggccgccctgaccgactggctgcgggctaaggccagcttcgtgatcgagggcctgaaggaggccgacaaggacgagttctgcagatgcgagctgaagctgcagaagtggtacggggacctgcggggaaagcccttcgccatcgaagccgagaacagcatcctggacatcagcggcttcagcaagcagtacaactgtgccttcatctggcagaaggacggcgtgaagaagctgaacctgtacctgatcatcaactacttcaagggcggcaagctgcggttcaagaagatcaaacctgaagccttcgaagccaacagattctacaccgtgatcaacaaaaagagcggcgagatcgtgcccatggaggtgaacttcaacttcgacgaccccaacctgatcatcctgcctctggcctttggcaagagacagggcagagaattcatctggaacgacctgctgtccctggaaaccggcagcctgaagctggccaacggaagagtgatcgagaagacactgtacaacagaagaacccggcaggatgagcctgccctgttcgtggccctgaccttcgagcggcgggaggtcctggactcctccaatatcaaaccaatgaacctgatcggcgtggcaagaggcgaaaacatccccgccgtgatcgccctgaccgaccccgagggctgcccactgagccggtttaaggatagcctgggaaacccaacccacatcctgagaatcggcgagagctataaggagaagcagcggaccatccaggccaagaaggaggtggagcagcggagagccggcggctacagccggaagtacgccagcaaagccaagaatctggcagacgatatggtgagaaacaccgctagagatctgctgtactacgccgtgacccaggatgccatgctgatcttcgccaacctgagccggggcttcggccggcagggcaagcggaccttcatggccgagagacagtacacacggatggaggactggctgaccgccaagctggcctacgagggcctgagcaagacctacctgtccaagacactggcccagtacacctccaagacatgcagcaactgtgggtttaccatcaccagcgccgactacgacagggtgctggagaagctgaagaagacagcaacaggctggatgaccacaattaacggcaaggagctgaaggtggagggccagattacctactacaacagatacaagagacagaacgtagtcaaggacctgtccgtcgagctggatagactgagcgaagaatctgtgaacaacgacatctcctcctggacaaagggcagaagcggagaagctctgagcctcctgaagaaaagattctcccatagacccgtgcaggagaagttcgtgtgcctgaactgcggcttcgagacacacgcagccgagcaagccgccctgaacatcgccagatcctggctgttcctgcggagccaggagtacaagaaataccagacaaacaagacaaccggcaacaccgataagagagccttcgtcgagacctggcagtccttttaccggaagaagcttaaggaggtgtggaaacctgccgtgcggtctggcggatctggcggaggctccaccagccccaagaaaaagagaaaagtctaagctgccttctgcggggcttgccttctggccatgcccttcttctctcccttgcacctgtacctcttggtctttgaataaagcctgagtaggaaggctagcaaaaaaaaaaaaaaaaaaaaaaaaaaaaaaaaaaaaaaaaaaaaaaaaaaaaaaaaaaaaaaaaaaaaaaaaaaaaaaaagcccagccggctccccaacctctaccgaggagggcacctctgagtccgccacccccgagagcggccctggcacctccaccgagcccagcgagggcagcgcacccggcagccctgccggcagccccacctccacagaggagggaaccagcaccgagcccagcgaaggcagcgccccaggcaccagcaccgagcctagtgagcaggagattaaacggatcaacaagatcagaagaagacttgtgaaagacagcaacaccaagaaggccggcaagacaggccccatgaaaaccctgctggttagagtgatgacacccgatctgagagagcggctggaaaacctgagaaagaagcctgaaaatatcccccagcccatcagcaatacatctagagccaacctgaataagctgctgaccgattacaccgaaatgaagaaggcgatcctgcatgtgtactgggaagagttccagaaggaccctgtgggcctgatgagccgggtggcccagcctgccagcaagaagatcgatcagaacaagctgaaacctgagatggacgagaagggcaacctgaccaccgccggctttgcctgctctcagtgtggccagcccctgttcgtgtacaagctggagcaggtgtctgagaagggcaaggcttacaccaactacttcggacggtgcaatgtggccgagcacgaaaagctgatcctgctggcccagctgaagcccgagaaggatagcgacgaagccgtgacatatagcctgggaaagtttgggcagagggccctggatttctacagcattcatgtgaccaaggagtccacccaccccgtgaagcccctggcccagatcgccggaaacagatacgcctccggacctgtgggaaaggccctgagcgacgcatgtatgggcacaatcgcctccttcctgtctaagtaccaggacatcatcatcgaacaccagaaggtggtgaagggcaaccagaagagactggagagcctgcgggagctggccggcaaggaaaacctggaataccctagcgtgaccctgccacctcagcctcacaccaaggagggcgttgatgcctacaacgaagtgatcgcccgggtgcgaatgtgggtgaacctgaacctgtggcagaagctgaagctaagcagagatgatgccaagcctctgctgagactgaagggattcccttcctttcctctggtcgagagacaggccaacgaagtggactggtgggacatggtgtgtaacgtgaagaagctgatcaacgagaaaaaggaggatggcaaggtgttttggcagaatctggctggctacaagagacaggaagccctgagaccatacctgagcagcgaggaagatcggaagaagggaaagaaattcgctcggtaccagctgggcgacctgctgctgcacctggaaaagaagcacggcgaggactggggaaaggtgtacgacgaggcctgggagcggattgacaagaaagtggaaggcctgagcaagcacatcaagctggaagaggaacggagaagcgaggacgcccagagcaaggccgccctgaccgactggctgcgggctaaggccagcttcgtgatcgagggcctgaaggaggccgacaaggacgagttctgcagatgcgagctgaagctgcagaagtggtacggggacctgcggggaaagcccttcgccatcgaagccgagaacagcatcctggacatcagcggcttcagcaagcagtacaactgtgccttcatctggcagaaggacggcgtgaagaagctgaacctgtacctgatcatcaactacttcaagggcggcaagctgcggttcaagaagatcaaacctgaagccttcgaagccaacagattctacaccgtgatcaacaaaaagagcggcgagatcgtgcccatggaggtgaacttcaacttcgacgaccccaacctgatcatcctgcctctggcctttggcaagagacagggcagagaattcatctggaacgacctgctgtccctggaaaccggcagcctgaagctggccaacggaagagtgatcgagaagacactgtacaacagaagaacccggcaggatgagcctgccctgttcgtggccctgaccttcgagcggcgggaggtcctggactcctccaatatcaaaccaatgaacctgatcggcgtggcaagaggcgaaaacatccccgccgtgatcgccctgaccgaccccgagggctgcccactgagccggtttaaggatagcctgggaaacccaacccacatcctgagaatcggcgagagctataaggagaagcagcggaccatccaggccaagaaggaggtggagcagcggagagccggcggctacagccggaagtacgccagcaaagccaagaatctggcagacgatatggtgagaaacaccgctagagatctgctgtactacgccgtgacccaggatgccatgctgatcttcgccaacctgagccggggcttcggccggcagggcaagcggaccttcatggccgagagacagtacacacggatggaggactggctgaccgccaagctggcctacgagggcctgagcaagacctacctgtccaagacactggcccagtacacctccaagacatgcagcaactgtgggtttaccatcaccagcgccgactacgacagggtgctggagaagctgaagaagacagcaacaggctggatgaccacaattaacggcaaggagctgaaggtggagggccagattacctactacaacagatacaagagacagaacgtagtcaaggacctgtccgtcgagctggatagactgagcgaagaatctgtgaacaacgacatctcctcctggacaaagggcagaagcggagaagctctgagcctcctgaagaaaagattctcccatagacccgtgcaggagaagttcgtgtgcctgaactgcggcttcgagacacacgcagccgagcaagccgccctgaacatcgccagatcctggctgttcctgcggagccaggagtacaagaaataccagacaaacaagacaaccggcaacaccgataagagagccttcgtcgagacctggcagtccttttaccggaagaagcttaaggaggtgtggaaacctgccgtgcggtctggcggatctggcggaggctccaccagccccaagaaaaagagaaaagtctaagctgccttctgcggggcttgccttctggccatgcccttcttctctcccttgcacctgtacctcttggtctttgaataaagcctgagtaggaaggctagcaaaaaaaaaaaaaaaaaaaaaaaaaaaaaaaaaaaaaaaaaaaaaaaaaaaaaaaaaaaaaaaaaaaaaaaaaaaaaaaa

SEQ ID NO: 9376 - RNA, 8787 nt, synthetic construct
  source 1..8787: mol_type = other RNA
aggaaataagagagaaaagaagagtaagaagaaatataagagccaccatggcccctaagaagaagcgtaaagtgagccggatgaaccacgaccaggagttcgacccccctaaggtgtaccctcccgtccccgccgagaagagaaagcccatccgggtcctgagcctgttcgatggcatcgccaccggtctgctggtgctgaaggacctgggcatccaggtggataggtacattgcctccgaggtgtgcgaggactccatcaccgtgggaatggtgcgtcatcagggcaagatcatgtacgtgggcgacgtgcggagcgtgacacagaagcatatccaggagtggggccctttcgacctggtgatcggcggcagcccttgcaatgacctgagcatcgtgaacccagcccggaagggcctgtacgagggaaccggcagactgttcttcgagttttacagactgctgcacgacgcccggcctaaggaaggcgacgaccggcccttcttttggctgttcgagaatgtggtggccatgggagtcagcgacaagcgggatattagccggttcctggagagcaaccccgtgatgatcgatgccaaggaagtgagcgccgcccaccgggccagatacttctggggcaatctgcctggcatgaacagacccctggccagcaccgtgaacgacaagctggagctgcaggagtgcctggagcacggccggatcgccaagttcagcaaggtgagaaccatcaccacccgaagcaacagcatcaaacaaggcaaggaccagcactttcctgtgttcatgaacgagaaggaggacatcctgtggtgtaccgagatggagagagtgttcgggttcccagtccactacacagatgtcagcaacatgtctagactggccagacagagactgctgggaagaagctggtccgtccctgtgatcagacacctgttcgcccctctgaaggagtacttcgcctgcgtgagcagcggcaacagcaacgccaacagccggggccccagcttctctagcggcctggtgccactgtccctgagagggagccacatgggccccatggagatctacaaaaccgtgagcgcctggaagcggcagcctgtgcgcgtgctgagcctgtttcggaatatcgataaagtcctgaaaagcctgggattcctggagagcggctctggctccggcggtggcaccctgaagtacgtggaggatgtgacaaacgtggtcagacgggatgtggagaagtggggccccttcgatctggtgtacggcagcacccaacccctgggcagctcttgtgaccggtgccctggctggtacatgtttcagttccaccggatcctgcagtacgccctgccgagacaggagtcccagcggccattcttttggattttcatggacaacttgctgctgaccgaggatgaccaggaaactaccactcggttcctgcagaccgaagccgtgaccctgcaggacgtgagaggccgggactaccagaacgccatgcgggtgtggtccaacatccctggactgaaaagcaagcacgcacctctgacccctaaagaagaggagtacctgcaggcccaggtgcggagcagaagcaagctggacgcccctaaggtggatctgctggtgaagaattgcctcctgcccctgagagagtacttcaagtatttcagccagaatagtctgcccctgggaggcagcggcggcggctaccagacccccgtgagcttcaaggacgtggtggtgggcttcacccaggaggagtggcacaggctgagccccgcccagagggccctgtacagggacgtgatgctggagacctacagcaacctggtgagcgtgggctacgagggcaccaagcccgacgtgatcctgaggctggagcaggaggaggccccctggatctgcgaggtggcctgccccggctgccacaggtgggaggacatctggcagggcggcccaagcagcggcgcccctcctcccagcggcggcaggcggcccaagcagcggcgcccctcctcccagcggcggcagcccagccggctccccaacctctaccgaggagggcacctctgagtccgccacccccgagagcggccctggcacctccaccgagcccagcgagggcagcgcacccggcagccctgccggcagccccacctccacagaggagggaaccagcaccgagcccagcgaaggcagcgccccaggcaccagcaccgagcctagtgagcaggagattaaacggatcaacaagatcagaagaagacttgtgaaagacagcaacaccaagaaggccggcaagacaggccccatgaaaaccctgctggttagagtgatgacacccgatctgagagagcggctggaaaacctgagaaagaagcctgaaaatatcccccagcccatcagcaatacatctagagccaacctgaataagctgctgaccgattacaccgaaatgaagaaggcgatcctgcatgtgtactgggaagagttccagaaggaccctgtgggcctgatgagccgggtggcccagcctgccagcaagaagatcgatcagaacaagctgaaacctgagatggacgagaagggcaacctgaccaccgccggctttgcctgctctcagtgtggccagcccctgttcgtgtacaagctggagcaggtgtctgagaagggcaaggcttacaccaactacttcggacggtgcaatgtggccgagcacgaaaagctgatcctgctggcccagctgaagcccgagaaggatagcgacgaagccgtgacatatagcctgggaaagtttgggcagagggccctggatttctacagcattcatgtgaccaaggagtccacccaccccgtgaagcccctggcccagatcgccggaaacagatacgcctccggacctgtgggaaaggccctgagcgacgcatgtatgggcacaatcgcctccttcctgtctaagtaccaggacatcatcatcgaacaccagaaggtggtgaagggcaaccagaagagactggagagcctgcgggagctggccggcaaggaaaacctggaataccctagcgtgaccctgccacctcagcctcacaccaaggagggcgttgatgcctacaacgaagtgatcgcccgggtgcgaatgtgggtgaacctgaacctgtggcagaagctgaagctaagcagagatgatgccaagcctctgctgagactgaagggattcccttcctttcctctggtcgagagacaggccaacgaagtggactggtgggacatggtgtgtaacgtgaagaagctgatcaacgagaaaaaggaggatggcaaggtgttttggcagaatctggctggctacaagagacaggaagccctgagaccatacctgagcagcgaggaagatcggaagaagggaaagaaattcgctcggtaccagctgggcgacctgctgctgcacctggaaaagaagcacggcgaggactggggaaaggtgtacgacgaggcctgggagcggattgacaagaaagtggaaggcctgagcaagcacatcaagctggaagaggaacggagaagcgaggacgcccagagcaaggccgccctgaccgactggctgcgggctaaggccagcttcgtgatcgagggcctgaaggaggccgacaaggacgagttctgcagatgcgagctgaagctgcagaagtggtacggggacctgcggggaaagcccttcgccatcgaagccgagaacagcatcctggacatcagcggcttcagcaagcagtacaactgtgccttcatctggcagaaggacggcgtgaagaagctgaacctgtacctgatcatcaactacttcaagggcggcaagctgcggttcaagaagatcaaacctgaagccttcgaagccaacagattctacaccgtgatcaacaaaaagagcggcgagatcgtgcccatggaggtgaacttcaacttcgacgaccccaacctgatcatcctgcctctggcctttggcaagagacagggcagagaattcatctggaacgacctgctgtccctggaaaccggcagcctgaagctggccaacggaagagtgatcgagaagacactgtacaacagaagaacccggcaggatgagcctgccctgttcgtggccctgaccttcgagcggcgggaggtcctggactcctccaatatcaaaccaatgaacctgatcggcgtggcaagaggcgaaaacatccccgccgtgatcgccctgaccgaccccgagggctgcccactgagccggtttaaggatagcctgggaaacccaacccacatcctgagaatcggcgagagctataaggagaagcagcggaccatccaggccaagaaggaggtggagcagcggagagccggcggctacagccggaagtacgccagcaaagccaagaatctggcagacgatatggtgagaaacaccgctagagatctgctgtactacgccgtgacccaggatgccatgctgatcttcgccaacctgagccggggcttcggccggcagggcaagcggaccttcatggccgagagacagtacacacggatggaggactggctgaccgccaagctggcctacgagggcctgagcaagacctacctgtccaagacactggcccagtacacctccaagacatgcagcaactgtgggtttaccatcaccagcgccgactacgacagggtgctggagaagctgaagaagacagcaacaggctggatgaccacaattaacggcaaggagctgaaggtggagggccagattacctactacaacagatacaagagacagaacgtagtcaaggacctgtccgtcgagctggatagactgagcgaagaatctgtgaacaacgacatctcctcctggacaaagggcagaagcggagaagctctgagcctcctgaagaaaagattctcccatagacccgtgcaggagaagttcgtgtgcctgaactgcggcttcgagacacacgcagccgagcaagccgccctgaacatcgccagatcctggctgttcctgcggagccaggagtacaagaaataccagacaaacaagacaaccggcaacaccgataagagagccttcgtcgagacctggcagtccttttaccggaagaagcttaaggaggtgtggaaacctgccgtgcggtctggcggatctggcggaggctccaccagccccaagaaaaagagaaaagtctaagctgccttctgcggggcttgccttctggccatgcccttcttctctcccttgcacctgtacctcttggtctttgaataaagcctgagtaggaaggctagcaaaaaaaaaaaaaaaaaaaaaaaaaaaaaaaaaaaaaaaaaaaaaaaaaaaaaaaaaaaaaaaaaaaaaaaaaaaaaaaagcccagccggctccccaacctctaccgaggagggcacctctgagtccgccacccccgagagcggccctggcacctccaccgagcccagcgagggcagcgcacccggcagccctgccggcagccccacctccacagaggagggaaccagcaccgagcccagcgaaggcagcgccccaggcaccagcaccgagcctagtgagcaggagattaaacggatcaacaagatcagaagaagacttgtgaaagacagcaacaccaagaaggccggcaagacaggccccatgaaaaccctgctggttagagtgatgacacccgatctgagagagcggctggaaaacctgagaaagaagcctgaaaatatcccccagcccatcagcaatacatctagagccaacctgaataagctgctgaccgattacaccgaaatgaagaaggcgatcctgcatgtgtactgggaagagttccagaaggaccctgtgggcctgatgagccgggtggcccagcctgccagcaagaagatcgatcagaacaagctgaaacctgagatggacgagaagggcaacctgaccaccgccggctttgcctgctctcagtgtggccagcccctgttcgtgtacaagctggagcaggtgtctgagaagggcaaggcttacaccaactacttcggacggtgcaatgtggccgagcacgaaaagctgatcctgctggcccagctgaagcccgagaaggatagcgacgaagccgtgacatatagcctgggaaagtttgggcagagggccctggatttctacagcattcatgtgaccaaggagtccacccaccccgtgaagcccctggcccagatcgccggaaacagatacgcctccggacctgtgggaaaggccctgagcgacgcatgtatgggcacaatcgcctccttcctgtctaagtaccaggacatcatcatcgaacaccagaaggtggtgaagggcaaccagaagagactggagagcctgcgggagctggccggcaaggaaaacctggaataccctagcgtgaccctgccacctcagcctcacaccaaggagggcgttgatgcctacaacgaagtgatcgcccgggtgcgaatgtgggtgaacctgaacctgtggcagaagctgaagctaagcagagatgatgccaagcctctgctgagactgaagggattcccttcctttcctctggtcgagagacaggccaacgaagtggactggtgggacatggtgtgtaacgtgaagaagctgatcaacgagaaaaaggaggatggcaaggtgttttggcagaatctggctggctacaagagacaggaagccctgagaccatacctgagcagcgaggaagatcggaagaagggaaagaaattcgctcggtaccagctgggcgacctgctgctgcacctggaaaagaagcacggcgaggactggggaaaggtgtacgacgaggcctgggagcggattgacaagaaagtggaaggcctgagcaagcacatcaagctggaagaggaacggagaagcgaggacgcccagagcaaggccgccctgaccgactggctgcgggctaaggccagcttcgtgatcgagggcctgaaggaggccgacaaggacgagttctgcagatgcgagctgaagctgcagaagtggtacggggacctgcggggaaagcccttcgccatcgaagccgagaacagcatcctggacatcagcggcttcagcaagcagtacaactgtgccttcatctggcagaaggacggcgtgaagaagctgaacctgtacctgatcatcaactacttcaagggcggcaagctgcggttcaagaagatcaaacctgaagccttcgaagccaacagattctacaccgtgatcaacaaaaagagcggcgagatcgtgcccatggaggtgaacttcaacttcgacgaccccaacctgatcatcctgcctctggcctttggcaagagacagggcagagaattcatctggaacgacctgctgtccctggaaaccggcagcctgaagctggccaacggaagagtgatcgagaagacactgtacaacagaagaacccggcaggatgagcctgccctgttcgtggccctgaccttcgagcggcgggaggtcctggactcctccaatatcaaaccaatgaacctgatcggcgtggcaagaggcgaaaacatccccgccgtgatcgccctgaccgaccccgagggctgcccactgagccggtttaaggatagcctgggaaacccaacccacatcctgagaatcggcgagagctataaggagaagcagcggaccatccaggccaagaaggaggtggagcagcggagagccggcggctacagccggaagtacgccagcaaagccaagaatctggcagacgatatggtgagaaacaccgctagagatctgctgtactacgccgtgacccaggatgccatgctgatcttcgccaacctgagccggggcttcggccggcagggcaagcggaccttcatggccgagagacagtacacacggatggaggactggctgaccgccaagctggcctacgagggcctgagcaagacctacctgtccaagacactggcccagtacacctccaagacatgcagcaactgtgggtttaccatcaccagcgccgactacgacagggtgctggagaagctgaagaagacagcaacaggctggatgaccacaattaacggcaaggagctgaaggtggagggccagattacctactacaacagatacaagagacagaacgtagtcaaggacctgtccgtcgagctggatagactgagcgaagaatctgtgaacaacgacatctcctcctggacaaagggcagaagcggagaagctctgagcctcctgaagaaaagattctcccatagacccgtgcaggagaagttcgtgtgcctgaactgcggcttcgagacacacgcagccgagcaagccgccctgaacatcgccagatcctggctgttcctgcggagccaggagtacaagaaataccagacaaacaagacaaccggcaacaccgataagagagccttcgtcgagacctggcagtccttttaccggaagaagcttaaggaggtgtggaaacctgccgtgcggtctggcggatctggcggaggctccaccagccccaagaaaaagagaaaagtctaagctgccttctgcggggcttgccttctggccatgcccttcttctctcccttgcacctgtacctcttggtctttgaataaagcctgagtaggaaggctagcaaaaaaaaaaaaaaaaaaaaaaaaaaaaaaaaaaaaaaaaaaaaaaaaaaaaaaaaaaaaaaaaaaaaaaaaaaaaaaaa

SEQ ID NO: 9377 - RNA, 8787 nt, synthetic construct
  source 1..8787: mol_type = other RNA
aggaaataagagagaaaagaagagtaagaagaaatataagagccaccatggcccctaagaagaagcgtaaagtgagccggatgaaccacgaccaggagttcgacccccctaaggtgtaccctcccgtccccgccgagaagagaaagcccatccgggtcctgagcctgttcgatggcatcgccaccggtctgctggtgctgaaggacctgggcatccaggtggataggtacattgcctccgaggtgtgcgaggactccatcaccgtgggaatggtgcgtcatcagggcaagatcatgtacgtgggcgacgtgcggagcgtgacacagaagcatatccaggagtggggccctttcgacctggtgatcggcggcagcccttgcaatgacctgagcatcgtgaacccagcccggaagggcctgtacgagggaaccggcagactgttcttcgagttttacagactgctgcacgacgcccggcctaaggaaggcgacgaccggcccttcttttggctgttcgagaatgtggtggccatgggagtcagcgacaagcgggatattagccggttcctggagagcaaccccgtgatgatcgatgccaaggaagtgagcgccgcccaccgggccagatacttctggggcaatctgcctggcatgaacagacccctggccagcaccgtgaacgacaagctggagctgcaggagtgcctggagcacggccggatcgccaagttcagcaaggtgagaaccatcaccacccgaagcaacagcatcaaacaaggcaaggaccagcactttcctgtgttcatgaacgagaaggaggacatcctgtggtgtaccgagatggagagagtgttcgggttcccagtccactacacagatgtcagcaacatgtctagactggccagacagagactgctgggaagaagctggtccgtccctgtgatcagacacctgttcgcccctctgaaggagtacttcgcctgcgtgagcagcggcaacagcaacgccaacagccggggccccagcttctctagcggcctggtgccactgtccctgagagggagccacatgggccccatggagatctacaaaaccgtgagcgcctggaagcggcagcctgtgcgcgtgctgagcctgtttcggaatatcgataaagtcctgaaaagcctgggattcctggagagcggctctggctccggcggtggcaccctgaagtacgtggaggatgtgacaaacgtggtcagacgggatgtggagaagtggggccccttcgatctggtgtacggcagcacccaacccctgggcagctcttgtgaccggtgccctggctggtacatgtttcagttccaccggatcctgcagtacgccctgccgagacaggagtcccagcggccattcttttggattttcatggacaacttgctgctgaccgaggatgaccaggaaactaccactcggttcctgcagaccgaagccgtgaccctgcaggacgtgagaggccgggactaccagaacgccatgcgggtgtggtccaacatccctggactgaaaagcaagcacgcacctctgacccctaaagaagaggagtacctgcaggcccaggtgcggagcagaagcaagctggacgcccctaaggtggatctgctggtgaagaattgcctcctgcccctgagagagtacttcaagtatttcagccagaatagtctgcccctgggaggcagcggcggcggcaagcccggcgccgtgagcttcgccgacgtggccgtgtacttcagccccgaggagtggggctgcctgaggcccgcccagagggccctgtacagggacgtgatgagggagacctacggccacctgggcgccctgggcttcaggggcaccaagcccgccctgatctgctgggtggaggaggaggccgacctgtggggccccgaggccagggaccccgaggtgggcgcctgcctgaccgaggccgacggcggcccaagcagcggcgcccctcctcccagcggcggcaggcggcccaagcagcggcgcccctcctcccagcggcggcagcccagccggctccccaacctctaccgaggagggcacctctgagtccgccacccccgagagcggccctggcacctccaccgagcccagcgagggcagcgcacccggcagccctgccggcagccccacctccacagaggagggaaccagcaccgagcccagcgaaggcagcgccccaggcaccagcaccgagcctagtgagcaggagattaaacggatcaacaagatcagaagaagacttgtgaaagacagcaacaccaagaaggccggcaagacaggccccatgaaaaccctgctggttagagtgatgacacccgatctgagagagcggctggaaaacctgagaaagaagcctgaaaatatcccccagcccatcagcaatacatctagagccaacctgaataagctgctgaccgattacaccgaaatgaagaaggcgatcctgcatgtgtactgggaagagttccagaaggaccctgtgggcctgatgagccgggtggcccagcctgccagcaagaagatcgatcagaacaagctgaaacctgagatggacgagaagggcaacctgaccaccgccggctttgcctgctctcagtgtggccagcccctgttcgtgtacaagctggagcaggtgtctgagaagggcaaggcttacaccaactacttcggacggtgcaatgtggccgagcacgaaaagctgatcctgctggcccagctgaagcccgagaaggatagcgacgaagccgtgacatatagcctgggaaagtttgggcagagggccctggatttctacagcattcatgtgaccaaggagtccacccaccccgtgaagcccctggcccagatcgccggaaacagatacgcctccggacctgtgggaaaggccctgagcgacgcatgtatgggcacaatcgcctccttcctgtctaagtaccaggacatcatcatcgaacaccagaaggtggtgaagggcaaccagaagagactggagagcctgcgggagctggccggcaaggaaaacctggaataccctagcgtgaccctgccacctcagcctcacaccaaggagggcgttgatgcctacaacgaagtgatcgcccgggtgcgaatgtgggtgaacctgaacctgtggcagaagctgaagctaagcagagatgatgccaagcctctgctgagactgaagggattcccttcctttcctctggtcgagagacaggccaacgaagtggactggtgggacatggtgtgtaacgtgaagaagctgatcaacgagaaaaaggaggatggcaaggtgttttggcagaatctggctggctacaagagacaggaagccctgagaccatacctgagcagcgaggaagatcggaagaagggaaagaaattcgctcggtaccagctgggcgacctgctgctgcacctggaaaagaagcacggcgaggactggggaaaggtgtacgacgaggcctgggagcggattgacaagaaagtggaaggcctgagcaagcacatcaagctggaagaggaacggagaagcgaggacgcccagagcaaggccgccctgaccgactggctgcgggctaaggccagcttcgtgatcgagggcctgaaggaggccgacaaggacgagttctgcagatgcgagctgaagctgcagaagtggtacggggacctgcggggaaagcccttcgccatcgaagccgagaacagcatcctggacatcagcggcttcagcaagcagtacaactgtgccttcatctggcagaaggacggcgtgaagaagctgaacctgtacctgatcatcaactacttcaagggcggcaagctgcggttcaagaagatcaaacctgaagccttcgaagccaacagattctacaccgtgatcaacaaaaagagcggcgagatcgtgcccatggaggtgaacttcaacttcgacgaccccaacctgatcatcctgcctctggcctttggcaagagacagggcagagaattcatctggaacgacctgctgtccctggaaaccggcagcctgaagctggccaacggaagagtgatcgagaagacactgtacaacagaagaacccggcaggatgagcctgccctgttcgtggccctgaccttcgagcggcgggaggtcctggactcctccaatatcaaaccaatgaacctgatcggcgtggcaagaggcgaaaacatccccgccgtgatcgccctgaccgaccccgagggctgcccactgagccggtttaaggatagcctgggaaacccaacccacatcctgagaatcggcgagagctataaggagaagcagcggaccatccaggccaagaaggaggtggagcagcggagagccggcggctacagccggaagtacgccagcaaagccaagaatctggcagacgatatggtgagaaacaccgctagagatctgctgtactacgccgtgacccaggatgccatgctgatcttcgccaacctgagccggggcttcggccggcagggcaagcggaccttcatggccgagagacagtacacacggatggaggactggctgaccgccaagctggcctacgagggcctgagcaagacctacctgtccaagacactggcccagtacacctccaagacatgcagcaactgtgggtttaccatcaccagcgccgactacgacagggtgctggagaagctgaagaagacagcaacaggctggatgaccacaattaacggcaaggagctgaaggtggagggccagattacctactacaacagatacaagagacagaacgtagtcaaggacctgtccgtcgagctggatagactgagcgaagaatctgtgaacaacgacatctcctcctggacaaagggcagaagcggagaagctctgagcctcctgaagaaaagattctcccatagacccgtgcaggagaagttcgtgtgcctgaactgcggcttcgagacacacgcagccgagcaagccgccctgaacatcgccagatcctggctgttcctgcggagccaggagtacaagaaataccagacaaacaagacaaccggcaacaccgataagagagccttcgtcgagacctggcagtccttttaccggaagaagcttaaggaggtgtggaaacctgccgtgcggtctggcggatctggcggaggctccaccagccccaagaaaaagagaaaagtctaagctgccttctgcggggcttgccttctggccatgcccttcttctctcccttgcacctgtacctcttggtctttgaataaagcctgagtaggaaggctagcaaaaaaaaaaaaaaaaaaaaaaaaaaaaaaaaaaaaaaaaaaaaaaaaaaaaaaaaaaaaaaaaaaaaaaaaaaaaaaaagcccagccggctccccaacctctaccgaggagggcacctctgagtccgccacccccgagagcggccctggcacctccaccgagcccagcgagggcagcgcacccggcagccctgccggcagccccacctccacagaggagggaaccagcaccgagcccagcgaaggcagcgccccaggcaccagcaccgagcctagtgagcaggagattaaacggatcaacaagatcagaagaagacttgtgaaagacagcaacaccaagaaggccggcaagacaggccccatgaaaaccctgctggttagagtgatgacacccgatctgagagagcggctggaaaacctgagaaagaagcctgaaaatatcccccagcccatcagcaatacatctagagccaacctgaataagctgctgaccgattacaccgaaatgaagaaggcgatcctgcatgtgtactgggaagagttccagaaggaccctgtgggcctgatgagccgggtggcccagcctgccagcaagaagatcgatcagaacaagctgaaacctgagatggacgagaagggcaacctgaccaccgccggctttgcctgctctcagtgtggccagcccctgttcgtgtacaagctggagcaggtgtctgagaagggcaaggcttacaccaactacttcggacggtgcaatgtggccgagcacgaaaagctgatcctgctggcccagctgaagcccgagaaggatagcgacgaagccgtgacatatagcctgggaaagtttgggcagagggccctggatttctacagcattcatgtgaccaaggagtccacccaccccgtgaagcccctggcccagatcgccggaaacagatacgcctccggacctgtgggaaaggccctgagcgacgcatgtatgggcacaatcgcctccttcctgtctaagtaccaggacatcatcatcgaacaccagaaggtggtgaagggcaaccagaagagactggagagcctgcgggagctggccggcaaggaaaacctggaataccctagcgtgaccctgccacctcagcctcacaccaaggagggcgttgatgcctacaacgaagtgatcgcccgggtgcgaatgtgggtgaacctgaacctgtggcagaagctgaagctaagcagagatgatgccaagcctctgctgagactgaagggattcccttcctttcctctggtcgagagacaggccaacgaagtggactggtgggacatggtgtgtaacgtgaagaagctgatcaacgagaaaaaggaggatggcaaggtgttttggcagaatctggctggctacaagagacaggaagccctgagaccatacctgagcagcgaggaagatcggaagaagggaaagaaattcgctcggtaccagctgggcgacctgctgctgcacctggaaaagaagcacggcgaggactggggaaaggtgtacgacgaggcctgggagcggattgacaagaaagtggaaggcctgagcaagcacatcaagctggaagaggaacggagaagcgaggacgcccagagcaaggccgccctgaccgactggctgcgggctaaggccagcttcgtgatcgagggcctgaaggaggccgacaaggacgagttctgcagatgcgagctgaagctgcagaagtggtacggggacctgcggggaaagcccttcgccatcgaagccgagaacagcatcctggacatcagcggcttcagcaagcagtacaactgtgccttcatctggcagaaggacggcgtgaagaagctgaacctgtacctgatcatcaactacttcaagggcggcaagctgcggttcaagaagatcaaacctgaagccttcgaagccaacagattctacaccgtgatcaacaaaaagagcggcgagatcgtgcccatggaggtgaacttcaacttcgacgaccccaacctgatcatcctgcctctggcctttggcaagagacagggcagagaattcatctggaacgacctgctgtccctggaaaccggcagcctgaagctggccaacggaagagtgatcgagaagacactgtacaacagaagaacccggcaggatgagcctgccctgttcgtggccctgaccttcgagcggcgggaggtcctggactcctccaatatcaaaccaatgaacctgatcggcgtggcaagaggcgaaaacatccccgccgtgatcgccctgaccgaccccgagggctgcccactgagccggtttaaggatagcctgggaaacccaacccacatcctgagaatcggcgagagctataaggagaagcagcggaccatccaggccaagaaggaggtggagcagcggagagccggcggctacagccggaagtacgccagcaaagccaagaatctggcagacgatatggtgagaaacaccgctagagatctgctgtactacgccgtgacccaggatgccatgctgatcttcgccaacctgagccggggcttcggccggcagggcaagcggaccttcatggccgagagacagtacacacggatggaggactggctgaccgccaagctggcctacgagggcctgagcaagacctacctgtccaagacactggcccagtacacctccaagacatgcagcaactgtgggtttaccatcaccagcgccgactacgacagggtgctggagaagctgaagaagacagcaacaggctggatgaccacaattaacggcaaggagctgaaggtggagggccagattacctactacaacagatacaagagacagaacgtagtcaaggacctgtccgtcgagctggatagactgagcgaagaatctgtgaacaacgacatctcctcctggacaaagggcagaagcggagaagctctgagcctcctgaagaaaagattctcccatagacccgtgcaggagaagttcgtgtgcctgaactgcggcttcgagacacacgcagccgagcaagccgccctgaacatcgccagatcctggctgttcctgcggagccaggagtacaagaaataccagacaaacaagacaaccggcaacaccgataagagagccttcgtcgagacctggcagtccttttaccggaagaagcttaaggaggtgtggaaacctgccgtgcggtctggcggatctggcggaggctccaccagccccaagaaaaagagaaaagtctaagctgccttctgcggggcttgccttctggccatgcccttcttctctcccttgcacctgtacctcttggtctttgaataaagcctgagtaggaaggctagcaaaaaaaaaaaaaaaaaaaaaaaaaaaaaaaaaaaaaaaaaaaaaaaaaaaaaaaaaaaaaaaaaaaaaaaaaaaaaaaa

SEQ ID NO: 9378 - RNA, 8787 nt, synthetic construct
  source 1..8787: mol_type = other RNA
aggaaataagagagaaaagaagagtaagaagaaatataagagccaccatggcccctaagaagaagcgtaaagtgagccggatgaaccacgaccaggagttcgacccccctaaggtgtaccctcccgtccccgccgagaagagaaagcccatccgggtcctgagcctgttcgatggcatcgccaccggtctgctggtgctgaaggacctgggcatccaggtggataggtacattgcctccgaggtgtgcgaggactccatcaccgtgggaatggtgcgtcatcagggcaagatcatgtacgtgggcgacgtgcggagcgtgacacagaagcatatccaggagtggggccctttcgacctggtgatcggcggcagcccttgcaatgacctgagcatcgtgaacccagcccggaagggcctgtacgagggaaccggcagactgttcttcgagttttacagactgctgcacgacgcccggcctaaggaaggcgacgaccggcccttcttttggctgttcgagaatgtggtggccatgggagtcagcgacaagcgggatattagccggttcctggagagcaaccccgtgatgatcgatgccaaggaagtgagcgccgcccaccgggccagatacttctggggcaatctgcctggcatgaacagacccctggccagcaccgtgaacgacaagctggagctgcaggagtgcctggagcacggccggatcgccaagttcagcaaggtgagaaccatcaccacccgaagcaacagcatcaaacaaggcaaggaccagcactttcctgtgttcatgaacgagaaggaggacatcctgtggtgtaccgagatggagagagtgttcgggttcccagtccactacacagatgtcagcaacatgtctagactggccagacagagactgctgggaagaagctggtccgtccctgtgatcagacacctgttcgcccctctgaaggagtacttcgcctgcgtgagcagcggcaacagcaacgccaacagccggggccccagcttctctagcggcctggtgccactgtccctgagagggagccacatgggccccatggagatctacaaaaccgtgagcgcctggaagcggcagcctgtgcgcgtgctgagcctgtttcggaatatcgataaagtcctgaaaagcctgggattcctggagagcggctctggctccggcggtggcaccctgaagtacgtggaggatgtgacaaacgtggtcagacgggatgtggagaagtggggccccttcgatctggtgtacggcagcacccaacccctgggcagctcttgtgaccggtgccctggctggtacatgtttcagttccaccggatcctgcagtacgccctgccgagacaggagtcccagcggccattcttttggattttcatggacaacttgctgctgaccgaggatgaccaggaaactaccactcggttcctgcagaccgaagccgtgaccctgcaggacgtgagaggccgggactaccagaacgccatgcgggtgtggtccaacatccctggactgaaaagcaagcacgcacctctgacccctaaagaagaggagtacctgcaggcccaggtgcggagcagaagcaagctggacgcccctaaggtggatctgctggtgaagaattgcctcctgcccctgagagagtacttcaagtatttcagccagaatagtctgcccctgggaggcagcggcggcggcccccagaagagcgtgaccttcgaggacgtggccgtgtacttcacccagaccgagtgggacggcctgagccccgcccagagggccctgtacagggacgtgatgctggagaactacggcaacgtggccagcctgggcttccccctgctgaagcccgccgtgatcagccagctggagggcggcggcaagctgggcggccccagccccctggccagcggcaccggcaccggcccccagggcctgtggggcggcccaagcagcggcgcccctcctcccagcggcggcaggcggcccaagcagcggcgcccctcctcccagcggcggcagcccagccggctccccaacctctaccgaggagggcacctctgagtccgccacccccgagagcggccctggcacctccaccgagcccagcgagggcagcgcacccggcagccctgccggcagccccacctccacagaggagggaaccagcaccgagcccagcgaaggcagcgccccaggcaccagcaccgagcctagtgagcaggagattaaacggatcaacaagatcagaagaagacttgtgaaagacagcaacaccaagaaggccggcaagacaggccccatgaaaaccctgctggttagagtgatgacacccgatctgagagagcggctggaaaacctgagaaagaagcctgaaaatatcccccagcccatcagcaatacatctagagccaacctgaataagctgctgaccgattacaccgaaatgaagaaggcgatcctgcatgtgtactgggaagagttccagaaggaccctgtgggcctgatgagccgggtggcccagcctgccagcaagaagatcgatcagaacaagctgaaacctgagatggacgagaagggcaacctgaccaccgccggctttgcctgctctcagtgtggccagcccctgttcgtgtacaagctggagcaggtgtctgagaagggcaaggcttacaccaactacttcggacggtgcaatgtggccgagcacgaaaagctgatcctgctggcccagctgaagcccgagaaggatagcgacgaagccgtgacatatagcctgggaaagtttgggcagagggccctggatttctacagcattcatgtgaccaaggagtccacccaccccgtgaagcccctggcccagatcgccggaaacagatacgcctccggacctgtgggaaaggccctgagcgacgcatgtatgggcacaatcgcctccttcctgtctaagtaccaggacatcatcatcgaacaccagaaggtggtgaagggcaaccagaagagactggagagcctgcgggagctggccggcaaggaaaacctggaataccctagcgtgaccctgccacctcagcctcacaccaaggagggcgttgatgcctacaacgaagtgatcgcccgggtgcgaatgtgggtgaacctgaacctgtggcagaagctgaagctaagcagagatgatgccaagcctctgctgagactgaagggattcccttcctttcctctggtcgagagacaggccaacgaagtggactggtgggacatggtgtgtaacgtgaagaagctgatcaacgagaaaaaggaggatggcaaggtgttttggcagaatctggctggctacaagagacaggaagccctgagaccatacctgagcagcgaggaagatcggaagaagggaaagaaattcgctcggtaccagctgggcgacctgctgctgcacctggaaaagaagcacggcgaggactggggaaaggtgtacgacgaggcctgggagcggattgacaagaaagtggaaggcctgagcaagcacatcaagctggaagaggaacggagaagcgaggacgcccagagcaaggccgccctgaccgactggctgcgggctaaggccagcttcgtgatcgagggcctgaaggaggccgacaaggacgagttctgcagatgcgagctgaagctgcagaagtggtacggggacctgcggggaaagcccttcgccatcgaagccgagaacagcatcctggacatcagcggcttcagcaagcagtacaactgtgccttcatctggcagaaggacggcgtgaagaagctgaacctgtacctgatcatcaactacttcaagggcggcaagctgcggttcaagaagatcaaacctgaagccttcgaagccaacagattctacaccgtgatcaacaaaaagagcggcgagatcgtgcccatggaggtgaacttcaacttcgacgaccccaacctgatcatcctgcctctggcctttggcaagagacagggcagagaattcatctggaacgacctgctgtccctggaaaccggcagcctgaagctggccaacggaagagtgatcgagaagacactgtacaacagaagaacccggcaggatgagcctgccctgttcgtggccctgaccttcgagcggcgggaggtcctggactcctccaatatcaaaccaatgaacctgatcggcgtggcaagaggcgaaaacatccccgccgtgatcgccctgaccgaccccgagggctgcccactgagccggtttaaggatagcctgggaaacccaacccacatcctgagaatcggcgagagctataaggagaagcagcggaccatccaggccaagaaggaggtggagcagcggagagccggcggctacagccggaagtacgccagcaaagccaagaatctggcagacgatatggtgagaaacaccgctagagatctgctgtactacgccgtgacccaggatgccatgctgatcttcgccaacctgagccggggcttcggccggcagggcaagcggaccttcatggccgagagacagtacacacggatggaggactggctgaccgccaagctggcctacgagggcctgagcaagacctacctgtccaagacactggcccagtacacctccaagacatgcagcaactgtgggtttaccatcaccagcgccgactacgacagggtgctggagaagctgaagaagacagcaacaggctggatgaccacaattaacggcaaggagctgaaggtggagggccagattacctactacaacagatacaagagacagaacgtagtcaaggacctgtccgtcgagctggatagactgagcgaagaatctgtgaacaacgacatctcctcctggacaaagggcagaagcggagaagctctgagcctcctgaagaaaagattctcccatagacccgtgcaggagaagttcgtgtgcctgaactgcggcttcgagacacacgcagccgagcaagccgccctgaacatcgccagatcctggctgttcctgcggagccaggagtacaagaaataccagacaaacaagacaaccggcaacaccgataagagagccttcgtcgagacctggcagtccttttaccggaagaagcttaaggaggtgtggaaacctgccgtgcggtctggcggatctggcggaggctccaccagccccaagaaaaagagaaaagtctaagctgccttctgcggggcttgccttctggccatgcccttcttctctcccttgcacctgtacctcttggtctttgaataaagcctgagtaggaaggctagcaaaaaaaaaaaaaaaaaaaaaaaaaaaaaaaaaaaaaaaaaaaaaaaaaaaaaaaaaaaaaaaaaaaaaaaaaaaaaaaagcccagccggctccccaacctctaccgaggagggcacctctgagtccgccacccccgagagcggccctggcacctccaccgagcccagcgagggcagcgcacccggcagccctgccggcagccccacctccacagaggagggaaccagcaccgagcccagcgaaggcagcgccccaggcaccagcaccgagcctagtgagcaggagattaaacggatcaacaagatcagaagaagacttgtgaaagacagcaacaccaagaaggccggcaagacaggccccatgaaaaccctgctggttagagtgatgacacccgatctgagagagcggctggaaaacctgagaaagaagcctgaaaatatcccccagcccatcagcaatacatctagagccaacctgaataagctgctgaccgattacaccgaaatgaagaaggcgatcctgcatgtgtactgggaagagttccagaaggaccctgtgggcctgatgagccgggtggcccagcctgccagcaagaagatcgatcagaacaagctgaaacctgagatggacgagaagggcaacctgaccaccgccggctttgcctgctctcagtgtggccagcccctgttcgtgtacaagctggagcaggtgtctgagaagggcaaggcttacaccaactacttcggacggtgcaatgtggccgagcacgaaaagctgatcctgctggcccagctgaagcccgagaaggatagcgacgaagccgtgacatatagcctgggaaagtttgggcagagggccctggatttctacagcattcatgtgaccaaggagtccacccaccccgtgaagcccctggcccagatcgccggaaacagatacgcctccggacctgtgggaaaggccctgagcgacgcatgtatgggcacaatcgcctccttcctgtctaagtaccaggacatcatcatcgaacaccagaaggtggtgaagggcaaccagaagagactggagagcctgcgggagctggccggcaaggaaaacctggaataccctagcgtgaccctgccacctcagcctcacaccaaggagggcgttgatgcctacaacgaagtgatcgcccgggtgcgaatgtgggtgaacctgaacctgtggcagaagctgaagctaagcagagatgatgccaagcctctgctgagactgaagggattcccttcctttcctctggtcgagagacaggccaacgaagtggactggtgggacatggtgtgtaacgtgaagaagctgatcaacgagaaaaaggaggatggcaaggtgttttggcagaatctggctggctacaagagacaggaagccctgagaccatacctgagcagcgaggaagatcggaagaagggaaagaaattcgctcggtaccagctgggcgacctgctgctgcacctggaaaagaagcacggcgaggactggggaaaggtgtacgacgaggcctgggagcggattgacaagaaagtggaaggcctgagcaagcacatcaagctggaagaggaacggagaagcgaggacgcccagagcaaggccgccctgaccgactggctgcgggctaaggccagcttcgtgatcgagggcctgaaggaggccgacaaggacgagttctgcagatgcgagctgaagctgcagaagtggtacggggacctgcggggaaagcccttcgccatcgaagccgagaacagcatcctggacatcagcggcttcagcaagcagtacaactgtgccttcatctggcagaaggacggcgtgaagaagctgaacctgtacctgatcatcaactacttcaagggcggcaagctgcggttcaagaagatcaaacctgaagccttcgaagccaacagattctacaccgtgatcaacaaaaagagcggcgagatcgtgcccatggaggtgaacttcaacttcgacgaccccaacctgatcatcctgcctctggcctttggcaagagacagggcagagaattcatctggaacgacctgctgtccctggaaaccggcagcctgaagctggccaacggaagagtgatcgagaagacactgtacaacagaagaacccggcaggatgagcctgccctgttcgtggccctgaccttcgagcggcgggaggtcctggactcctccaatatcaaaccaatgaacctgatcggcgtggcaagaggcgaaaacatccccgccgtgatcgccctgaccgaccccgagggctgcccactgagccggtttaaggatagcctgggaaacccaacccacatcctgagaatcggcgagagctataaggagaagcagcggaccatccaggccaagaaggaggtggagcagcggagagccggcggctacagccggaagtacgccagcaaagccaagaatctggcagacgatatggtgagaaacaccgctagagatctgctgtactacgccgtgacccaggatgccatgctgatcttcgccaacctgagccggggcttcggccggcagggcaagcggaccttcatggccgagagacagtacacacggatggaggactggctgaccgccaagctggcctacgagggcctgagcaagacctacctgtccaagacactggcccagtacacctccaagacatgcagcaactgtgggtttaccatcaccagcgccgactacgacagggtgctggagaagctgaagaagacagcaacaggctggatgaccacaattaacggcaaggagctgaaggtggagggccagattacctactacaacagatacaagagacagaacgtagtcaaggacctgtccgtcgagctggatagactgagcgaagaatctgtgaacaacgacatctcctcctggacaaagggcagaagcggagaagctctgagcctcctgaagaaaagattctcccatagacccgtgcaggagaagttcgtgtgcctgaactgcggcttcgagacacacgcagccgagcaagccgccctgaacatcgccagatcctggctgttcctgcggagccaggagtacaagaaataccagacaaacaagacaaccggcaacaccgataagagagccttcgtcgagacctggcagtccttttaccggaagaagcttaaggaggtgtggaaacctgccgtgcggtctggcggatctggcggaggctccaccagccccaagaaaaagagaaaagtctaagctgccttctgcggggcttgccttctggccatgcccttcttctctcccttgcacctgtacctcttggtctttgaataaagcctgagtaggaaggctagcaaaaaaaaaaaaaaaaaaaaaaaaaaaaaaaaaaaaaaaaaaaaaaaaaaaaaaaaaaaaaaaaaaaaaaaaaaaaaaaa

SEQ ID NO: 9379 - RNA, 8787 nt, synthetic construct
  source 1..8787: mol_type = other RNA
aggaaataagagagaaaagaagagtaagaagaaatataagagccaccatggcccctaagaagaagcgtaaagtgagccggatgaaccacgaccaggagttcgacccccctaaggtgtaccctcccgtccccgccgagaagagaaagcccatccgggtcctgagcctgttcgatggcatcgccaccggtctgctggtgctgaaggacctgggcatccaggtggataggtacattgcctccgaggtgtgcgaggactccatcaccgtgggaatggtgcgtcatcagggcaagatcatgtacgtgggcgacgtgcggagcgtgacacagaagcatatccaggagtggggccctttcgacctggtgatcggcggcagcccttgcaatgacctgagcatcgtgaacccagcccggaagggcctgtacgagggaaccggcagactgttcttcgagttttacagactgctgcacgacgcccggcctaaggaaggcgacgaccggcccttcttttggctgttcgagaatgtggtggccatgggagtcagcgacaagcgggatattagccggttcctggagagcaaccccgtgatgatcgatgccaaggaagtgagcgccgcccaccgggccagatacttctggggcaatctgcctggcatgaacagacccctggccagcaccgtgaacgacaagctggagctgcaggagtgcctggagcacggccggatcgccaagttcagcaaggtgagaaccatcaccacccgaagcaacagcatcaaacaaggcaaggaccagcactttcctgtgttcatgaacgagaaggaggacatcctgtggtgtaccgagatggagagagtgttcgggttcccagtccactacacagatgtcagcaacatgtctagactggccagacagagactgctgggaagaagctggtccgtccctgtgatcagacacctgttcgcccctctgaaggagtacttcgcctgcgtgagcagcggcaacagcaacgccaacagccggggccccagcttctctagcggcctggtgccactgtccctgagagggagccacatgggccccatggagatctacaaaaccgtgagcgcctggaagcggcagcctgtgcgcgtgctgagcctgtttcggaatatcgataaagtcctgaaaagcctgggattcctggagagcggctctggctccggcggtggcaccctgaagtacgtggaggatgtgacaaacgtggtcagacgggatgtggagaagtggggccccttcgatctggtgtacggcagcacccaacccctgggcagctcttgtgaccggtgccctggctggtacatgtttcagttccaccggatcctgcagtacgccctgccgagacaggagtcccagcggccattcttttggattttcatggacaacttgctgctgaccgaggatgaccaggaaactaccactcggttcctgcagaccgaagccgtgaccctgcaggacgtgagaggccgggactaccagaacgccatgcgggtgtggtccaacatccctggactgaaaagcaagcacgcacctctgacccctaaagaagaggagtacctgcaggcccaggtgcggagcagaagcaagctggacgcccctaaggtggatctgctggtgaagaattgcctcctgcccctgagagagtacttcaagtatttcagccagaatagtctgcccctgggaggcagcggcggcggcgacgccgtgacctacgaggacgtgcacgtgaacttcacccacgaggagtgggccctgctggaccccagccagaagagcctgtacaaggacgtgatgctggagacctactggaacctgaccagcatcggctacaagtgggaggaccacaacttcgaggagaactgccagagcagcaggaggcacggcaggcacatcaactgccccagcggctacaagccctgcgagcacgaggagtacggcaagggcggcccaagcagcggcgcccctcctcccagcggcggcaggcggcccaagcagcggcgcccctcctcccagcggcggcagcccagccggctccccaacctctaccgaggagggcacctctgagtccgccacccccgagagcggccctggcacctccaccgagcccagcgagggcagcgcacccggcagccctgccggcagccccacctccacagaggagggaaccagcaccgagcccagcgaaggcagcgccccaggcaccagcaccgagcctagtgagcaggagattaaacggatcaacaagatcagaagaagacttgtgaaagacagcaacaccaagaaggccggcaagacaggccccatgaaaaccctgctggttagagtgatgacacccgatctgagagagcggctggaaaacctgagaaagaagcctgaaaatatcccccagcccatcagcaatacatctagagccaacctgaataagctgctgaccgattacaccgaaatgaagaaggcgatcctgcatgtgtactgggaagagttccagaaggaccctgtgggcctgatgagccgggtggcccagcctgccagcaagaagatcgatcagaacaagctgaaacctgagatggacgagaagggcaacctgaccaccgccggctttgcctgctctcagtgtggccagcccctgttcgtgtacaagctggagcaggtgtctgagaagggcaaggcttacaccaactacttcggacggtgcaatgtggccgagcacgaaaagctgatcctgctggcccagctgaagcccgagaaggatagcgacgaagccgtgacatatagcctgggaaagtttgggcagagggccctggatttctacagcattcatgtgaccaaggagtccacccaccccgtgaagcccctggcccagatcgccggaaacagatacgcctccggacctgtgggaaaggccctgagcgacgcatgtatgggcacaatcgcctccttcctgtctaagtaccaggacatcatcatcgaacaccagaaggtggtgaagggcaaccagaagagactggagagcctgcgggagctggccggcaaggaaaacctggaataccctagcgtgaccctgccacctcagcctcacaccaaggagggcgttgatgcctacaacgaagtgatcgcccgggtgcgaatgtgggtgaacctgaacctgtggcagaagctgaagctaagcagagatgatgccaagcctctgctgagactgaagggattcccttcctttcctctggtcgagagacaggccaacgaagtggactggtgggacatggtgtgtaacgtgaagaagctgatcaacgagaaaaaggaggatggcaaggtgttttggcagaatctggctggctacaagagacaggaagccctgagaccatacctgagcagcgaggaagatcggaagaagggaaagaaattcgctcggtaccagctgggcgacctgctgctgcacctggaaaagaagcacggcgaggactggggaaaggtgtacgacgaggcctgggagcggattgacaagaaagtggaaggcctgagcaagcacatcaagctggaagaggaacggagaagcgaggacgcccagagcaaggccgccctgaccgactggctgcgggctaaggccagcttcgtgatcgagggcctgaaggaggccgacaaggacgagttctgcagatgcgagctgaagctgcagaagtggtacggggacctgcggggaaagcccttcgccatcgaagccgagaacagcatcctggacatcagcggcttcagcaagcagtacaactgtgccttcatctggcagaaggacggcgtgaagaagctgaacctgtacctgatcatcaactacttcaagggcggcaagctgcggttcaagaagatcaaacctgaagccttcgaagccaacagattctacaccgtgatcaacaaaaagagcggcgagatcgtgcccatggaggtgaacttcaacttcgacgaccccaacctgatcatcctgcctctggcctttggcaagagacagggcagagaattcatctggaacgacctgctgtccctggaaaccggcagcctgaagctggccaacggaagagtgatcgagaagacactgtacaacagaagaacccggcaggatgagcctgccctgttcgtggccctgaccttcgagcggcgggaggtcctggactcctccaatatcaaaccaatgaacctgatcggcgtggcaagaggcgaaaacatccccgccgtgatcgccctgaccgaccccgagggctgcccactgagccggtttaaggatagcctgggaaacccaacccacatcctgagaatcggcgagagctataaggagaagcagcggaccatccaggccaagaaggaggtggagcagcggagagccggcggctacagccggaagtacgccagcaaagccaagaatctggcagacgatatggtgagaaacaccgctagagatctgctgtactacgccgtgacccaggatgccatgctgatcttcgccaacctgagccggggcttcggccggcagggcaagcggaccttcatggccgagagacagtacacacggatggaggactggctgaccgccaagctggcctacgagggcctgagcaagacctacctgtccaagacactggcccagtacacctccaagacatgcagcaactgtgggtttaccatcaccagcgccgactacgacagggtgctggagaagctgaagaagacagcaacaggctggatgaccacaattaacggcaaggagctgaaggtggagggccagattacctactacaacagatacaagagacagaacgtagtcaaggacctgtccgtcgagctggatagactgagcgaagaatctgtgaacaacgacatctcctcctggacaaagggcagaagcggagaagctctgagcctcctgaagaaaagattctcccatagacccgtgcaggagaagttcgtgtgcctgaactgcggcttcgagacacacgcagccgagcaagccgccctgaacatcgccagatcctggctgttcctgcggagccaggagtacaagaaataccagacaaacaagacaaccggcaacaccgataagagagccttcgtcgagacctggcagtccttttaccggaagaagcttaaggaggtgtggaaacctgccgtgcggtctggcggatctggcggaggctccaccagccccaagaaaaagagaaaagtctaagctgccttctgcggggcttgccttctggccatgcccttcttctctcccttgcacctgtacctcttggtctttgaataaagcctgagtaggaaggctagcaaaaaaaaaaaaaaaaaaaaaaaaaaaaaaaaaaaaaaaaaaaaaaaaaaaaaaaaaaaaaaaaaaaaaaaaaaaaaaaagcccagccggctccccaacctctaccgaggagggcacctctgagtccgccacccccgagagcggccctggcacctccaccgagcccagcgagggcagcgcacccggcagccctgccggcagccccacctccacagaggagggaaccagcaccgagcccagcgaaggcagcgccccaggcaccagcaccgagcctagtgagcaggagattaaacggatcaacaagatcagaagaagacttgtgaaagacagcaacaccaagaaggccggcaagacaggccccatgaaaaccctgctggttagagtgatgacacccgatctgagagagcggctggaaaacctgagaaagaagcctgaaaatatcccccagcccatcagcaatacatctagagccaacctgaataagctgctgaccgattacaccgaaatgaagaaggcgatcctgcatgtgtactgggaagagttccagaaggaccctgtgggcctgatgagccgggtggcccagcctgccagcaagaagatcgatcagaacaagctgaaacctgagatggacgagaagggcaacctgaccaccgccggctttgcctgctctcagtgtggccagcccctgttcgtgtacaagctggagcaggtgtctgagaagggcaaggcttacaccaactacttcggacggtgcaatgtggccgagcacgaaaagctgatcctgctggcccagctgaagcccgagaaggatagcgacgaagccgtgacatatagcctgggaaagtttgggcagagggccctggatttctacagcattcatgtgaccaaggagtccacccaccccgtgaagcccctggcccagatcgccggaaacagatacgcctccggacctgtgggaaaggccctgagcgacgcatgtatgggcacaatcgcctccttcctgtctaagtaccaggacatcatcatcgaacaccagaaggtggtgaagggcaaccagaagagactggagagcctgcgggagctggccggcaaggaaaacctggaataccctagcgtgaccctgccacctcagcctcacaccaaggagggcgttgatgcctacaacgaagtgatcgcccgggtgcgaatgtgggtgaacctgaacctgtggcagaagctgaagctaagcagagatgatgccaagcctctgctgagactgaagggattcccttcctttcctctggtcgagagacaggccaacgaagtggactggtgggacatggtgtgtaacgtgaagaagctgatcaacgagaaaaaggaggatggcaaggtgttttggcagaatctggctggctacaagagacaggaagccctgagaccatacctgagcagcgaggaagatcggaagaagggaaagaaattcgctcggtaccagctgggcgacctgctgctgcacctggaaaagaagcacggcgaggactggggaaaggtgtacgacgaggcctgggagcggattgacaagaaagtggaaggcctgagcaagcacatcaagctggaagaggaacggagaagcgaggacgcccagagcaaggccgccctgaccgactggctgcgggctaaggccagcttcgtgatcgagggcctgaaggaggccgacaaggacgagttctgcagatgcgagctgaagctgcagaagtggtacggggacctgcggggaaagcccttcgccatcgaagccgagaacagcatcctggacatcagcggcttcagcaagcagtacaactgtgccttcatctggcagaaggacggcgtgaagaagctgaacctgtacctgatcatcaactacttcaagggcggcaagctgcggttcaagaagatcaaacctgaagccttcgaagccaacagattctacaccgtgatcaacaaaaagagcggcgagatcgtgcccatggaggtgaacttcaacttcgacgaccccaacctgatcatcctgcctctggcctttggcaagagacagggcagagaattcatctggaacgacctgctgtccctggaaaccggcagcctgaagctggccaacggaagagtgatcgagaagacactgtacaacagaagaacccggcaggatgagcctgccctgttcgtggccctgaccttcgagcggcgggaggtcctggactcctccaatatcaaaccaatgaacctgatcggcgtggcaagaggcgaaaacatccccgccgtgatcgccctgaccgaccccgagggctgcccactgagccggtttaaggatagcctgggaaacccaacccacatcctgagaatcggcgagagctataaggagaagcagcggaccatccaggccaagaaggaggtggagcagcggagagccggcggctacagccggaagtacgccagcaaagccaagaatctggcagacgatatggtgagaaacaccgctagagatctgctgtactacgccgtgacccaggatgccatgctgatcttcgccaacctgagccggggcttcggccggcagggcaagcggaccttcatggccgagagacagtacacacggatggaggactggctgaccgccaagctggcctacgagggcctgagcaagacctacctgtccaagacactggcccagtacacctccaagacatgcagcaactgtgggtttaccatcaccagcgccgactacgacagggtgctggagaagctgaagaagacagcaacaggctggatgaccacaattaacggcaaggagctgaaggtggagggccagattacctactacaacagatacaagagacagaacgtagtcaaggacctgtccgtcgagctggatagactgagcgaagaatctgtgaacaacgacatctcctcctggacaaagggcagaagcggagaagctctgagcctcctgaagaaaagattctcccatagacccgtgcaggagaagttcgtgtgcctgaactgcggcttcgagacacacgcagccgagcaagccgccctgaacatcgccagatcctggctgttcctgcggagccaggagtacaagaaataccagacaaacaagacaaccggcaacaccgataagagagccttcgtcgagacctggcagtccttttaccggaagaagcttaaggaggtgtggaaacctgccgtgcggtctggcggatctggcggaggctccaccagccccaagaaaaagagaaaagtctaagctgccttctgcggggcttgccttctggccatgcccttcttctctcccttgcacctgtacctcttggtctttgaataaagcctgagtaggaaggctagcaaaaaaaaaaaaaaaaaaaaaaaaaaaaaaaaaaaaaaaaaaaaaaaaaaaaaaaaaaaaaaaaaaaaaaaaaaaaaaaa

SEQ ID NO: 9380 - RNA, 8787 nt, synthetic construct
  source 1..8787: mol_type = other RNA
aggaaataagagagaaaagaagagtaagaagaaatataagagccaccatggcccctaagaagaagcgtaaagtgagccggatgaaccacgaccaggagttcgacccccctaaggtgtaccctcccgtccccgccgagaagagaaagcccatccgggtcctgagcctgttcgatggcatcgccaccggtctgctggtgctgaaggacctgggcatccaggtggataggtacattgcctccgaggtgtgcgaggactccatcaccgtgggaatggtgcgtcatcagggcaagatcatgtacgtgggcgacgtgcggagcgtgacacagaagcatatccaggagtggggccctttcgacctggtgatcggcggcagcccttgcaatgacctgagcatcgtgaacccagcccggaagggcctgtacgagggaaccggcagactgttcttcgagttttacagactgctgcacgacgcccggcctaaggaaggcgacgaccggcccttcttttggctgttcgagaatgtggtggccatgggagtcagcgacaagcgggatattagccggttcctggagagcaaccccgtgatgatcgatgccaaggaagtgagcgccgcccaccgggccagatacttctggggcaatctgcctggcatgaacagacccctggccagcaccgtgaacgacaagctggagctgcaggagtgcctggagcacggccggatcgccaagttcagcaaggtgagaaccatcaccacccgaagcaacagcatcaaacaaggcaaggaccagcactttcctgtgttcatgaacgagaaggaggacatcctgtggtgtaccgagatggagagagtgttcgggttcccagtccactacacagatgtcagcaacatgtctagactggccagacagagactgctgggaagaagctggtccgtccctgtgatcagacacctgttcgcccctctgaaggagtacttcgcctgcgtgagcagcggcaacagcaacgccaacagccggggccccagcttctctagcggcctggtgccactgtccctgagagggagccacatgggccccatggagatctacaaaaccgtgagcgcctggaagcggcagcctgtgcgcgtgctgagcctgtttcggaatatcgataaagtcctgaaaagcctgggattcctggagagcggctctggctccggcggtggcaccctgaagtacgtggaggatgtgacaaacgtggtcagacgggatgtggagaagtggggccccttcgatctggtgtacggcagcacccaacccctgggcagctcttgtgaccggtgccctggctggtacatgtttcagttccaccggatcctgcagtacgccctgccgagacaggagtcccagcggccattcttttggattttcatggacaacttgctgctgaccgaggatgaccaggaaactaccactcggttcctgcagaccgaagccgtgaccctgcaggacgtgagaggccgggactaccagaacgccatgcgggtgtggtccaacatccctggactgaaaagcaagcacgcacctctgacccctaaagaagaggagtacctgcaggcccaggtgcggagcagaagcaagctggacgcccctaaggtggatctgctggtgaagaattgcctcctgcccctgagagagtacttcaagtatttcagccagaatagtctgcccctgggaggcagcggcggcggcttccaggaggccgtgaccttcaaggacgtggccgtgaccttcaccgaggaggagctgggcctgctggacagcacccagaggaagctgtacagggacgtgatgctggagaacttcaggaacctgctgctggtgggcaaccagcccttcaagcccgagctgatcttccagctggagagggaggagatgctgctgatgctggagaccgagatccagaggggcaccaagagccaccacagcctggagggcggcccaagcagcggcgcccctcctcccagcggcggcaggcggcccaagcagcggcgcccctcctcccagcggcggcagcccagccggctccccaacctctaccgaggagggcacctctgagtccgccacccccgagagcggccctggcacctccaccgagcccagcgagggcagcgcacccggcagccctgccggcagccccacctccacagaggagggaaccagcaccgagcccagcgaaggcagcgccccaggcaccagcaccgagcctagtgagcaggagattaaacggatcaacaagatcagaagaagacttgtgaaagacagcaacaccaagaaggccggcaagacaggccccatgaaaaccctgctggttagagtgatgacacccgatctgagagagcggctggaaaacctgagaaagaagcctgaaaatatcccccagcccatcagcaatacatctagagccaacctgaataagctgctgaccgattacaccgaaatgaagaaggcgatcctgcatgtgtactgggaagagttccagaaggaccctgtgggcctgatgagccgggtggcccagcctgccagcaagaagatcgatcagaacaagctgaaacctgagatggacgagaagggcaacctgaccaccgccggctttgcctgctctcagtgtggccagcccctgttcgtgtacaagctggagcaggtgtctgagaagggcaaggcttacaccaactacttcggacggtgcaatgtggccgagcacgaaaagctgatcctgctggcccagctgaagcccgagaaggatagcgacgaagccgtgacatatagcctgggaaagtttgggcagagggccctggatttctacagcattcatgtgaccaaggagtccacccaccccgtgaagcccctggcccagatcgccggaaacagatacgcctccggacctgtgggaaaggccctgagcgacgcatgtatgggcacaatcgcctccttcctgtctaagtaccaggacatcatcatcgaacaccagaaggtggtgaagggcaaccagaagagactggagagcctgcgggagctggccggcaaggaaaacctggaataccctagcgtgaccctgccacctcagcctcacaccaaggagggcgttgatgcctacaacgaagtgatcgcccgggtgcgaatgtgggtgaacctgaacctgtggcagaagctgaagctaagcagagatgatgccaagcctctgctgagactgaagggattcccttcctttcctctggtcgagagacaggccaacgaagtggactggtgggacatggtgtgtaacgtgaagaagctgatcaacgagaaaaaggaggatggcaaggtgttttggcagaatctggctggctacaagagacaggaagccctgagaccatacctgagcagcgaggaagatcggaagaagggaaagaaattcgctcggtaccagctgggcgacctgctgctgcacctggaaaagaagcacggcgaggactggggaaaggtgtacgacgaggcctgggagcggattgacaagaaagtggaaggcctgagcaagcacatcaagctggaagaggaacggagaagcgaggacgcccagagcaaggccgccctgaccgactggctgcgggctaaggccagcttcgtgatcgagggcctgaaggaggccgacaaggacgagttctgcagatgcgagctgaagctgcagaagtggtacggggacctgcggggaaagcccttcgccatcgaagccgagaacagcatcctggacatcagcggcttcagcaagcagtacaactgtgccttcatctggcagaaggacggcgtgaagaagctgaacctgtacctgatcatcaactacttcaagggcggcaagctgcggttcaagaagatcaaacctgaagccttcgaagccaacagattctacaccgtgatcaacaaaaagagcggcgagatcgtgcccatggaggtgaacttcaacttcgacgaccccaacctgatcatcctgcctctggcctttggcaagagacagggcagagaattcatctggaacgacctgctgtccctggaaaccggcagcctgaagctggccaacggaagagtgatcgagaagacactgtacaacagaagaacccggcaggatgagcctgccctgttcgtggccctgaccttcgagcggcgggaggtcctggactcctccaatatcaaaccaatgaacctgatcggcgtggcaagaggcgaaaacatccccgccgtgatcgccctgaccgaccccgagggctgcccactgagccggtttaaggatagcctgggaaacccaacccacatcctgagaatcggcgagagctataaggagaagcagcggaccatccaggccaagaaggaggtggagcagcggagagccggcggctacagccggaagtacgccagcaaagccaagaatctggcagacgatatggtgagaaacaccgctagagatctgctgtactacgccgtgacccaggatgccatgctgatcttcgccaacctgagccggggcttcggccggcagggcaagcggaccttcatggccgagagacagtacacacggatggaggactggctgaccgccaagctggcctacgagggcctgagcaagacctacctgtccaagacactggcccagtacacctccaagacatgcagcaactgtgggtttaccatcaccagcgccgactacgacagggtgctggagaagctgaagaagacagcaacaggctggatgaccacaattaacggcaaggagctgaaggtggagggccagattacctactacaacagatacaagagacagaacgtagtcaaggacctgtccgtcgagctggatagactgagcgaagaatctgtgaacaacgacatctcctcctggacaaagggcagaagcggagaagctctgagcctcctgaagaaaagattctcccatagacccgtgcaggagaagttcgtgtgcctgaactgcggcttcgagacacacgcagccgagcaagccgccctgaacatcgccagatcctggctgttcctgcggagccaggagtacaagaaataccagacaaacaagacaaccggcaacaccgataagagagccttcgtcgagacctggcagtccttttaccggaagaagcttaaggaggtgtggaaacctgccgtgcggtctggcggatctggcggaggctccaccagccccaagaaaaagagaaaagtctaagctgccttctgcggggcttgccttctggccatgcccttcttctctcccttgcacctgtacctcttggtctttgaataaagcctgagtaggaaggctagcaaaaaaaaaaaaaaaaaaaaaaaaaaaaaaaaaaaaaaaaaaaaaaaaaaaaaaaaaaaaaaaaaaaaaaaaaaaaaaaagcccagccggctccccaacctctaccgaggagggcacctctgagtccgccacccccgagagcggccctggcacctccaccgagcccagcgagggcagcgcacccggcagccctgccggcagccccacctccacagaggagggaaccagcaccgagcccagcgaaggcagcgccccaggcaccagcaccgagcctagtgagcaggagattaaacggatcaacaagatcagaagaagacttgtgaaagacagcaacaccaagaaggccggcaagacaggccccatgaaaaccctgctggttagagtgatgacacccgatctgagagagcggctggaaaacctgagaaagaagcctgaaaatatcccccagcccatcagcaatacatctagagccaacctgaataagctgctgaccgattacaccgaaatgaagaaggcgatcctgcatgtgtactgggaagagttccagaaggaccctgtgggcctgatgagccgggtggcccagcctgccagcaagaagatcgatcagaacaagctgaaacctgagatggacgagaagggcaacctgaccaccgccggctttgcctgctctcagtgtggccagcccctgttcgtgtacaagctggagcaggtgtctgagaagggcaaggcttacaccaactacttcggacggtgcaatgtggccgagcacgaaaagctgatcctgctggcccagctgaagcccgagaaggatagcgacgaagccgtgacatatagcctgggaaagtttgggcagagggccctggatttctacagcattcatgtgaccaaggagtccacccaccccgtgaagcccctggcccagatcgccggaaacagatacgcctccggacctgtgggaaaggccctgagcgacgcatgtatgggcacaatcgcctccttcctgtctaagtaccaggacatcatcatcgaacaccagaaggtggtgaagggcaaccagaagagactggagagcctgcgggagctggccggcaaggaaaacctggaataccctagcgtgaccctgccacctcagcctcacaccaaggagggcgttgatgcctacaacgaagtgatcgcccgggtgcgaatgtgggtgaacctgaacctgtggcagaagctgaagctaagcagagatgatgccaagcctctgctgagactgaagggattcccttcctttcctctggtcgagagacaggccaacgaagtggactggtgggacatggtgtgtaacgtgaagaagctgatcaacgagaaaaaggaggatggcaaggtgttttggcagaatctggctggctacaagagacaggaagccctgagaccatacctgagcagcgaggaagatcggaagaagggaaagaaattcgctcggtaccagctgggcgacctgctgctgcacctggaaaagaagcacggcgaggactggggaaaggtgtacgacgaggcctgggagcggattgacaagaaagtggaaggcctgagcaagcacatcaagctggaagaggaacggagaagcgaggacgcccagagcaaggccgccctgaccgactggctgcgggctaaggccagcttcgtgatcgagggcctgaaggaggccgacaaggacgagttctgcagatgcgagctgaagctgcagaagtggtacggggacctgcggggaaagcccttcgccatcgaagccgagaacagcatcctggacatcagcggcttcagcaagcagtacaactgtgccttcatctggcagaaggacggcgtgaagaagctgaacctgtacctgatcatcaactacttcaagggcggcaagctgcggttcaagaagatcaaacctgaagccttcgaagccaacagattctacaccgtgatcaacaaaaagagcggcgagatcgtgcccatggaggtgaacttcaacttcgacgaccccaacctgatcatcctgcctctggcctttggcaagagacagggcagagaattcatctggaacgacctgctgtccctggaaaccggcagcctgaagctggccaacggaagagtgatcgagaagacactgtacaacagaagaacccggcaggatgagcctgccctgttcgtggccctgaccttcgagcggcgggaggtcctggactcctccaatatcaaaccaatgaacctgatcggcgtggcaagaggcgaaaacatccccgccgtgatcgccctgaccgaccccgagggctgcccactgagccggtttaaggatagcctgggaaacccaacccacatcctgagaatcggcgagagctataaggagaagcagcggaccatccaggccaagaaggaggtggagcagcggagagccggcggctacagccggaagtacgccagcaaagccaagaatctggcagacgatatggtgagaaacaccgctagagatctgctgtactacgccgtgacccaggatgccatgctgatcttcgccaacctgagccggggcttcggccggcagggcaagcggaccttcatggccgagagacagtacacacggatggaggactggctgaccgccaagctggcctacgagggcctgagcaagacctacctgtccaagacactggcccagtacacctccaagacatgcagcaactgtgggtttaccatcaccagcgccgactacgacagggtgctggagaagctgaagaagacagcaacaggctggatgaccacaattaacggcaaggagctgaaggtggagggccagattacctactacaacagatacaagagacagaacgtagtcaaggacctgtccgtcgagctggatagactgagcgaagaatctgtgaacaacgacatctcctcctggacaaagggcagaagcggagaagctctgagcctcctgaagaaaagattctcccatagacccgtgcaggagaagttcgtgtgcctgaactgcggcttcgagacacacgcagccgagcaagccgccctgaacatcgccagatcctggctgttcctgcggagccaggagtacaagaaataccagacaaacaagacaaccggcaacaccgataagagagccttcgtcgagacctggcagtccttttaccggaagaagcttaaggaggtgtggaaacctgccgtgcggtctggcggatctggcggaggctccaccagccccaagaaaaagagaaaagtctaagctgccttctgcggggcttgccttctggccatgcccttcttctctcccttgcacctgtacctcttggtctttgaataaagcctgagtaggaaggctagcaaaaaaaaaaaaaaaaaaaaaaaaaaaaaaaaaaaaaaaaaaaaaaaaaaaaaaaaaaaaaaaaaaaaaaaaaaaaaaaa

SEQ ID NO: 9381 - RNA, 8787 nt, synthetic construct
  source 1..8787: mol_type = other RNA
aggaaataagagagaaaagaagagtaagaagaaatataagagccaccatggcccctaagaagaagcgtaaagtgagccggatgaaccacgaccaggagttcgacccccctaaggtgtaccctcccgtccccgccgagaagagaaagcccatccgggtcctgagcctgttcgatggcatcgccaccggtctgctggtgctgaaggacctgggcatccaggtggataggtacattgcctccgaggtgtgcgaggactccatcaccgtgggaatggtgcgtcatcagggcaagatcatgtacgtgggcgacgtgcggagcgtgacacagaagcatatccaggagtggggccctttcgacctggtgatcggcggcagcccttgcaatgacctgagcatcgtgaacccagcccggaagggcctgtacgagggaaccggcagactgttcttcgagttttacagactgctgcacgacgcccggcctaaggaaggcgacgaccggcccttcttttggctgttcgagaatgtggtggccatgggagtcagcgacaagcgggatattagccggttcctggagagcaaccccgtgatgatcgatgccaaggaagtgagcgccgcccaccgggccagatacttctggggcaatctgcctggcatgaacagacccctggccagcaccgtgaacgacaagctggagctgcaggagtgcctggagcacggccggatcgccaagttcagcaaggtgagaaccatcaccacccgaagcaacagcatcaaacaaggcaaggaccagcactttcctgtgttcatgaacgagaaggaggacatcctgtggtgtaccgagatggagagagtgttcgggttcccagtccactacacagatgtcagcaacatgtctagactggccagacagagactgctgggaagaagctggtccgtccctgtgatcagacacctgttcgcccctctgaaggagtacttcgcctgcgtgagcagcggcaacagcaacgccaacagccggggccccagcttctctagcggcctggtgccactgtccctgagagggagccacatgggccccatggagatctacaaaaccgtgagcgcctggaagcggcagcctgtgcgcgtgctgagcctgtttcggaatatcgataaagtcctgaaaagcctgggattcctggagagcggctctggctccggcggtggcaccctgaagtacgtggaggatgtgacaaacgtggtcagacgggatgtggagaagtggggccccttcgatctggtgtacggcagcacccaacccctgggcagctcttgtgaccggtgccctggctggtacatgtttcagttccaccggatcctgcagtacgccctgccgagacaggagtcccagcggccattcttttggattttcatggacaacttgctgctgaccgaggatgaccaggaaactaccactcggttcctgcagaccgaagccgtgaccctgcaggacgtgagaggccgggactaccagaacgccatgcgggtgtggtccaacatccctggactgaaaagcaagcacgcacctctgacccctaaagaagaggagtacctgcaggcccaggtgcggagcagaagcaagctggacgcccctaaggtggatctgctggtgaagaattgcctcctgcccctgagagagtacttcaagtatttcagccagaatagtctgcccctgggaggcagcggcggcggcatggagggcctggtgatgttccaggacctgagcatcgacttcagccaggaggagtgggagtgcctggacgccgcccagaaggacctgtacagggacgtgatgatggagaactacagcagcctggtgagcctgggcctgagcacccccaagcccgacgtgatcagcctgctggagcagggcaaggagccctggatggtgagcagggacgtgctgggcggctggtgccccgacaggctgaagaagggcggcccaagcagcggcgcccctcctcccagcggcggcaggcggcccaagcagcggcgcccctcctcccagcggcggcagcccagccggctccccaacctctaccgaggagggcacctctgagtccgccacccccgagagcggccctggcacctccaccgagcccagcgagggcagcgcacccggcagccctgccggcagccccacctccacagaggagggaaccagcaccgagcccagcgaaggcagcgccccaggcaccagcaccgagcctagtgagcaggagattaaacggatcaacaagatcagaagaagacttgtgaaagacagcaacaccaagaaggccggcaagacaggccccatgaaaaccctgctggttagagtgatgacacccgatctgagagagcggctggaaaacctgagaaagaagcctgaaaatatcccccagcccatcagcaatacatctagagccaacctgaataagctgctgaccgattacaccgaaatgaagaaggcgatcctgcatgtgtactgggaagagttccagaaggaccctgtgggcctgatgagccgggtggcccagcctgccagcaagaagatcgatcagaacaagctgaaacctgagatggacgagaagggcaacctgaccaccgccggctttgcctgctctcagtgtggccagcccctgttcgtgtacaagctggagcaggtgtctgagaagggcaaggcttacaccaactacttcggacggtgcaatgtggccgagcacgaaaagctgatcctgctggcccagctgaagcccgagaaggatagcgacgaagccgtgacatatagcctgggaaagtttgggcagagggccctggatttctacagcattcatgtgaccaaggagtccacccaccccgtgaagcccctggcccagatcgccggaaacagatacgcctccggacctgtgggaaaggccctgagcgacgcatgtatgggcacaatcgcctccttcctgtctaagtaccaggacatcatcatcgaacaccagaaggtggtgaagggcaaccagaagagactggagagcctgcgggagctggccggcaaggaaaacctggaataccctagcgtgaccctgccacctcagcctcacaccaaggagggcgttgatgcctacaacgaagtgatcgcccgggtgcgaatgtgggtgaacctgaacctgtggcagaagctgaagctaagcagagatgatgccaagcctctgctgagactgaagggattcccttcctttcctctggtcgagagacaggccaacgaagtggactggtgggacatggtgtgtaacgtgaagaagctgatcaacgagaaaaaggaggatggcaaggtgttttggcagaatctggctggctacaagagacaggaagccctgagaccatacctgagcagcgaggaagatcggaagaagggaaagaaattcgctcggtaccagctgggcgacctgctgctgcacctggaaaagaagcacggcgaggactggggaaaggtgtacgacgaggcctgggagcggattgacaagaaagtggaaggcctgagcaagcacatcaagctggaagaggaacggagaagcgaggacgcccagagcaaggccgccctgaccgactggctgcgggctaaggccagcttcgtgatcgagggcctgaaggaggccgacaaggacgagttctgcagatgcgagctgaagctgcagaagtggtacggggacctgcggggaaagcccttcgccatcgaagccgagaacagcatcctggacatcagcggcttcagcaagcagtacaactgtgccttcatctggcagaaggacggcgtgaagaagctgaacctgtacctgatcatcaactacttcaagggcggcaagctgcggttcaagaagatcaaacctgaagccttcgaagccaacagattctacaccgtgatcaacaaaaagagcggcgagatcgtgcccatggaggtgaacttcaacttcgacgaccccaacctgatcatcctgcctctggcctttggcaagagacagggcagagaattcatctggaacgacctgctgtccctggaaaccggcagcctgaagctggccaacggaagagtgatcgagaagacactgtacaacagaagaacccggcaggatgagcctgccctgttcgtggccctgaccttcgagcggcgggaggtcctggactcctccaatatcaaaccaatgaacctgatcggcgtggcaagaggcgaaaacatccccgccgtgatcgccctgaccgaccccgagggctgcccactgagccggtttaaggatagcctgggaaacccaacccacatcctgagaatcggcgagagctataaggagaagcagcggaccatccaggccaagaaggaggtggagcagcggagagccggcggctacagccggaagtacgccagcaaagccaagaatctggcagacgatatggtgagaaacaccgctagagatctgctgtactacgccgtgacccaggatgccatgctgatcttcgccaacctgagccggggcttcggccggcagggcaagcggaccttcatggccgagagacagtacacacggatggaggactggctgaccgccaagctggcctacgagggcctgagcaagacctacctgtccaagacactggcccagtacacctccaagacatgcagcaactgtgggtttaccatcaccagcgccgactacgacagggtgctggagaagctgaagaagacagcaacaggctggatgaccacaattaacggcaaggagctgaaggtggagggccagattacctactacaacagatacaagagacagaacgtagtcaaggacctgtccgtcgagctggatagactgagcgaagaatctgtgaacaacgacatctcctcctggacaaagggcagaagcggagaagctctgagcctcctgaagaaaagattctcccatagacccgtgcaggagaagttcgtgtgcctgaactgcggcttcgagacacacgcagccgagcaagccgccctgaacatcgccagatcctggctgttcctgcggagccaggagtacaagaaataccagacaaacaagacaaccggcaacaccgataagagagccttcgtcgagacctggcagtccttttaccggaagaagcttaaggaggtgtggaaacctgccgtgcggtctggcggatctggcggaggctccaccagccccaagaaaaagagaaaagtctaagctgccttctgcggggcttgccttctggccatgcccttcttctctcccttgcacctgtacctcttggtctttgaataaagcctgagtaggaaggctagcaaaaaaaaaaaaaaaaaaaaaaaaaaaaaaaaaaaaaaaaaaaaaaaaaaaaaaaaaaaaaaaaaaaaaaaaaaaaaaaagcccagccggctccccaacctctaccgaggagggcacctctgagtccgccacccccgagagcggccctggcacctccaccgagcccagcgagggcagcgcacccggcagccctgccggcagccccacctccacagaggagggaaccagcaccgagcccagcgaaggcagcgccccaggcaccagcaccgagcctagtgagcaggagattaaacggatcaacaagatcagaagaagacttgtgaaagacagcaacaccaagaaggccggcaagacaggccccatgaaaaccctgctggttagagtgatgacacccgatctgagagagcggctggaaaacctgagaaagaagcctgaaaatatcccccagcccatcagcaatacatctagagccaacctgaataagctgctgaccgattacaccgaaatgaagaaggcgatcctgcatgtgtactgggaagagttccagaaggaccctgtgggcctgatgagccgggtggcccagcctgccagcaagaagatcgatcagaacaagctgaaacctgagatggacgagaagggcaacctgaccaccgccggctttgcctgctctcagtgtggccagcccctgttcgtgtacaagctggagcaggtgtctgagaagggcaaggcttacaccaactacttcggacggtgcaatgtggccgagcacgaaaagctgatcctgctggcccagctgaagcccgagaaggatagcgacgaagccgtgacatatagcctgggaaagtttgggcagagggccctggatttctacagcattcatgtgaccaaggagtccacccaccccgtgaagcccctggcccagatcgccggaaacagatacgcctccggacctgtgggaaaggccctgagcgacgcatgtatgggcacaatcgcctccttcctgtctaagtaccaggacatcatcatcgaacaccagaaggtggtgaagggcaaccagaagagactggagagcctgcgggagctggccggcaaggaaaacctggaataccctagcgtgaccctgccacctcagcctcacaccaaggagggcgttgatgcctacaacgaagtgatcgcccgggtgcgaatgtgggtgaacctgaacctgtggcagaagctgaagctaagcagagatgatgccaagcctctgctgagactgaagggattcccttcctttcctctggtcgagagacaggccaacgaagtggactggtgggacatggtgtgtaacgtgaagaagctgatcaacgagaaaaaggaggatggcaaggtgttttggcagaatctggctggctacaagagacaggaagccctgagaccatacctgagcagcgaggaagatcggaagaagggaaagaaattcgctcggtaccagctgggcgacctgctgctgcacctggaaaagaagcacggcgaggactggggaaaggtgtacgacgaggcctgggagcggattgacaagaaagtggaaggcctgagcaagcacatcaagctggaagaggaacggagaagcgaggacgcccagagcaaggccgccctgaccgactggctgcgggctaaggccagcttcgtgatcgagggcctgaaggaggccgacaaggacgagttctgcagatgcgagctgaagctgcagaagtggtacggggacctgcggggaaagcccttcgccatcgaagccgagaacagcatcctggacatcagcggcttcagcaagcagtacaactgtgccttcatctggcagaaggacggcgtgaagaagctgaacctgtacctgatcatcaactacttcaagggcggcaagctgcggttcaagaagatcaaacctgaagccttcgaagccaacagattctacaccgtgatcaacaaaaagagcggcgagatcgtgcccatggaggtgaacttcaacttcgacgaccccaacctgatcatcctgcctctggcctttggcaagagacagggcagagaattcatctggaacgacctgctgtccctggaaaccggcagcctgaagctggccaacggaagagtgatcgagaagacactgtacaacagaagaacccggcaggatgagcctgccctgttcgtggccctgaccttcgagcggcgggaggtcctggactcctccaatatcaaaccaatgaacctgatcggcgtggcaagaggcgaaaacatccccgccgtgatcgccctgaccgaccccgagggctgcccactgagccggtttaaggatagcctgggaaacccaacccacatcctgagaatcggcgagagctataaggagaagcagcggaccatccaggccaagaaggaggtggagcagcggagagccggcggctacagccggaagtacgccagcaaagccaagaatctggcagacgatatggtgagaaacaccgctagagatctgctgtactacgccgtgacccaggatgccatgctgatcttcgccaacctgagccggggcttcggccggcagggcaagcggaccttcatggccgagagacagtacacacggatggaggactggctgaccgccaagctggcctacgagggcctgagcaagacctacctgtccaagacactggcccagtacacctccaagacatgcagcaactgtgggtttaccatcaccagcgccgactacgacagggtgctggagaagctgaagaagacagcaacaggctggatgaccacaattaacggcaaggagctgaaggtggagggccagattacctactacaacagatacaagagacagaacgtagtcaaggacctgtccgtcgagctggatagactgagcgaagaatctgtgaacaacgacatctcctcctggacaaagggcagaagcggagaagctctgagcctcctgaagaaaagattctcccatagacccgtgcaggagaagttcgtgtgcctgaactgcggcttcgagacacacgcagccgagcaagccgccctgaacatcgccagatcctggctgttcctgcggagccaggagtacaagaaataccagacaaacaagacaaccggcaacaccgataagagagccttcgtcgagacctggcagtccttttaccggaagaagcttaaggaggtgtggaaacctgccgtgcggtctggcggatctggcggaggctccaccagccccaagaaaaagagaaaagtctaagctgccttctgcggggcttgccttctggccatgcccttcttctctcccttgcacctgtacctcttggtctttgaataaagcctgagtaggaaggctagcaaaaaaaaaaaaaaaaaaaaaaaaaaaaaaaaaaaaaaaaaaaaaaaaaaaaaaaaaaaaaaaaaaaaaaaaaaaaaaaa

SEQ ID NO: 9382 - RNA, 8787 nt, synthetic construct
  source 1..8787: mol_type = other RNA
aggaaataagagagaaaagaagagtaagaagaaatataagagccaccatggcccctaagaagaagcgtaaagtgagccggatgaaccacgaccaggagttcgacccccctaaggtgtaccctcccgtccccgccgagaagagaaagcccatccgggtcctgagcctgttcgatggcatcgccaccggtctgctggtgctgaaggacctgggcatccaggtggataggtacattgcctccgaggtgtgcgaggactccatcaccgtgggaatggtgcgtcatcagggcaagatcatgtacgtgggcgacgtgcggagcgtgacacagaagcatatccaggagtggggccctttcgacctggtgatcggcggcagcccttgcaatgacctgagcatcgtgaacccagcccggaagggcctgtacgagggaaccggcagactgttcttcgagttttacagactgctgcacgacgcccggcctaaggaaggcgacgaccggcccttcttttggctgttcgagaatgtggtggccatgggagtcagcgacaagcgggatattagccggttcctggagagcaaccccgtgatgatcgatgccaaggaagtgagcgccgcccaccgggccagatacttctggggcaatctgcctggcatgaacagacccctggccagcaccgtgaacgacaagctggagctgcaggagtgcctggagcacggccggatcgccaagttcagcaaggtgagaaccatcaccacccgaagcaacagcatcaaacaaggcaaggaccagcactttcctgtgttcatgaacgagaaggaggacatcctgtggtgtaccgagatggagagagtgttcgggttcccagtccactacacagatgtcagcaacatgtctagactggccagacagagactgctgggaagaagctggtccgtccctgtgatcagacacctgttcgcccctctgaaggagtacttcgcctgcgtgagcagcggcaacagcaacgccaacagccggggccccagcttctctagcggcctggtgccactgtccctgagagggagccacatgggccccatggagatctacaaaaccgtgagcgcctggaagcggcagcctgtgcgcgtgctgagcctgtttcggaatatcgataaagtcctgaaaagcctgggattcctggagagcggctctggctccggcggtggcaccctgaagtacgtggaggatgtgacaaacgtggtcagacgggatgtggagaagtggggccccttcgatctggtgtacggcagcacccaacccctgggcagctcttgtgaccggtgccctggctggtacatgtttcagttccaccggatcctgcagtacgccctgccgagacaggagtcccagcggccattcttttggattttcatggacaacttgctgctgaccgaggatgaccaggaaactaccactcggttcctgcagaccgaagccgtgaccctgcaggacgtgagaggccgggactaccagaacgccatgcgggtgtggtccaacatccctggactgaaaagcaagcacgcacctctgacccctaaagaagaggagtacctgcaggcccaggtgcggagcagaagcaagctggacgcccctaaggtggatctgctggtgaagaattgcctcctgcccctgagagagtacttcaagtatttcagccagaatagtctgcccctgggaggcagcggcggcggcacccaggagcacgtgaccttcagggacgtggccgtgttcttcagccaggacgagtggctgcacctggacagcgcccagagggccctgtacagggaggtgatgctggagaactacagcagcctggtgagcctgggcatccccttcagcatgcccaagctgatccaccagctgcagcagggcgaggacccctgcatggtggagagggaggtgagcgccgacacctgcctgggcttcaagacctggggcggcccaagcagcggcgcccctcctcccagcggcggcaggcggcccaagcagcggcgcccctcctcccagcggcggcagcccagccggctccccaacctctaccgaggagggcacctctgagtccgccacccccgagagcggccctggcacctccaccgagcccagcgagggcagcgcacccggcagccctgccggcagccccacctccacagaggagggaaccagcaccgagcccagcgaaggcagcgccccaggcaccagcaccgagcctagtgagcaggagattaaacggatcaacaagatcagaagaagacttgtgaaagacagcaacaccaagaaggccggcaagacaggccccatgaaaaccctgctggttagagtgatgacacccgatctgagagagcggctggaaaacctgagaaagaagcctgaaaatatcccccagcccatcagcaatacatctagagccaacctgaataagctgctgaccgattacaccgaaatgaagaaggcgatcctgcatgtgtactgggaagagttccagaaggaccctgtgggcctgatgagccgggtggcccagcctgccagcaagaagatcgatcagaacaagctgaaacctgagatggacgagaagggcaacctgaccaccgccggctttgcctgctctcagtgtggccagcccctgttcgtgtacaagctggagcaggtgtctgagaagggcaaggcttacaccaactacttcggacggtgcaatgtggccgagcacgaaaagctgatcctgctggcccagctgaagcccgagaaggatagcgacgaagccgtgacatatagcctgggaaagtttgggcagagggccctggatttctacagcattcatgtgaccaaggagtccacccaccccgtgaagcccctggcccagatcgccggaaacagatacgcctccggacctgtgggaaaggccctgagcgacgcatgtatgggcacaatcgcctccttcctgtctaagtaccaggacatcatcatcgaacaccagaaggtggtgaagggcaaccagaagagactggagagcctgcgggagctggccggcaaggaaaacctggaataccctagcgtgaccctgccacctcagcctcacaccaaggagggcgttgatgcctacaacgaagtgatcgcccgggtgcgaatgtgggtgaacctgaacctgtggcagaagctgaagctaagcagagatgatgccaagcctctgctgagactgaagggattcccttcctttcctctggtcgagagacaggccaacgaagtggactggtgggacatggtgtgtaacgtgaagaagctgatcaacgagaaaaaggaggatggcaaggtgttttggcagaatctggctggctacaagagacaggaagccctgagaccatacctgagcagcgaggaagatcggaagaagggaaagaaattcgctcggtaccagctgggcgacctgctgctgcacctggaaaagaagcacggcgaggactggggaaaggtgtacgacgaggcctgggagcggattgacaagaaagtggaaggcctgagcaagcacatcaagctggaagaggaacggagaagcgaggacgcccagagcaaggccgccctgaccgactggctgcgggctaaggccagcttcgtgatcgagggcctgaaggaggccgacaaggacgagttctgcagatgcgagctgaagctgcagaagtggtacggggacctgcggggaaagcccttcgccatcgaagccgagaacagcatcctggacatcagcggcttcagcaagcagtacaactgtgccttcatctggcagaaggacggcgtgaagaagctgaacctgtacctgatcatcaactacttcaagggcggcaagctgcggttcaagaagatcaaacctgaagccttcgaagccaacagattctacaccgtgatcaacaaaaagagcggcgagatcgtgcccatggaggtgaacttcaacttcgacgaccccaacctgatcatcctgcctctggcctttggcaagagacagggcagagaattcatctggaacgacctgctgtccctggaaaccggcagcctgaagctggccaacggaagagtgatcgagaagacactgtacaacagaagaacccggcaggatgagcctgccctgttcgtggccctgaccttcgagcggcgggaggtcctggactcctccaatatcaaaccaatgaacctgatcggcgtggcaagaggcgaaaacatccccgccgtgatcgccctgaccgaccccgagggctgcccactgagccggtttaaggatagcctgggaaacccaacccacatcctgagaatcggcgagagctataaggagaagcagcggaccatccaggccaagaaggaggtggagcagcggagagccggcggctacagccggaagtacgccagcaaagccaagaatctggcagacgatatggtgagaaacaccgctagagatctgctgtactacgccgtgacccaggatgccatgctgatcttcgccaacctgagccggggcttcggccggcagggcaagcggaccttcatggccgagagacagtacacacggatggaggactggctgaccgccaagctggcctacgagggcctgagcaagacctacctgtccaagacactggcccagtacacctccaagacatgcagcaactgtgggtttaccatcaccagcgccgactacgacagggtgctggagaagctgaagaagacagcaacaggctggatgaccacaattaacggcaaggagctgaaggtggagggccagattacctactacaacagatacaagagacagaacgtagtcaaggacctgtccgtcgagctggatagactgagcgaagaatctgtgaacaacgacatctcctcctggacaaagggcagaagcggagaagctctgagcctcctgaagaaaagattctcccatagacccgtgcaggagaagttcgtgtgcctgaactgcggcttcgagacacacgcagccgagcaagccgccctgaacatcgccagatcctggctgttcctgcggagccaggagtacaagaaataccagacaaacaagacaaccggcaacaccgataagagagccttcgtcgagacctggcagtccttttaccggaagaagcttaaggaggtgtggaaacctgccgtgcggtctggcggatctggcggaggctccaccagccccaagaaaaagagaaaagtctaagctgccttctgcggggcttgccttctggccatgcccttcttctctcccttgcacctgtacctcttggtctttgaataaagcctgagtaggaaggctagcaaaaaaaaaaaaaaaaaaaaaaaaaaaaaaaaaaaaaaaaaaaaaaaaaaaaaaaaaaaaaaaaaaaaaaaaaaaaaaaagcccagccggctccccaacctctaccgaggagggcacctctgagtccgccacccccgagagcggccctggcacctccaccgagcccagcgagggcagcgcacccggcagccctgccggcagccccacctccacagaggagggaaccagcaccgagcccagcgaaggcagcgccccaggcaccagcaccgagcctagtgagcaggagattaaacggatcaacaagatcagaagaagacttgtgaaagacagcaacaccaagaaggccggcaagacaggccccatgaaaaccctgctggttagagtgatgacacccgatctgagagagcggctggaaaacctgagaaagaagcctgaaaatatcccccagcccatcagcaatacatctagagccaacctgaataagctgctgaccgattacaccgaaatgaagaaggcgatcctgcatgtgtactgggaagagttccagaaggaccctgtgggcctgatgagccgggtggcccagcctgccagcaagaagatcgatcagaacaagctgaaacctgagatggacgagaagggcaacctgaccaccgccggctttgcctgctctcagtgtggccagcccctgttcgtgtacaagctggagcaggtgtctgagaagggcaaggcttacaccaactacttcggacggtgcaatgtggccgagcacgaaaagctgatcctgctggcccagctgaagcccgagaaggatagcgacgaagccgtgacatatagcctgggaaagtttgggcagagggccctggatttctacagcattcatgtgaccaaggagtccacccaccccgtgaagcccctggcccagatcgccggaaacagatacgcctccggacctgtgggaaaggccctgagcgacgcatgtatgggcacaatcgcctccttcctgtctaagtaccaggacatcatcatcgaacaccagaaggtggtgaagggcaaccagaagagactggagagcctgcgggagctggccggcaaggaaaacctggaataccctagcgtgaccctgccacctcagcctcacaccaaggagggcgttgatgcctacaacgaagtgatcgcccgggtgcgaatgtgggtgaacctgaacctgtggcagaagctgaagctaagcagagatgatgccaagcctctgctgagactgaagggattcccttcctttcctctggtcgagagacaggccaacgaagtggactggtgggacatggtgtgtaacgtgaagaagctgatcaacgagaaaaaggaggatggcaaggtgttttggcagaatctggctggctacaagagacaggaagccctgagaccatacctgagcagcgaggaagatcggaagaagggaaagaaattcgctcggtaccagctgggcgacctgctgctgcacctggaaaagaagcacggcgaggactggggaaaggtgtacgacgaggcctgggagcggattgacaagaaagtggaaggcctgagcaagcacatcaagctggaagaggaacggagaagcgaggacgcccagagcaaggccgccctgaccgactggctgcgggctaaggccagcttcgtgatcgagggcctgaaggaggccgacaaggacgagttctgcagatgcgagctgaagctgcagaagtggtacggggacctgcggggaaagcccttcgccatcgaagccgagaacagcatcctggacatcagcggcttcagcaagcagtacaactgtgccttcatctggcagaaggacggcgtgaagaagctgaacctgtacctgatcatcaactacttcaagggcggcaagctgcggttcaagaagatcaaacctgaagccttcgaagccaacagattctacaccgtgatcaacaaaaagagcggcgagatcgtgcccatggaggtgaacttcaacttcgacgaccccaacctgatcatcctgcctctggcctttggcaagagacagggcagagaattcatctggaacgacctgctgtccctggaaaccggcagcctgaagctggccaacggaagagtgatcgagaagacactgtacaacagaagaacccggcaggatgagcctgccctgttcgtggccctgaccttcgagcggcgggaggtcctggactcctccaatatcaaaccaatgaacctgatcggcgtggcaagaggcgaaaacatccccgccgtgatcgccctgaccgaccccgagggctgcccactgagccggtttaaggatagcctgggaaacccaacccacatcctgagaatcggcgagagctataaggagaagcagcggaccatccaggccaagaaggaggtggagcagcggagagccggcggctacagccggaagtacgccagcaaagccaagaatctggcagacgatatggtgagaaacaccgctagagatctgctgtactacgccgtgacccaggatgccatgctgatcttcgccaacctgagccggggcttcggccggcagggcaagcggaccttcatggccgagagacagtacacacggatggaggactggctgaccgccaagctggcctacgagggcctgagcaagacctacctgtccaagacactggcccagtacacctccaagacatgcagcaactgtgggtttaccatcaccagcgccgactacgacagggtgctggagaagctgaagaagacagcaacaggctggatgaccacaattaacggcaaggagctgaaggtggagggccagattacctactacaacagatacaagagacagaacgtagtcaaggacctgtccgtcgagctggatagactgagcgaagaatctgtgaacaacgacatctcctcctggacaaagggcagaagcggagaagctctgagcctcctgaagaaaagattctcccatagacccgtgcaggagaagttcgtgtgcctgaactgcggcttcgagacacacgcagccgagcaagccgccctgaacatcgccagatcctggctgttcctgcggagccaggagtacaagaaataccagacaaacaagacaaccggcaacaccgataagagagccttcgtcgagacctggcagtccttttaccggaagaagcttaaggaggtgtggaaacctgccgtgcggtctggcggatctggcggaggctccaccagccccaagaaaaagagaaaagtctaagctgccttctgcggggcttgccttctggccatgcccttcttctctcccttgcacctgtacctcttggtctttgaataaagcctgagtaggaaggctagcaaaaaaaaaaaaaaaaaaaaaaaaaaaaaaaaaaaaaaaaaaaaaaaaaaaaaaaaaaaaaaaaaaaaaaaaaaaaaaaa

SEQ ID NO: 9383 - RNA, 8787 nt, synthetic construct
  source 1..8787: mol_type = other RNA
aggaaataagagagaaaagaagagtaagaagaaatataagagccaccatggcccctaagaagaagcgtaaagtgagccggatgaaccacgaccaggagttcgacccccctaaggtgtaccctcccgtccccgccgagaagagaaagcccatccgggtcctgagcctgttcgatggcatcgccaccggtctgctggtgctgaaggacctgggcatccaggtggataggtacattgcctccgaggtgtgcgaggactccatcaccgtgggaatggtgcgtcatcagggcaagatcatgtacgtgggcgacgtgcggagcgtgacacagaagcatatccaggagtggggccctttcgacctggtgatcggcggcagcccttgcaatgacctgagcatcgtgaacccagcccggaagggcctgtacgagggaaccggcagactgttcttcgagttttacagactgctgcacgacgcccggcctaaggaaggcgacgaccggcccttcttttggctgttcgagaatgtggtggccatgggagtcagcgacaagcgggatattagccggttcctggagagcaaccccgtgatgatcgatgccaaggaagtgagcgccgcccaccgggccagatacttctggggcaatctgcctggcatgaacagacccctggccagcaccgtgaacgacaagctggagctgcaggagtgcctggagcacggccggatcgccaagttcagcaaggtgagaaccatcaccacccgaagcaacagcatcaaacaaggcaaggaccagcactttcctgtgttcatgaacgagaaggaggacatcctgtggtgtaccgagatggagagagtgttcgggttcccagtccactacacagatgtcagcaacatgtctagactggccagacagagactgctgggaagaagctggtccgtccctgtgatcagacacctgttcgcccctctgaaggagtacttcgcctgcgtgagcagcggcaacagcaacgccaacagccggggccccagcttctctagcggcctggtgccactgtccctgagagggagccacatgggccccatggagatctacaaaaccgtgagcgcctggaagcggcagcctgtgcgcgtgctgagcctgtttcggaatatcgataaagtcctgaaaagcctgggattcctggagagcggctctggctccggcggtggcaccctgaagtacgtggaggatgtgacaaacgtggtcagacgggatgtggagaagtggggccccttcgatctggtgtacggcagcacccaacccctgggcagctcttgtgaccggtgccctggctggtacatgtttcagttccaccggatcctgcagtacgccctgccgagacaggagtcccagcggccattcttttggattttcatggacaacttgctgctgaccgaggatgaccaggaaactaccactcggttcctgcagaccgaagccgtgaccctgcaggacgtgagaggccgggactaccagaacgccatgcgggtgtggtccaacatccctggactgaaaagcaagcacgcacctctgacccctaaagaagaggagtacctgcaggcccaggtgcggagcagaagcaagctggacgcccctaaggtggatctgctggtgaagaattgcctcctgcccctgagagagtacttcaagtatttcagccagaatagtctgcccctgggaggcagcggcggcggccaggccgaggtgaccttcgaggacgtggccgtgctgttcagcagggaggagtggggcaggctgggccccgcccagaggggcctgtacagggacgtgatgctggagacctacaggaacctggtgagcctgggcgccggccccgccggccccaagcccggcgtgatcacccagctggagcagggcgacgagccctgggtgctggacgcccagggcgccaagggcaaggagaggctgagggtgagcggcggcccaagcagcggcgcccctcctcccagcggcggcaggcggcccaagcagcggcgcccctcctcccagcggcggcagcccagccggctccccaacctctaccgaggagggcacctctgagtccgccacccccgagagcggccctggcacctccaccgagcccagcgagggcagcgcacccggcagccctgccggcagccccacctccacagaggagggaaccagcaccgagcccagcgaaggcagcgccccaggcaccagcaccgagcctagtgagcaggagattaaacggatcaacaagatcagaagaagacttgtgaaagacagcaacaccaagaaggccggcaagacaggccccatgaaaaccctgctggttagagtgatgacacccgatctgagagagcggctggaaaacctgagaaagaagcctgaaaatatcccccagcccatcagcaatacatctagagccaacctgaataagctgctgaccgattacaccgaaatgaagaaggcgatcctgcatgtgtactgggaagagttccagaaggaccctgtgggcctgatgagccgggtggcccagcctgccagcaagaagatcgatcagaacaagctgaaacctgagatggacgagaagggcaacctgaccaccgccggctttgcctgctctcagtgtggccagcccctgttcgtgtacaagctggagcaggtgtctgagaagggcaaggcttacaccaactacttcggacggtgcaatgtggccgagcacgaaaagctgatcctgctggcccagctgaagcccgagaaggatagcgacgaagccgtgacatatagcctgggaaagtttgggcagagggccctggatttctacagcattcatgtgaccaaggagtccacccaccccgtgaagcccctggcccagatcgccggaaacagatacgcctccggacctgtgggaaaggccctgagcgacgcatgtatgggcacaatcgcctccttcctgtctaagtaccaggacatcatcatcgaacaccagaaggtggtgaagggcaaccagaagagactggagagcctgcgggagctggccggcaaggaaaacctggaataccctagcgtgaccctgccacctcagcctcacaccaaggagggcgttgatgcctacaacgaagtgatcgcccgggtgcgaatgtgggtgaacctgaacctgtggcagaagctgaagctaagcagagatgatgccaagcctctgctgagactgaagggattcccttcctttcctctggtcgagagacaggccaacgaagtggactggtgggacatggtgtgtaacgtgaagaagctgatcaacgagaaaaaggaggatggcaaggtgttttggcagaatctggctggctacaagagacaggaagccctgagaccatacctgagcagcgaggaagatcggaagaagggaaagaaattcgctcggtaccagctgggcgacctgctgctgcacctggaaaagaagcacggcgaggactggggaaaggtgtacgacgaggcctgggagcggattgacaagaaagtggaaggcctgagcaagcacatcaagctggaagaggaacggagaagcgaggacgcccagagcaaggccgccctgaccgactggctgcgggctaaggccagcttcgtgatcgagggcctgaaggaggccgacaaggacgagttctgcagatgcgagctgaagctgcagaagtggtacggggacctgcggggaaagcccttcgccatcgaagccgagaacagcatcctggacatcagcggcttcagcaagcagtacaactgtgccttcatctggcagaaggacggcgtgaagaagctgaacctgtacctgatcatcaactacttcaagggcggcaagctgcggttcaagaagatcaaacctgaagccttcgaagccaacagattctacaccgtgatcaacaaaaagagcggcgagatcgtgcccatggaggtgaacttcaacttcgacgaccccaacctgatcatcctgcctctggcctttggcaagagacagggcagagaattcatctggaacgacctgctgtccctggaaaccggcagcctgaagctggccaacggaagagtgatcgagaagacactgtacaacagaagaacccggcaggatgagcctgccctgttcgtggccctgaccttcgagcggcgggaggtcctggactcctccaatatcaaaccaatgaacctgatcggcgtggcaagaggcgaaaacatccccgccgtgatcgccctgaccgaccccgagggctgcccactgagccggtttaaggatagcctgggaaacccaacccacatcctgagaatcggcgagagctataaggagaagcagcggaccatccaggccaagaaggaggtggagcagcggagagccggcggctacagccggaagtacgccagcaaagccaagaatctggcagacgatatggtgagaaacaccgctagagatctgctgtactacgccgtgacccaggatgccatgctgatcttcgccaacctgagccggggcttcggccggcagggcaagcggaccttcatggccgagagacagtacacacggatggaggactggctgaccgccaagctggcctacgagggcctgagcaagacctacctgtccaagacactggcccagtacacctccaagacatgcagcaactgtgggtttaccatcaccagcgccgactacgacagggtgctggagaagctgaagaagacagcaacaggctggatgaccacaattaacggcaaggagctgaaggtggagggccagattacctactacaacagatacaagagacagaacgtagtcaaggacctgtccgtcgagctggatagactgagcgaagaatctgtgaacaacgacatctcctcctggacaaagggcagaagcggagaagctctgagcctcctgaagaaaagattctcccatagacccgtgcaggagaagttcgtgtgcctgaactgcggcttcgagacacacgcagccgagcaagccgccctgaacatcgccagatcctggctgttcctgcggagccaggagtacaagaaataccagacaaacaagacaaccggcaacaccgataagagagccttcgtcgagacctggcagtccttttaccggaagaagcttaaggaggtgtggaaacctgccgtgcggtctggcggatctggcggaggctccaccagccccaagaaaaagagaaaagtctaagctgccttctgcggggcttgccttctggccatgcccttcttctctcccttgcacctgtacctcttggtctttgaataaagcctgagtaggaaggctagcaaaaaaaaaaaaaaaaaaaaaaaaaaaaaaaaaaaaaaaaaaaaaaaaaaaaaaaaaaaaaaaaaaaaaaaaaaaaaaaagcccagccggctccccaacctctaccgaggagggcacctctgagtccgccacccccgagagcggccctggcacctccaccgagcccagcgagggcagcgcacccggcagccctgccggcagccccacctccacagaggagggaaccagcaccgagcccagcgaaggcagcgccccaggcaccagcaccgagcctagtgagcaggagattaaacggatcaacaagatcagaagaagacttgtgaaagacagcaacaccaagaaggccggcaagacaggccccatgaaaaccctgctggttagagtgatgacacccgatctgagagagcggctggaaaacctgagaaagaagcctgaaaatatcccccagcccatcagcaatacatctagagccaacctgaataagctgctgaccgattacaccgaaatgaagaaggcgatcctgcatgtgtactgggaagagttccagaaggaccctgtgggcctgatgagccgggtggcccagcctgccagcaagaagatcgatcagaacaagctgaaacctgagatggacgagaagggcaacctgaccaccgccggctttgcctgctctcagtgtggccagcccctgttcgtgtacaagctggagcaggtgtctgagaagggcaaggcttacaccaactacttcggacggtgcaatgtggccgagcacgaaaagctgatcctgctggcccagctgaagcccgagaaggatagcgacgaagccgtgacatatagcctgggaaagtttgggcagagggccctggatttctacagcattcatgtgaccaaggagtccacccaccccgtgaagcccctggcccagatcgccggaaacagatacgcctccggacctgtgggaaaggccctgagcgacgcatgtatgggcacaatcgcctccttcctgtctaagtaccaggacatcatcatcgaacaccagaaggtggtgaagggcaaccagaagagactggagagcctgcgggagctggccggcaaggaaaacctggaataccctagcgtgaccctgccacctcagcctcacaccaaggagggcgttgatgcctacaacgaagtgatcgcccgggtgcgaatgtgggtgaacctgaacctgtggcagaagctgaagctaagcagagatgatgccaagcctctgctgagactgaagggattcccttcctttcctctggtcgagagacaggccaacgaagtggactggtgggacatggtgtgtaacgtgaagaagctgatcaacgagaaaaaggaggatggcaaggtgttttggcagaatctggctggctacaagagacaggaagccctgagaccatacctgagcagcgaggaagatcggaagaagggaaagaaattcgctcggtaccagctgggcgacctgctgctgcacctggaaaagaagcacggcgaggactggggaaaggtgtacgacgaggcctgggagcggattgacaagaaagtggaaggcctgagcaagcacatcaagctggaagaggaacggagaagcgaggacgcccagagcaaggccgccctgaccgactggctgcgggctaaggccagcttcgtgatcgagggcctgaaggaggccgacaaggacgagttctgcagatgcgagctgaagctgcagaagtggtacggggacctgcggggaaagcccttcgccatcgaagccgagaacagcatcctggacatcagcggcttcagcaagcagtacaactgtgccttcatctggcagaaggacggcgtgaagaagctgaacctgtacctgatcatcaactacttcaagggcggcaagctgcggttcaagaagatcaaacctgaagccttcgaagccaacagattctacaccgtgatcaacaaaaagagcggcgagatcgtgcccatggaggtgaacttcaacttcgacgaccccaacctgatcatcctgcctctggcctttggcaagagacagggcagagaattcatctggaacgacctgctgtccctggaaaccggcagcctgaagctggccaacggaagagtgatcgagaagacactgtacaacagaagaacccggcaggatgagcctgccctgttcgtggccctgaccttcgagcggcgggaggtcctggactcctccaatatcaaaccaatgaacctgatcggcgtggcaagaggcgaaaacatccccgccgtgatcgccctgaccgaccccgagggctgcccactgagccggtttaaggatagcctgggaaacccaacccacatcctgagaatcggcgagagctataaggagaagcagcggaccatccaggccaagaaggaggtggagcagcggagagccggcggctacagccggaagtacgccagcaaagccaagaatctggcagacgatatggtgagaaacaccgctagagatctgctgtactacgccgtgacccaggatgccatgctgatcttcgccaacctgagccggggcttcggccggcagggcaagcggaccttcatggccgagagacagtacacacggatggaggactggctgaccgccaagctggcctacgagggcctgagcaagacctacctgtccaagacactggcccagtacacctccaagacatgcagcaactgtgggtttaccatcaccagcgccgactacgacagggtgctggagaagctgaagaagacagcaacaggctggatgaccacaattaacggcaaggagctgaaggtggagggccagattacctactacaacagatacaagagacagaacgtagtcaaggacctgtccgtcgagctggatagactgagcgaagaatctgtgaacaacgacatctcctcctggacaaagggcagaagcggagaagctctgagcctcctgaagaaaagattctcccatagacccgtgcaggagaagttcgtgtgcctgaactgcggcttcgagacacacgcagccgagcaagccgccctgaacatcgccagatcctggctgttcctgcggagccaggagtacaagaaataccagacaaacaagacaaccggcaacaccgataagagagccttcgtcgagacctggcagtccttttaccggaagaagcttaaggaggtgtggaaacctgccgtgcggtctggcggatctggcggaggctccaccagccccaagaaaaagagaaaagtctaagctgccttctgcggggcttgccttctggccatgcccttcttctctcccttgcacctgtacctcttggtctttgaataaagcctgagtaggaaggctagcaaaaaaaaaaaaaaaaaaaaaaaaaaaaaaaaaaaaaaaaaaaaaaaaaaaaaaaaaaaaaaaaaaaaaaaaaaaaaaaa

SEQ ID NO: 9384 - RNA, 8787 nt, synthetic construct
  source 1..8787: mol_type = other RNA
aggaaataagagagaaaagaagagtaagaagaaatataagagccaccatggcccctaagaagaagcgtaaagtgagccggatgaaccacgaccaggagttcgacccccctaaggtgtaccctcccgtccccgccgagaagagaaagcccatccgggtcctgagcctgttcgatggcatcgccaccggtctgctggtgctgaaggacctgggcatccaggtggataggtacattgcctccgaggtgtgcgaggactccatcaccgtgggaatggtgcgtcatcagggcaagatcatgtacgtgggcgacgtgcggagcgtgacacagaagcatatccaggagtggggccctttcgacctggtgatcggcggcagcccttgcaatgacctgagcatcgtgaacccagcccggaagggcctgtacgagggaaccggcagactgttcttcgagttttacagactgctgcacgacgcccggcctaaggaaggcgacgaccggcccttcttttggctgttcgagaatgtggtggccatgggagtcagcgacaagcgggatattagccggttcctggagagcaaccccgtgatgatcgatgccaaggaagtgagcgccgcccaccgggccagatacttctggggcaatctgcctggcatgaacagacccctggccagcaccgtgaacgacaagctggagctgcaggagtgcctggagcacggccggatcgccaagttcagcaaggtgagaaccatcaccacccgaagcaacagcatcaaacaaggcaaggaccagcactttcctgtgttcatgaacgagaaggaggacatcctgtggtgtaccgagatggagagagtgttcgggttcccagtccactacacagatgtcagcaacatgtctagactggccagacagagactgctgggaagaagctggtccgtccctgtgatcagacacctgttcgcccctctgaaggagtacttcgcctgcgtgagcagcggcaacagcaacgccaacagccggggccccagcttctctagcggcctggtgccactgtccctgagagggagccacatgggccccatggagatctacaaaaccgtgagcgcctggaagcggcagcctgtgcgcgtgctgagcctgtttcggaatatcgataaagtcctgaaaagcctgggattcctggagagcggctctggctccggcggtggcaccctgaagtacgtggaggatgtgacaaacgtggtcagacgggatgtggagaagtggggccccttcgatctggtgtacggcagcacccaacccctgggcagctcttgtgaccggtgccctggctggtacatgtttcagttccaccggatcctgcagtacgccctgccgagacaggagtcccagcggccattcttttggattttcatggacaacttgctgctgaccgaggatgaccaggaaactaccactcggttcctgcagaccgaagccgtgaccctgcaggacgtgagaggccgggactaccagaacgccatgcgggtgtggtccaacatccctggactgaaaagcaagcacgcacctctgacccctaaagaagaggagtacctgcaggcccaggtgcggagcagaagcaagctggacgcccctaaggtggatctgctggtgaagaattgcctcctgcccctgagagagtacttcaagtatttcagccagaatagtctgcccctgggaggcagcggcggcggcgagccctgggccatcaccttcgccgacgtggccgtgtacttcagccccgaggagtggggctgcctgcagcccacccagagggccctgtacagggacgtgatgagggacacctacgtgctgctgagcgccctgggcggcggcggcggcgccaagcccgccctgatcagctgggtggagagggagagcgagctgtgggacagcgacgcccaggaccccgaggtgcccaagtggcccaccgaggccggcggcccaagcagcggcgcccctcctcccagcggcggcaggcggcccaagcagcggcgcccctcctcccagcggcggcagcccagccggctccccaacctctaccgaggagggcacctctgagtccgccacccccgagagcggccctggcacctccaccgagcccagcgagggcagcgcacccggcagccctgccggcagccccacctccacagaggagggaaccagcaccgagcccagcgaaggcagcgccccaggcaccagcaccgagcctagtgagcaggagattaaacggatcaacaagatcagaagaagacttgtgaaagacagcaacaccaagaaggccggcaagacaggccccatgaaaaccctgctggttagagtgatgacacccgatctgagagagcggctggaaaacctgagaaagaagcctgaaaatatcccccagcccatcagcaatacatctagagccaacctgaataagctgctgaccgattacaccgaaatgaagaaggcgatcctgcatgtgtactgggaagagttccagaaggaccctgtgggcctgatgagccgggtggcccagcctgccagcaagaagatcgatcagaacaagctgaaacctgagatggacgagaagggcaacctgaccaccgccggctttgcctgctctcagtgtggccagcccctgttcgtgtacaagctggagcaggtgtctgagaagggcaaggcttacaccaactacttcggacggtgcaatgtggccgagcacgaaaagctgatcctgctggcccagctgaagcccgagaaggatagcgacgaagccgtgacatatagcctgggaaagtttgggcagagggccctggatttctacagcattcatgtgaccaaggagtccacccaccccgtgaagcccctggcccagatcgccggaaacagatacgcctccggacctgtgggaaaggccctgagcgacgcatgtatgggcacaatcgcctccttcctgtctaagtaccaggacatcatcatcgaacaccagaaggtggtgaagggcaaccagaagagactggagagcctgcgggagctggccggcaaggaaaacctggaataccctagcgtgaccctgccacctcagcctcacaccaaggagggcgttgatgcctacaacgaagtgatcgcccgggtgcgaatgtgggtgaacctgaacctgtggcagaagctgaagctaagcagagatgatgccaagcctctgctgagactgaagggattcccttcctttcctctggtcgagagacaggccaacgaagtggactggtgggacatggtgtgtaacgtgaagaagctgatcaacgagaaaaaggaggatggcaaggtgttttggcagaatctggctggctacaagagacaggaagccctgagaccatacctgagcagcgaggaagatcggaagaagggaaagaaattcgctcggtaccagctgggcgacctgctgctgcacctggaaaagaagcacggcgaggactggggaaaggtgtacgacgaggcctgggagcggattgacaagaaagtggaaggcctgagcaagcacatcaagctggaagaggaacggagaagcgaggacgcccagagcaaggccgccctgaccgactggctgcgggctaaggccagcttcgtgatcgagggcctgaaggaggccgacaaggacgagttctgcagatgcgagctgaagctgcagaagtggtacggggacctgcggggaaagcccttcgccatcgaagccgagaacagcatcctggacatcagcggcttcagcaagcagtacaactgtgccttcatctggcagaaggacggcgtgaagaagctgaacctgtacctgatcatcaactacttcaagggcggcaagctgcggttcaagaagatcaaacctgaagccttcgaagccaacagattctacaccgtgatcaacaaaaagagcggcgagatcgtgcccatggaggtgaacttcaacttcgacgaccccaacctgatcatcctgcctctggcctttggcaagagacagggcagagaattcatctggaacgacctgctgtccctggaaaccggcagcctgaagctggccaacggaagagtgatcgagaagacactgtacaacagaagaacccggcaggatgagcctgccctgttcgtggccctgaccttcgagcggcgggaggtcctggactcctccaatatcaaaccaatgaacctgatcggcgtggcaagaggcgaaaacatccccgccgtgatcgccctgaccgaccccgagggctgcccactgagccggtttaaggatagcctgggaaacccaacccacatcctgagaatcggcgagagctataaggagaagcagcggaccatccaggccaagaaggaggtggagcagcggagagccggcggctacagccggaagtacgccagcaaagccaagaatctggcagacgatatggtgagaaacaccgctagagatctgctgtactacgccgtgacccaggatgccatgctgatcttcgccaacctgagccggggcttcggccggcagggcaagcggaccttcatggccgagagacagtacacacggatggaggactggctgaccgccaagctggcctacgagggcctgagcaagacctacctgtccaagacactggcccagtacacctccaagacatgcagcaactgtgggtttaccatcaccagcgccgactacgacagggtgctggagaagctgaagaagacagcaacaggctggatgaccacaattaacggcaaggagctgaaggtggagggccagattacctactacaacagatacaagagacagaacgtagtcaaggacctgtccgtcgagctggatagactgagcgaagaatctgtgaacaacgacatctcctcctggacaaagggcagaagcggagaagctctgagcctcctgaagaaaagattctcccatagacccgtgcaggagaagttcgtgtgcctgaactgcggcttcgagacacacgcagccgagcaagccgccctgaacatcgccagatcctggctgttcctgcggagccaggagtacaagaaataccagacaaacaagacaaccggcaacaccgataagagagccttcgtcgagacctggcagtccttttaccggaagaagcttaaggaggtgtggaaacctgccgtgcggtctggcggatctggcggaggctccaccagccccaagaaaaagagaaaagtctaagctgccttctgcggggcttgccttctggccatgcccttcttctctcccttgcacctgtacctcttggtctttgaataaagcctgagtaggaaggctagcaaaaaaaaaaaaaaaaaaaaaaaaaaaaaaaaaaaaaaaaaaaaaaaaaaaaaaaaaaaaaaaaaaaaaaaaaaaaaaaagcccagccggctccccaacctctaccgaggagggcacctctgagtccgccacccccgagagcggccctggcacctccaccgagcccagcgagggcagcgcacccggcagccctgccggcagccccacctccacagaggagggaaccagcaccgagcccagcgaaggcagcgccccaggcaccagcaccgagcctagtgagcaggagattaaacggatcaacaagatcagaagaagacttgtgaaagacagcaacaccaagaaggccggcaagacaggccccatgaaaaccctgctggttagagtgatgacacccgatctgagagagcggctggaaaacctgagaaagaagcctgaaaatatcccccagcccatcagcaatacatctagagccaacctgaataagctgctgaccgattacaccgaaatgaagaaggcgatcctgcatgtgtactgggaagagttccagaaggaccctgtgggcctgatgagccgggtggcccagcctgccagcaagaagatcgatcagaacaagctgaaacctgagatggacgagaagggcaacctgaccaccgccggctttgcctgctctcagtgtggccagcccctgttcgtgtacaagctggagcaggtgtctgagaagggcaaggcttacaccaactacttcggacggtgcaatgtggccgagcacgaaaagctgatcctgctggcccagctgaagcccgagaaggatagcgacgaagccgtgacatatagcctgggaaagtttgggcagagggccctggatttctacagcattcatgtgaccaaggagtccacccaccccgtgaagcccctggcccagatcgccggaaacagatacgcctccggacctgtgggaaaggccctgagcgacgcatgtatgggcacaatcgcctccttcctgtctaagtaccaggacatcatcatcgaacaccagaaggtggtgaagggcaaccagaagagactggagagcctgcgggagctggccggcaaggaaaacctggaataccctagcgtgaccctgccacctcagcctcacaccaaggagggcgttgatgcctacaacgaagtgatcgcccgggtgcgaatgtgggtgaacctgaacctgtggcagaagctgaagctaagcagagatgatgccaagcctctgctgagactgaagggattcccttcctttcctctggtcgagagacaggccaacgaagtggactggtgggacatggtgtgtaacgtgaagaagctgatcaacgagaaaaaggaggatggcaaggtgttttggcagaatctggctggctacaagagacaggaagccctgagaccatacctgagcagcgaggaagatcggaagaagggaaagaaattcgctcggtaccagctgggcgacctgctgctgcacctggaaaagaagcacggcgaggactggggaaaggtgtacgacgaggcctgggagcggattgacaagaaagtggaaggcctgagcaagcacatcaagctggaagaggaacggagaagcgaggacgcccagagcaaggccgccctgaccgactggctgcgggctaaggccagcttcgtgatcgagggcctgaaggaggccgacaaggacgagttctgcagatgcgagctgaagctgcagaagtggtacggggacctgcggggaaagcccttcgccatcgaagccgagaacagcatcctggacatcagcggcttcagcaagcagtacaactgtgccttcatctggcagaaggacggcgtgaagaagctgaacctgtacctgatcatcaactacttcaagggcggcaagctgcggttcaagaagatcaaacctgaagccttcgaagccaacagattctacaccgtgatcaacaaaaagagcggcgagatcgtgcccatggaggtgaacttcaacttcgacgaccccaacctgatcatcctgcctctggcctttggcaagagacagggcagagaattcatctggaacgacctgctgtccctggaaaccggcagcctgaagctggccaacggaagagtgatcgagaagacactgtacaacagaagaacccggcaggatgagcctgccctgttcgtggccctgaccttcgagcggcgggaggtcctggactcctccaatatcaaaccaatgaacctgatcggcgtggcaagaggcgaaaacatccccgccgtgatcgccctgaccgaccccgagggctgcccactgagccggtttaaggatagcctgggaaacccaacccacatcctgagaatcggcgagagctataaggagaagcagcggaccatccaggccaagaaggaggtggagcagcggagagccggcggctacagccggaagtacgccagcaaagccaagaatctggcagacgatatggtgagaaacaccgctagagatctgctgtactacgccgtgacccaggatgccatgctgatcttcgccaacctgagccggggcttcggccggcagggcaagcggaccttcatggccgagagacagtacacacggatggaggactggctgaccgccaagctggcctacgagggcctgagcaagacctacctgtccaagacactggcccagtacacctccaagacatgcagcaactgtgggtttaccatcaccagcgccgactacgacagggtgctggagaagctgaagaagacagcaacaggctggatgaccacaattaacggcaaggagctgaaggtggagggccagattacctactacaacagatacaagagacagaacgtagtcaaggacctgtccgtcgagctggatagactgagcgaagaatctgtgaacaacgacatctcctcctggacaaagggcagaagcggagaagctctgagcctcctgaagaaaagattctcccatagacccgtgcaggagaagttcgtgtgcctgaactgcggcttcgagacacacgcagccgagcaagccgccctgaacatcgccagatcctggctgttcctgcggagccaggagtacaagaaataccagacaaacaagacaaccggcaacaccgataagagagccttcgtcgagacctggcagtccttttaccggaagaagcttaaggaggtgtggaaacctgccgtgcggtctggcggatctggcggaggctccaccagccccaagaaaaagagaaaagtctaagctgccttctgcggggcttgccttctggccatgcccttcttctctcccttgcacctgtacctcttggtctttgaataaagcctgagtaggaaggctagcaaaaaaaaaaaaaaaaaaaaaaaaaaaaaaaaaaaaaaaaaaaaaaaaaaaaaaaaaaaaaaaaaaaaaaaaaaaaaaaa

SEQ ID NO: 9385 - RNA, 8787 nt, synthetic construct
  source 1..8787: mol_type = other RNA
aggaaataagagagaaaagaagagtaagaagaaatataagagccaccatggcccctaagaagaagcgtaaagtgagccggatgaaccacgaccaggagttcgacccccctaaggtgtaccctcccgtccccgccgagaagagaaagcccatccgggtcctgagcctgttcgatggcatcgccaccggtctgctggtgctgaaggacctgggcatccaggtggataggtacattgcctccgaggtgtgcgaggactccatcaccgtgggaatggtgcgtcatcagggcaagatcatgtacgtgggcgacgtgcggagcgtgacacagaagcatatccaggagtggggccctttcgacctggtgatcggcggcagcccttgcaatgacctgagcatcgtgaacccagcccggaagggcctgtacgagggaaccggcagactgttcttcgagttttacagactgctgcacgacgcccggcctaaggaaggcgacgaccggcccttcttttggctgttcgagaatgtggtggccatgggagtcagcgacaagcgggatattagccggttcctggagagcaaccccgtgatgatcgatgccaaggaagtgagcgccgcccaccgggccagatacttctggggcaatctgcctggcatgaacagacccctggccagcaccgtgaacgacaagctggagctgcaggagtgcctggagcacggccggatcgccaagttcagcaaggtgagaaccatcaccacccgaagcaacagcatcaaacaaggcaaggaccagcactttcctgtgttcatgaacgagaaggaggacatcctgtggtgtaccgagatggagagagtgttcgggttcccagtccactacacagatgtcagcaacatgtctagactggccagacagagactgctgggaagaagctggtccgtccctgtgatcagacacctgttcgcccctctgaaggagtacttcgcctgcgtgagcagcggcaacagcaacgccaacagccggggccccagcttctctagcggcctggtgccactgtccctgagagggagccacatgggccccatggagatctacaaaaccgtgagcgcctggaagcggcagcctgtgcgcgtgctgagcctgtttcggaatatcgataaagtcctgaaaagcctgggattcctggagagcggctctggctccggcggtggcaccctgaagtacgtggaggatgtgacaaacgtggtcagacgggatgtggagaagtggggccccttcgatctggtgtacggcagcacccaacccctgggcagctcttgtgaccggtgccctggctggtacatgtttcagttccaccggatcctgcagtacgccctgccgagacaggagtcccagcggccattcttttggattttcatggacaacttgctgctgaccgaggatgaccaggaaactaccactcggttcctgcagaccgaagccgtgaccctgcaggacgtgagaggccgggactaccagaacgccatgcgggtgtggtccaacatccctggactgaaaagcaagcacgcacctctgacccctaaagaagaggagtacctgcaggcccaggtgcggagcagaagcaagctggacgcccctaaggtggatctgctggtgaagaattgcctcctgcccctgagagagtacttcaagtatttcagccagaatagtctgcccctgggaggcagcggcggcggctgccaggagcccgtgagcttcgcccaggtggccgtgtacttcagcagggaggagtgggccctgctggaccccgcccagagggccctgtacagggacgtgatgctggagacctaccagtgcgtggccagcctggcccccctgcccgcccacaagcccatggtgatcagcctgctggagggcggcgaggacccctggatccccgacgtgaggagccccgaggccgtgcccggcgacctgagccccggcggcccaagcagcggcgcccctcctcccagcggcggcaggcggcccaagcagcggcgcccctcctcccagcggcggcagcccagccggctccccaacctctaccgaggagggcacctctgagtccgccacccccgagagcggccctggcacctccaccgagcccagcgagggcagcgcacccggcagccctgccggcagccccacctccacagaggagggaaccagcaccgagcccagcgaaggcagcgccccaggcaccagcaccgagcctagtgagcaggagattaaacggatcaacaagatcagaagaagacttgtgaaagacagcaacaccaagaaggccggcaagacaggccccatgaaaaccctgctggttagagtgatgacacccgatctgagagagcggctggaaaacctgagaaagaagcctgaaaatatcccccagcccatcagcaatacatctagagccaacctgaataagctgctgaccgattacaccgaaatgaagaaggcgatcctgcatgtgtactgggaagagttccagaaggaccctgtgggcctgatgagccgggtggcccagcctgccagcaagaagatcgatcagaacaagctgaaacctgagatggacgagaagggcaacctgaccaccgccggctttgcctgctctcagtgtggccagcccctgttcgtgtacaagctggagcaggtgtctgagaagggcaaggcttacaccaactacttcggacggtgcaatgtggccgagcacgaaaagctgatcctgctggcccagctgaagcccgagaaggatagcgacgaagccgtgacatatagcctgggaaagtttgggcagagggccctggatttctacagcattcatgtgaccaaggagtccacccaccccgtgaagcccctggcccagatcgccggaaacagatacgcctccggacctgtgggaaaggccctgagcgacgcatgtatgggcacaatcgcctccttcctgtctaagtaccaggacatcatcatcgaacaccagaaggtggtgaagggcaaccagaagagactggagagcctgcgggagctggccggcaaggaaaacctggaataccctagcgtgaccctgccacctcagcctcacaccaaggagggcgttgatgcctacaacgaagtgatcgcccgggtgcgaatgtgggtgaacctgaacctgtggcagaagctgaagctaagcagagatgatgccaagcctctgctgagactgaagggattcccttcctttcctctggtcgagagacaggccaacgaagtggactggtgggacatggtgtgtaacgtgaagaagctgatcaacgagaaaaaggaggatggcaaggtgttttggcagaatctggctggctacaagagacaggaagccctgagaccatacctgagcagcgaggaagatcggaagaagggaaagaaattcgctcggtaccagctgggcgacctgctgctgcacctggaaaagaagcacggcgaggactggggaaaggtgtacgacgaggcctgggagcggattgacaagaaagtggaaggcctgagcaagcacatcaagctggaagaggaacggagaagcgaggacgcccagagcaaggccgccctgaccgactggctgcgggctaaggccagcttcgtgatcgagggcctgaaggaggccgacaaggacgagttctgcagatgcgagctgaagctgcagaagtggtacggggacctgcggggaaagcccttcgccatcgaagccgagaacagcatcctggacatcagcggcttcagcaagcagtacaactgtgccttcatctggcagaaggacggcgtgaagaagctgaacctgtacctgatcatcaactacttcaagggcggcaagctgcggttcaagaagatcaaacctgaagccttcgaagccaacagattctacaccgtgatcaacaaaaagagcggcgagatcgtgcccatggaggtgaacttcaacttcgacgaccccaacctgatcatcctgcctctggcctttggcaagagacagggcagagaattcatctggaacgacctgctgtccctggaaaccggcagcctgaagctggccaacggaagagtgatcgagaagacactgtacaacagaagaacccggcaggatgagcctgccctgttcgtggccctgaccttcgagcggcgggaggtcctggactcctccaatatcaaaccaatgaacctgatcggcgtggcaagaggcgaaaacatccccgccgtgatcgccctgaccgaccccgagggctgcccactgagccggtttaaggatagcctgggaaacccaacccacatcctgagaatcggcgagagctataaggagaagcagcggaccatccaggccaagaaggaggtggagcagcggagagccggcggctacagccggaagtacgccagcaaagccaagaatctggcagacgatatggtgagaaacaccgctagagatctgctgtactacgccgtgacccaggatgccatgctgatcttcgccaacctgagccggggcttcggccggcagggcaagcggaccttcatggccgagagacagtacacacggatggaggactggctgaccgccaagctggcctacgagggcctgagcaagacctacctgtccaagacactggcccagtacacctccaagacatgcagcaactgtgggtttaccatcaccagcgccgactacgacagggtgctggagaagctgaagaagacagcaacaggctggatgaccacaattaacggcaaggagctgaaggtggagggccagattacctactacaacagatacaagagacagaacgtagtcaaggacctgtccgtcgagctggatagactgagcgaagaatctgtgaacaacgacatctcctcctggacaaagggcagaagcggagaagctctgagcctcctgaagaaaagattctcccatagacccgtgcaggagaagttcgtgtgcctgaactgcggcttcgagacacacgcagccgagcaagccgccctgaacatcgccagatcctggctgttcctgcggagccaggagtacaagaaataccagacaaacaagacaaccggcaacaccgataagagagccttcgtcgagacctggcagtccttttaccggaagaagcttaaggaggtgtggaaacctgccgtgcggtctggcggatctggcggaggctccaccagccccaagaaaaagagaaaagtctaagctgccttctgcggggcttgccttctggccatgcccttcttctctcccttgcacctgtacctcttggtctttgaataaagcctgagtaggaaggctagcaaaaaaaaaaaaaaaaaaaaaaaaaaaaaaaaaaaaaaaaaaaaaaaaaaaaaaaaaaaaaaaaaaaaaaaaaaaaaaaagcccagccggctccccaacctctaccgaggagggcacctctgagtccgccacccccgagagcggccctggcacctccaccgagcccagcgagggcagcgcacccggcagccctgccggcagccccacctccacagaggagggaaccagcaccgagcccagcgaaggcagcgccccaggcaccagcaccgagcctagtgagcaggagattaaacggatcaacaagatcagaagaagacttgtgaaagacagcaacaccaagaaggccggcaagacaggccccatgaaaaccctgctggttagagtgatgacacccgatctgagagagcggctggaaaacctgagaaagaagcctgaaaatatcccccagcccatcagcaatacatctagagccaacctgaataagctgctgaccgattacaccgaaatgaagaaggcgatcctgcatgtgtactgggaagagttccagaaggaccctgtgggcctgatgagccgggtggcccagcctgccagcaagaagatcgatcagaacaagctgaaacctgagatggacgagaagggcaacctgaccaccgccggctttgcctgctctcagtgtggccagcccctgttcgtgtacaagctggagcaggtgtctgagaagggcaaggcttacaccaactacttcggacggtgcaatgtggccgagcacgaaaagctgatcctgctggcccagctgaagcccgagaaggatagcgacgaagccgtgacatatagcctgggaaagtttgggcagagggccctggatttctacagcattcatgtgaccaaggagtccacccaccccgtgaagcccctggcccagatcgccggaaacagatacgcctccggacctgtgggaaaggccctgagcgacgcatgtatgggcacaatcgcctccttcctgtctaagtaccaggacatcatcatcgaacaccagaaggtggtgaagggcaaccagaagagactggagagcctgcgggagctggccggcaaggaaaacctggaataccctagcgtgaccctgccacctcagcctcacaccaaggagggcgttgatgcctacaacgaagtgatcgcccgggtgcgaatgtgggtgaacctgaacctgtggcagaagctgaagctaagcagagatgatgccaagcctctgctgagactgaagggattcccttcctttcctctggtcgagagacaggccaacgaagtggactggtgggacatggtgtgtaacgtgaagaagctgatcaacgagaaaaaggaggatggcaaggtgttttggcagaatctggctggctacaagagacaggaagccctgagaccatacctgagcagcgaggaagatcggaagaagggaaagaaattcgctcggtaccagctgggcgacctgctgctgcacctggaaaagaagcacggcgaggactggggaaaggtgtacgacgaggcctgggagcggattgacaagaaagtggaaggcctgagcaagcacatcaagctggaagaggaacggagaagcgaggacgcccagagcaaggccgccctgaccgactggctgcgggctaaggccagcttcgtgatcgagggcctgaaggaggccgacaaggacgagttctgcagatgcgagctgaagctgcagaagtggtacggggacctgcggggaaagcccttcgccatcgaagccgagaacagcatcctggacatcagcggcttcagcaagcagtacaactgtgccttcatctggcagaaggacggcgtgaagaagctgaacctgtacctgatcatcaactacttcaagggcggcaagctgcggttcaagaagatcaaacctgaagccttcgaagccaacagattctacaccgtgatcaacaaaaagagcggcgagatcgtgcccatggaggtgaacttcaacttcgacgaccccaacctgatcatcctgcctctggcctttggcaagagacagggcagagaattcatctggaacgacctgctgtccctggaaaccggcagcctgaagctggccaacggaagagtgatcgagaagacactgtacaacagaagaacccggcaggatgagcctgccctgttcgtggccctgaccttcgagcggcgggaggtcctggactcctccaatatcaaaccaatgaacctgatcggcgtggcaagaggcgaaaacatccccgccgtgatcgccctgaccgaccccgagggctgcccactgagccggtttaaggatagcctgggaaacccaacccacatcctgagaatcggcgagagctataaggagaagcagcggaccatccaggccaagaaggaggtggagcagcggagagccggcggctacagccggaagtacgccagcaaagccaagaatctggcagacgatatggtgagaaacaccgctagagatctgctgtactacgccgtgacccaggatgccatgctgatcttcgccaacctgagccggggcttcggccggcagggcaagcggaccttcatggccgagagacagtacacacggatggaggactggctgaccgccaagctggcctacgagggcctgagcaagacctacctgtccaagacactggcccagtacacctccaagacatgcagcaactgtgggtttaccatcaccagcgccgactacgacagggtgctggagaagctgaagaagacagcaacaggctggatgaccacaattaacggcaaggagctgaaggtggagggccagattacctactacaacagatacaagagacagaacgtagtcaaggacctgtccgtcgagctggatagactgagcgaagaatctgtgaacaacgacatctcctcctggacaaagggcagaagcggagaagctctgagcctcctgaagaaaagattctcccatagacccgtgcaggagaagttcgtgtgcctgaactgcggcttcgagacacacgcagccgagcaagccgccctgaacatcgccagatcctggctgttcctgcggagccaggagtacaagaaataccagacaaacaagacaaccggcaacaccgataagagagccttcgtcgagacctggcagtccttttaccggaagaagcttaaggaggtgtggaaacctgccgtgcggtctggcggatctggcggaggctccaccagccccaagaaaaagagaaaagtctaagctgccttctgcggggcttgccttctggccatgcccttcttctctcccttgcacctgtacctcttggtctttgaataaagcctgagtaggaaggctagcaaaaaaaaaaaaaaaaaaaaaaaaaaaaaaaaaaaaaaaaaaaaaaaaaaaaaaaaaaaaaaaaaaaaaaaaaaaaaaaa

SEQ ID NO: 9386 - RNA, 8787 nt, synthetic construct
  source 1..8787: mol_type = other RNA
aggaaataagagagaaaagaagagtaagaagaaatataagagccaccatggcccctaagaagaagcgtaaagtgagccggatgaaccacgaccaggagttcgacccccctaaggtgtaccctcccgtccccgccgagaagagaaagcccatccgggtcctgagcctgttcgatggcatcgccaccggtctgctggtgctgaaggacctgggcatccaggtggataggtacattgcctccgaggtgtgcgaggactccatcaccgtgggaatggtgcgtcatcagggcaagatcatgtacgtgggcgacgtgcggagcgtgacacagaagcatatccaggagtggggccctttcgacctggtgatcggcggcagcccttgcaatgacctgagcatcgtgaacccagcccggaagggcctgtacgagggaaccggcagactgttcttcgagttttacagactgctgcacgacgcccggcctaaggaaggcgacgaccggcccttcttttggctgttcgagaatgtggtggccatgggagtcagcgacaagcgggatattagccggttcctggagagcaaccccgtgatgatcgatgccaaggaagtgagcgccgcccaccgggccagatacttctggggcaatctgcctggcatgaacagacccctggccagcaccgtgaacgacaagctggagctgcaggagtgcctggagcacggccggatcgccaagttcagcaaggtgagaaccatcaccacccgaagcaacagcatcaaacaaggcaaggaccagcactttcctgtgttcatgaacgagaaggaggacatcctgtggtgtaccgagatggagagagtgttcgggttcccagtccactacacagatgtcagcaacatgtctagactggccagacagagactgctgggaagaagctggtccgtccctgtgatcagacacctgttcgcccctctgaaggagtacttcgcctgcgtgagcagcggcaacagcaacgccaacagccggggccccagcttctctagcggcctggtgccactgtccctgagagggagccacatgggccccatggagatctacaaaaccgtgagcgcctggaagcggcagcctgtgcgcgtgctgagcctgtttcggaatatcgataaagtcctgaaaagcctgggattcctggagagcggctctggctccggcggtggcaccctgaagtacgtggaggatgtgacaaacgtggtcagacgggatgtggagaagtggggccccttcgatctggtgtacggcagcacccaacccctgggcagctcttgtgaccggtgccctggctggtacatgtttcagttccaccggatcctgcagtacgccctgccgagacaggagtcccagcggccattcttttggattttcatggacaacttgctgctgaccgaggatgaccaggaaactaccactcggttcctgcagaccgaagccgtgaccctgcaggacgtgagaggccgggactaccagaacgccatgcgggtgtggtccaacatccctggactgaaaagcaagcacgcacctctgacccctaaagaagaggagtacctgcaggcccaggtgcggagcagaagcaagctggacgcccctaaggtggatctgctggtgaagaattgcctcctgcccctgagagagtacttcaagtatttcagccagaatagtctgcccctgggaggcagcggcggcggcagccagagcctggtggagttcggcgacgtggccatcgacttcagccaggaggagtgggagtggctgaaccccgcccagaggaccctgtacaggaaggtgatgctggagaactacaggaacctggccagcctgggcctgtgcggcagcaagcccgccgtgatcagcagcctggagcagggcaaggagccctgggccgtgaagaggaaggtggccaggggctggagccccgacctgaagaccgtgggcggcccaagcagcggcgcccctcctcccagcggcggcaggcggcccaagcagcggcgcccctcctcccagcggcggcagcccagccggctccccaacctctaccgaggagggcacctctgagtccgccacccccgagagcggccctggcacctccaccgagcccagcgagggcagcgcacccggcagccctgccggcagccccacctccacagaggagggaaccagcaccgagcccagcgaaggcagcgccccaggcaccagcaccgagcctagtgagcaggagattaaacggatcaacaagatcagaagaagacttgtgaaagacagcaacaccaagaaggccggcaagacaggccccatgaaaaccctgctggttagagtgatgacacccgatctgagagagcggctggaaaacctgagaaagaagcctgaaaatatcccccagcccatcagcaatacatctagagccaacctgaataagctgctgaccgattacaccgaaatgaagaaggcgatcctgcatgtgtactgggaagagttccagaaggaccctgtgggcctgatgagccgggtggcccagcctgccagcaagaagatcgatcagaacaagctgaaacctgagatggacgagaagggcaacctgaccaccgccggctttgcctgctctcagtgtggccagcccctgttcgtgtacaagctggagcaggtgtctgagaagggcaaggcttacaccaactacttcggacggtgcaatgtggccgagcacgaaaagctgatcctgctggcccagctgaagcccgagaaggatagcgacgaagccgtgacatatagcctgggaaagtttgggcagagggccctggatttctacagcattcatgtgaccaaggagtccacccaccccgtgaagcccctggcccagatcgccggaaacagatacgcctccggacctgtgggaaaggccctgagcgacgcatgtatgggcacaatcgcctccttcctgtctaagtaccaggacatcatcatcgaacaccagaaggtggtgaagggcaaccagaagagactggagagcctgcgggagctggccggcaaggaaaacctggaataccctagcgtgaccctgccacctcagcctcacaccaaggagggcgttgatgcctacaacgaagtgatcgcccgggtgcgaatgtgggtgaacctgaacctgtggcagaagctgaagctaagcagagatgatgccaagcctctgctgagactgaagggattcccttcctttcctctggtcgagagacaggccaacgaagtggactggtgggacatggtgtgtaacgtgaagaagctgatcaacgagaaaaaggaggatggcaaggtgttttggcagaatctggctggctacaagagacaggaagccctgagaccatacctgagcagcgaggaagatcggaagaagggaaagaaattcgctcggtaccagctgggcgacctgctgctgcacctggaaaagaagcacggcgaggactggggaaaggtgtacgacgaggcctgggagcggattgacaagaaagtggaaggcctgagcaagcacatcaagctggaagaggaacggagaagcgaggacgcccagagcaaggccgccctgaccgactggctgcgggctaaggccagcttcgtgatcgagggcctgaaggaggccgacaaggacgagttctgcagatgcgagctgaagctgcagaagtggtacggggacctgcggggaaagcccttcgccatcgaagccgagaacagcatcctggacatcagcggcttcagcaagcagtacaactgtgccttcatctggcagaaggacggcgtgaagaagctgaacctgtacctgatcatcaactacttcaagggcggcaagctgcggttcaagaagatcaaacctgaagccttcgaagccaacagattctacaccgtgatcaacaaaaagagcggcgagatcgtgcccatggaggtgaacttcaacttcgacgaccccaacctgatcatcctgcctctggcctttggcaagagacagggcagagaattcatctggaacgacctgctgtccctggaaaccggcagcctgaagctggccaacggaagagtgatcgagaagacactgtacaacagaagaacccggcaggatgagcctgccctgttcgtggccctgaccttcgagcggcgggaggtcctggactcctccaatatcaaaccaatgaacctgatcggcgtggcaagaggcgaaaacatccccgccgtgatcgccctgaccgaccccgagggctgcccactgagccggtttaaggatagcctgggaaacccaacccacatcctgagaatcggcgagagctataaggagaagcagcggaccatccaggccaagaaggaggtggagcagcggagagccggcggctacagccggaagtacgccagcaaagccaagaatctggcagacgatatggtgagaaacaccgctagagatctgctgtactacgccgtgacccaggatgccatgctgatcttcgccaacctgagccggggcttcggccggcagggcaagcggaccttcatggccgagagacagtacacacggatggaggactggctgaccgccaagctggcctacgagggcctgagcaagacctacctgtccaagacactggcccagtacacctccaagacatgcagcaactgtgggtttaccatcaccagcgccgactacgacagggtgctggagaagctgaagaagacagcaacaggctggatgaccacaattaacggcaaggagctgaaggtggagggccagattacctactacaacagatacaagagacagaacgtagtcaaggacctgtccgtcgagctggatagactgagcgaagaatctgtgaacaacgacatctcctcctggacaaagggcagaagcggagaagctctgagcctcctgaagaaaagattctcccatagacccgtgcaggagaagttcgtgtgcctgaactgcggcttcgagacacacgcagccgagcaagccgccctgaacatcgccagatcctggctgttcctgcggagccaggagtacaagaaataccagacaaacaagacaaccggcaacaccgataagagagccttcgtcgagacctggcagtccttttaccggaagaagcttaaggaggtgtggaaacctgccgtgcggtctggcggatctggcggaggctccaccagccccaagaaaaagagaaaagtctaagctgccttctgcggggcttgccttctggccatgcccttcttctctcccttgcacctgtacctcttggtctttgaataaagcctgagtaggaaggctagcaaaaaaaaaaaaaaaaaaaaaaaaaaaaaaaaaaaaaaaaaaaaaaaaaaaaaaaaaaaaaaaaaaaaaaaaaaaaaaaagcccagccggctccccaacctctaccgaggagggcacctctgagtccgccacccccgagagcggccctggcacctccaccgagcccagcgagggcagcgcacccggcagccctgccggcagccccacctccacagaggagggaaccagcaccgagcccagcgaaggcagcgccccaggcaccagcaccgagcctagtgagcaggagattaaacggatcaacaagatcagaagaagacttgtgaaagacagcaacaccaagaaggccggcaagacaggccccatgaaaaccctgctggttagagtgatgacacccgatctgagagagcggctggaaaacctgagaaagaagcctgaaaatatcccccagcccatcagcaatacatctagagccaacctgaataagctgctgaccgattacaccgaaatgaagaaggcgatcctgcatgtgtactgggaagagttccagaaggaccctgtgggcctgatgagccgggtggcccagcctgccagcaagaagatcgatcagaacaagctgaaacctgagatggacgagaagggcaacctgaccaccgccggctttgcctgctctcagtgtggccagcccctgttcgtgtacaagctggagcaggtgtctgagaagggcaaggcttacaccaactacttcggacggtgcaatgtggccgagcacgaaaagctgatcctgctggcccagctgaagcccgagaaggatagcgacgaagccgtgacatatagcctgggaaagtttgggcagagggccctggatttctacagcattcatgtgaccaaggagtccacccaccccgtgaagcccctggcccagatcgccggaaacagatacgcctccggacctgtgggaaaggccctgagcgacgcatgtatgggcacaatcgcctccttcctgtctaagtaccaggacatcatcatcgaacaccagaaggtggtgaagggcaaccagaagagactggagagcctgcgggagctggccggcaaggaaaacctggaataccctagcgtgaccctgccacctcagcctcacaccaaggagggcgttgatgcctacaacgaagtgatcgcccgggtgcgaatgtgggtgaacctgaacctgtggcagaagctgaagctaagcagagatgatgccaagcctctgctgagactgaagggattcccttcctttcctctggtcgagagacaggccaacgaagtggactggtgggacatggtgtgtaacgtgaagaagctgatcaacgagaaaaaggaggatggcaaggtgttttggcagaatctggctggctacaagagacaggaagccctgagaccatacctgagcagcgaggaagatcggaagaagggaaagaaattcgctcggtaccagctgggcgacctgctgctgcacctggaaaagaagcacggcgaggactggggaaaggtgtacgacgaggcctgggagcggattgacaagaaagtggaaggcctgagcaagcacatcaagctggaagaggaacggagaagcgaggacgcccagagcaaggccgccctgaccgactggctgcgggctaaggccagcttcgtgatcgagggcctgaaggaggccgacaaggacgagttctgcagatgcgagctgaagctgcagaagtggtacggggacctgcggggaaagcccttcgccatcgaagccgagaacagcatcctggacatcagcggcttcagcaagcagtacaactgtgccttcatctggcagaaggacggcgtgaagaagctgaacctgtacctgatcatcaactacttcaagggcggcaagctgcggttcaagaagatcaaacctgaagccttcgaagccaacagattctacaccgtgatcaacaaaaagagcggcgagatcgtgcccatggaggtgaacttcaacttcgacgaccccaacctgatcatcctgcctctggcctttggcaagagacagggcagagaattcatctggaacgacctgctgtccctggaaaccggcagcctgaagctggccaacggaagagtgatcgagaagacactgtacaacagaagaacccggcaggatgagcctgccctgttcgtggccctgaccttcgagcggcgggaggtcctggactcctccaatatcaaaccaatgaacctgatcggcgtggcaagaggcgaaaacatccccgccgtgatcgccctgaccgaccccgagggctgcccactgagccggtttaaggatagcctgggaaacccaacccacatcctgagaatcggcgagagctataaggagaagcagcggaccatccaggccaagaaggaggtggagcagcggagagccggcggctacagccggaagtacgccagcaaagccaagaatctggcagacgatatggtgagaaacaccgctagagatctgctgtactacgccgtgacccaggatgccatgctgatcttcgccaacctgagccggggcttcggccggcagggcaagcggaccttcatggccgagagacagtacacacggatggaggactggctgaccgccaagctggcctacgagggcctgagcaagacctacctgtccaagacactggcccagtacacctccaagacatgcagcaactgtgggtttaccatcaccagcgccgactacgacagggtgctggagaagctgaagaagacagcaacaggctggatgaccacaattaacggcaaggagctgaaggtggagggccagattacctactacaacagatacaagagacagaacgtagtcaaggacctgtccgtcgagctggatagactgagcgaagaatctgtgaacaacgacatctcctcctggacaaagggcagaagcggagaagctctgagcctcctgaagaaaagattctcccatagacccgtgcaggagaagttcgtgtgcctgaactgcggcttcgagacacacgcagccgagcaagccgccctgaacatcgccagatcctggctgttcctgcggagccaggagtacaagaaataccagacaaacaagacaaccggcaacaccgataagagagccttcgtcgagacctggcagtccttttaccggaagaagcttaaggaggtgtggaaacctgccgtgcggtctggcggatctggcggaggctccaccagccccaagaaaaagagaaaagtctaagctgccttctgcggggcttgccttctggccatgcccttcttctctcccttgcacctgtacctcttggtctttgaataaagcctgagtaggaaggctagcaaaaaaaaaaaaaaaaaaaaaaaaaaaaaaaaaaaaaaaaaaaaaaaaaaaaaaaaaaaaaaaaaaaaaaaaaaaaaaaa

SEQ ID NO: 9387 - RNA, 8787 nt, synthetic construct
  source 1..8787: mol_type = other RNA
aggaaataagagagaaaagaagagtaagaagaaatataagagccaccatggcccctaagaagaagcgtaaagtgagccggatgaaccacgaccaggagttcgacccccctaaggtgtaccctcccgtccccgccgagaagagaaagcccatccgggtcctgagcctgttcgatggcatcgccaccggtctgctggtgctgaaggacctgggcatccaggtggataggtacattgcctccgaggtgtgcgaggactccatcaccgtgggaatggtgcgtcatcagggcaagatcatgtacgtgggcgacgtgcggagcgtgacacagaagcatatccaggagtggggccctttcgacctggtgatcggcggcagcccttgcaatgacctgagcatcgtgaacccagcccggaagggcctgtacgagggaaccggcagactgttcttcgagttttacagactgctgcacgacgcccggcctaaggaaggcgacgaccggcccttcttttggctgttcgagaatgtggtggccatgggagtcagcgacaagcgggatattagccggttcctggagagcaaccccgtgatgatcgatgccaaggaagtgagcgccgcccaccgggccagatacttctggggcaatctgcctggcatgaacagacccctggccagcaccgtgaacgacaagctggagctgcaggagtgcctggagcacggccggatcgccaagttcagcaaggtgagaaccatcaccacccgaagcaacagcatcaaacaaggcaaggaccagcactttcctgtgttcatgaacgagaaggaggacatcctgtggtgtaccgagatggagagagtgttcgggttcccagtccactacacagatgtcagcaacatgtctagactggccagacagagactgctgggaagaagctggtccgtccctgtgatcagacacctgttcgcccctctgaaggagtacttcgcctgcgtgagcagcggcaacagcaacgccaacagccggggccccagcttctctagcggcctggtgccactgtccctgagagggagccacatgggccccatggagatctacaaaaccgtgagcgcctggaagcggcagcctgtgcgcgtgctgagcctgtttcggaatatcgataaagtcctgaaaagcctgggattcctggagagcggctctggctccggcggtggcaccctgaagtacgtggaggatgtgacaaacgtggtcagacgggatgtggagaagtggggccccttcgatctggtgtacggcagcacccaacccctgggcagctcttgtgaccggtgccctggctggtacatgtttcagttccaccggatcctgcagtacgccctgccgagacaggagtcccagcggccattcttttggattttcatggacaacttgctgctgaccgaggatgaccaggaaactaccactcggttcctgcagaccgaagccgtgaccctgcaggacgtgagaggccgggactaccagaacgccatgcgggtgtggtccaacatccctggactgaaaagcaagcacgcacctctgacccctaaagaagaggagtacctgcaggcccaggtgcggagcagaagcaagctggacgcccctaaggtggatctgctggtgaagaattgcctcctgcccctgagagagtacttcaagtatttcagccagaatagtctgcccctgggaggcagcggcggcggcctggcccccgaggaccacggcagcagctacgagggcagcgtgagcttcagggacgtggccatcgacttcagcagggaggagtggaggcacctggaccccagccagaggaacctgtacagggacgtgatgctggagacctacagccacctgctgagcgtgggctaccaggtgcccgaggccgaggtggtgatgctggagcagggcaaggagccctgggccctgcagggcgagaggcccaggcagggcggcccaagcagcggcgcccctcctcccagcggcggcaggcggcccaagcagcggcgcccctcctcccagcggcggcagcccagccggctccccaacctctaccgaggagggcacctctgagtccgccacccccgagagcggccctggcacctccaccgagcccagcgagggcagcgcacccggcagccctgccggcagccccacctccacagaggagggaaccagcaccgagcccagcgaaggcagcgccccaggcaccagcaccgagcctagtgagcaggagattaaacggatcaacaagatcagaagaagacttgtgaaagacagcaacaccaagaaggccggcaagacaggccccatgaaaaccctgctggttagagtgatgacacccgatctgagagagcggctggaaaacctgagaaagaagcctgaaaatatcccccagcccatcagcaatacatctagagccaacctgaataagctgctgaccgattacaccgaaatgaagaaggcgatcctgcatgtgtactgggaagagttccagaaggaccctgtgggcctgatgagccgggtggcccagcctgccagcaagaagatcgatcagaacaagctgaaacctgagatggacgagaagggcaacctgaccaccgccggctttgcctgctctcagtgtggccagcccctgttcgtgtacaagctggagcaggtgtctgagaagggcaaggcttacaccaactacttcggacggtgcaatgtggccgagcacgaaaagctgatcctgctggcccagctgaagcccgagaaggatagcgacgaagccgtgacatatagcctgggaaagtttgggcagagggccctggatttctacagcattcatgtgaccaaggagtccacccaccccgtgaagcccctggcccagatcgccggaaacagatacgcctccggacctgtgggaaaggccctgagcgacgcatgtatgggcacaatcgcctccttcctgtctaagtaccaggacatcatcatcgaacaccagaaggtggtgaagggcaaccagaagagactggagagcctgcgggagctggccggcaaggaaaacctggaataccctagcgtgaccctgccacctcagcctcacaccaaggagggcgttgatgcctacaacgaagtgatcgcccgggtgcgaatgtgggtgaacctgaacctgtggcagaagctgaagctaagcagagatgatgccaagcctctgctgagactgaagggattcccttcctttcctctggtcgagagacaggccaacgaagtggactggtgggacatggtgtgtaacgtgaagaagctgatcaacgagaaaaaggaggatggcaaggtgttttggcagaatctggctggctacaagagacaggaagccctgagaccatacctgagcagcgaggaagatcggaagaagggaaagaaattcgctcggtaccagctgggcgacctgctgctgcacctggaaaagaagcacggcgaggactggggaaaggtgtacgacgaggcctgggagcggattgacaagaaagtggaaggcctgagcaagcacatcaagctggaagaggaacggagaagcgaggacgcccagagcaaggccgccctgaccgactggctgcgggctaaggccagcttcgtgatcgagggcctgaaggaggccgacaaggacgagttctgcagatgcgagctgaagctgcagaagtggtacggggacctgcggggaaagcccttcgccatcgaagccgagaacagcatcctggacatcagcggcttcagcaagcagtacaactgtgccttcatctggcagaaggacggcgtgaagaagctgaacctgtacctgatcatcaactacttcaagggcggcaagctgcggttcaagaagatcaaacctgaagccttcgaagccaacagattctacaccgtgatcaacaaaaagagcggcgagatcgtgcccatggaggtgaacttcaacttcgacgaccccaacctgatcatcctgcctctggcctttggcaagagacagggcagagaattcatctggaacgacctgctgtccctggaaaccggcagcctgaagctggccaacggaagagtgatcgagaagacactgtacaacagaagaacccggcaggatgagcctgccctgttcgtggccctgaccttcgagcggcgggaggtcctggactcctccaatatcaaaccaatgaacctgatcggcgtggcaagaggcgaaaacatccccgccgtgatcgccctgaccgaccccgagggctgcccactgagccggtttaaggatagcctgggaaacccaacccacatcctgagaatcggcgagagctataaggagaagcagcggaccatccaggccaagaaggaggtggagcagcggagagccggcggctacagccggaagtacgccagcaaagccaagaatctggcagacgatatggtgagaaacaccgctagagatctgctgtactacgccgtgacccaggatgccatgctgatcttcgccaacctgagccggggcttcggccggcagggcaagcggaccttcatggccgagagacagtacacacggatggaggactggctgaccgccaagctggcctacgagggcctgagcaagacctacctgtccaagacactggcccagtacacctccaagacatgcagcaactgtgggtttaccatcaccagcgccgactacgacagggtgctggagaagctgaagaagacagcaacaggctggatgaccacaattaacggcaaggagctgaaggtggagggccagattacctactacaacagatacaagagacagaacgtagtcaaggacctgtccgtcgagctggatagactgagcgaagaatctgtgaacaacgacatctcctcctggacaaagggcagaagcggagaagctctgagcctcctgaagaaaagattctcccatagacccgtgcaggagaagttcgtgtgcctgaactgcggcttcgagacacacgcagccgagcaagccgccctgaacatcgccagatcctggctgttcctgcggagccaggagtacaagaaataccagacaaacaagacaaccggcaacaccgataagagagccttcgtcgagacctggcagtccttttaccggaagaagcttaaggaggtgtggaaacctgccgtgcggtctggcggatctggcggaggctccaccagccccaagaaaaagagaaaagtctaagctgccttctgcggggcttgccttctggccatgcccttcttctctcccttgcacctgtacctcttggtctttgaataaagcctgagtaggaaggctagcaaaaaaaaaaaaaaaaaaaaaaaaaaaaaaaaaaaaaaaaaaaaaaaaaaaaaaaaaaaaaaaaaaaaaaaaaaaaaaaagcccagccggctccccaacctctaccgaggagggcacctctgagtccgccacccccgagagcggccctggcacctccaccgagcccagcgagggcagcgcacccggcagccctgccggcagccccacctccacagaggagggaaccagcaccgagcccagcgaaggcagcgccccaggcaccagcaccgagcctagtgagcaggagattaaacggatcaacaagatcagaagaagacttgtgaaagacagcaacaccaagaaggccggcaagacaggccccatgaaaaccctgctggttagagtgatgacacccgatctgagagagcggctggaaaacctgagaaagaagcctgaaaatatcccccagcccatcagcaatacatctagagccaacctgaataagctgctgaccgattacaccgaaatgaagaaggcgatcctgcatgtgtactgggaagagttccagaaggaccctgtgggcctgatgagccgggtggcccagcctgccagcaagaagatcgatcagaacaagctgaaacctgagatggacgagaagggcaacctgaccaccgccggctttgcctgctctcagtgtggccagcccctgttcgtgtacaagctggagcaggtgtctgagaagggcaaggcttacaccaactacttcggacggtgcaatgtggccgagcacgaaaagctgatcctgctggcccagctgaagcccgagaaggatagcgacgaagccgtgacatatagcctgggaaagtttgggcagagggccctggatttctacagcattcatgtgaccaaggagtccacccaccccgtgaagcccctggcccagatcgccggaaacagatacgcctccggacctgtgggaaaggccctgagcgacgcatgtatgggcacaatcgcctccttcctgtctaagtaccaggacatcatcatcgaacaccagaaggtggtgaagggcaaccagaagagactggagagcctgcgggagctggccggcaaggaaaacctggaataccctagcgtgaccctgccacctcagcctcacaccaaggagggcgttgatgcctacaacgaagtgatcgcccgggtgcgaatgtgggtgaacctgaacctgtggcagaagctgaagctaagcagagatgatgccaagcctctgctgagactgaagggattcccttcctttcctctggtcgagagacaggccaacgaagtggactggtgggacatggtgtgtaacgtgaagaagctgatcaacgagaaaaaggaggatggcaaggtgttttggcagaatctggctggctacaagagacaggaagccctgagaccatacctgagcagcgaggaagatcggaagaagggaaagaaattcgctcggtaccagctgggcgacctgctgctgcacctggaaaagaagcacggcgaggactggggaaaggtgtacgacgaggcctgggagcggattgacaagaaagtggaaggcctgagcaagcacatcaagctggaagaggaacggagaagcgaggacgcccagagcaaggccgccctgaccgactggctgcgggctaaggccagcttcgtgatcgagggcctgaaggaggccgacaaggacgagttctgcagatgcgagctgaagctgcagaagtggtacggggacctgcggggaaagcccttcgccatcgaagccgagaacagcatcctggacatcagcggcttcagcaagcagtacaactgtgccttcatctggcagaaggacggcgtgaagaagctgaacctgtacctgatcatcaactacttcaagggcggcaagctgcggttcaagaagatcaaacctgaagccttcgaagccaacagattctacaccgtgatcaacaaaaagagcggcgagatcgtgcccatggaggtgaacttcaacttcgacgaccccaacctgatcatcctgcctctggcctttggcaagagacagggcagagaattcatctggaacgacctgctgtccctggaaaccggcagcctgaagctggccaacggaagagtgatcgagaagacactgtacaacagaagaacccggcaggatgagcctgccctgttcgtggccctgaccttcgagcggcgggaggtcctggactcctccaatatcaaaccaatgaacctgatcggcgtggcaagaggcgaaaacatccccgccgtgatcgccctgaccgaccccgagggctgcccactgagccggtttaaggatagcctgggaaacccaacccacatcctgagaatcggcgagagctataaggagaagcagcggaccatccaggccaagaaggaggtggagcagcggagagccggcggctacagccggaagtacgccagcaaagccaagaatctggcagacgatatggtgagaaacaccgctagagatctgctgtactacgccgtgacccaggatgccatgctgatcttcgccaacctgagccggggcttcggccggcagggcaagcggaccttcatggccgagagacagtacacacggatggaggactggctgaccgccaagctggcctacgagggcctgagcaagacctacctgtccaagacactggcccagtacacctccaagacatgcagcaactgtgggtttaccatcaccagcgccgactacgacagggtgctggagaagctgaagaagacagcaacaggctggatgaccacaattaacggcaaggagctgaaggtggagggccagattacctactacaacagatacaagagacagaacgtagtcaaggacctgtccgtcgagctggatagactgagcgaagaatctgtgaacaacgacatctcctcctggacaaagggcagaagcggagaagctctgagcctcctgaagaaaagattctcccatagacccgtgcaggagaagttcgtgtgcctgaactgcggcttcgagacacacgcagccgagcaagccgccctgaacatcgccagatcctggctgttcctgcggagccaggagtacaagaaataccagacaaacaagacaaccggcaacaccgataagagagccttcgtcgagacctggcagtccttttaccggaagaagcttaaggaggtgtggaaacctgccgtgcggtctggcggatctggcggaggctccaccagccccaagaaaaagagaaaagtctaagctgccttctgcggggcttgccttctggccatgcccttcttctctcccttgcacctgtacctcttggtctttgaataaagcctgagtaggaaggctagcaaaaaaaaaaaaaaaaaaaaaaaaaaaaaaaaaaaaaaaaaaaaaaaaaaaaaaaaaaaaaaaaaaaaaaaaaaaaaaaa

SEQ ID NO: 9388 - RNA, 8787 nt, synthetic construct
  source 1..8787: mol_type = other RNA
aggaaataagagagaaaagaagagtaagaagaaatataagagccaccatggcccctaagaagaagcgtaaagtgagccggatgaaccacgaccaggagttcgacccccctaaggtgtaccctcccgtccccgccgagaagagaaagcccatccgggtcctgagcctgttcgatggcatcgccaccggtctgctggtgctgaaggacctgggcatccaggtggataggtacattgcctccgaggtgtgcgaggactccatcaccgtgggaatggtgcgtcatcagggcaagatcatgtacgtgggcgacgtgcggagcgtgacacagaagcatatccaggagtggggccctttcgacctggtgatcggcggcagcccttgcaatgacctgagcatcgtgaacccagcccggaagggcctgtacgagggaaccggcagactgttcttcgagttttacagactgctgcacgacgcccggcctaaggaaggcgacgaccggcccttcttttggctgttcgagaatgtggtggccatgggagtcagcgacaagcgggatattagccggttcctggagagcaaccccgtgatgatcgatgccaaggaagtgagcgccgcccaccgggccagatacttctggggcaatctgcctggcatgaacagacccctggccagcaccgtgaacgacaagctggagctgcaggagtgcctggagcacggccggatcgccaagttcagcaaggtgagaaccatcaccacccgaagcaacagcatcaaacaaggcaaggaccagcactttcctgtgttcatgaacgagaaggaggacatcctgtggtgtaccgagatggagagagtgttcgggttcccagtccactacacagatgtcagcaacatgtctagactggccagacagagactgctgggaagaagctggtccgtccctgtgatcagacacctgttcgcccctctgaaggagtacttcgcctgcgtgagcagcggcaacagcaacgccaacagccggggccccagcttctctagcggcctggtgccactgtccctgagagggagccacatgggccccatggagatctacaaaaccgtgagcgcctggaagcggcagcctgtgcgcgtgctgagcctgtttcggaatatcgataaagtcctgaaaagcctgggattcctggagagcggctctggctccggcggtggcaccctgaagtacgtggaggatgtgacaaacgtggtcagacgggatgtggagaagtggggccccttcgatctggtgtacggcagcacccaacccctgggcagctcttgtgaccggtgccctggctggtacatgtttcagttccaccggatcctgcagtacgccctgccgagacaggagtcccagcggccattcttttggattttcatggacaacttgctgctgaccgaggatgaccaggaaactaccactcggttcctgcagaccgaagccgtgaccctgcaggacgtgagaggccgggactaccagaacgccatgcgggtgtggtccaacatccctggactgaaaagcaagcacgcacctctgacccctaaagaagaggagtacctgcaggcccaggtgcggagcagaagcaagctggacgcccctaaggtggatctgctggtgaagaattgcctcctgcccctgagagagtacttcaagtatttcagccagaatagtctgcccctgggaggcagcggcggcggcatggagggcctggtgatgttccaggacctgttcatcgacttcagccaggaggagtgggagtgcctggacgccgcccagaaggacctgtacagggacgtgatgatggagaactacagcagcctggtgagcctgggcctgtgcatccccaagcccgacgtgatcagcctgctggagcagggcaaggagccctggatggtgagcagggacgtgctgggcggctggtgccccgacaggctgaagaagggcggcccaagcagcggcgcccctcctcccagcggcggcaggcggcccaagcagcggcgcccctcctcccagcggcggcagcccagccggctccccaacctctaccgaggagggcacctctgagtccgccacccccgagagcggccctggcacctccaccgagcccagcgagggcagcgcacccggcagccctgccggcagccccacctccacagaggagggaaccagcaccgagcccagcgaaggcagcgccccaggcaccagcaccgagcctagtgagcaggagattaaacggatcaacaagatcagaagaagacttgtgaaagacagcaacaccaagaaggccggcaagacaggccccatgaaaaccctgctggttagagtgatgacacccgatctgagagagcggctggaaaacctgagaaagaagcctgaaaatatcccccagcccatcagcaatacatctagagccaacctgaataagctgctgaccgattacaccgaaatgaagaaggcgatcctgcatgtgtactgggaagagttccagaaggaccctgtgggcctgatgagccgggtggcccagcctgccagcaagaagatcgatcagaacaagctgaaacctgagatggacgagaagggcaacctgaccaccgccggctttgcctgctctcagtgtggccagcccctgttcgtgtacaagctggagcaggtgtctgagaagggcaaggcttacaccaactacttcggacggtgcaatgtggccgagcacgaaaagctgatcctgctggcccagctgaagcccgagaaggatagcgacgaagccgtgacatatagcctgggaaagtttgggcagagggccctggatttctacagcattcatgtgaccaaggagtccacccaccccgtgaagcccctggcccagatcgccggaaacagatacgcctccggacctgtgggaaaggccctgagcgacgcatgtatgggcacaatcgcctccttcctgtctaagtaccaggacatcatcatcgaacaccagaaggtggtgaagggcaaccagaagagactggagagcctgcgggagctggccggcaaggaaaacctggaataccctagcgtgaccctgccacctcagcctcacaccaaggagggcgttgatgcctacaacgaagtgatcgcccgggtgcgaatgtgggtgaacctgaacctgtggcagaagctgaagctaagcagagatgatgccaagcctctgctgagactgaagggattcccttcctttcctctggtcgagagacaggccaacgaagtggactggtgggacatggtgtgtaacgtgaagaagctgatcaacgagaaaaaggaggatggcaaggtgttttggcagaatctggctggctacaagagacaggaagccctgagaccatacctgagcagcgaggaagatcggaagaagggaaagaaattcgctcggtaccagctgggcgacctgctgctgcacctggaaaagaagcacggcgaggactggggaaaggtgtacgacgaggcctgggagcggattgacaagaaagtggaaggcctgagcaagcacatcaagctggaagaggaacggagaagcgaggacgcccagagcaaggccgccctgaccgactggctgcgggctaaggccagcttcgtgatcgagggcctgaaggaggccgacaaggacgagttctgcagatgcgagctgaagctgcagaagtggtacggggacctgcggggaaagcccttcgccatcgaagccgagaacagcatcctggacatcagcggcttcagcaagcagtacaactgtgccttcatctggcagaaggacggcgtgaagaagctgaacctgtacctgatcatcaactacttcaagggcggcaagctgcggttcaagaagatcaaacctgaagccttcgaagccaacagattctacaccgtgatcaacaaaaagagcggcgagatcgtgcccatggaggtgaacttcaacttcgacgaccccaacctgatcatcctgcctctggcctttggcaagagacagggcagagaattcatctggaacgacctgctgtccctggaaaccggcagcctgaagctggccaacggaagagtgatcgagaagacactgtacaacagaagaacccggcaggatgagcctgccctgttcgtggccctgaccttcgagcggcgggaggtcctggactcctccaatatcaaaccaatgaacctgatcggcgtggcaagaggcgaaaacatccccgccgtgatcgccctgaccgaccccgagggctgcccactgagccggtttaaggatagcctgggaaacccaacccacatcctgagaatcggcgagagctataaggagaagcagcggaccatccaggccaagaaggaggtggagcagcggagagccggcggctacagccggaagtacgccagcaaagccaagaatctggcagacgatatggtgagaaacaccgctagagatctgctgtactacgccgtgacccaggatgccatgctgatcttcgccaacctgagccggggcttcggccggcagggcaagcggaccttcatggccgagagacagtacacacggatggaggactggctgaccgccaagctggcctacgagggcctgagcaagacctacctgtccaagacactggcccagtacacctccaagacatgcagcaactgtgggtttaccatcaccagcgccgactacgacagggtgctggagaagctgaagaagacagcaacaggctggatgaccacaattaacggcaaggagctgaaggtggagggccagattacctactacaacagatacaagagacagaacgtagtcaaggacctgtccgtcgagctggatagactgagcgaagaatctgtgaacaacgacatctcctcctggacaaagggcagaagcggagaagctctgagcctcctgaagaaaagattctcccatagacccgtgcaggagaagttcgtgtgcctgaactgcggcttcgagacacacgcagccgagcaagccgccctgaacatcgccagatcctggctgttcctgcggagccaggagtacaagaaataccagacaaacaagacaaccggcaacaccgataagagagccttcgtcgagacctggcagtccttttaccggaagaagcttaaggaggtgtggaaacctgccgtgcggtctggcggatctggcggaggctccaccagccccaagaaaaagagaaaagtctaagctgccttctgcggggcttgccttctggccatgcccttcttctctcccttgcacctgtacctcttggtctttgaataaagcctgagtaggaaggctagcaaaaaaaaaaaaaaaaaaaaaaaaaaaaaaaaaaaaaaaaaaaaaaaaaaaaaaaaaaaaaaaaaaaaaaaaaaaaaaaagcccagccggctccccaacctctaccgaggagggcacctctgagtccgccacccccgagagcggccctggcacctccaccgagcccagcgagggcagcgcacccggcagccctgccggcagccccacctccacagaggagggaaccagcaccgagcccagcgaaggcagcgccccaggcaccagcaccgagcctagtgagcaggagattaaacggatcaacaagatcagaagaagacttgtgaaagacagcaacaccaagaaggccggcaagacaggccccatgaaaaccctgctggttagagtgatgacacccgatctgagagagcggctggaaaacctgagaaagaagcctgaaaatatcccccagcccatcagcaatacatctagagccaacctgaataagctgctgaccgattacaccgaaatgaagaaggcgatcctgcatgtgtactgggaagagttccagaaggaccctgtgggcctgatgagccgggtggcccagcctgccagcaagaagatcgatcagaacaagctgaaacctgagatggacgagaagggcaacctgaccaccgccggctttgcctgctctcagtgtggccagcccctgttcgtgtacaagctggagcaggtgtctgagaagggcaaggcttacaccaactacttcggacggtgcaatgtggccgagcacgaaaagctgatcctgctggcccagctgaagcccgagaaggatagcgacgaagccgtgacatatagcctgggaaagtttgggcagagggccctggatttctacagcattcatgtgaccaaggagtccacccaccccgtgaagcccctggcccagatcgccggaaacagatacgcctccggacctgtgggaaaggccctgagcgacgcatgtatgggcacaatcgcctccttcctgtctaagtaccaggacatcatcatcgaacaccagaaggtggtgaagggcaaccagaagagactggagagcctgcgggagctggccggcaaggaaaacctggaataccctagcgtgaccctgccacctcagcctcacaccaaggagggcgttgatgcctacaacgaagtgatcgcccgggtgcgaatgtgggtgaacctgaacctgtggcagaagctgaagctaagcagagatgatgccaagcctctgctgagactgaagggattcccttcctttcctctggtcgagagacaggccaacgaagtggactggtgggacatggtgtgtaacgtgaagaagctgatcaacgagaaaaaggaggatggcaaggtgttttggcagaatctggctggctacaagagacaggaagccctgagaccatacctgagcagcgaggaagatcggaagaagggaaagaaattcgctcggtaccagctgggcgacctgctgctgcacctggaaaagaagcacggcgaggactggggaaaggtgtacgacgaggcctgggagcggattgacaagaaagtggaaggcctgagcaagcacatcaagctggaagaggaacggagaagcgaggacgcccagagcaaggccgccctgaccgactggctgcgggctaaggccagcttcgtgatcgagggcctgaaggaggccgacaaggacgagttctgcagatgcgagctgaagctgcagaagtggtacggggacctgcggggaaagcccttcgccatcgaagccgagaacagcatcctggacatcagcggcttcagcaagcagtacaactgtgccttcatctggcagaaggacggcgtgaagaagctgaacctgtacctgatcatcaactacttcaagggcggcaagctgcggttcaagaagatcaaacctgaagccttcgaagccaacagattctacaccgtgatcaacaaaaagagcggcgagatcgtgcccatggaggtgaacttcaacttcgacgaccccaacctgatcatcctgcctctggcctttggcaagagacagggcagagaattcatctggaacgacctgctgtccctggaaaccggcagcctgaagctggccaacggaagagtgatcgagaagacactgtacaacagaagaacccggcaggatgagcctgccctgttcgtggccctgaccttcgagcggcgggaggtcctggactcctccaatatcaaaccaatgaacctgatcggcgtggcaagaggcgaaaacatccccgccgtgatcgccctgaccgaccccgagggctgcccactgagccggtttaaggatagcctgggaaacccaacccacatcctgagaatcggcgagagctataaggagaagcagcggaccatccaggccaagaaggaggtggagcagcggagagccggcggctacagccggaagtacgccagcaaagccaagaatctggcagacgatatggtgagaaacaccgctagagatctgctgtactacgccgtgacccaggatgccatgctgatcttcgccaacctgagccggggcttcggccggcagggcaagcggaccttcatggccgagagacagtacacacggatggaggactggctgaccgccaagctggcctacgagggcctgagcaagacctacctgtccaagacactggcccagtacacctccaagacatgcagcaactgtgggtttaccatcaccagcgccgactacgacagggtgctggagaagctgaagaagacagcaacaggctggatgaccacaattaacggcaaggagctgaaggtggagggccagattacctactacaacagatacaagagacagaacgtagtcaaggacctgtccgtcgagctggatagactgagcgaagaatctgtgaacaacgacatctcctcctggacaaagggcagaagcggagaagctctgagcctcctgaagaaaagattctcccatagacccgtgcaggagaagttcgtgtgcctgaactgcggcttcgagacacacgcagccgagcaagccgccctgaacatcgccagatcctggctgttcctgcggagccaggagtacaagaaataccagacaaacaagacaaccggcaacaccgataagagagccttcgtcgagacctggcagtccttttaccggaagaagcttaaggaggtgtggaaacctgccgtgcggtctggcggatctggcggaggctccaccagccccaagaaaaagagaaaagtctaagctgccttctgcggggcttgccttctggccatgcccttcttctctcccttgcacctgtacctcttggtctttgaataaagcctgagtaggaaggctagcaaaaaaaaaaaaaaaaaaaaaaaaaaaaaaaaaaaaaaaaaaaaaaaaaaaaaaaaaaaaaaaaaaaaaaaaaaaaaaaa

SEQ ID NO: 9389 - RNA, 8787 nt, synthetic construct
  source 1..8787: mol_type = other RNA
aggaaataagagagaaaagaagagtaagaagaaatataagagccaccatggcccctaagaagaagcgtaaagtgagccggatgaaccacgaccaggagttcgacccccctaaggtgtaccctcccgtccccgccgagaagagaaagcccatccgggtcctgagcctgttcgatggcatcgccaccggtctgctggtgctgaaggacctgggcatccaggtggataggtacattgcctccgaggtgtgcgaggactccatcaccgtgggaatggtgcgtcatcagggcaagatcatgtacgtgggcgacgtgcggagcgtgacacagaagcatatccaggagtggggccctttcgacctggtgatcggcggcagcccttgcaatgacctgagcatcgtgaacccagcccggaagggcctgtacgagggaaccggcagactgttcttcgagttttacagactgctgcacgacgcccggcctaaggaaggcgacgaccggcccttcttttggctgttcgagaatgtggtggccatgggagtcagcgacaagcgggatattagccggttcctggagagcaaccccgtgatgatcgatgccaaggaagtgagcgccgcccaccgggccagatacttctggggcaatctgcctggcatgaacagacccctggccagcaccgtgaacgacaagctggagctgcaggagtgcctggagcacggccggatcgccaagttcagcaaggtgagaaccatcaccacccgaagcaacagcatcaaacaaggcaaggaccagcactttcctgtgttcatgaacgagaaggaggacatcctgtggtgtaccgagatggagagagtgttcgggttcccagtccactacacagatgtcagcaacatgtctagactggccagacagagactgctgggaagaagctggtccgtccctgtgatcagacacctgttcgcccctctgaaggagtacttcgcctgcgtgagcagcggcaacagcaacgccaacagccggggccccagcttctctagcggcctggtgccactgtccctgagagggagccacatgggccccatggagatctacaaaaccgtgagcgcctggaagcggcagcctgtgcgcgtgctgagcctgtttcggaatatcgataaagtcctgaaaagcctgggattcctggagagcggctctggctccggcggtggcaccctgaagtacgtggaggatgtgacaaacgtggtcagacgggatgtggagaagtggggccccttcgatctggtgtacggcagcacccaacccctgggcagctcttgtgaccggtgccctggctggtacatgtttcagttccaccggatcctgcagtacgccctgccgagacaggagtcccagcggccattcttttggattttcatggacaacttgctgctgaccgaggatgaccaggaaactaccactcggttcctgcagaccgaagccgtgaccctgcaggacgtgagaggccgggactaccagaacgccatgcgggtgtggtccaacatccctggactgaaaagcaagcacgcacctctgacccctaaagaagaggagtacctgcaggcccaggtgcggagcagaagcaagctggacgcccctaaggtggatctgctggtgaagaattgcctcctgcccctgagagagtacttcaagtatttcagccagaatagtctgcccctgggaggcagcggcggcggcccccaggccagcgtgagcttcaaggacgtgaccgtggagttcacccaggaggagtggtggcagatggacagcgcccagaggaccctgtacagggacgtgatgctggagaactacagccacctggtgagcgtgggctactgcttcaccaagcccgagctgatcttcatgctggagcagggcgaggacccctggctgctggagaaggagttcgtgaacaggagcagccccgaggagagccagcccggcggcccaagcagcggcgcccctcctcccagcggcggcaggcggcccaagcagcggcgcccctcctcccagcggcggcagcccagccggctccccaacctctaccgaggagggcacctctgagtccgccacccccgagagcggccctggcacctccaccgagcccagcgagggcagcgcacccggcagccctgccggcagccccacctccacagaggagggaaccagcaccgagcccagcgaaggcagcgccccaggcaccagcaccgagcctagtgagcaggagattaaacggatcaacaagatcagaagaagacttgtgaaagacagcaacaccaagaaggccggcaagacaggccccatgaaaaccctgctggttagagtgatgacacccgatctgagagagcggctggaaaacctgagaaagaagcctgaaaatatcccccagcccatcagcaatacatctagagccaacctgaataagctgctgaccgattacaccgaaatgaagaaggcgatcctgcatgtgtactgggaagagttccagaaggaccctgtgggcctgatgagccgggtggcccagcctgccagcaagaagatcgatcagaacaagctgaaacctgagatggacgagaagggcaacctgaccaccgccggctttgcctgctctcagtgtggccagcccctgttcgtgtacaagctggagcaggtgtctgagaagggcaaggcttacaccaactacttcggacggtgcaatgtggccgagcacgaaaagctgatcctgctggcccagctgaagcccgagaaggatagcgacgaagccgtgacatatagcctgggaaagtttgggcagagggccctggatttctacagcattcatgtgaccaaggagtccacccaccccgtgaagcccctggcccagatcgccggaaacagatacgcctccggacctgtgggaaaggccctgagcgacgcatgtatgggcacaatcgcctccttcctgtctaagtaccaggacatcatcatcgaacaccagaaggtggtgaagggcaaccagaagagactggagagcctgcgggagctggccggcaaggaaaacctggaataccctagcgtgaccctgccacctcagcctcacaccaaggagggcgttgatgcctacaacgaagtgatcgcccgggtgcgaatgtgggtgaacctgaacctgtggcagaagctgaagctaagcagagatgatgccaagcctctgctgagactgaagggattcccttcctttcctctggtcgagagacaggccaacgaagtggactggtgggacatggtgtgtaacgtgaagaagctgatcaacgagaaaaaggaggatggcaaggtgttttggcagaatctggctggctacaagagacaggaagccctgagaccatacctgagcagcgaggaagatcggaagaagggaaagaaattcgctcggtaccagctgggcgacctgctgctgcacctggaaaagaagcacggcgaggactggggaaaggtgtacgacgaggcctgggagcggattgacaagaaagtggaaggcctgagcaagcacatcaagctggaagaggaacggagaagcgaggacgcccagagcaaggccgccctgaccgactggctgcgggctaaggccagcttcgtgatcgagggcctgaaggaggccgacaaggacgagttctgcagatgcgagctgaagctgcagaagtggtacggggacctgcggggaaagcccttcgccatcgaagccgagaacagcatcctggacatcagcggcttcagcaagcagtacaactgtgccttcatctggcagaaggacggcgtgaagaagctgaacctgtacctgatcatcaactacttcaagggcggcaagctgcggttcaagaagatcaaacctgaagccttcgaagccaacagattctacaccgtgatcaacaaaaagagcggcgagatcgtgcccatggaggtgaacttcaacttcgacgaccccaacctgatcatcctgcctctggcctttggcaagagacagggcagagaattcatctggaacgacctgctgtccctggaaaccggcagcctgaagctggccaacggaagagtgatcgagaagacactgtacaacagaagaacccggcaggatgagcctgccctgttcgtggccctgaccttcgagcggcgggaggtcctggactcctccaatatcaaaccaatgaacctgatcggcgtggcaagaggcgaaaacatccccgccgtgatcgccctgaccgaccccgagggctgcccactgagccggtttaaggatagcctgggaaacccaacccacatcctgagaatcggcgagagctataaggagaagcagcggaccatccaggccaagaaggaggtggagcagcggagagccggcggctacagccggaagtacgccagcaaagccaagaatctggcagacgatatggtgagaaacaccgctagagatctgctgtactacgccgtgacccaggatgccatgctgatcttcgccaacctgagccggggcttcggccggcagggcaagcggaccttcatggccgagagacagtacacacggatggaggactggctgaccgccaagctggcctacgagggcctgagcaagacctacctgtccaagacactggcccagtacacctccaagacatgcagcaactgtgggtttaccatcaccagcgccgactacgacagggtgctggagaagctgaagaagacagcaacaggctggatgaccacaattaacggcaaggagctgaaggtggagggccagattacctactacaacagatacaagagacagaacgtagtcaaggacctgtccgtcgagctggatagactgagcgaagaatctgtgaacaacgacatctcctcctggacaaagggcagaagcggagaagctctgagcctcctgaagaaaagattctcccatagacccgtgcaggagaagttcgtgtgcctgaactgcggcttcgagacacacgcagccgagcaagccgccctgaacatcgccagatcctggctgttcctgcggagccaggagtacaagaaataccagacaaacaagacaaccggcaacaccgataagagagccttcgtcgagacctggcagtccttttaccggaagaagcttaaggaggtgtggaaacctgccgtgcggtctggcggatctggcggaggctccaccagccccaagaaaaagagaaaagtctaagctgccttctgcggggcttgccttctggccatgcccttcttctctcccttgcacctgtacctcttggtctttgaataaagcctgagtaggaaggctagcaaaaaaaaaaaaaaaaaaaaaaaaaaaaaaaaaaaaaaaaaaaaaaaaaaaaaaaaaaaaaaaaaaaaaaaaaaaaaaaagcccagccggctccccaacctctaccgaggagggcacctctgagtccgccacccccgagagcggccctggcacctccaccgagcccagcgagggcagcgcacccggcagccctgccggcagccccacctccacagaggagggaaccagcaccgagcccagcgaaggcagcgccccaggcaccagcaccgagcctagtgagcaggagattaaacggatcaacaagatcagaagaagacttgtgaaagacagcaacaccaagaaggccggcaagacaggccccatgaaaaccctgctggttagagtgatgacacccgatctgagagagcggctggaaaacctgagaaagaagcctgaaaatatcccccagcccatcagcaatacatctagagccaacctgaataagctgctgaccgattacaccgaaatgaagaaggcgatcctgcatgtgtactgggaagagttccagaaggaccctgtgggcctgatgagccgggtggcccagcctgccagcaagaagatcgatcagaacaagctgaaacctgagatggacgagaagggcaacctgaccaccgccggctttgcctgctctcagtgtggccagcccctgttcgtgtacaagctggagcaggtgtctgagaagggcaaggcttacaccaactacttcggacggtgcaatgtggccgagcacgaaaagctgatcctgctggcccagctgaagcccgagaaggatagcgacgaagccgtgacatatagcctgggaaagtttgggcagagggccctggatttctacagcattcatgtgaccaaggagtccacccaccccgtgaagcccctggcccagatcgccggaaacagatacgcctccggacctgtgggaaaggccctgagcgacgcatgtatgggcacaatcgcctccttcctgtctaagtaccaggacatcatcatcgaacaccagaaggtggtgaagggcaaccagaagagactggagagcctgcgggagctggccggcaaggaaaacctggaataccctagcgtgaccctgccacctcagcctcacaccaaggagggcgttgatgcctacaacgaagtgatcgcccgggtgcgaatgtgggtgaacctgaacctgtggcagaagctgaagctaagcagagatgatgccaagcctctgctgagactgaagggattcccttcctttcctctggtcgagagacaggccaacgaagtggactggtgggacatggtgtgtaacgtgaagaagctgatcaacgagaaaaaggaggatggcaaggtgttttggcagaatctggctggctacaagagacaggaagccctgagaccatacctgagcagcgaggaagatcggaagaagggaaagaaattcgctcggtaccagctgggcgacctgctgctgcacctggaaaagaagcacggcgaggactggggaaaggtgtacgacgaggcctgggagcggattgacaagaaagtggaaggcctgagcaagcacatcaagctggaagaggaacggagaagcgaggacgcccagagcaaggccgccctgaccgactggctgcgggctaaggccagcttcgtgatcgagggcctgaaggaggccgacaaggacgagttctgcagatgcgagctgaagctgcagaagtggtacggggacctgcggggaaagcccttcgccatcgaagccgagaacagcatcctggacatcagcggcttcagcaagcagtacaactgtgccttcatctggcagaaggacggcgtgaagaagctgaacctgtacctgatcatcaactacttcaagggcggcaagctgcggttcaagaagatcaaacctgaagccttcgaagccaacagattctacaccgtgatcaacaaaaagagcggcgagatcgtgcccatggaggtgaacttcaacttcgacgaccccaacctgatcatcctgcctctggcctttggcaagagacagggcagagaattcatctggaacgacctgctgtccctggaaaccggcagcctgaagctggccaacggaagagtgatcgagaagacactgtacaacagaagaacccggcaggatgagcctgccctgttcgtggccctgaccttcgagcggcgggaggtcctggactcctccaatatcaaaccaatgaacctgatcggcgtggcaagaggcgaaaacatccccgccgtgatcgccctgaccgaccccgagggctgcccactgagccggtttaaggatagcctgggaaacccaacccacatcctgagaatcggcgagagctataaggagaagcagcggaccatccaggccaagaaggaggtggagcagcggagagccggcggctacagccggaagtacgccagcaaagccaagaatctggcagacgatatggtgagaaacaccgctagagatctgctgtactacgccgtgacccaggatgccatgctgatcttcgccaacctgagccggggcttcggccggcagggcaagcggaccttcatggccgagagacagtacacacggatggaggactggctgaccgccaagctggcctacgagggcctgagcaagacctacctgtccaagacactggcccagtacacctccaagacatgcagcaactgtgggtttaccatcaccagcgccgactacgacagggtgctggagaagctgaagaagacagcaacaggctggatgaccacaattaacggcaaggagctgaaggtggagggccagattacctactacaacagatacaagagacagaacgtagtcaaggacctgtccgtcgagctggatagactgagcgaagaatctgtgaacaacgacatctcctcctggacaaagggcagaagcggagaagctctgagcctcctgaagaaaagattctcccatagacccgtgcaggagaagttcgtgtgcctgaactgcggcttcgagacacacgcagccgagcaagccgccctgaacatcgccagatcctggctgttcctgcggagccaggagtacaagaaataccagacaaacaagacaaccggcaacaccgataagagagccttcgtcgagacctggcagtccttttaccggaagaagcttaaggaggtgtggaaacctgccgtgcggtctggcggatctggcggaggctccaccagccccaagaaaaagagaaaagtctaagctgccttctgcggggcttgccttctggccatgcccttcttctctcccttgcacctgtacctcttggtctttgaataaagcctgagtaggaaggctagcaaaaaaaaaaaaaaaaaaaaaaaaaaaaaaaaaaaaaaaaaaaaaaaaaaaaaaaaaaaaaaaaaaaaaaaaaaaaaaaa

SEQ ID NO: 9390 - RNA, 8787 nt, synthetic construct
  source 1..8787: mol_type = other RNA
aggaaataagagagaaaagaagagtaagaagaaatataagagccaccatggcccctaagaagaagcgtaaagtgagccggatgaaccacgaccaggagttcgacccccctaaggtgtaccctcccgtccccgccgagaagagaaagcccatccgggtcctgagcctgttcgatggcatcgccaccggtctgctggtgctgaaggacctgggcatccaggtggataggtacattgcctccgaggtgtgcgaggactccatcaccgtgggaatggtgcgtcatcagggcaagatcatgtacgtgggcgacgtgcggagcgtgacacagaagcatatccaggagtggggccctttcgacctggtgatcggcggcagcccttgcaatgacctgagcatcgtgaacccagcccggaagggcctgtacgagggaaccggcagactgttcttcgagttttacagactgctgcacgacgcccggcctaaggaaggcgacgaccggcccttcttttggctgttcgagaatgtggtggccatgggagtcagcgacaagcgggatattagccggttcctggagagcaaccccgtgatgatcgatgccaaggaagtgagcgccgcccaccgggccagatacttctggggcaatctgcctggcatgaacagacccctggccagcaccgtgaacgacaagctggagctgcaggagtgcctggagcacggccggatcgccaagttcagcaaggtgagaaccatcaccacccgaagcaacagcatcaaacaaggcaaggaccagcactttcctgtgttcatgaacgagaaggaggacatcctgtggtgtaccgagatggagagagtgttcgggttcccagtccactacacagatgtcagcaacatgtctagactggccagacagagactgctgggaagaagctggtccgtccctgtgatcagacacctgttcgcccctctgaaggagtacttcgcctgcgtgagcagcggcaacagcaacgccaacagccggggccccagcttctctagcggcctggtgccactgtccctgagagggagccacatgggccccatggagatctacaaaaccgtgagcgcctggaagcggcagcctgtgcgcgtgctgagcctgtttcggaatatcgataaagtcctgaaaagcctgggattcctggagagcggctctggctccggcggtggcaccctgaagtacgtggaggatgtgacaaacgtggtcagacgggatgtggagaagtggggccccttcgatctggtgtacggcagcacccaacccctgggcagctcttgtgaccggtgccctggctggtacatgtttcagttccaccggatcctgcagtacgccctgccgagacaggagtcccagcggccattcttttggattttcatggacaacttgctgctgaccgaggatgaccaggaaactaccactcggttcctgcagaccgaagccgtgaccctgcaggacgtgagaggccgggactaccagaacgccatgcgggtgtggtccaacatccctggactgaaaagcaagcacgcacctctgacccctaaagaagaggagtacctgcaggcccaggtgcggagcagaagcaagctggacgcccctaaggtggatctgctggtgaagaattgcctcctgcccctgagagagtacttcaagtatttcagccagaatagtctgcccctgggaggcagcggcggcggcttccaggagctggtgaccttcagggacgtggccatcgacttcagcaggcaggagtgggagtacctggacagcgtgcagagggacctgtacagggacgtgatgctggagaactacaggaacctggtgagcctgggccacagcatcagcaagcccgacgtggtggacctgctggagcagggcaaggagccctggatgatcctgagggaggagacccagaggcagtacaccgacctggacctgcacggcggcccaagcagcggcgcccctcctcccagcggcggcaggcggcccaagcagcggcgcccctcctcccagcggcggcagcccagccggctccccaacctctaccgaggagggcacctctgagtccgccacccccgagagcggccctggcacctccaccgagcccagcgagggcagcgcacccggcagccctgccggcagccccacctccacagaggagggaaccagcaccgagcccagcgaaggcagcgccccaggcaccagcaccgagcctagtgagcaggagattaaacggatcaacaagatcagaagaagacttgtgaaagacagcaacaccaagaaggccggcaagacaggccccatgaaaaccctgctggttagagtgatgacacccgatctgagagagcggctggaaaacctgagaaagaagcctgaaaatatcccccagcccatcagcaatacatctagagccaacctgaataagctgctgaccgattacaccgaaatgaagaaggcgatcctgcatgtgtactgggaagagttccagaaggaccctgtgggcctgatgagccgggtggcccagcctgccagcaagaagatcgatcagaacaagctgaaacctgagatggacgagaagggcaacctgaccaccgccggctttgcctgctctcagtgtggccagcccctgttcgtgtacaagctggagcaggtgtctgagaagggcaaggcttacaccaactacttcggacggtgcaatgtggccgagcacgaaaagctgatcctgctggcccagctgaagcccgagaaggatagcgacgaagccgtgacatatagcctgggaaagtttgggcagagggccctggatttctacagcattcatgtgaccaaggagtccacccaccccgtgaagcccctggcccagatcgccggaaacagatacgcctccggacctgtgggaaaggccctgagcgacgcatgtatgggcacaatcgcctccttcctgtctaagtaccaggacatcatcatcgaacaccagaaggtggtgaagggcaaccagaagagactggagagcctgcgggagctggccggcaaggaaaacctggaataccctagcgtgaccctgccacctcagcctcacaccaaggagggcgttgatgcctacaacgaagtgatcgcccgggtgcgaatgtgggtgaacctgaacctgtggcagaagctgaagctaagcagagatgatgccaagcctctgctgagactgaagggattcccttcctttcctctggtcgagagacaggccaacgaagtggactggtgggacatggtgtgtaacgtgaagaagctgatcaacgagaaaaaggaggatggcaaggtgttttggcagaatctggctggctacaagagacaggaagccctgagaccatacctgagcagcgaggaagatcggaagaagggaaagaaattcgctcggtaccagctgggcgacctgctgctgcacctggaaaagaagcacggcgaggactggggaaaggtgtacgacgaggcctgggagcggattgacaagaaagtggaaggcctgagcaagcacatcaagctggaagaggaacggagaagcgaggacgcccagagcaaggccgccctgaccgactggctgcgggctaaggccagcttcgtgatcgagggcctgaaggaggccgacaaggacgagttctgcagatgcgagctgaagctgcagaagtggtacggggacctgcggggaaagcccttcgccatcgaagccgagaacagcatcctggacatcagcggcttcagcaagcagtacaactgtgccttcatctggcagaaggacggcgtgaagaagctgaacctgtacctgatcatcaactacttcaagggcggcaagctgcggttcaagaagatcaaacctgaagccttcgaagccaacagattctacaccgtgatcaacaaaaagagcggcgagatcgtgcccatggaggtgaacttcaacttcgacgaccccaacctgatcatcctgcctctggcctttggcaagagacagggcagagaattcatctggaacgacctgctgtccctggaaaccggcagcctgaagctggccaacggaagagtgatcgagaagacactgtacaacagaagaacccggcaggatgagcctgccctgttcgtggccctgaccttcgagcggcgggaggtcctggactcctccaatatcaaaccaatgaacctgatcggcgtggcaagaggcgaaaacatccccgccgtgatcgccctgaccgaccccgagggctgcccactgagccggtttaaggatagcctgggaaacccaacccacatcctgagaatcggcgagagctataaggagaagcagcggaccatccaggccaagaaggaggtggagcagcggagagccggcggctacagccggaagtacgccagcaaagccaagaatctggcagacgatatggtgagaaacaccgctagagatctgctgtactacgccgtgacccaggatgccatgctgatcttcgccaacctgagccggggcttcggccggcagggcaagcggaccttcatggccgagagacagtacacacggatggaggactggctgaccgccaagctggcctacgagggcctgagcaagacctacctgtccaagacactggcccagtacacctccaagacatgcagcaactgtgggtttaccatcaccagcgccgactacgacagggtgctggagaagctgaagaagacagcaacaggctggatgaccacaattaacggcaaggagctgaaggtggagggccagattacctactacaacagatacaagagacagaacgtagtcaaggacctgtccgtcgagctggatagactgagcgaagaatctgtgaacaacgacatctcctcctggacaaagggcagaagcggagaagctctgagcctcctgaagaaaagattctcccatagacccgtgcaggagaagttcgtgtgcctgaactgcggcttcgagacacacgcagccgagcaagccgccctgaacatcgccagatcctggctgttcctgcggagccaggagtacaagaaataccagacaaacaagacaaccggcaacaccgataagagagccttcgtcgagacctggcagtccttttaccggaagaagcttaaggaggtgtggaaacctgccgtgcggtctggcggatctggcggaggctccaccagccccaagaaaaagagaaaagtctaagctgccttctgcggggcttgccttctggccatgcccttcttctctcccttgcacctgtacctcttggtctttgaataaagcctgagtaggaaggctagcaaaaaaaaaaaaaaaaaaaaaaaaaaaaaaaaaaaaaaaaaaaaaaaaaaaaaaaaaaaaaaaaaaaaaaaaaaaaaaaagcccagccggctccccaacctctaccgaggagggcacctctgagtccgccacccccgagagcggccctggcacctccaccgagcccagcgagggcagcgcacccggcagccctgccggcagccccacctccacagaggagggaaccagcaccgagcccagcgaaggcagcgccccaggcaccagcaccgagcctagtgagcaggagattaaacggatcaacaagatcagaagaagacttgtgaaagacagcaacaccaagaaggccggcaagacaggccccatgaaaaccctgctggttagagtgatgacacccgatctgagagagcggctggaaaacctgagaaagaagcctgaaaatatcccccagcccatcagcaatacatctagagccaacctgaataagctgctgaccgattacaccgaaatgaagaaggcgatcctgcatgtgtactgggaagagttccagaaggaccctgtgggcctgatgagccgggtggcccagcctgccagcaagaagatcgatcagaacaagctgaaacctgagatggacgagaagggcaacctgaccaccgccggctttgcctgctctcagtgtggccagcccctgttcgtgtacaagctggagcaggtgtctgagaagggcaaggcttacaccaactacttcggacggtgcaatgtggccgagcacgaaaagctgatcctgctggcccagctgaagcccgagaaggatagcgacgaagccgtgacatatagcctgggaaagtttgggcagagggccctggatttctacagcattcatgtgaccaaggagtccacccaccccgtgaagcccctggcccagatcgccggaaacagatacgcctccggacctgtgggaaaggccctgagcgacgcatgtatgggcacaatcgcctccttcctgtctaagtaccaggacatcatcatcgaacaccagaaggtggtgaagggcaaccagaagagactggagagcctgcgggagctggccggcaaggaaaacctggaataccctagcgtgaccctgccacctcagcctcacaccaaggagggcgttgatgcctacaacgaagtgatcgcccgggtgcgaatgtgggtgaacctgaacctgtggcagaagctgaagctaagcagagatgatgccaagcctctgctgagactgaagggattcccttcctttcctctggtcgagagacaggccaacgaagtggactggtgggacatggtgtgtaacgtgaagaagctgatcaacgagaaaaaggaggatggcaaggtgttttggcagaatctggctggctacaagagacaggaagccctgagaccatacctgagcagcgaggaagatcggaagaagggaaagaaattcgctcggtaccagctgggcgacctgctgctgcacctggaaaagaagcacggcgaggactggggaaaggtgtacgacgaggcctgggagcggattgacaagaaagtggaaggcctgagcaagcacatcaagctggaagaggaacggagaagcgaggacgcccagagcaaggccgccctgaccgactggctgcgggctaaggccagcttcgtgatcgagggcctgaaggaggccgacaaggacgagttctgcagatgcgagctgaagctgcagaagtggtacggggacctgcggggaaagcccttcgccatcgaagccgagaacagcatcctggacatcagcggcttcagcaagcagtacaactgtgccttcatctggcagaaggacggcgtgaagaagctgaacctgtacctgatcatcaactacttcaagggcggcaagctgcggttcaagaagatcaaacctgaagccttcgaagccaacagattctacaccgtgatcaacaaaaagagcggcgagatcgtgcccatggaggtgaacttcaacttcgacgaccccaacctgatcatcctgcctctggcctttggcaagagacagggcagagaattcatctggaacgacctgctgtccctggaaaccggcagcctgaagctggccaacggaagagtgatcgagaagacactgtacaacagaagaacccggcaggatgagcctgccctgttcgtggccctgaccttcgagcggcgggaggtcctggactcctccaatatcaaaccaatgaacctgatcggcgtggcaagaggcgaaaacatccccgccgtgatcgccctgaccgaccccgagggctgcccactgagccggtttaaggatagcctgggaaacccaacccacatcctgagaatcggcgagagctataaggagaagcagcggaccatccaggccaagaaggaggtggagcagcggagagccggcggctacagccggaagtacgccagcaaagccaagaatctggcagacgatatggtgagaaacaccgctagagatctgctgtactacgccgtgacccaggatgccatgctgatcttcgccaacctgagccggggcttcggccggcagggcaagcggaccttcatggccgagagacagtacacacggatggaggactggctgaccgccaagctggcctacgagggcctgagcaagacctacctgtccaagacactggcccagtacacctccaagacatgcagcaactgtgggtttaccatcaccagcgccgactacgacagggtgctggagaagctgaagaagacagcaacaggctggatgaccacaattaacggcaaggagctgaaggtggagggccagattacctactacaacagatacaagagacagaacgtagtcaaggacctgtccgtcgagctggatagactgagcgaagaatctgtgaacaacgacatctcctcctggacaaagggcagaagcggagaagctctgagcctcctgaagaaaagattctcccatagacccgtgcaggagaagttcgtgtgcctgaactgcggcttcgagacacacgcagccgagcaagccgccctgaacatcgccagatcctggctgttcctgcggagccaggagtacaagaaataccagacaaacaagacaaccggcaacaccgataagagagccttcgtcgagacctggcagtccttttaccggaagaagcttaaggaggtgtggaaacctgccgtgcggtctggcggatctggcggaggctccaccagccccaagaaaaagagaaaagtctaagctgccttctgcggggcttgccttctggccatgcccttcttctctcccttgcacctgtacctcttggtctttgaataaagcctgagtaggaaggctagcaaaaaaaaaaaaaaaaaaaaaaaaaaaaaaaaaaaaaaaaaaaaaaaaaaaaaaaaaaaaaaaaaaaaaaaaaaaaaaaa

SEQ ID NO: 9391 - RNA, 8787 nt, synthetic construct
  source 1..8787: mol_type = other RNA
aggaaataagagagaaaagaagagtaagaagaaatataagagccaccatggcccctaagaagaagcgtaaagtgagccggatgaaccacgaccaggagttcgacccccctaaggtgtaccctcccgtccccgccgagaagagaaagcccatccgggtcctgagcctgttcgatggcatcgccaccggtctgctggtgctgaaggacctgggcatccaggtggataggtacattgcctccgaggtgtgcgaggactccatcaccgtgggaatggtgcgtcatcagggcaagatcatgtacgtgggcgacgtgcggagcgtgacacagaagcatatccaggagtggggccctttcgacctggtgatcggcggcagcccttgcaatgacctgagcatcgtgaacccagcccggaagggcctgtacgagggaaccggcagactgttcttcgagttttacagactgctgcacgacgcccggcctaaggaaggcgacgaccggcccttcttttggctgttcgagaatgtggtggccatgggagtcagcgacaagcgggatattagccggttcctggagagcaaccccgtgatgatcgatgccaaggaagtgagcgccgcccaccgggccagatacttctggggcaatctgcctggcatgaacagacccctggccagcaccgtgaacgacaagctggagctgcaggagtgcctggagcacggccggatcgccaagttcagcaaggtgagaaccatcaccacccgaagcaacagcatcaaacaaggcaaggaccagcactttcctgtgttcatgaacgagaaggaggacatcctgtggtgtaccgagatggagagagtgttcgggttcccagtccactacacagatgtcagcaacatgtctagactggccagacagagactgctgggaagaagctggtccgtccctgtgatcagacacctgttcgcccctctgaaggagtacttcgcctgcgtgagcagcggcaacagcaacgccaacagccggggccccagcttctctagcggcctggtgccactgtccctgagagggagccacatgggccccatggagatctacaaaaccgtgagcgcctggaagcggcagcctgtgcgcgtgctgagcctgtttcggaatatcgataaagtcctgaaaagcctgggattcctggagagcggctctggctccggcggtggcaccctgaagtacgtggaggatgtgacaaacgtggtcagacgggatgtggagaagtggggccccttcgatctggtgtacggcagcacccaacccctgggcagctcttgtgaccggtgccctggctggtacatgtttcagttccaccggatcctgcagtacgccctgccgagacaggagtcccagcggccattcttttggattttcatggacaacttgctgctgaccgaggatgaccaggaaactaccactcggttcctgcagaccgaagccgtgaccctgcaggacgtgagaggccgggactaccagaacgccatgcgggtgtggtccaacatccctggactgaaaagcaagcacgcacctctgacccctaaagaagaggagtacctgcaggcccaggtgcggagcagaagcaagctggacgcccctaaggtggatctgctggtgaagaattgcctcctgcccctgagagagtacttcaagtatttcagccagaatagtctgcccctgggaggcagcggcggcggcacccagaggagcatcagcttcaaggacctggccgtggacttcaccagggaggagtggcagaggctgggccccgcccagaggctgctgtacagggacgtgatgctggagaactacagcaacctgatcgccgtgggcctgcacgtgagcaagcccgacgtgatcctgaagctggagcagggcaaggagccctgggtggtggagaacagcagcaggcagaaccacgccgaggacgacgagcccctgggcggcccaagcagcggcgcccctcctcccagcggcggcaggcggcccaagcagcggcgcccctcctcccagcggcggcagcccagccggctccccaacctctaccgaggagggcacctctgagtccgccacccccgagagcggccctggcacctccaccgagcccagcgagggcagcgcacccggcagccctgccggcagccccacctccacagaggagggaaccagcaccgagcccagcgaaggcagcgccccaggcaccagcaccgagcctagtgagcaggagattaaacggatcaacaagatcagaagaagacttgtgaaagacagcaacaccaagaaggccggcaagacaggccccatgaaaaccctgctggttagagtgatgacacccgatctgagagagcggctggaaaacctgagaaagaagcctgaaaatatcccccagcccatcagcaatacatctagagccaacctgaataagctgctgaccgattacaccgaaatgaagaaggcgatcctgcatgtgtactgggaagagttccagaaggaccctgtgggcctgatgagccgggtggcccagcctgccagcaagaagatcgatcagaacaagctgaaacctgagatggacgagaagggcaacctgaccaccgccggctttgcctgctctcagtgtggccagcccctgttcgtgtacaagctggagcaggtgtctgagaagggcaaggcttacaccaactacttcggacggtgcaatgtggccgagcacgaaaagctgatcctgctggcccagctgaagcccgagaaggatagcgacgaagccgtgacatatagcctgggaaagtttgggcagagggccctggatttctacagcattcatgtgaccaaggagtccacccaccccgtgaagcccctggcccagatcgccggaaacagatacgcctccggacctgtgggaaaggccctgagcgacgcatgtatgggcacaatcgcctccttcctgtctaagtaccaggacatcatcatcgaacaccagaaggtggtgaagggcaaccagaagagactggagagcctgcgggagctggccggcaaggaaaacctggaataccctagcgtgaccctgccacctcagcctcacaccaaggagggcgttgatgcctacaacgaagtgatcgcccgggtgcgaatgtgggtgaacctgaacctgtggcagaagctgaagctaagcagagatgatgccaagcctctgctgagactgaagggattcccttcctttcctctggtcgagagacaggccaacgaagtggactggtgggacatggtgtgtaacgtgaagaagctgatcaacgagaaaaaggaggatggcaaggtgttttggcagaatctggctggctacaagagacaggaagccctgagaccatacctgagcagcgaggaagatcggaagaagggaaagaaattcgctcggtaccagctgggcgacctgctgctgcacctggaaaagaagcacggcgaggactggggaaaggtgtacgacgaggcctgggagcggattgacaagaaagtggaaggcctgagcaagcacatcaagctggaagaggaacggagaagcgaggacgcccagagcaaggccgccctgaccgactggctgcgggctaaggccagcttcgtgatcgagggcctgaaggaggccgacaaggacgagttctgcagatgcgagctgaagctgcagaagtggtacggggacctgcggggaaagcccttcgccatcgaagccgagaacagcatcctggacatcagcggcttcagcaagcagtacaactgtgccttcatctggcagaaggacggcgtgaagaagctgaacctgtacctgatcatcaactacttcaagggcggcaagctgcggttcaagaagatcaaacctgaagccttcgaagccaacagattctacaccgtgatcaacaaaaagagcggcgagatcgtgcccatggaggtgaacttcaacttcgacgaccccaacctgatcatcctgcctctggcctttggcaagagacagggcagagaattcatctggaacgacctgctgtccctggaaaccggcagcctgaagctggccaacggaagagtgatcgagaagacactgtacaacagaagaacccggcaggatgagcctgccctgttcgtggccctgaccttcgagcggcgggaggtcctggactcctccaatatcaaaccaatgaacctgatcggcgtggcaagaggcgaaaacatccccgccgtgatcgccctgaccgaccccgagggctgcccactgagccggtttaaggatagcctgggaaacccaacccacatcctgagaatcggcgagagctataaggagaagcagcggaccatccaggccaagaaggaggtggagcagcggagagccggcggctacagccggaagtacgccagcaaagccaagaatctggcagacgatatggtgagaaacaccgctagagatctgctgtactacgccgtgacccaggatgccatgctgatcttcgccaacctgagccggggcttcggccggcagggcaagcggaccttcatggccgagagacagtacacacggatggaggactggctgaccgccaagctggcctacgagggcctgagcaagacctacctgtccaagacactggcccagtacacctccaagacatgcagcaactgtgggtttaccatcaccagcgccgactacgacagggtgctggagaagctgaagaagacagcaacaggctggatgaccacaattaacggcaaggagctgaaggtggagggccagattacctactacaacagatacaagagacagaacgtagtcaaggacctgtccgtcgagctggatagactgagcgaagaatctgtgaacaacgacatctcctcctggacaaagggcagaagcggagaagctctgagcctcctgaagaaaagattctcccatagacccgtgcaggagaagttcgtgtgcctgaactgcggcttcgagacacacgcagccgagcaagccgccctgaacatcgccagatcctggctgttcctgcggagccaggagtacaagaaataccagacaaacaagacaaccggcaacaccgataagagagccttcgtcgagacctggcagtccttttaccggaagaagcttaaggaggtgtggaaacctgccgtgcggtctggcggatctggcggaggctccaccagccccaagaaaaagagaaaagtctaagctgccttctgcggggcttgccttctggccatgcccttcttctctcccttgcacctgtacctcttggtctttgaataaagcctgagtaggaaggctagcaaaaaaaaaaaaaaaaaaaaaaaaaaaaaaaaaaaaaaaaaaaaaaaaaaaaaaaaaaaaaaaaaaaaaaaaaaaaaaaagcccagccggctccccaacctctaccgaggagggcacctctgagtccgccacccccgagagcggccctggcacctccaccgagcccagcgagggcagcgcacccggcagccctgccggcagccccacctccacagaggagggaaccagcaccgagcccagcgaaggcagcgccccaggcaccagcaccgagcctagtgagcaggagattaaacggatcaacaagatcagaagaagacttgtgaaagacagcaacaccaagaaggccggcaagacaggccccatgaaaaccctgctggttagagtgatgacacccgatctgagagagcggctggaaaacctgagaaagaagcctgaaaatatcccccagcccatcagcaatacatctagagccaacctgaataagctgctgaccgattacaccgaaatgaagaaggcgatcctgcatgtgtactgggaagagttccagaaggaccctgtgggcctgatgagccgggtggcccagcctgccagcaagaagatcgatcagaacaagctgaaacctgagatggacgagaagggcaacctgaccaccgccggctttgcctgctctcagtgtggccagcccctgttcgtgtacaagctggagcaggtgtctgagaagggcaaggcttacaccaactacttcggacggtgcaatgtggccgagcacgaaaagctgatcctgctggcccagctgaagcccgagaaggatagcgacgaagccgtgacatatagcctgggaaagtttgggcagagggccctggatttctacagcattcatgtgaccaaggagtccacccaccccgtgaagcccctggcccagatcgccggaaacagatacgcctccggacctgtgggaaaggccctgagcgacgcatgtatgggcacaatcgcctccttcctgtctaagtaccaggacatcatcatcgaacaccagaaggtggtgaagggcaaccagaagagactggagagcctgcgggagctggccggcaaggaaaacctggaataccctagcgtgaccctgccacctcagcctcacaccaaggagggcgttgatgcctacaacgaagtgatcgcccgggtgcgaatgtgggtgaacctgaacctgtggcagaagctgaagctaagcagagatgatgccaagcctctgctgagactgaagggattcccttcctttcctctggtcgagagacaggccaacgaagtggactggtgggacatggtgtgtaacgtgaagaagctgatcaacgagaaaaaggaggatggcaaggtgttttggcagaatctggctggctacaagagacaggaagccctgagaccatacctgagcagcgaggaagatcggaagaagggaaagaaattcgctcggtaccagctgggcgacctgctgctgcacctggaaaagaagcacggcgaggactggggaaaggtgtacgacgaggcctgggagcggattgacaagaaagtggaaggcctgagcaagcacatcaagctggaagaggaacggagaagcgaggacgcccagagcaaggccgccctgaccgactggctgcgggctaaggccagcttcgtgatcgagggcctgaaggaggccgacaaggacgagttctgcagatgcgagctgaagctgcagaagtggtacggggacctgcggggaaagcccttcgccatcgaagccgagaacagcatcctggacatcagcggcttcagcaagcagtacaactgtgccttcatctggcagaaggacggcgtgaagaagctgaacctgtacctgatcatcaactacttcaagggcggcaagctgcggttcaagaagatcaaacctgaagccttcgaagccaacagattctacaccgtgatcaacaaaaagagcggcgagatcgtgcccatggaggtgaacttcaacttcgacgaccccaacctgatcatcctgcctctggcctttggcaagagacagggcagagaattcatctggaacgacctgctgtccctggaaaccggcagcctgaagctggccaacggaagagtgatcgagaagacactgtacaacagaagaacccggcaggatgagcctgccctgttcgtggccctgaccttcgagcggcgggaggtcctggactcctccaatatcaaaccaatgaacctgatcggcgtggcaagaggcgaaaacatccccgccgtgatcgccctgaccgaccccgagggctgcccactgagccggtttaaggatagcctgggaaacccaacccacatcctgagaatcggcgagagctataaggagaagcagcggaccatccaggccaagaaggaggtggagcagcggagagccggcggctacagccggaagtacgccagcaaagccaagaatctggcagacgatatggtgagaaacaccgctagagatctgctgtactacgccgtgacccaggatgccatgctgatcttcgccaacctgagccggggcttcggccggcagggcaagcggaccttcatggccgagagacagtacacacggatggaggactggctgaccgccaagctggcctacgagggcctgagcaagacctacctgtccaagacactggcccagtacacctccaagacatgcagcaactgtgggtttaccatcaccagcgccgactacgacagggtgctggagaagctgaagaagacagcaacaggctggatgaccacaattaacggcaaggagctgaaggtggagggccagattacctactacaacagatacaagagacagaacgtagtcaaggacctgtccgtcgagctggatagactgagcgaagaatctgtgaacaacgacatctcctcctggacaaagggcagaagcggagaagctctgagcctcctgaagaaaagattctcccatagacccgtgcaggagaagttcgtgtgcctgaactgcggcttcgagacacacgcagccgagcaagccgccctgaacatcgccagatcctggctgttcctgcggagccaggagtacaagaaataccagacaaacaagacaaccggcaacaccgataagagagccttcgtcgagacctggcagtccttttaccggaagaagcttaaggaggtgtggaaacctgccgtgcggtctggcggatctggcggaggctccaccagccccaagaaaaagagaaaagtctaagctgccttctgcggggcttgccttctggccatgcccttcttctctcccttgcacctgtacctcttggtctttgaataaagcctgagtaggaaggctagcaaaaaaaaaaaaaaaaaaaaaaaaaaaaaaaaaaaaaaaaaaaaaaaaaaaaaaaaaaaaaaaaaaaaaaaaaaaaaaaa

SEQ ID NO: 9392 - RNA, 8787 nt, synthetic construct
  source 1..8787: mol_type = other RNA
aggaaataagagagaaaagaagagtaagaagaaatataagagccaccatggcccctaagaagaagcgtaaagtgagccggatgaaccacgaccaggagttcgacccccctaaggtgtaccctcccgtccccgccgagaagagaaagcccatccgggtcctgagcctgttcgatggcatcgccaccggtctgctggtgctgaaggacctgggcatccaggtggataggtacattgcctccgaggtgtgcgaggactccatcaccgtgggaatggtgcgtcatcagggcaagatcatgtacgtgggcgacgtgcggagcgtgacacagaagcatatccaggagtggggccctttcgacctggtgatcggcggcagcccttgcaatgacctgagcatcgtgaacccagcccggaagggcctgtacgagggaaccggcagactgttcttcgagttttacagactgctgcacgacgcccggcctaaggaaggcgacgaccggcccttcttttggctgttcgagaatgtggtggccatgggagtcagcgacaagcgggatattagccggttcctggagagcaaccccgtgatgatcgatgccaaggaagtgagcgccgcccaccgggccagatacttctggggcaatctgcctggcatgaacagacccctggccagcaccgtgaacgacaagctggagctgcaggagtgcctggagcacggccggatcgccaagttcagcaaggtgagaaccatcaccacccgaagcaacagcatcaaacaaggcaaggaccagcactttcctgtgttcatgaacgagaaggaggacatcctgtggtgtaccgagatggagagagtgttcgggttcccagtccactacacagatgtcagcaacatgtctagactggccagacagagactgctgggaagaagctggtccgtccctgtgatcagacacctgttcgcccctctgaaggagtacttcgcctgcgtgagcagcggcaacagcaacgccaacagccggggccccagcttctctagcggcctggtgccactgtccctgagagggagccacatgggccccatggagatctacaaaaccgtgagcgcctggaagcggcagcctgtgcgcgtgctgagcctgtttcggaatatcgataaagtcctgaaaagcctgggattcctggagagcggctctggctccggcggtggcaccctgaagtacgtggaggatgtgacaaacgtggtcagacgggatgtggagaagtggggccccttcgatctggtgtacggcagcacccaacccctgggcagctcttgtgaccggtgccctggctggtacatgtttcagttccaccggatcctgcagtacgccctgccgagacaggagtcccagcggccattcttttggattttcatggacaacttgctgctgaccgaggatgaccaggaaactaccactcggttcctgcagaccgaagccgtgaccctgcaggacgtgagaggccgggactaccagaacgccatgcgggtgtggtccaacatccctggactgaaaagcaagcacgcacctctgacccctaaagaagaggagtacctgcaggcccaggtgcggagcagaagcaagctggacgcccctaaggtggatctgctggtgaagaattgcctcctgcccctgagagagtacttcaagtatttcagccagaatagtctgcccctgggaggcagcggcggcggcatggacagcgtgaccatcgaggacgtggccgtggacttcaccctggaggagtgggccctgctgggccccagccagaggaagctgtacagggacgtgatgcaggagaccctgaggaacctggccgccgtgggcgccaagagggagtaccacgacatcgaggaccagtacaagaaccagggcaggaagctgaggaccttcatggtggagaggctgtgcaagagcaaggacatcagcctgtgcggcggcggcccaagcagcggcgcccctcctcccagcggcggcaggcggcccaagcagcggcgcccctcctcccagcggcggcagcccagccggctccccaacctctaccgaggagggcacctctgagtccgccacccccgagagcggccctggcacctccaccgagcccagcgagggcagcgcacccggcagccctgccggcagccccacctccacagaggagggaaccagcaccgagcccagcgaaggcagcgccccaggcaccagcaccgagcctagtgagcaggagattaaacggatcaacaagatcagaagaagacttgtgaaagacagcaacaccaagaaggccggcaagacaggccccatgaaaaccctgctggttagagtgatgacacccgatctgagagagcggctggaaaacctgagaaagaagcctgaaaatatcccccagcccatcagcaatacatctagagccaacctgaataagctgctgaccgattacaccgaaatgaagaaggcgatcctgcatgtgtactgggaagagttccagaaggaccctgtgggcctgatgagccgggtggcccagcctgccagcaagaagatcgatcagaacaagctgaaacctgagatggacgagaagggcaacctgaccaccgccggctttgcctgctctcagtgtggccagcccctgttcgtgtacaagctggagcaggtgtctgagaagggcaaggcttacaccaactacttcggacggtgcaatgtggccgagcacgaaaagctgatcctgctggcccagctgaagcccgagaaggatagcgacgaagccgtgacatatagcctgggaaagtttgggcagagggccctggatttctacagcattcatgtgaccaaggagtccacccaccccgtgaagcccctggcccagatcgccggaaacagatacgcctccggacctgtgggaaaggccctgagcgacgcatgtatgggcacaatcgcctccttcctgtctaagtaccaggacatcatcatcgaacaccagaaggtggtgaagggcaaccagaagagactggagagcctgcgggagctggccggcaaggaaaacctggaataccctagcgtgaccctgccacctcagcctcacaccaaggagggcgttgatgcctacaacgaagtgatcgcccgggtgcgaatgtgggtgaacctgaacctgtggcagaagctgaagctaagcagagatgatgccaagcctctgctgagactgaagggattcccttcctttcctctggtcgagagacaggccaacgaagtggactggtgggacatggtgtgtaacgtgaagaagctgatcaacgagaaaaaggaggatggcaaggtgttttggcagaatctggctggctacaagagacaggaagccctgagaccatacctgagcagcgaggaagatcggaagaagggaaagaaattcgctcggtaccagctgggcgacctgctgctgcacctggaaaagaagcacggcgaggactggggaaaggtgtacgacgaggcctgggagcggattgacaagaaagtggaaggcctgagcaagcacatcaagctggaagaggaacggagaagcgaggacgcccagagcaaggccgccctgaccgactggctgcgggctaaggccagcttcgtgatcgagggcctgaaggaggccgacaaggacgagttctgcagatgcgagctgaagctgcagaagtggtacggggacctgcggggaaagcccttcgccatcgaagccgagaacagcatcctggacatcagcggcttcagcaagcagtacaactgtgccttcatctggcagaaggacggcgtgaagaagctgaacctgtacctgatcatcaactacttcaagggcggcaagctgcggttcaagaagatcaaacctgaagccttcgaagccaacagattctacaccgtgatcaacaaaaagagcggcgagatcgtgcccatggaggtgaacttcaacttcgacgaccccaacctgatcatcctgcctctggcctttggcaagagacagggcagagaattcatctggaacgacctgctgtccctggaaaccggcagcctgaagctggccaacggaagagtgatcgagaagacactgtacaacagaagaacccggcaggatgagcctgccctgttcgtggccctgaccttcgagcggcgggaggtcctggactcctccaatatcaaaccaatgaacctgatcggcgtggcaagaggcgaaaacatccccgccgtgatcgccctgaccgaccccgagggctgcccactgagccggtttaaggatagcctgggaaacccaacccacatcctgagaatcggcgagagctataaggagaagcagcggaccatccaggccaagaaggaggtggagcagcggagagccggcggctacagccggaagtacgccagcaaagccaagaatctggcagacgatatggtgagaaacaccgctagagatctgctgtactacgccgtgacccaggatgccatgctgatcttcgccaacctgagccggggcttcggccggcagggcaagcggaccttcatggccgagagacagtacacacggatggaggactggctgaccgccaagctggcctacgagggcctgagcaagacctacctgtccaagacactggcccagtacacctccaagacatgcagcaactgtgggtttaccatcaccagcgccgactacgacagggtgctggagaagctgaagaagacagcaacaggctggatgaccacaattaacggcaaggagctgaaggtggagggccagattacctactacaacagatacaagagacagaacgtagtcaaggacctgtccgtcgagctggatagactgagcgaagaatctgtgaacaacgacatctcctcctggacaaagggcagaagcggagaagctctgagcctcctgaagaaaagattctcccatagacccgtgcaggagaagttcgtgtgcctgaactgcggcttcgagacacacgcagccgagcaagccgccctgaacatcgccagatcctggctgttcctgcggagccaggagtacaagaaataccagacaaacaagacaaccggcaacaccgataagagagccttcgtcgagacctggcagtccttttaccggaagaagcttaaggaggtgtggaaacctgccgtgcggtctggcggatctggcggaggctccaccagccccaagaaaaagagaaaagtctaagctgccttctgcggggcttgccttctggccatgcccttcttctctcccttgcacctgtacctcttggtctttgaataaagcctgagtaggaaggctagcaaaaaaaaaaaaaaaaaaaaaaaaaaaaaaaaaaaaaaaaaaaaaaaaaaaaaaaaaaaaaaaaaaaaaaaaaaaaaaaagcccagccggctccccaacctctaccgaggagggcacctctgagtccgccacccccgagagcggccctggcacctccaccgagcccagcgagggcagcgcacccggcagccctgccggcagccccacctccacagaggagggaaccagcaccgagcccagcgaaggcagcgccccaggcaccagcaccgagcctagtgagcaggagattaaacggatcaacaagatcagaagaagacttgtgaaagacagcaacaccaagaaggccggcaagacaggccccatgaaaaccctgctggttagagtgatgacacccgatctgagagagcggctggaaaacctgagaaagaagcctgaaaatatcccccagcccatcagcaatacatctagagccaacctgaataagctgctgaccgattacaccgaaatgaagaaggcgatcctgcatgtgtactgggaagagttccagaaggaccctgtgggcctgatgagccgggtggcccagcctgccagcaagaagatcgatcagaacaagctgaaacctgagatggacgagaagggcaacctgaccaccgccggctttgcctgctctcagtgtggccagcccctgttcgtgtacaagctggagcaggtgtctgagaagggcaaggcttacaccaactacttcggacggtgcaatgtggccgagcacgaaaagctgatcctgctggcccagctgaagcccgagaaggatagcgacgaagccgtgacatatagcctgggaaagtttgggcagagggccctggatttctacagcattcatgtgaccaaggagtccacccaccccgtgaagcccctggcccagatcgccggaaacagatacgcctccggacctgtgggaaaggccctgagcgacgcatgtatgggcacaatcgcctccttcctgtctaagtaccaggacatcatcatcgaacaccagaaggtggtgaagggcaaccagaagagactggagagcctgcgggagctggccggcaaggaaaacctggaataccctagcgtgaccctgccacctcagcctcacaccaaggagggcgttgatgcctacaacgaagtgatcgcccgggtgcgaatgtgggtgaacctgaacctgtggcagaagctgaagctaagcagagatgatgccaagcctctgctgagactgaagggattcccttcctttcctctggtcgagagacaggccaacgaagtggactggtgggacatggtgtgtaacgtgaagaagctgatcaacgagaaaaaggaggatggcaaggtgttttggcagaatctggctggctacaagagacaggaagccctgagaccatacctgagcagcgaggaagatcggaagaagggaaagaaattcgctcggtaccagctgggcgacctgctgctgcacctggaaaagaagcacggcgaggactggggaaaggtgtacgacgaggcctgggagcggattgacaagaaagtggaaggcctgagcaagcacatcaagctggaagaggaacggagaagcgaggacgcccagagcaaggccgccctgaccgactggctgcgggctaaggccagcttcgtgatcgagggcctgaaggaggccgacaaggacgagttctgcagatgcgagctgaagctgcagaagtggtacggggacctgcggggaaagcccttcgccatcgaagccgagaacagcatcctggacatcagcggcttcagcaagcagtacaactgtgccttcatctggcagaaggacggcgtgaagaagctgaacctgtacctgatcatcaactacttcaagggcggcaagctgcggttcaagaagatcaaacctgaagccttcgaagccaacagattctacaccgtgatcaacaaaaagagcggcgagatcgtgcccatggaggtgaacttcaacttcgacgaccccaacctgatcatcctgcctctggcctttggcaagagacagggcagagaattcatctggaacgacctgctgtccctggaaaccggcagcctgaagctggccaacggaagagtgatcgagaagacactgtacaacagaagaacccggcaggatgagcctgccctgttcgtggccctgaccttcgagcggcgggaggtcctggactcctccaatatcaaaccaatgaacctgatcggcgtggcaagaggcgaaaacatccccgccgtgatcgccctgaccgaccccgagggctgcccactgagccggtttaaggatagcctgggaaacccaacccacatcctgagaatcggcgagagctataaggagaagcagcggaccatccaggccaagaaggaggtggagcagcggagagccggcggctacagccggaagtacgccagcaaagccaagaatctggcagacgatatggtgagaaacaccgctagagatctgctgtactacgccgtgacccaggatgccatgctgatcttcgccaacctgagccggggcttcggccggcagggcaagcggaccttcatggccgagagacagtacacacggatggaggactggctgaccgccaagctggcctacgagggcctgagcaagacctacctgtccaagacactggcccagtacacctccaagacatgcagcaactgtgggtttaccatcaccagcgccgactacgacagggtgctggagaagctgaagaagacagcaacaggctggatgaccacaattaacggcaaggagctgaaggtggagggccagattacctactacaacagatacaagagacagaacgtagtcaaggacctgtccgtcgagctggatagactgagcgaagaatctgtgaacaacgacatctcctcctggacaaagggcagaagcggagaagctctgagcctcctgaagaaaagattctcccatagacccgtgcaggagaagttcgtgtgcctgaactgcggcttcgagacacacgcagccgagcaagccgccctgaacatcgccagatcctggctgttcctgcggagccaggagtacaagaaataccagacaaacaagacaaccggcaacaccgataagagagccttcgtcgagacctggcagtccttttaccggaagaagcttaaggaggtgtggaaacctgccgtgcggtctggcggatctggcggaggctccaccagccccaagaaaaagagaaaagtctaagctgccttctgcggggcttgccttctggccatgcccttcttctctcccttgcacctgtacctcttggtctttgaataaagcctgagtaggaaggctagcaaaaaaaaaaaaaaaaaaaaaaaaaaaaaaaaaaaaaaaaaaaaaaaaaaaaaaaaaaaaaaaaaaaaaaaaaaaaaaaa

SEQ ID NO: 9393 - RNA, 8787 nt, synthetic construct
  source 1..8787: mol_type = other RNA
aggaaataagagagaaaagaagagtaagaagaaatataagagccaccatggcccctaagaagaagcgtaaagtgagccggatgaaccacgaccaggagttcgacccccctaaggtgtaccctcccgtccccgccgagaagagaaagcccatccgggtcctgagcctgttcgatggcatcgccaccggtctgctggtgctgaaggacctgggcatccaggtggataggtacattgcctccgaggtgtgcgaggactccatcaccgtgggaatggtgcgtcatcagggcaagatcatgtacgtgggcgacgtgcggagcgtgacacagaagcatatccaggagtggggccctttcgacctggtgatcggcggcagcccttgcaatgacctgagcatcgtgaacccagcccggaagggcctgtacgagggaaccggcagactgttcttcgagttttacagactgctgcacgacgcccggcctaaggaaggcgacgaccggcccttcttttggctgttcgagaatgtggtggccatgggagtcagcgacaagcgggatattagccggttcctggagagcaaccccgtgatgatcgatgccaaggaagtgagcgccgcccaccgggccagatacttctggggcaatctgcctggcatgaacagacccctggccagcaccgtgaacgacaagctggagctgcaggagtgcctggagcacggccggatcgccaagttcagcaaggtgagaaccatcaccacccgaagcaacagcatcaaacaaggcaaggaccagcactttcctgtgttcatgaacgagaaggaggacatcctgtggtgtaccgagatggagagagtgttcgggttcccagtccactacacagatgtcagcaacatgtctagactggccagacagagactgctgggaagaagctggtccgtccctgtgatcagacacctgttcgcccctctgaaggagtacttcgcctgcgtgagcagcggcaacagcaacgccaacagccggggccccagcttctctagcggcctggtgccactgtccctgagagggagccacatgggccccatggagatctacaaaaccgtgagcgcctggaagcggcagcctgtgcgcgtgctgagcctgtttcggaatatcgataaagtcctgaaaagcctgggattcctggagagcggctctggctccggcggtggcaccctgaagtacgtggaggatgtgacaaacgtggtcagacgggatgtggagaagtggggccccttcgatctggtgtacggcagcacccaacccctgggcagctcttgtgaccggtgccctggctggtacatgtttcagttccaccggatcctgcagtacgccctgccgagacaggagtcccagcggccattcttttggattttcatggacaacttgctgctgaccgaggatgaccaggaaactaccactcggttcctgcagaccgaagccgtgaccctgcaggacgtgagaggccgggactaccagaacgccatgcgggtgtggtccaacatccctggactgaaaagcaagcacgcacctctgacccctaaagaagaggagtacctgcaggcccaggtgcggagcagaagcaagctggacgcccctaaggtggatctgctggtgaagaattgcctcctgcccctgagagagtacttcaagtatttcagccagaatagtctgcccctgggaggcagcggcggcggcctgcagggcagcgtgagcttcaaggacgtgaccgtggacttcacccaggaggagtggcagcagctggaccccgcccagaaggccctgtacagggacgtgatgctggagaactactgccacttcgtgagcgtgggcttccacatgaccaagcccgacatgatcaggaggctggagcagggcgaggagctgtggaccgagaggatcttccccggccagagctacctggaggaggacggcaaggccggcggcccaagcagcggcgcccctcctcccagcggcggcaggcggcccaagcagcggcgcccctcctcccagcggcggcagcccagccggctccccaacctctaccgaggagggcacctctgagtccgccacccccgagagcggccctggcacctccaccgagcccagcgagggcagcgcacccggcagccctgccggcagccccacctccacagaggagggaaccagcaccgagcccagcgaaggcagcgccccaggcaccagcaccgagcctagtgagcaggagattaaacggatcaacaagatcagaagaagacttgtgaaagacagcaacaccaagaaggccggcaagacaggccccatgaaaaccctgctggttagagtgatgacacccgatctgagagagcggctggaaaacctgagaaagaagcctgaaaatatcccccagcccatcagcaatacatctagagccaacctgaataagctgctgaccgattacaccgaaatgaagaaggcgatcctgcatgtgtactgggaagagttccagaaggaccctgtgggcctgatgagccgggtggcccagcctgccagcaagaagatcgatcagaacaagctgaaacctgagatggacgagaagggcaacctgaccaccgccggctttgcctgctctcagtgtggccagcccctgttcgtgtacaagctggagcaggtgtctgagaagggcaaggcttacaccaactacttcggacggtgcaatgtggccgagcacgaaaagctgatcctgctggcccagctgaagcccgagaaggatagcgacgaagccgtgacatatagcctgggaaagtttgggcagagggccctggatttctacagcattcatgtgaccaaggagtccacccaccccgtgaagcccctggcccagatcgccggaaacagatacgcctccggacctgtgggaaaggccctgagcgacgcatgtatgggcacaatcgcctccttcctgtctaagtaccaggacatcatcatcgaacaccagaaggtggtgaagggcaaccagaagagactggagagcctgcgggagctggccggcaaggaaaacctggaataccctagcgtgaccctgccacctcagcctcacaccaaggagggcgttgatgcctacaacgaagtgatcgcccgggtgcgaatgtgggtgaacctgaacctgtggcagaagctgaagctaagcagagatgatgccaagcctctgctgagactgaagggattcccttcctttcctctggtcgagagacaggccaacgaagtggactggtgggacatggtgtgtaacgtgaagaagctgatcaacgagaaaaaggaggatggcaaggtgttttggcagaatctggctggctacaagagacaggaagccctgagaccatacctgagcagcgaggaagatcggaagaagggaaagaaattcgctcggtaccagctgggcgacctgctgctgcacctggaaaagaagcacggcgaggactggggaaaggtgtacgacgaggcctgggagcggattgacaagaaagtggaaggcctgagcaagcacatcaagctggaagaggaacggagaagcgaggacgcccagagcaaggccgccctgaccgactggctgcgggctaaggccagcttcgtgatcgagggcctgaaggaggccgacaaggacgagttctgcagatgcgagctgaagctgcagaagtggtacggggacctgcggggaaagcccttcgccatcgaagccgagaacagcatcctggacatcagcggcttcagcaagcagtacaactgtgccttcatctggcagaaggacggcgtgaagaagctgaacctgtacctgatcatcaactacttcaagggcggcaagctgcggttcaagaagatcaaacctgaagccttcgaagccaacagattctacaccgtgatcaacaaaaagagcggcgagatcgtgcccatggaggtgaacttcaacttcgacgaccccaacctgatcatcctgcctctggcctttggcaagagacagggcagagaattcatctggaacgacctgctgtccctggaaaccggcagcctgaagctggccaacggaagagtgatcgagaagacactgtacaacagaagaacccggcaggatgagcctgccctgttcgtggccctgaccttcgagcggcgggaggtcctggactcctccaatatcaaaccaatgaacctgatcggcgtggcaagaggcgaaaacatccccgccgtgatcgccctgaccgaccccgagggctgcccactgagccggtttaaggatagcctgggaaacccaacccacatcctgagaatcggcgagagctataaggagaagcagcggaccatccaggccaagaaggaggtggagcagcggagagccggcggctacagccggaagtacgccagcaaagccaagaatctggcagacgatatggtgagaaacaccgctagagatctgctgtactacgccgtgacccaggatgccatgctgatcttcgccaacctgagccggggcttcggccggcagggcaagcggaccttcatggccgagagacagtacacacggatggaggactggctgaccgccaagctggcctacgagggcctgagcaagacctacctgtccaagacactggcccagtacacctccaagacatgcagcaactgtgggtttaccatcaccagcgccgactacgacagggtgctggagaagctgaagaagacagcaacaggctggatgaccacaattaacggcaaggagctgaaggtggagggccagattacctactacaacagatacaagagacagaacgtagtcaaggacctgtccgtcgagctggatagactgagcgaagaatctgtgaacaacgacatctcctcctggacaaagggcagaagcggagaagctctgagcctcctgaagaaaagattctcccatagacccgtgcaggagaagttcgtgtgcctgaactgcggcttcgagacacacgcagccgagcaagccgccctgaacatcgccagatcctggctgttcctgcggagccaggagtacaagaaataccagacaaacaagacaaccggcaacaccgataagagagccttcgtcgagacctggcagtccttttaccggaagaagcttaaggaggtgtggaaacctgccgtgcggtctggcggatctggcggaggctccaccagccccaagaaaaagagaaaagtctaagctgccttctgcggggcttgccttctggccatgcccttcttctctcccttgcacctgtacctcttggtctttgaataaagcctgagtaggaaggctagcaaaaaaaaaaaaaaaaaaaaaaaaaaaaaaaaaaaaaaaaaaaaaaaaaaaaaaaaaaaaaaaaaaaaaaaaaaaaaaaagcccagccggctccccaacctctaccgaggagggcacctctgagtccgccacccccgagagcggccctggcacctccaccgagcccagcgagggcagcgcacccggcagccctgccggcagccccacctccacagaggagggaaccagcaccgagcccagcgaaggcagcgccccaggcaccagcaccgagcctagtgagcaggagattaaacggatcaacaagatcagaagaagacttgtgaaagacagcaacaccaagaaggccggcaagacaggccccatgaaaaccctgctggttagagtgatgacacccgatctgagagagcggctggaaaacctgagaaagaagcctgaaaatatcccccagcccatcagcaatacatctagagccaacctgaataagctgctgaccgattacaccgaaatgaagaaggcgatcctgcatgtgtactgggaagagttccagaaggaccctgtgggcctgatgagccgggtggcccagcctgccagcaagaagatcgatcagaacaagctgaaacctgagatggacgagaagggcaacctgaccaccgccggctttgcctgctctcagtgtggccagcccctgttcgtgtacaagctggagcaggtgtctgagaagggcaaggcttacaccaactacttcggacggtgcaatgtggccgagcacgaaaagctgatcctgctggcccagctgaagcccgagaaggatagcgacgaagccgtgacatatagcctgggaaagtttgggcagagggccctggatttctacagcattcatgtgaccaaggagtccacccaccccgtgaagcccctggcccagatcgccggaaacagatacgcctccggacctgtgggaaaggccctgagcgacgcatgtatgggcacaatcgcctccttcctgtctaagtaccaggacatcatcatcgaacaccagaaggtggtgaagggcaaccagaagagactggagagcctgcgggagctggccggcaaggaaaacctggaataccctagcgtgaccctgccacctcagcctcacaccaaggagggcgttgatgcctacaacgaagtgatcgcccgggtgcgaatgtgggtgaacctgaacctgtggcagaagctgaagctaagcagagatgatgccaagcctctgctgagactgaagggattcccttcctttcctctggtcgagagacaggccaacgaagtggactggtgggacatggtgtgtaacgtgaagaagctgatcaacgagaaaaaggaggatggcaaggtgttttggcagaatctggctggctacaagagacaggaagccctgagaccatacctgagcagcgaggaagatcggaagaagggaaagaaattcgctcggtaccagctgggcgacctgctgctgcacctggaaaagaagcacggcgaggactggggaaaggtgtacgacgaggcctgggagcggattgacaagaaagtggaaggcctgagcaagcacatcaagctggaagaggaacggagaagcgaggacgcccagagcaaggccgccctgaccgactggctgcgggctaaggccagcttcgtgatcgagggcctgaaggaggccgacaaggacgagttctgcagatgcgagctgaagctgcagaagtggtacggggacctgcggggaaagcccttcgccatcgaagccgagaacagcatcctggacatcagcggcttcagcaagcagtacaactgtgccttcatctggcagaaggacggcgtgaagaagctgaacctgtacctgatcatcaactacttcaagggcggcaagctgcggttcaagaagatcaaacctgaagccttcgaagccaacagattctacaccgtgatcaacaaaaagagcggcgagatcgtgcccatggaggtgaacttcaacttcgacgaccccaacctgatcatcctgcctctggcctttggcaagagacagggcagagaattcatctggaacgacctgctgtccctggaaaccggcagcctgaagctggccaacggaagagtgatcgagaagacactgtacaacagaagaacccggcaggatgagcctgccctgttcgtggccctgaccttcgagcggcgggaggtcctggactcctccaatatcaaaccaatgaacctgatcggcgtggcaagaggcgaaaacatccccgccgtgatcgccctgaccgaccccgagggctgcccactgagccggtttaaggatagcctgggaaacccaacccacatcctgagaatcggcgagagctataaggagaagcagcggaccatccaggccaagaaggaggtggagcagcggagagccggcggctacagccggaagtacgccagcaaagccaagaatctggcagacgatatggtgagaaacaccgctagagatctgctgtactacgccgtgacccaggatgccatgctgatcttcgccaacctgagccggggcttcggccggcagggcaagcggaccttcatggccgagagacagtacacacggatggaggactggctgaccgccaagctggcctacgagggcctgagcaagacctacctgtccaagacactggcccagtacacctccaagacatgcagcaactgtgggtttaccatcaccagcgccgactacgacagggtgctggagaagctgaagaagacagcaacaggctggatgaccacaattaacggcaaggagctgaaggtggagggccagattacctactacaacagatacaagagacagaacgtagtcaaggacctgtccgtcgagctggatagactgagcgaagaatctgtgaacaacgacatctcctcctggacaaagggcagaagcggagaagctctgagcctcctgaagaaaagattctcccatagacccgtgcaggagaagttcgtgtgcctgaactgcggcttcgagacacacgcagccgagcaagccgccctgaacatcgccagatcctggctgttcctgcggagccaggagtacaagaaataccagacaaacaagacaaccggcaacaccgataagagagccttcgtcgagacctggcagtccttttaccggaagaagcttaaggaggtgtggaaacctgccgtgcggtctggcggatctggcggaggctccaccagccccaagaaaaagagaaaagtctaagctgccttctgcggggcttgccttctggccatgcccttcttctctcccttgcacctgtacctcttggtctttgaataaagcctgagtaggaaggctagcaaaaaaaaaaaaaaaaaaaaaaaaaaaaaaaaaaaaaaaaaaaaaaaaaaaaaaaaaaaaaaaaaaaaaaaaaaaaaaaa

SEQ ID NO: 9394 - RNA, 8787 nt, synthetic construct
  source 1..8787: mol_type = other RNA
aggaaataagagagaaaagaagagtaagaagaaatataagagccaccatggcccctaagaagaagcgtaaagtgagccggatgaaccacgaccaggagttcgacccccctaaggtgtaccctcccgtccccgccgagaagagaaagcccatccgggtcctgagcctgttcgatggcatcgccaccggtctgctggtgctgaaggacctgggcatccaggtggataggtacattgcctccgaggtgtgcgaggactccatcaccgtgggaatggtgcgtcatcagggcaagatcatgtacgtgggcgacgtgcggagcgtgacacagaagcatatccaggagtggggccctttcgacctggtgatcggcggcagcccttgcaatgacctgagcatcgtgaacccagcccggaagggcctgtacgagggaaccggcagactgttcttcgagttttacagactgctgcacgacgcccggcctaaggaaggcgacgaccggcccttcttttggctgttcgagaatgtggtggccatgggagtcagcgacaagcgggatattagccggttcctggagagcaaccccgtgatgatcgatgccaaggaagtgagcgccgcccaccgggccagatacttctggggcaatctgcctggcatgaacagacccctggccagcaccgtgaacgacaagctggagctgcaggagtgcctggagcacggccggatcgccaagttcagcaaggtgagaaccatcaccacccgaagcaacagcatcaaacaaggcaaggaccagcactttcctgtgttcatgaacgagaaggaggacatcctgtggtgtaccgagatggagagagtgttcgggttcccagtccactacacagatgtcagcaacatgtctagactggccagacagagactgctgggaagaagctggtccgtccctgtgatcagacacctgttcgcccctctgaaggagtacttcgcctgcgtgagcagcggcaacagcaacgccaacagccggggccccagcttctctagcggcctggtgccactgtccctgagagggagccacatgggccccatggagatctacaaaaccgtgagcgcctggaagcggcagcctgtgcgcgtgctgagcctgtttcggaatatcgataaagtcctgaaaagcctgggattcctggagagcggctctggctccggcggtggcaccctgaagtacgtggaggatgtgacaaacgtggtcagacgggatgtggagaagtggggccccttcgatctggtgtacggcagcacccaacccctgggcagctcttgtgaccggtgccctggctggtacatgtttcagttccaccggatcctgcagtacgccctgccgagacaggagtcccagcggccattcttttggattttcatggacaacttgctgctgaccgaggatgaccaggaaactaccactcggttcctgcagaccgaagccgtgaccctgcaggacgtgagaggccgggactaccagaacgccatgcgggtgtggtccaacatccctggactgaaaagcaagcacgcacctctgacccctaaagaagaggagtacctgcaggcccaggtgcggagcagaagcaagctggacgcccctaaggtggatctgctggtgaagaattgcctcctgcccctgagagagtacttcaagtatttcagccagaatagtctgcccctgggaggcagcggcggcggctgcaaggagagcgtgatcttcaaggacgtgtgcgtgaacttcagcctggaggagtgggagtgcctggacctgacccagaggaacctgtacaggtgcgtgatgctggagaactacagcaacctggtgagcgtgggcctgagcatccccaagcccgacgtgatcagcctgctggagcagggcaaggagccctggggcgtgttcgacagcgagatgaccaggggcctgaaccaggactgcggcagcggcggcccaagcagcggcgcccctcctcccagcggcggcaggcggcccaagcagcggcgcccctcctcccagcggcggcagcccagccggctccccaacctctaccgaggagggcacctctgagtccgccacccccgagagcggccctggcacctccaccgagcccagcgagggcagcgcacccggcagccctgccggcagccccacctccacagaggagggaaccagcaccgagcccagcgaaggcagcgccccaggcaccagcaccgagcctagtgagcaggagattaaacggatcaacaagatcagaagaagacttgtgaaagacagcaacaccaagaaggccggcaagacaggccccatgaaaaccctgctggttagagtgatgacacccgatctgagagagcggctggaaaacctgagaaagaagcctgaaaatatcccccagcccatcagcaatacatctagagccaacctgaataagctgctgaccgattacaccgaaatgaagaaggcgatcctgcatgtgtactgggaagagttccagaaggaccctgtgggcctgatgagccgggtggcccagcctgccagcaagaagatcgatcagaacaagctgaaacctgagatggacgagaagggcaacctgaccaccgccggctttgcctgctctcagtgtggccagcccctgttcgtgtacaagctggagcaggtgtctgagaagggcaaggcttacaccaactacttcggacggtgcaatgtggccgagcacgaaaagctgatcctgctggcccagctgaagcccgagaaggatagcgacgaagccgtgacatatagcctgggaaagtttgggcagagggccctggatttctacagcattcatgtgaccaaggagtccacccaccccgtgaagcccctggcccagatcgccggaaacagatacgcctccggacctgtgggaaaggccctgagcgacgcatgtatgggcacaatcgcctccttcctgtctaagtaccaggacatcatcatcgaacaccagaaggtggtgaagggcaaccagaagagactggagagcctgcgggagctggccggcaaggaaaacctggaataccctagcgtgaccctgccacctcagcctcacaccaaggagggcgttgatgcctacaacgaagtgatcgcccgggtgcgaatgtgggtgaacctgaacctgtggcagaagctgaagctaagcagagatgatgccaagcctctgctgagactgaagggattcccttcctttcctctggtcgagagacaggccaacgaagtggactggtgggacatggtgtgtaacgtgaagaagctgatcaacgagaaaaaggaggatggcaaggtgttttggcagaatctggctggctacaagagacaggaagccctgagaccatacctgagcagcgaggaagatcggaagaagggaaagaaattcgctcggtaccagctgggcgacctgctgctgcacctggaaaagaagcacggcgaggactggggaaaggtgtacgacgaggcctgggagcggattgacaagaaagtggaaggcctgagcaagcacatcaagctggaagaggaacggagaagcgaggacgcccagagcaaggccgccctgaccgactggctgcgggctaaggccagcttcgtgatcgagggcctgaaggaggccgacaaggacgagttctgcagatgcgagctgaagctgcagaagtggtacggggacctgcggggaaagcccttcgccatcgaagccgagaacagcatcctggacatcagcggcttcagcaagcagtacaactgtgccttcatctggcagaaggacggcgtgaagaagctgaacctgtacctgatcatcaactacttcaagggcggcaagctgcggttcaagaagatcaaacctgaagccttcgaagccaacagattctacaccgtgatcaacaaaaagagcggcgagatcgtgcccatggaggtgaacttcaacttcgacgaccccaacctgatcatcctgcctctggcctttggcaagagacagggcagagaattcatctggaacgacctgctgtccctggaaaccggcagcctgaagctggccaacggaagagtgatcgagaagacactgtacaacagaagaacccggcaggatgagcctgccctgttcgtggccctgaccttcgagcggcgggaggtcctggactcctccaatatcaaaccaatgaacctgatcggcgtggcaagaggcgaaaacatccccgccgtgatcgccctgaccgaccccgagggctgcccactgagccggtttaaggatagcctgggaaacccaacccacatcctgagaatcggcgagagctataaggagaagcagcggaccatccaggccaagaaggaggtggagcagcggagagccggcggctacagccggaagtacgccagcaaagccaagaatctggcagacgatatggtgagaaacaccgctagagatctgctgtactacgccgtgacccaggatgccatgctgatcttcgccaacctgagccggggcttcggccggcagggcaagcggaccttcatggccgagagacagtacacacggatggaggactggctgaccgccaagctggcctacgagggcctgagcaagacctacctgtccaagacactggcccagtacacctccaagacatgcagcaactgtgggtttaccatcaccagcgccgactacgacagggtgctggagaagctgaagaagacagcaacaggctggatgaccacaattaacggcaaggagctgaaggtggagggccagattacctactacaacagatacaagagacagaacgtagtcaaggacctgtccgtcgagctggatagactgagcgaagaatctgtgaacaacgacatctcctcctggacaaagggcagaagcggagaagctctgagcctcctgaagaaaagattctcccatagacccgtgcaggagaagttcgtgtgcctgaactgcggcttcgagacacacgcagccgagcaagccgccctgaacatcgccagatcctggctgttcctgcggagccaggagtacaagaaataccagacaaacaagacaaccggcaacaccgataagagagccttcgtcgagacctggcagtccttttaccggaagaagcttaaggaggtgtggaaacctgccgtgcggtctggcggatctggcggaggctccaccagccccaagaaaaagagaaaagtctaagctgccttctgcggggcttgccttctggccatgcccttcttctctcccttgcacctgtacctcttggtctttgaataaagcctgagtaggaaggctagcaaaaaaaaaaaaaaaaaaaaaaaaaaaaaaaaaaaaaaaaaaaaaaaaaaaaaaaaaaaaaaaaaaaaaaaaaaaaaaaagcccagccggctccccaacctctaccgaggagggcacctctgagtccgccacccccgagagcggccctggcacctccaccgagcccagcgagggcagcgcacccggcagccctgccggcagccccacctccacagaggagggaaccagcaccgagcccagcgaaggcagcgccccaggcaccagcaccgagcctagtgagcaggagattaaacggatcaacaagatcagaagaagacttgtgaaagacagcaacaccaagaaggccggcaagacaggccccatgaaaaccctgctggttagagtgatgacacccgatctgagagagcggctggaaaacctgagaaagaagcctgaaaatatcccccagcccatcagcaatacatctagagccaacctgaataagctgctgaccgattacaccgaaatgaagaaggcgatcctgcatgtgtactgggaagagttccagaaggaccctgtgggcctgatgagccgggtggcccagcctgccagcaagaagatcgatcagaacaagctgaaacctgagatggacgagaagggcaacctgaccaccgccggctttgcctgctctcagtgtggccagcccctgttcgtgtacaagctggagcaggtgtctgagaagggcaaggcttacaccaactacttcggacggtgcaatgtggccgagcacgaaaagctgatcctgctggcccagctgaagcccgagaaggatagcgacgaagccgtgacatatagcctgggaaagtttgggcagagggccctggatttctacagcattcatgtgaccaaggagtccacccaccccgtgaagcccctggcccagatcgccggaaacagatacgcctccggacctgtgggaaaggccctgagcgacgcatgtatgggcacaatcgcctccttcctgtctaagtaccaggacatcatcatcgaacaccagaaggtggtgaagggcaaccagaagagactggagagcctgcgggagctggccggcaaggaaaacctggaataccctagcgtgaccctgccacctcagcctcacaccaaggagggcgttgatgcctacaacgaagtgatcgcccgggtgcgaatgtgggtgaacctgaacctgtggcagaagctgaagctaagcagagatgatgccaagcctctgctgagactgaagggattcccttcctttcctctggtcgagagacaggccaacgaagtggactggtgggacatggtgtgtaacgtgaagaagctgatcaacgagaaaaaggaggatggcaaggtgttttggcagaatctggctggctacaagagacaggaagccctgagaccatacctgagcagcgaggaagatcggaagaagggaaagaaattcgctcggtaccagctgggcgacctgctgctgcacctggaaaagaagcacggcgaggactggggaaaggtgtacgacgaggcctgggagcggattgacaagaaagtggaaggcctgagcaagcacatcaagctggaagaggaacggagaagcgaggacgcccagagcaaggccgccctgaccgactggctgcgggctaaggccagcttcgtgatcgagggcctgaaggaggccgacaaggacgagttctgcagatgcgagctgaagctgcagaagtggtacggggacctgcggggaaagcccttcgccatcgaagccgagaacagcatcctggacatcagcggcttcagcaagcagtacaactgtgccttcatctggcagaaggacggcgtgaagaagctgaacctgtacctgatcatcaactacttcaagggcggcaagctgcggttcaagaagatcaaacctgaagccttcgaagccaacagattctacaccgtgatcaacaaaaagagcggcgagatcgtgcccatggaggtgaacttcaacttcgacgaccccaacctgatcatcctgcctctggcctttggcaagagacagggcagagaattcatctggaacgacctgctgtccctggaaaccggcagcctgaagctggccaacggaagagtgatcgagaagacactgtacaacagaagaacccggcaggatgagcctgccctgttcgtggccctgaccttcgagcggcgggaggtcctggactcctccaatatcaaaccaatgaacctgatcggcgtggcaagaggcgaaaacatccccgccgtgatcgccctgaccgaccccgagggctgcccactgagccggtttaaggatagcctgggaaacccaacccacatcctgagaatcggcgagagctataaggagaagcagcggaccatccaggccaagaaggaggtggagcagcggagagccggcggctacagccggaagtacgccagcaaagccaagaatctggcagacgatatggtgagaaacaccgctagagatctgctgtactacgccgtgacccaggatgccatgctgatcttcgccaacctgagccggggcttcggccggcagggcaagcggaccttcatggccgagagacagtacacacggatggaggactggctgaccgccaagctggcctacgagggcctgagcaagacctacctgtccaagacactggcccagtacacctccaagacatgcagcaactgtgggtttaccatcaccagcgccgactacgacagggtgctggagaagctgaagaagacagcaacaggctggatgaccacaattaacggcaaggagctgaaggtggagggccagattacctactacaacagatacaagagacagaacgtagtcaaggacctgtccgtcgagctggatagactgagcgaagaatctgtgaacaacgacatctcctcctggacaaagggcagaagcggagaagctctgagcctcctgaagaaaagattctcccatagacccgtgcaggagaagttcgtgtgcctgaactgcggcttcgagacacacgcagccgagcaagccgccctgaacatcgccagatcctggctgttcctgcggagccaggagtacaagaaataccagacaaacaagacaaccggcaacaccgataagagagccttcgtcgagacctggcagtccttttaccggaagaagcttaaggaggtgtggaaacctgccgtgcggtctggcggatctggcggaggctccaccagccccaagaaaaagagaaaagtctaagctgccttctgcggggcttgccttctggccatgcccttcttctctcccttgcacctgtacctcttggtctttgaataaagcctgagtaggaaggctagcaaaaaaaaaaaaaaaaaaaaaaaaaaaaaaaaaaaaaaaaaaaaaaaaaaaaaaaaaaaaaaaaaaaaaaaaaaaaaaaa

SEQ ID NO: 9395 - RNA, 8787 nt, synthetic construct
  source 1..8787: mol_type = other RNA
aggaaataagagagaaaagaagagtaagaagaaatataagagccaccatggcccctaagaagaagcgtaaagtgagccggatgaaccacgaccaggagttcgacccccctaaggtgtaccctcccgtccccgccgagaagagaaagcccatccgggtcctgagcctgttcgatggcatcgccaccggtctgctggtgctgaaggacctgggcatccaggtggataggtacattgcctccgaggtgtgcgaggactccatcaccgtgggaatggtgcgtcatcagggcaagatcatgtacgtgggcgacgtgcggagcgtgacacagaagcatatccaggagtggggccctttcgacctggtgatcggcggcagcccttgcaatgacctgagcatcgtgaacccagcccggaagggcctgtacgagggaaccggcagactgttcttcgagttttacagactgctgcacgacgcccggcctaaggaaggcgacgaccggcccttcttttggctgttcgagaatgtggtggccatgggagtcagcgacaagcgggatattagccggttcctggagagcaaccccgtgatgatcgatgccaaggaagtgagcgccgcccaccgggccagatacttctggggcaatctgcctggcatgaacagacccctggccagcaccgtgaacgacaagctggagctgcaggagtgcctggagcacggccggatcgccaagttcagcaaggtgagaaccatcaccacccgaagcaacagcatcaaacaaggcaaggaccagcactttcctgtgttcatgaacgagaaggaggacatcctgtggtgtaccgagatggagagagtgttcgggttcccagtccactacacagatgtcagcaacatgtctagactggccagacagagactgctgggaagaagctggtccgtccctgtgatcagacacctgttcgcccctctgaaggagtacttcgcctgcgtgagcagcggcaacagcaacgccaacagccggggccccagcttctctagcggcctggtgccactgtccctgagagggagccacatgggccccatggagatctacaaaaccgtgagcgcctggaagcggcagcctgtgcgcgtgctgagcctgtttcggaatatcgataaagtcctgaaaagcctgggattcctggagagcggctctggctccggcggtggcaccctgaagtacgtggaggatgtgacaaacgtggtcagacgggatgtggagaagtggggccccttcgatctggtgtacggcagcacccaacccctgggcagctcttgtgaccggtgccctggctggtacatgtttcagttccaccggatcctgcagtacgccctgccgagacaggagtcccagcggccattcttttggattttcatggacaacttgctgctgaccgaggatgaccaggaaactaccactcggttcctgcagaccgaagccgtgaccctgcaggacgtgagaggccgggactaccagaacgccatgcgggtgtggtccaacatccctggactgaaaagcaagcacgcacctctgacccctaaagaagaggagtacctgcaggcccaggtgcggagcagaagcaagctggacgcccctaaggtggatctgctggtgaagaattgcctcctgcccctgagagagtacttcaagtatttcagccagaatagtctgcccctgggaggcagcggcggcggcgtgggccaccccgtgaccttcagggacgtggccgtggacttcagcctggaggagtggaggtgcctgagccccgcccagagggccctgtacagggacgtgatgctggagaactacgagaacctggtgagcgtgggcctgcccgtgagcaagcccaccgtgatcagcctgctggagaagggcgaggccccctggatgccccaggccggcgcccccaggggcccctgccccgactacctgagctggggcggcccaagcagcggcgcccctcctcccagcggcggcaggcggcccaagcagcggcgcccctcctcccagcggcggcagcccagccggctccccaacctctaccgaggagggcacctctgagtccgccacccccgagagcggccctggcacctccaccgagcccagcgagggcagcgcacccggcagccctgccggcagccccacctccacagaggagggaaccagcaccgagcccagcgaaggcagcgccccaggcaccagcaccgagcctagtgagcaggagattaaacggatcaacaagatcagaagaagacttgtgaaagacagcaacaccaagaaggccggcaagacaggccccatgaaaaccctgctggttagagtgatgacacccgatctgagagagcggctggaaaacctgagaaagaagcctgaaaatatcccccagcccatcagcaatacatctagagccaacctgaataagctgctgaccgattacaccgaaatgaagaaggcgatcctgcatgtgtactgggaagagttccagaaggaccctgtgggcctgatgagccgggtggcccagcctgccagcaagaagatcgatcagaacaagctgaaacctgagatggacgagaagggcaacctgaccaccgccggctttgcctgctctcagtgtggccagcccctgttcgtgtacaagctggagcaggtgtctgagaagggcaaggcttacaccaactacttcggacggtgcaatgtggccgagcacgaaaagctgatcctgctggcccagctgaagcccgagaaggatagcgacgaagccgtgacatatagcctgggaaagtttgggcagagggccctggatttctacagcattcatgtgaccaaggagtccacccaccccgtgaagcccctggcccagatcgccggaaacagatacgcctccggacctgtgggaaaggccctgagcgacgcatgtatgggcacaatcgcctccttcctgtctaagtaccaggacatcatcatcgaacaccagaaggtggtgaagggcaaccagaagagactggagagcctgcgggagctggccggcaaggaaaacctggaataccctagcgtgaccctgccacctcagcctcacaccaaggagggcgttgatgcctacaacgaagtgatcgcccgggtgcgaatgtgggtgaacctgaacctgtggcagaagctgaagctaagcagagatgatgccaagcctctgctgagactgaagggattcccttcctttcctctggtcgagagacaggccaacgaagtggactggtgggacatggtgtgtaacgtgaagaagctgatcaacgagaaaaaggaggatggcaaggtgttttggcagaatctggctggctacaagagacaggaagccctgagaccatacctgagcagcgaggaagatcggaagaagggaaagaaattcgctcggtaccagctgggcgacctgctgctgcacctggaaaagaagcacggcgaggactggggaaaggtgtacgacgaggcctgggagcggattgacaagaaagtggaaggcctgagcaagcacatcaagctggaagaggaacggagaagcgaggacgcccagagcaaggccgccctgaccgactggctgcgggctaaggccagcttcgtgatcgagggcctgaaggaggccgacaaggacgagttctgcagatgcgagctgaagctgcagaagtggtacggggacctgcggggaaagcccttcgccatcgaagccgagaacagcatcctggacatcagcggcttcagcaagcagtacaactgtgccttcatctggcagaaggacggcgtgaagaagctgaacctgtacctgatcatcaactacttcaagggcggcaagctgcggttcaagaagatcaaacctgaagccttcgaagccaacagattctacaccgtgatcaacaaaaagagcggcgagatcgtgcccatggaggtgaacttcaacttcgacgaccccaacctgatcatcctgcctctggcctttggcaagagacagggcagagaattcatctggaacgacctgctgtccctggaaaccggcagcctgaagctggccaacggaagagtgatcgagaagacactgtacaacagaagaacccggcaggatgagcctgccctgttcgtggccctgaccttcgagcggcgggaggtcctggactcctccaatatcaaaccaatgaacctgatcggcgtggcaagaggcgaaaacatccccgccgtgatcgccctgaccgaccccgagggctgcccactgagccggtttaaggatagcctgggaaacccaacccacatcctgagaatcggcgagagctataaggagaagcagcggaccatccaggccaagaaggaggtggagcagcggagagccggcggctacagccggaagtacgccagcaaagccaagaatctggcagacgatatggtgagaaacaccgctagagatctgctgtactacgccgtgacccaggatgccatgctgatcttcgccaacctgagccggggcttcggccggcagggcaagcggaccttcatggccgagagacagtacacacggatggaggactggctgaccgccaagctggcctacgagggcctgagcaagacctacctgtccaagacactggcccagtacacctccaagacatgcagcaactgtgggtttaccatcaccagcgccgactacgacagggtgctggagaagctgaagaagacagcaacaggctggatgaccacaattaacggcaaggagctgaaggtggagggccagattacctactacaacagatacaagagacagaacgtagtcaaggacctgtccgtcgagctggatagactgagcgaagaatctgtgaacaacgacatctcctcctggacaaagggcagaagcggagaagctctgagcctcctgaagaaaagattctcccatagacccgtgcaggagaagttcgtgtgcctgaactgcggcttcgagacacacgcagccgagcaagccgccctgaacatcgccagatcctggctgttcctgcggagccaggagtacaagaaataccagacaaacaagacaaccggcaacaccgataagagagccttcgtcgagacctggcagtccttttaccggaagaagcttaaggaggtgtggaaacctgccgtgcggtctggcggatctggcggaggctccaccagccccaagaaaaagagaaaagtctaagctgccttctgcggggcttgccttctggccatgcccttcttctctcccttgcacctgtacctcttggtctttgaataaagcctgagtaggaaggctagcaaaaaaaaaaaaaaaaaaaaaaaaaaaaaaaaaaaaaaaaaaaaaaaaaaaaaaaaaaaaaaaaaaaaaaaaaaaaaaaagcccagccggctccccaacctctaccgaggagggcacctctgagtccgccacccccgagagcggccctggcacctccaccgagcccagcgagggcagcgcacccggcagccctgccggcagccccacctccacagaggagggaaccagcaccgagcccagcgaaggcagcgccccaggcaccagcaccgagcctagtgagcaggagattaaacggatcaacaagatcagaagaagacttgtgaaagacagcaacaccaagaaggccggcaagacaggccccatgaaaaccctgctggttagagtgatgacacccgatctgagagagcggctggaaaacctgagaaagaagcctgaaaatatcccccagcccatcagcaatacatctagagccaacctgaataagctgctgaccgattacaccgaaatgaagaaggcgatcctgcatgtgtactgggaagagttccagaaggaccctgtgggcctgatgagccgggtggcccagcctgccagcaagaagatcgatcagaacaagctgaaacctgagatggacgagaagggcaacctgaccaccgccggctttgcctgctctcagtgtggccagcccctgttcgtgtacaagctggagcaggtgtctgagaagggcaaggcttacaccaactacttcggacggtgcaatgtggccgagcacgaaaagctgatcctgctggcccagctgaagcccgagaaggatagcgacgaagccgtgacatatagcctgggaaagtttgggcagagggccctggatttctacagcattcatgtgaccaaggagtccacccaccccgtgaagcccctggcccagatcgccggaaacagatacgcctccggacctgtgggaaaggccctgagcgacgcatgtatgggcacaatcgcctccttcctgtctaagtaccaggacatcatcatcgaacaccagaaggtggtgaagggcaaccagaagagactggagagcctgcgggagctggccggcaaggaaaacctggaataccctagcgtgaccctgccacctcagcctcacaccaaggagggcgttgatgcctacaacgaagtgatcgcccgggtgcgaatgtgggtgaacctgaacctgtggcagaagctgaagctaagcagagatgatgccaagcctctgctgagactgaagggattcccttcctttcctctggtcgagagacaggccaacgaagtggactggtgggacatggtgtgtaacgtgaagaagctgatcaacgagaaaaaggaggatggcaaggtgttttggcagaatctggctggctacaagagacaggaagccctgagaccatacctgagcagcgaggaagatcggaagaagggaaagaaattcgctcggtaccagctgggcgacctgctgctgcacctggaaaagaagcacggcgaggactggggaaaggtgtacgacgaggcctgggagcggattgacaagaaagtggaaggcctgagcaagcacatcaagctggaagaggaacggagaagcgaggacgcccagagcaaggccgccctgaccgactggctgcgggctaaggccagcttcgtgatcgagggcctgaaggaggccgacaaggacgagttctgcagatgcgagctgaagctgcagaagtggtacggggacctgcggggaaagcccttcgccatcgaagccgagaacagcatcctggacatcagcggcttcagcaagcagtacaactgtgccttcatctggcagaaggacggcgtgaagaagctgaacctgtacctgatcatcaactacttcaagggcggcaagctgcggttcaagaagatcaaacctgaagccttcgaagccaacagattctacaccgtgatcaacaaaaagagcggcgagatcgtgcccatggaggtgaacttcaacttcgacgaccccaacctgatcatcctgcctctggcctttggcaagagacagggcagagaattcatctggaacgacctgctgtccctggaaaccggcagcctgaagctggccaacggaagagtgatcgagaagacactgtacaacagaagaacccggcaggatgagcctgccctgttcgtggccctgaccttcgagcggcgggaggtcctggactcctccaatatcaaaccaatgaacctgatcggcgtggcaagaggcgaaaacatccccgccgtgatcgccctgaccgaccccgagggctgcccactgagccggtttaaggatagcctgggaaacccaacccacatcctgagaatcggcgagagctataaggagaagcagcggaccatccaggccaagaaggaggtggagcagcggagagccggcggctacagccggaagtacgccagcaaagccaagaatctggcagacgatatggtgagaaacaccgctagagatctgctgtactacgccgtgacccaggatgccatgctgatcttcgccaacctgagccggggcttcggccggcagggcaagcggaccttcatggccgagagacagtacacacggatggaggactggctgaccgccaagctggcctacgagggcctgagcaagacctacctgtccaagacactggcccagtacacctccaagacatgcagcaactgtgggtttaccatcaccagcgccgactacgacagggtgctggagaagctgaagaagacagcaacaggctggatgaccacaattaacggcaaggagctgaaggtggagggccagattacctactacaacagatacaagagacagaacgtagtcaaggacctgtccgtcgagctggatagactgagcgaagaatctgtgaacaacgacatctcctcctggacaaagggcagaagcggagaagctctgagcctcctgaagaaaagattctcccatagacccgtgcaggagaagttcgtgtgcctgaactgcggcttcgagacacacgcagccgagcaagccgccctgaacatcgccagatcctggctgttcctgcggagccaggagtacaagaaataccagacaaacaagacaaccggcaacaccgataagagagccttcgtcgagacctggcagtccttttaccggaagaagcttaaggaggtgtggaaacctgccgtgcggtctggcggatctggcggaggctccaccagccccaagaaaaagagaaaagtctaagctgccttctgcggggcttgccttctggccatgcccttcttctctcccttgcacctgtacctcttggtctttgaataaagcctgagtaggaaggctagcaaaaaaaaaaaaaaaaaaaaaaaaaaaaaaaaaaaaaaaaaaaaaaaaaaaaaaaaaaaaaaaaaaaaaaaaaaaaaaaa

SEQ ID NO: 9396 - RNA, 8787 nt, synthetic construct
  source 1..8787: mol_type = other RNA
aggaaataagagagaaaagaagagtaagaagaaatataagagccaccatggcccctaagaagaagcgtaaagtgagccggatgaaccacgaccaggagttcgacccccctaaggtgtaccctcccgtccccgccgagaagagaaagcccatccgggtcctgagcctgttcgatggcatcgccaccggtctgctggtgctgaaggacctgggcatccaggtggataggtacattgcctccgaggtgtgcgaggactccatcaccgtgggaatggtgcgtcatcagggcaagatcatgtacgtgggcgacgtgcggagcgtgacacagaagcatatccaggagtggggccctttcgacctggtgatcggcggcagcccttgcaatgacctgagcatcgtgaacccagcccggaagggcctgtacgagggaaccggcagactgttcttcgagttttacagactgctgcacgacgcccggcctaaggaaggcgacgaccggcccttcttttggctgttcgagaatgtggtggccatgggagtcagcgacaagcgggatattagccggttcctggagagcaaccccgtgatgatcgatgccaaggaagtgagcgccgcccaccgggccagatacttctggggcaatctgcctggcatgaacagacccctggccagcaccgtgaacgacaagctggagctgcaggagtgcctggagcacggccggatcgccaagttcagcaaggtgagaaccatcaccacccgaagcaacagcatcaaacaaggcaaggaccagcactttcctgtgttcatgaacgagaaggaggacatcctgtggtgtaccgagatggagagagtgttcgggttcccagtccactacacagatgtcagcaacatgtctagactggccagacagagactgctgggaagaagctggtccgtccctgtgatcagacacctgttcgcccctctgaaggagtacttcgcctgcgtgagcagcggcaacagcaacgccaacagccggggccccagcttctctagcggcctggtgccactgtccctgagagggagccacatgggccccatggagatctacaaaaccgtgagcgcctggaagcggcagcctgtgcgcgtgctgagcctgtttcggaatatcgataaagtcctgaaaagcctgggattcctggagagcggctctggctccggcggtggcaccctgaagtacgtggaggatgtgacaaacgtggtcagacgggatgtggagaagtggggccccttcgatctggtgtacggcagcacccaacccctgggcagctcttgtgaccggtgccctggctggtacatgtttcagttccaccggatcctgcagtacgccctgccgagacaggagtcccagcggccattcttttggattttcatggacaacttgctgctgaccgaggatgaccaggaaactaccactcggttcctgcagaccgaagccgtgaccctgcaggacgtgagaggccgggactaccagaacgccatgcgggtgtggtccaacatccctggactgaaaagcaagcacgcacctctgacccctaaagaagaggagtacctgcaggcccaggtgcggagcagaagcaagctggacgcccctaaggtggatctgctggtgaagaattgcctcctgcccctgagagagtacttcaagtatttcagccagaatagtctgcccctgggaggcagcggcggcggcttccaggacttcgtgagcttcaacgacgtgagcgtgaacttcaccgaggaggagtggagggagctggaccccgtgcagagggtgctgtacagggacgtgatgctggagaactacaggaacctggtgagcctgggcttccccttcagcaagcccgacatcatcagccagctggagcaggccgtgaacccctggatgcaggagggcgaggtgctgaggggcagctgcacccacctggagaccaggggcggcccaagcagcggcgcccctcctcccagcggcggcaggcggcccaagcagcggcgcccctcctcccagcggcggcagcccagccggctccccaacctctaccgaggagggcacctctgagtccgccacccccgagagcggccctggcacctccaccgagcccagcgagggcagcgcacccggcagccctgccggcagccccacctccacagaggagggaaccagcaccgagcccagcgaaggcagcgccccaggcaccagcaccgagcctagtgagcaggagattaaacggatcaacaagatcagaagaagacttgtgaaagacagcaacaccaagaaggccggcaagacaggccccatgaaaaccctgctggttagagtgatgacacccgatctgagagagcggctggaaaacctgagaaagaagcctgaaaatatcccccagcccatcagcaatacatctagagccaacctgaataagctgctgaccgattacaccgaaatgaagaaggcgatcctgcatgtgtactgggaagagttccagaaggaccctgtgggcctgatgagccgggtggcccagcctgccagcaagaagatcgatcagaacaagctgaaacctgagatggacgagaagggcaacctgaccaccgccggctttgcctgctctcagtgtggccagcccctgttcgtgtacaagctggagcaggtgtctgagaagggcaaggcttacaccaactacttcggacggtgcaatgtggccgagcacgaaaagctgatcctgctggcccagctgaagcccgagaaggatagcgacgaagccgtgacatatagcctgggaaagtttgggcagagggccctggatttctacagcattcatgtgaccaaggagtccacccaccccgtgaagcccctggcccagatcgccggaaacagatacgcctccggacctgtgggaaaggccctgagcgacgcatgtatgggcacaatcgcctccttcctgtctaagtaccaggacatcatcatcgaacaccagaaggtggtgaagggcaaccagaagagactggagagcctgcgggagctggccggcaaggaaaacctggaataccctagcgtgaccctgccacctcagcctcacaccaaggagggcgttgatgcctacaacgaagtgatcgcccgggtgcgaatgtgggtgaacctgaacctgtggcagaagctgaagctaagcagagatgatgccaagcctctgctgagactgaagggattcccttcctttcctctggtcgagagacaggccaacgaagtggactggtgggacatggtgtgtaacgtgaagaagctgatcaacgagaaaaaggaggatggcaaggtgttttggcagaatctggctggctacaagagacaggaagccctgagaccatacctgagcagcgaggaagatcggaagaagggaaagaaattcgctcggtaccagctgggcgacctgctgctgcacctggaaaagaagcacggcgaggactggggaaaggtgtacgacgaggcctgggagcggattgacaagaaagtggaaggcctgagcaagcacatcaagctggaagaggaacggagaagcgaggacgcccagagcaaggccgccctgaccgactggctgcgggctaaggccagcttcgtgatcgagggcctgaaggaggccgacaaggacgagttctgcagatgcgagctgaagctgcagaagtggtacggggacctgcggggaaagcccttcgccatcgaagccgagaacagcatcctggacatcagcggcttcagcaagcagtacaactgtgccttcatctggcagaaggacggcgtgaagaagctgaacctgtacctgatcatcaactacttcaagggcggcaagctgcggttcaagaagatcaaacctgaagccttcgaagccaacagattctacaccgtgatcaacaaaaagagcggcgagatcgtgcccatggaggtgaacttcaacttcgacgaccccaacctgatcatcctgcctctggcctttggcaagagacagggcagagaattcatctggaacgacctgctgtccctggaaaccggcagcctgaagctggccaacggaagagtgatcgagaagacactgtacaacagaagaacccggcaggatgagcctgccctgttcgtggccctgaccttcgagcggcgggaggtcctggactcctccaatatcaaaccaatgaacctgatcggcgtggcaagaggcgaaaacatccccgccgtgatcgccctgaccgaccccgagggctgcccactgagccggtttaaggatagcctgggaaacccaacccacatcctgagaatcggcgagagctataaggagaagcagcggaccatccaggccaagaaggaggtggagcagcggagagccggcggctacagccggaagtacgccagcaaagccaagaatctggcagacgatatggtgagaaacaccgctagagatctgctgtactacgccgtgacccaggatgccatgctgatcttcgccaacctgagccggggcttcggccggcagggcaagcggaccttcatggccgagagacagtacacacggatggaggactggctgaccgccaagctggcctacgagggcctgagcaagacctacctgtccaagacactggcccagtacacctccaagacatgcagcaactgtgggtttaccatcaccagcgccgactacgacagggtgctggagaagctgaagaagacagcaacaggctggatgaccacaattaacggcaaggagctgaaggtggagggccagattacctactacaacagatacaagagacagaacgtagtcaaggacctgtccgtcgagctggatagactgagcgaagaatctgtgaacaacgacatctcctcctggacaaagggcagaagcggagaagctctgagcctcctgaagaaaagattctcccatagacccgtgcaggagaagttcgtgtgcctgaactgcggcttcgagacacacgcagccgagcaagccgccctgaacatcgccagatcctggctgttcctgcggagccaggagtacaagaaataccagacaaacaagacaaccggcaacaccgataagagagccttcgtcgagacctggcagtccttttaccggaagaagcttaaggaggtgtggaaacctgccgtgcggtctggcggatctggcggaggctccaccagccccaagaaaaagagaaaagtctaagctgccttctgcggggcttgccttctggccatgcccttcttctctcccttgcacctgtacctcttggtctttgaataaagcctgagtaggaaggctagcaaaaaaaaaaaaaaaaaaaaaaaaaaaaaaaaaaaaaaaaaaaaaaaaaaaaaaaaaaaaaaaaaaaaaaaaaaaaaaaagcccagccggctccccaacctctaccgaggagggcacctctgagtccgccacccccgagagcggccctggcacctccaccgagcccagcgagggcagcgcacccggcagccctgccggcagccccacctccacagaggagggaaccagcaccgagcccagcgaaggcagcgccccaggcaccagcaccgagcctagtgagcaggagattaaacggatcaacaagatcagaagaagacttgtgaaagacagcaacaccaagaaggccggcaagacaggccccatgaaaaccctgctggttagagtgatgacacccgatctgagagagcggctggaaaacctgagaaagaagcctgaaaatatcccccagcccatcagcaatacatctagagccaacctgaataagctgctgaccgattacaccgaaatgaagaaggcgatcctgcatgtgtactgggaagagttccagaaggaccctgtgggcctgatgagccgggtggcccagcctgccagcaagaagatcgatcagaacaagctgaaacctgagatggacgagaagggcaacctgaccaccgccggctttgcctgctctcagtgtggccagcccctgttcgtgtacaagctggagcaggtgtctgagaagggcaaggcttacaccaactacttcggacggtgcaatgtggccgagcacgaaaagctgatcctgctggcccagctgaagcccgagaaggatagcgacgaagccgtgacatatagcctgggaaagtttgggcagagggccctggatttctacagcattcatgtgaccaaggagtccacccaccccgtgaagcccctggcccagatcgccggaaacagatacgcctccggacctgtgggaaaggccctgagcgacgcatgtatgggcacaatcgcctccttcctgtctaagtaccaggacatcatcatcgaacaccagaaggtggtgaagggcaaccagaagagactggagagcctgcgggagctggccggcaaggaaaacctggaataccctagcgtgaccctgccacctcagcctcacaccaaggagggcgttgatgcctacaacgaagtgatcgcccgggtgcgaatgtgggtgaacctgaacctgtggcagaagctgaagctaagcagagatgatgccaagcctctgctgagactgaagggattcccttcctttcctctggtcgagagacaggccaacgaagtggactggtgggacatggtgtgtaacgtgaagaagctgatcaacgagaaaaaggaggatggcaaggtgttttggcagaatctggctggctacaagagacaggaagccctgagaccatacctgagcagcgaggaagatcggaagaagggaaagaaattcgctcggtaccagctgggcgacctgctgctgcacctggaaaagaagcacggcgaggactggggaaaggtgtacgacgaggcctgggagcggattgacaagaaagtggaaggcctgagcaagcacatcaagctggaagaggaacggagaagcgaggacgcccagagcaaggccgccctgaccgactggctgcgggctaaggccagcttcgtgatcgagggcctgaaggaggccgacaaggacgagttctgcagatgcgagctgaagctgcagaagtggtacggggacctgcggggaaagcccttcgccatcgaagccgagaacagcatcctggacatcagcggcttcagcaagcagtacaactgtgccttcatctggcagaaggacggcgtgaagaagctgaacctgtacctgatcatcaactacttcaagggcggcaagctgcggttcaagaagatcaaacctgaagccttcgaagccaacagattctacaccgtgatcaacaaaaagagcggcgagatcgtgcccatggaggtgaacttcaacttcgacgaccccaacctgatcatcctgcctctggcctttggcaagagacagggcagagaattcatctggaacgacctgctgtccctggaaaccggcagcctgaagctggccaacggaagagtgatcgagaagacactgtacaacagaagaacccggcaggatgagcctgccctgttcgtggccctgaccttcgagcggcgggaggtcctggactcctccaatatcaaaccaatgaacctgatcggcgtggcaagaggcgaaaacatccccgccgtgatcgccctgaccgaccccgagggctgcccactgagccggtttaaggatagcctgggaaacccaacccacatcctgagaatcggcgagagctataaggagaagcagcggaccatccaggccaagaaggaggtggagcagcggagagccggcggctacagccggaagtacgccagcaaagccaagaatctggcagacgatatggtgagaaacaccgctagagatctgctgtactacgccgtgacccaggatgccatgctgatcttcgccaacctgagccggggcttcggccggcagggcaagcggaccttcatggccgagagacagtacacacggatggaggactggctgaccgccaagctggcctacgagggcctgagcaagacctacctgtccaagacactggcccagtacacctccaagacatgcagcaactgtgggtttaccatcaccagcgccgactacgacagggtgctggagaagctgaagaagacagcaacaggctggatgaccacaattaacggcaaggagctgaaggtggagggccagattacctactacaacagatacaagagacagaacgtagtcaaggacctgtccgtcgagctggatagactgagcgaagaatctgtgaacaacgacatctcctcctggacaaagggcagaagcggagaagctctgagcctcctgaagaaaagattctcccatagacccgtgcaggagaagttcgtgtgcctgaactgcggcttcgagacacacgcagccgagcaagccgccctgaacatcgccagatcctggctgttcctgcggagccaggagtacaagaaataccagacaaacaagacaaccggcaacaccgataagagagccttcgtcgagacctggcagtccttttaccggaagaagcttaaggaggtgtggaaacctgccgtgcggtctggcggatctggcggaggctccaccagccccaagaaaaagagaaaagtctaagctgccttctgcggggcttgccttctggccatgcccttcttctctcccttgcacctgtacctcttggtctttgaataaagcctgagtaggaaggctagcaaaaaaaaaaaaaaaaaaaaaaaaaaaaaaaaaaaaaaaaaaaaaaaaaaaaaaaaaaaaaaaaaaaaaaaaaaaaaaaa

SEQ ID NO: 9397 - RNA, 8787 nt, synthetic construct
  source 1..8787: mol_type = other RNA
aggaaataagagagaaaagaagagtaagaagaaatataagagccaccatggcccctaagaagaagcgtaaagtgagccggatgaaccacgaccaggagttcgacccccctaaggtgtaccctcccgtccccgccgagaagagaaagcccatccgggtcctgagcctgttcgatggcatcgccaccggtctgctggtgctgaaggacctgggcatccaggtggataggtacattgcctccgaggtgtgcgaggactccatcaccgtgggaatggtgcgtcatcagggcaagatcatgtacgtgggcgacgtgcggagcgtgacacagaagcatatccaggagtggggccctttcgacctggtgatcggcggcagcccttgcaatgacctgagcatcgtgaacccagcccggaagggcctgtacgagggaaccggcagactgttcttcgagttttacagactgctgcacgacgcccggcctaaggaaggcgacgaccggcccttcttttggctgttcgagaatgtggtggccatgggagtcagcgacaagcgggatattagccggttcctggagagcaaccccgtgatgatcgatgccaaggaagtgagcgccgcccaccgggccagatacttctggggcaatctgcctggcatgaacagacccctggccagcaccgtgaacgacaagctggagctgcaggagtgcctggagcacggccggatcgccaagttcagcaaggtgagaaccatcaccacccgaagcaacagcatcaaacaaggcaaggaccagcactttcctgtgttcatgaacgagaaggaggacatcctgtggtgtaccgagatggagagagtgttcgggttcccagtccactacacagatgtcagcaacatgtctagactggccagacagagactgctgggaagaagctggtccgtccctgtgatcagacacctgttcgcccctctgaaggagtacttcgcctgcgtgagcagcggcaacagcaacgccaacagccggggccccagcttctctagcggcctggtgccactgtccctgagagggagccacatgggccccatggagatctacaaaaccgtgagcgcctggaagcggcagcctgtgcgcgtgctgagcctgtttcggaatatcgataaagtcctgaaaagcctgggattcctggagagcggctctggctccggcggtggcaccctgaagtacgtggaggatgtgacaaacgtggtcagacgggatgtggagaagtggggccccttcgatctggtgtacggcagcacccaacccctgggcagctcttgtgaccggtgccctggctggtacatgtttcagttccaccggatcctgcagtacgccctgccgagacaggagtcccagcggccattcttttggattttcatggacaacttgctgctgaccgaggatgaccaggaaactaccactcggttcctgcagaccgaagccgtgaccctgcaggacgtgagaggccgggactaccagaacgccatgcgggtgtggtccaacatccctggactgaaaagcaagcacgcacctctgacccctaaagaagaggagtacctgcaggcccaggtgcggagcagaagcaagctggacgcccctaaggtggatctgctggtgaagaattgcctcctgcccctgagagagtacttcaagtatttcagccagaatagtctgcccctgggaggcagcggcggcggcccccacaggctggtgctgttcagggacgtggccgtggacttcagccaggaggagtgggcctgcctggacagcgagcagaaggacctgtacagggacgtgatgctggagaactacagcaacctggtgagcctgggcttcagcagcagcaaggccgacatgctgagcctgctggagcagggcaaggagccctggaaggtggtgcaggacgtggccaggagccagagcagcgacctgggcagcaggggcggcccaagcagcggcgcccctcctcccagcggcggcaggcggcccaagcagcggcgcccctcctcccagcggcggcagcccagccggctccccaacctctaccgaggagggcacctctgagtccgccacccccgagagcggccctggcacctccaccgagcccagcgagggcagcgcacccggcagccctgccggcagccccacctccacagaggagggaaccagcaccgagcccagcgaaggcagcgccccaggcaccagcaccgagcctagtgagcaggagattaaacggatcaacaagatcagaagaagacttgtgaaagacagcaacaccaagaaggccggcaagacaggccccatgaaaaccctgctggttagagtgatgacacccgatctgagagagcggctggaaaacctgagaaagaagcctgaaaatatcccccagcccatcagcaatacatctagagccaacctgaataagctgctgaccgattacaccgaaatgaagaaggcgatcctgcatgtgtactgggaagagttccagaaggaccctgtgggcctgatgagccgggtggcccagcctgccagcaagaagatcgatcagaacaagctgaaacctgagatggacgagaagggcaacctgaccaccgccggctttgcctgctctcagtgtggccagcccctgttcgtgtacaagctggagcaggtgtctgagaagggcaaggcttacaccaactacttcggacggtgcaatgtggccgagcacgaaaagctgatcctgctggcccagctgaagcccgagaaggatagcgacgaagccgtgacatatagcctgggaaagtttgggcagagggccctggatttctacagcattcatgtgaccaaggagtccacccaccccgtgaagcccctggcccagatcgccggaaacagatacgcctccggacctgtgggaaaggccctgagcgacgcatgtatgggcacaatcgcctccttcctgtctaagtaccaggacatcatcatcgaacaccagaaggtggtgaagggcaaccagaagagactggagagcctgcgggagctggccggcaaggaaaacctggaataccctagcgtgaccctgccacctcagcctcacaccaaggagggcgttgatgcctacaacgaagtgatcgcccgggtgcgaatgtgggtgaacctgaacctgtggcagaagctgaagctaagcagagatgatgccaagcctctgctgagactgaagggattcccttcctttcctctggtcgagagacaggccaacgaagtggactggtgggacatggtgtgtaacgtgaagaagctgatcaacgagaaaaaggaggatggcaaggtgttttggcagaatctggctggctacaagagacaggaagccctgagaccatacctgagcagcgaggaagatcggaagaagggaaagaaattcgctcggtaccagctgggcgacctgctgctgcacctggaaaagaagcacggcgaggactggggaaaggtgtacgacgaggcctgggagcggattgacaagaaagtggaaggcctgagcaagcacatcaagctggaagaggaacggagaagcgaggacgcccagagcaaggccgccctgaccgactggctgcgggctaaggccagcttcgtgatcgagggcctgaaggaggccgacaaggacgagttctgcagatgcgagctgaagctgcagaagtggtacggggacctgcggggaaagcccttcgccatcgaagccgagaacagcatcctggacatcagcggcttcagcaagcagtacaactgtgccttcatctggcagaaggacggcgtgaagaagctgaacctgtacctgatcatcaactacttcaagggcggcaagctgcggttcaagaagatcaaacctgaagccttcgaagccaacagattctacaccgtgatcaacaaaaagagcggcgagatcgtgcccatggaggtgaacttcaacttcgacgaccccaacctgatcatcctgcctctggcctttggcaagagacagggcagagaattcatctggaacgacctgctgtccctggaaaccggcagcctgaagctggccaacggaagagtgatcgagaagacactgtacaacagaagaacccggcaggatgagcctgccctgttcgtggccctgaccttcgagcggcgggaggtcctggactcctccaatatcaaaccaatgaacctgatcggcgtggcaagaggcgaaaacatccccgccgtgatcgccctgaccgaccccgagggctgcccactgagccggtttaaggatagcctgggaaacccaacccacatcctgagaatcggcgagagctataaggagaagcagcggaccatccaggccaagaaggaggtggagcagcggagagccggcggctacagccggaagtacgccagcaaagccaagaatctggcagacgatatggtgagaaacaccgctagagatctgctgtactacgccgtgacccaggatgccatgctgatcttcgccaacctgagccggggcttcggccggcagggcaagcggaccttcatggccgagagacagtacacacggatggaggactggctgaccgccaagctggcctacgagggcctgagcaagacctacctgtccaagacactggcccagtacacctccaagacatgcagcaactgtgggtttaccatcaccagcgccgactacgacagggtgctggagaagctgaagaagacagcaacaggctggatgaccacaattaacggcaaggagctgaaggtggagggccagattacctactacaacagatacaagagacagaacgtagtcaaggacctgtccgtcgagctggatagactgagcgaagaatctgtgaacaacgacatctcctcctggacaaagggcagaagcggagaagctctgagcctcctgaagaaaagattctcccatagacccgtgcaggagaagttcgtgtgcctgaactgcggcttcgagacacacgcagccgagcaagccgccctgaacatcgccagatcctggctgttcctgcggagccaggagtacaagaaataccagacaaacaagacaaccggcaacaccgataagagagccttcgtcgagacctggcagtccttttaccggaagaagcttaaggaggtgtggaaacctgccgtgcggtctggcggatctggcggaggctccaccagccccaagaaaaagagaaaagtctaagctgccttctgcggggcttgccttctggccatgcccttcttctctcccttgcacctgtacctcttggtctttgaataaagcctgagtaggaaggctagcaaaaaaaaaaaaaaaaaaaaaaaaaaaaaaaaaaaaaaaaaaaaaaaaaaaaaaaaaaaaaaaaaaaaaaaaaaaaaaaagcccagccggctccccaacctctaccgaggagggcacctctgagtccgccacccccgagagcggccctggcacctccaccgagcccagcgagggcagcgcacccggcagccctgccggcagccccacctccacagaggagggaaccagcaccgagcccagcgaaggcagcgccccaggcaccagcaccgagcctagtgagcaggagattaaacggatcaacaagatcagaagaagacttgtgaaagacagcaacaccaagaaggccggcaagacaggccccatgaaaaccctgctggttagagtgatgacacccgatctgagagagcggctggaaaacctgagaaagaagcctgaaaatatcccccagcccatcagcaatacatctagagccaacctgaataagctgctgaccgattacaccgaaatgaagaaggcgatcctgcatgtgtactgggaagagttccagaaggaccctgtgggcctgatgagccgggtggcccagcctgccagcaagaagatcgatcagaacaagctgaaacctgagatggacgagaagggcaacctgaccaccgccggctttgcctgctctcagtgtggccagcccctgttcgtgtacaagctggagcaggtgtctgagaagggcaaggcttacaccaactacttcggacggtgcaatgtggccgagcacgaaaagctgatcctgctggcccagctgaagcccgagaaggatagcgacgaagccgtgacatatagcctgggaaagtttgggcagagggccctggatttctacagcattcatgtgaccaaggagtccacccaccccgtgaagcccctggcccagatcgccggaaacagatacgcctccggacctgtgggaaaggccctgagcgacgcatgtatgggcacaatcgcctccttcctgtctaagtaccaggacatcatcatcgaacaccagaaggtggtgaagggcaaccagaagagactggagagcctgcgggagctggccggcaaggaaaacctggaataccctagcgtgaccctgccacctcagcctcacaccaaggagggcgttgatgcctacaacgaagtgatcgcccgggtgcgaatgtgggtgaacctgaacctgtggcagaagctgaagctaagcagagatgatgccaagcctctgctgagactgaagggattcccttcctttcctctggtcgagagacaggccaacgaagtggactggtgggacatggtgtgtaacgtgaagaagctgatcaacgagaaaaaggaggatggcaaggtgttttggcagaatctggctggctacaagagacaggaagccctgagaccatacctgagcagcgaggaagatcggaagaagggaaagaaattcgctcggtaccagctgggcgacctgctgctgcacctggaaaagaagcacggcgaggactggggaaaggtgtacgacgaggcctgggagcggattgacaagaaagtggaaggcctgagcaagcacatcaagctggaagaggaacggagaagcgaggacgcccagagcaaggccgccctgaccgactggctgcgggctaaggccagcttcgtgatcgagggcctgaaggaggccgacaaggacgagttctgcagatgcgagctgaagctgcagaagtggtacggggacctgcggggaaagcccttcgccatcgaagccgagaacagcatcctggacatcagcggcttcagcaagcagtacaactgtgccttcatctggcagaaggacggcgtgaagaagctgaacctgtacctgatcatcaactacttcaagggcggcaagctgcggttcaagaagatcaaacctgaagccttcgaagccaacagattctacaccgtgatcaacaaaaagagcggcgagatcgtgcccatggaggtgaacttcaacttcgacgaccccaacctgatcatcctgcctctggcctttggcaagagacagggcagagaattcatctggaacgacctgctgtccctggaaaccggcagcctgaagctggccaacggaagagtgatcgagaagacactgtacaacagaagaacccggcaggatgagcctgccctgttcgtggccctgaccttcgagcggcgggaggtcctggactcctccaatatcaaaccaatgaacctgatcggcgtggcaagaggcgaaaacatccccgccgtgatcgccctgaccgaccccgagggctgcccactgagccggtttaaggatagcctgggaaacccaacccacatcctgagaatcggcgagagctataaggagaagcagcggaccatccaggccaagaaggaggtggagcagcggagagccggcggctacagccggaagtacgccagcaaagccaagaatctggcagacgatatggtgagaaacaccgctagagatctgctgtactacgccgtgacccaggatgccatgctgatcttcgccaacctgagccggggcttcggccggcagggcaagcggaccttcatggccgagagacagtacacacggatggaggactggctgaccgccaagctggcctacgagggcctgagcaagacctacctgtccaagacactggcccagtacacctccaagacatgcagcaactgtgggtttaccatcaccagcgccgactacgacagggtgctggagaagctgaagaagacagcaacaggctggatgaccacaattaacggcaaggagctgaaggtggagggccagattacctactacaacagatacaagagacagaacgtagtcaaggacctgtccgtcgagctggatagactgagcgaagaatctgtgaacaacgacatctcctcctggacaaagggcagaagcggagaagctctgagcctcctgaagaaaagattctcccatagacccgtgcaggagaagttcgtgtgcctgaactgcggcttcgagacacacgcagccgagcaagccgccctgaacatcgccagatcctggctgttcctgcggagccaggagtacaagaaataccagacaaacaagacaaccggcaacaccgataagagagccttcgtcgagacctggcagtccttttaccggaagaagcttaaggaggtgtggaaacctgccgtgcggtctggcggatctggcggaggctccaccagccccaagaaaaagagaaaagtctaagctgccttctgcggggcttgccttctggccatgcccttcttctctcccttgcacctgtacctcttggtctttgaataaagcctgagtaggaaggctagcaaaaaaaaaaaaaaaaaaaaaaaaaaaaaaaaaaaaaaaaaaaaaaaaaaaaaaaaaaaaaaaaaaaaaaaaaaaaaaaa

SEQ ID NO: 9398 - RNA, 8787 nt, synthetic construct
  source 1..8787: mol_type = other RNA
aggaaataagagagaaaagaagagtaagaagaaatataagagccaccatggcccctaagaagaagcgtaaagtgagccggatgaaccacgaccaggagttcgacccccctaaggtgtaccctcccgtccccgccgagaagagaaagcccatccgggtcctgagcctgttcgatggcatcgccaccggtctgctggtgctgaaggacctgggcatccaggtggataggtacattgcctccgaggtgtgcgaggactccatcaccgtgggaatggtgcgtcatcagggcaagatcatgtacgtgggcgacgtgcggagcgtgacacagaagcatatccaggagtggggccctttcgacctggtgatcggcggcagcccttgcaatgacctgagcatcgtgaacccagcccggaagggcctgtacgagggaaccggcagactgttcttcgagttttacagactgctgcacgacgcccggcctaaggaaggcgacgaccggcccttcttttggctgttcgagaatgtggtggccatgggagtcagcgacaagcgggatattagccggttcctggagagcaaccccgtgatgatcgatgccaaggaagtgagcgccgcccaccgggccagatacttctggggcaatctgcctggcatgaacagacccctggccagcaccgtgaacgacaagctggagctgcaggagtgcctggagcacggccggatcgccaagttcagcaaggtgagaaccatcaccacccgaagcaacagcatcaaacaaggcaaggaccagcactttcctgtgttcatgaacgagaaggaggacatcctgtggtgtaccgagatggagagagtgttcgggttcccagtccactacacagatgtcagcaacatgtctagactggccagacagagactgctgggaagaagctggtccgtccctgtgatcagacacctgttcgcccctctgaaggagtacttcgcctgcgtgagcagcggcaacagcaacgccaacagccggggccccagcttctctagcggcctggtgccactgtccctgagagggagccacatgggccccatggagatctacaaaaccgtgagcgcctggaagcggcagcctgtgcgcgtgctgagcctgtttcggaatatcgataaagtcctgaaaagcctgggattcctggagagcggctctggctccggcggtggcaccctgaagtacgtggaggatgtgacaaacgtggtcagacgggatgtggagaagtggggccccttcgatctggtgtacggcagcacccaacccctgggcagctcttgtgaccggtgccctggctggtacatgtttcagttccaccggatcctgcagtacgccctgccgagacaggagtcccagcggccattcttttggattttcatggacaacttgctgctgaccgaggatgaccaggaaactaccactcggttcctgcagaccgaagccgtgaccctgcaggacgtgagaggccgggactaccagaacgccatgcgggtgtggtccaacatccctggactgaaaagcaagcacgcacctctgacccctaaagaagaggagtacctgcaggcccaggtgcggagcagaagcaagctggacgcccctaaggtggatctgctggtgaagaattgcctcctgcccctgagagagtacttcaagtatttcagccagaatagtctgcccctgggaggcagcggcggcggctaccaggagatggtgaccttcgaggacgtggccgtgcacttcaccaagaccgagtggaccggcctgagccccgcccagagggccctgtacaggagcgtgatgctggagaacttcggcaacctgaccgccctgggctaccccgtgcccaagcccgccctgatcagcctgctggagggcggcgacatggactggggcctggaggcccaggacgacccccccgccgagaggaccaagaacgtgtgcggcggcccaagcagcggcgcccctcctcccagcggcggcaggcggcccaagcagcggcgcccctcctcccagcggcggcagcccagccggctccccaacctctaccgaggagggcacctctgagtccgccacccccgagagcggccctggcacctccaccgagcccagcgagggcagcgcacccggcagccctgccggcagccccacctccacagaggagggaaccagcaccgagcccagcgaaggcagcgccccaggcaccagcaccgagcctagtgagcaggagattaaacggatcaacaagatcagaagaagacttgtgaaagacagcaacaccaagaaggccggcaagacaggccccatgaaaaccctgctggttagagtgatgacacccgatctgagagagcggctggaaaacctgagaaagaagcctgaaaatatcccccagcccatcagcaatacatctagagccaacctgaataagctgctgaccgattacaccgaaatgaagaaggcgatcctgcatgtgtactgggaagagttccagaaggaccctgtgggcctgatgagccgggtggcccagcctgccagcaagaagatcgatcagaacaagctgaaacctgagatggacgagaagggcaacctgaccaccgccggctttgcctgctctcagtgtggccagcccctgttcgtgtacaagctggagcaggtgtctgagaagggcaaggcttacaccaactacttcggacggtgcaatgtggccgagcacgaaaagctgatcctgctggcccagctgaagcccgagaaggatagcgacgaagccgtgacatatagcctgggaaagtttgggcagagggccctggatttctacagcattcatgtgaccaaggagtccacccaccccgtgaagcccctggcccagatcgccggaaacagatacgcctccggacctgtgggaaaggccctgagcgacgcatgtatgggcacaatcgcctccttcctgtctaagtaccaggacatcatcatcgaacaccagaaggtggtgaagggcaaccagaagagactggagagcctgcgggagctggccggcaaggaaaacctggaataccctagcgtgaccctgccacctcagcctcacaccaaggagggcgttgatgcctacaacgaagtgatcgcccgggtgcgaatgtgggtgaacctgaacctgtggcagaagctgaagctaagcagagatgatgccaagcctctgctgagactgaagggattcccttcctttcctctggtcgagagacaggccaacgaagtggactggtgggacatggtgtgtaacgtgaagaagctgatcaacgagaaaaaggaggatggcaaggtgttttggcagaatctggctggctacaagagacaggaagccctgagaccatacctgagcagcgaggaagatcggaagaagggaaagaaattcgctcggtaccagctgggcgacctgctgctgcacctggaaaagaagcacggcgaggactggggaaaggtgtacgacgaggcctgggagcggattgacaagaaagtggaaggcctgagcaagcacatcaagctggaagaggaacggagaagcgaggacgcccagagcaaggccgccctgaccgactggctgcgggctaaggccagcttcgtgatcgagggcctgaaggaggccgacaaggacgagttctgcagatgcgagctgaagctgcagaagtggtacggggacctgcggggaaagcccttcgccatcgaagccgagaacagcatcctggacatcagcggcttcagcaagcagtacaactgtgccttcatctggcagaaggacggcgtgaagaagctgaacctgtacctgatcatcaactacttcaagggcggcaagctgcggttcaagaagatcaaacctgaagccttcgaagccaacagattctacaccgtgatcaacaaaaagagcggcgagatcgtgcccatggaggtgaacttcaacttcgacgaccccaacctgatcatcctgcctctggcctttggcaagagacagggcagagaattcatctggaacgacctgctgtccctggaaaccggcagcctgaagctggccaacggaagagtgatcgagaagacactgtacaacagaagaacccggcaggatgagcctgccctgttcgtggccctgaccttcgagcggcgggaggtcctggactcctccaatatcaaaccaatgaacctgatcggcgtggcaagaggcgaaaacatccccgccgtgatcgccctgaccgaccccgagggctgcccactgagccggtttaaggatagcctgggaaacccaacccacatcctgagaatcggcgagagctataaggagaagcagcggaccatccaggccaagaaggaggtggagcagcggagagccggcggctacagccggaagtacgccagcaaagccaagaatctggcagacgatatggtgagaaacaccgctagagatctgctgtactacgccgtgacccaggatgccatgctgatcttcgccaacctgagccggggcttcggccggcagggcaagcggaccttcatggccgagagacagtacacacggatggaggactggctgaccgccaagctggcctacgagggcctgagcaagacctacctgtccaagacactggcccagtacacctccaagacatgcagcaactgtgggtttaccatcaccagcgccgactacgacagggtgctggagaagctgaagaagacagcaacaggctggatgaccacaattaacggcaaggagctgaaggtggagggccagattacctactacaacagatacaagagacagaacgtagtcaaggacctgtccgtcgagctggatagactgagcgaagaatctgtgaacaacgacatctcctcctggacaaagggcagaagcggagaagctctgagcctcctgaagaaaagattctcccatagacccgtgcaggagaagttcgtgtgcctgaactgcggcttcgagacacacgcagccgagcaagccgccctgaacatcgccagatcctggctgttcctgcggagccaggagtacaagaaataccagacaaacaagacaaccggcaacaccgataagagagccttcgtcgagacctggcagtccttttaccggaagaagcttaaggaggtgtggaaacctgccgtgcggtctggcggatctggcggaggctccaccagccccaagaaaaagagaaaagtctaagctgccttctgcggggcttgccttctggccatgcccttcttctctcccttgcacctgtacctcttggtctttgaataaagcctgagtaggaaggctagcaaaaaaaaaaaaaaaaaaaaaaaaaaaaaaaaaaaaaaaaaaaaaaaaaaaaaaaaaaaaaaaaaaaaaaaaaaaaaaaagcccagccggctccccaacctctaccgaggagggcacctctgagtccgccacccccgagagcggccctggcacctccaccgagcccagcgagggcagcgcacccggcagccctgccggcagccccacctccacagaggagggaaccagcaccgagcccagcgaaggcagcgccccaggcaccagcaccgagcctagtgagcaggagattaaacggatcaacaagatcagaagaagacttgtgaaagacagcaacaccaagaaggccggcaagacaggccccatgaaaaccctgctggttagagtgatgacacccgatctgagagagcggctggaaaacctgagaaagaagcctgaaaatatcccccagcccatcagcaatacatctagagccaacctgaataagctgctgaccgattacaccgaaatgaagaaggcgatcctgcatgtgtactgggaagagttccagaaggaccctgtgggcctgatgagccgggtggcccagcctgccagcaagaagatcgatcagaacaagctgaaacctgagatggacgagaagggcaacctgaccaccgccggctttgcctgctctcagtgtggccagcccctgttcgtgtacaagctggagcaggtgtctgagaagggcaaggcttacaccaactacttcggacggtgcaatgtggccgagcacgaaaagctgatcctgctggcccagctgaagcccgagaaggatagcgacgaagccgtgacatatagcctgggaaagtttgggcagagggccctggatttctacagcattcatgtgaccaaggagtccacccaccccgtgaagcccctggcccagatcgccggaaacagatacgcctccggacctgtgggaaaggccctgagcgacgcatgtatgggcacaatcgcctccttcctgtctaagtaccaggacatcatcatcgaacaccagaaggtggtgaagggcaaccagaagagactggagagcctgcgggagctggccggcaaggaaaacctggaataccctagcgtgaccctgccacctcagcctcacaccaaggagggcgttgatgcctacaacgaagtgatcgcccgggtgcgaatgtgggtgaacctgaacctgtggcagaagctgaagctaagcagagatgatgccaagcctctgctgagactgaagggattcccttcctttcctctggtcgagagacaggccaacgaagtggactggtgggacatggtgtgtaacgtgaagaagctgatcaacgagaaaaaggaggatggcaaggtgttttggcagaatctggctggctacaagagacaggaagccctgagaccatacctgagcagcgaggaagatcggaagaagggaaagaaattcgctcggtaccagctgggcgacctgctgctgcacctggaaaagaagcacggcgaggactggggaaaggtgtacgacgaggcctgggagcggattgacaagaaagtggaaggcctgagcaagcacatcaagctggaagaggaacggagaagcgaggacgcccagagcaaggccgccctgaccgactggctgcgggctaaggccagcttcgtgatcgagggcctgaaggaggccgacaaggacgagttctgcagatgcgagctgaagctgcagaagtggtacggggacctgcggggaaagcccttcgccatcgaagccgagaacagcatcctggacatcagcggcttcagcaagcagtacaactgtgccttcatctggcagaaggacggcgtgaagaagctgaacctgtacctgatcatcaactacttcaagggcggcaagctgcggttcaagaagatcaaacctgaagccttcgaagccaacagattctacaccgtgatcaacaaaaagagcggcgagatcgtgcccatggaggtgaacttcaacttcgacgaccccaacctgatcatcctgcctctggcctttggcaagagacagggcagagaattcatctggaacgacctgctgtccctggaaaccggcagcctgaagctggccaacggaagagtgatcgagaagacactgtacaacagaagaacccggcaggatgagcctgccctgttcgtggccctgaccttcgagcggcgggaggtcctggactcctccaatatcaaaccaatgaacctgatcggcgtggcaagaggcgaaaacatccccgccgtgatcgccctgaccgaccccgagggctgcccactgagccggtttaaggatagcctgggaaacccaacccacatcctgagaatcggcgagagctataaggagaagcagcggaccatccaggccaagaaggaggtggagcagcggagagccggcggctacagccggaagtacgccagcaaagccaagaatctggcagacgatatggtgagaaacaccgctagagatctgctgtactacgccgtgacccaggatgccatgctgatcttcgccaacctgagccggggcttcggccggcagggcaagcggaccttcatggccgagagacagtacacacggatggaggactggctgaccgccaagctggcctacgagggcctgagcaagacctacctgtccaagacactggcccagtacacctccaagacatgcagcaactgtgggtttaccatcaccagcgccgactacgacagggtgctggagaagctgaagaagacagcaacaggctggatgaccacaattaacggcaaggagctgaaggtggagggccagattacctactacaacagatacaagagacagaacgtagtcaaggacctgtccgtcgagctggatagactgagcgaagaatctgtgaacaacgacatctcctcctggacaaagggcagaagcggagaagctctgagcctcctgaagaaaagattctcccatagacccgtgcaggagaagttcgtgtgcctgaactgcggcttcgagacacacgcagccgagcaagccgccctgaacatcgccagatcctggctgttcctgcggagccaggagtacaagaaataccagacaaacaagacaaccggcaacaccgataagagagccttcgtcgagacctggcagtccttttaccggaagaagcttaaggaggtgtggaaacctgccgtgcggtctggcggatctggcggaggctccaccagccccaagaaaaagagaaaagtctaagctgccttctgcggggcttgccttctggccatgcccttcttctctcccttgcacctgtacctcttggtctttgaataaagcctgagtaggaaggctagcaaaaaaaaaaaaaaaaaaaaaaaaaaaaaaaaaaaaaaaaaaaaaaaaaaaaaaaaaaaaaaaaaaaaaaaaaaaaaaaa

SEQ ID NO: 9399 - RNA, 8787 nt, synthetic construct
  source 1..8787: mol_type = other RNA
aggaaataagagagaaaagaagagtaagaagaaatataagagccaccatggcccctaagaagaagcgtaaagtgagccggatgaaccacgaccaggagttcgacccccctaaggtgtaccctcccgtccccgccgagaagagaaagcccatccgggtcctgagcctgttcgatggcatcgccaccggtctgctggtgctgaaggacctgggcatccaggtggataggtacattgcctccgaggtgtgcgaggactccatcaccgtgggaatggtgcgtcatcagggcaagatcatgtacgtgggcgacgtgcggagcgtgacacagaagcatatccaggagtggggccctttcgacctggtgatcggcggcagcccttgcaatgacctgagcatcgtgaacccagcccggaagggcctgtacgagggaaccggcagactgttcttcgagttttacagactgctgcacgacgcccggcctaaggaaggcgacgaccggcccttcttttggctgttcgagaatgtggtggccatgggagtcagcgacaagcgggatattagccggttcctggagagcaaccccgtgatgatcgatgccaaggaagtgagcgccgcccaccgggccagatacttctggggcaatctgcctggcatgaacagacccctggccagcaccgtgaacgacaagctggagctgcaggagtgcctggagcacggccggatcgccaagttcagcaaggtgagaaccatcaccacccgaagcaacagcatcaaacaaggcaaggaccagcactttcctgtgttcatgaacgagaaggaggacatcctgtggtgtaccgagatggagagagtgttcgggttcccagtccactacacagatgtcagcaacatgtctagactggccagacagagactgctgggaagaagctggtccgtccctgtgatcagacacctgttcgcccctctgaaggagtacttcgcctgcgtgagcagcggcaacagcaacgccaacagccggggccccagcttctctagcggcctggtgccactgtccctgagagggagccacatgggccccatggagatctacaaaaccgtgagcgcctggaagcggcagcctgtgcgcgtgctgagcctgtttcggaatatcgataaagtcctgaaaagcctgggattcctggagagcggctctggctccggcggtggcaccctgaagtacgtggaggatgtgacaaacgtggtcagacgggatgtggagaagtggggccccttcgatctggtgtacggcagcacccaacccctgggcagctcttgtgaccggtgccctggctggtacatgtttcagttccaccggatcctgcagtacgccctgccgagacaggagtcccagcggccattcttttggattttcatggacaacttgctgctgaccgaggatgaccaggaaactaccactcggttcctgcagaccgaagccgtgaccctgcaggacgtgagaggccgggactaccagaacgccatgcgggtgtggtccaacatccctggactgaaaagcaagcacgcacctctgacccctaaagaagaggagtacctgcaggcccaggtgcggagcagaagcaagctggacgcccctaaggtggatctgctggtgaagaattgcctcctgcccctgagagagtacttcaagtatttcagccagaatagtctgcccctgggaggcagcggcggcggcgccgaggtgcccgtggccttcgaggacgtggccgtgtacttcacccaggaggagtggggcagcctggacaagaggcagaaggagctgtacagggacgtgatgtggatgaactacgagctgctggccagcctgggccccgccgccgccaagcccgacctgatcagcaagctggagaggagggccgccccctggatcaaggacaccaggggccccaagtggggcaagggcaagaggaagaccgtgggcggcccaagcagcggcgcccctcctcccagcggcggcaggcggcccaagcagcggcgcccctcctcccagcggcggcagcccagccggctccccaacctctaccgaggagggcacctctgagtccgccacccccgagagcggccctggcacctccaccgagcccagcgagggcagcgcacccggcagccctgccggcagccccacctccacagaggagggaaccagcaccgagcccagcgaaggcagcgccccaggcaccagcaccgagcctagtgagcaggagattaaacggatcaacaagatcagaagaagacttgtgaaagacagcaacaccaagaaggccggcaagacaggccccatgaaaaccctgctggttagagtgatgacacccgatctgagagagcggctggaaaacctgagaaagaagcctgaaaatatcccccagcccatcagcaatacatctagagccaacctgaataagctgctgaccgattacaccgaaatgaagaaggcgatcctgcatgtgtactgggaagagttccagaaggaccctgtgggcctgatgagccgggtggcccagcctgccagcaagaagatcgatcagaacaagctgaaacctgagatggacgagaagggcaacctgaccaccgccggctttgcctgctctcagtgtggccagcccctgttcgtgtacaagctggagcaggtgtctgagaagggcaaggcttacaccaactacttcggacggtgcaatgtggccgagcacgaaaagctgatcctgctggcccagctgaagcccgagaaggatagcgacgaagccgtgacatatagcctgggaaagtttgggcagagggccctggatttctacagcattcatgtgaccaaggagtccacccaccccgtgaagcccctggcccagatcgccggaaacagatacgcctccggacctgtgggaaaggccctgagcgacgcatgtatgggcacaatcgcctccttcctgtctaagtaccaggacatcatcatcgaacaccagaaggtggtgaagggcaaccagaagagactggagagcctgcgggagctggccggcaaggaaaacctggaataccctagcgtgaccctgccacctcagcctcacaccaaggagggcgttgatgcctacaacgaagtgatcgcccgggtgcgaatgtgggtgaacctgaacctgtggcagaagctgaagctaagcagagatgatgccaagcctctgctgagactgaagggattcccttcctttcctctggtcgagagacaggccaacgaagtggactggtgggacatggtgtgtaacgtgaagaagctgatcaacgagaaaaaggaggatggcaaggtgttttggcagaatctggctggctacaagagacaggaagccctgagaccatacctgagcagcgaggaagatcggaagaagggaaagaaattcgctcggtaccagctgggcgacctgctgctgcacctggaaaagaagcacggcgaggactggggaaaggtgtacgacgaggcctgggagcggattgacaagaaagtggaaggcctgagcaagcacatcaagctggaagaggaacggagaagcgaggacgcccagagcaaggccgccctgaccgactggctgcgggctaaggccagcttcgtgatcgagggcctgaaggaggccgacaaggacgagttctgcagatgcgagctgaagctgcagaagtggtacggggacctgcggggaaagcccttcgccatcgaagccgagaacagcatcctggacatcagcggcttcagcaagcagtacaactgtgccttcatctggcagaaggacggcgtgaagaagctgaacctgtacctgatcatcaactacttcaagggcggcaagctgcggttcaagaagatcaaacctgaagccttcgaagccaacagattctacaccgtgatcaacaaaaagagcggcgagatcgtgcccatggaggtgaacttcaacttcgacgaccccaacctgatcatcctgcctctggcctttggcaagagacagggcagagaattcatctggaacgacctgctgtccctggaaaccggcagcctgaagctggccaacggaagagtgatcgagaagacactgtacaacagaagaacccggcaggatgagcctgccctgttcgtggccctgaccttcgagcggcgggaggtcctggactcctccaatatcaaaccaatgaacctgatcggcgtggcaagaggcgaaaacatccccgccgtgatcgccctgaccgaccccgagggctgcccactgagccggtttaaggatagcctgggaaacccaacccacatcctgagaatcggcgagagctataaggagaagcagcggaccatccaggccaagaaggaggtggagcagcggagagccggcggctacagccggaagtacgccagcaaagccaagaatctggcagacgatatggtgagaaacaccgctagagatctgctgtactacgccgtgacccaggatgccatgctgatcttcgccaacctgagccggggcttcggccggcagggcaagcggaccttcatggccgagagacagtacacacggatggaggactggctgaccgccaagctggcctacgagggcctgagcaagacctacctgtccaagacactggcccagtacacctccaagacatgcagcaactgtgggtttaccatcaccagcgccgactacgacagggtgctggagaagctgaagaagacagcaacaggctggatgaccacaattaacggcaaggagctgaaggtggagggccagattacctactacaacagatacaagagacagaacgtagtcaaggacctgtccgtcgagctggatagactgagcgaagaatctgtgaacaacgacatctcctcctggacaaagggcagaagcggagaagctctgagcctcctgaagaaaagattctcccatagacccgtgcaggagaagttcgtgtgcctgaactgcggcttcgagacacacgcagccgagcaagccgccctgaacatcgccagatcctggctgttcctgcggagccaggagtacaagaaataccagacaaacaagacaaccggcaacaccgataagagagccttcgtcgagacctggcagtccttttaccggaagaagcttaaggaggtgtggaaacctgccgtgcggtctggcggatctggcggaggctccaccagccccaagaaaaagagaaaagtctaagctgccttctgcggggcttgccttctggccatgcccttcttctctcccttgcacctgtacctcttggtctttgaataaagcctgagtaggaaggctagcaaaaaaaaaaaaaaaaaaaaaaaaaaaaaaaaaaaaaaaaaaaaaaaaaaaaaaaaaaaaaaaaaaaaaaaaaaaaaaaagcccagccggctccccaacctctaccgaggagggcacctctgagtccgccacccccgagagcggccctggcacctccaccgagcccagcgagggcagcgcacccggcagccctgccggcagccccacctccacagaggagggaaccagcaccgagcccagcgaaggcagcgccccaggcaccagcaccgagcctagtgagcaggagattaaacggatcaacaagatcagaagaagacttgtgaaagacagcaacaccaagaaggccggcaagacaggccccatgaaaaccctgctggttagagtgatgacacccgatctgagagagcggctggaaaacctgagaaagaagcctgaaaatatcccccagcccatcagcaatacatctagagccaacctgaataagctgctgaccgattacaccgaaatgaagaaggcgatcctgcatgtgtactgggaagagttccagaaggaccctgtgggcctgatgagccgggtggcccagcctgccagcaagaagatcgatcagaacaagctgaaacctgagatggacgagaagggcaacctgaccaccgccggctttgcctgctctcagtgtggccagcccctgttcgtgtacaagctggagcaggtgtctgagaagggcaaggcttacaccaactacttcggacggtgcaatgtggccgagcacgaaaagctgatcctgctggcccagctgaagcccgagaaggatagcgacgaagccgtgacatatagcctgggaaagtttgggcagagggccctggatttctacagcattcatgtgaccaaggagtccacccaccccgtgaagcccctggcccagatcgccggaaacagatacgcctccggacctgtgggaaaggccctgagcgacgcatgtatgggcacaatcgcctccttcctgtctaagtaccaggacatcatcatcgaacaccagaaggtggtgaagggcaaccagaagagactggagagcctgcgggagctggccggcaaggaaaacctggaataccctagcgtgaccctgccacctcagcctcacaccaaggagggcgttgatgcctacaacgaagtgatcgcccgggtgcgaatgtgggtgaacctgaacctgtggcagaagctgaagctaagcagagatgatgccaagcctctgctgagactgaagggattcccttcctttcctctggtcgagagacaggccaacgaagtggactggtgggacatggtgtgtaacgtgaagaagctgatcaacgagaaaaaggaggatggcaaggtgttttggcagaatctggctggctacaagagacaggaagccctgagaccatacctgagcagcgaggaagatcggaagaagggaaagaaattcgctcggtaccagctgggcgacctgctgctgcacctggaaaagaagcacggcgaggactggggaaaggtgtacgacgaggcctgggagcggattgacaagaaagtggaaggcctgagcaagcacatcaagctggaagaggaacggagaagcgaggacgcccagagcaaggccgccctgaccgactggctgcgggctaaggccagcttcgtgatcgagggcctgaaggaggccgacaaggacgagttctgcagatgcgagctgaagctgcagaagtggtacggggacctgcggggaaagcccttcgccatcgaagccgagaacagcatcctggacatcagcggcttcagcaagcagtacaactgtgccttcatctggcagaaggacggcgtgaagaagctgaacctgtacctgatcatcaactacttcaagggcggcaagctgcggttcaagaagatcaaacctgaagccttcgaagccaacagattctacaccgtgatcaacaaaaagagcggcgagatcgtgcccatggaggtgaacttcaacttcgacgaccccaacctgatcatcctgcctctggcctttggcaagagacagggcagagaattcatctggaacgacctgctgtccctggaaaccggcagcctgaagctggccaacggaagagtgatcgagaagacactgtacaacagaagaacccggcaggatgagcctgccctgttcgtggccctgaccttcgagcggcgggaggtcctggactcctccaatatcaaaccaatgaacctgatcggcgtggcaagaggcgaaaacatccccgccgtgatcgccctgaccgaccccgagggctgcccactgagccggtttaaggatagcctgggaaacccaacccacatcctgagaatcggcgagagctataaggagaagcagcggaccatccaggccaagaaggaggtggagcagcggagagccggcggctacagccggaagtacgccagcaaagccaagaatctggcagacgatatggtgagaaacaccgctagagatctgctgtactacgccgtgacccaggatgccatgctgatcttcgccaacctgagccggggcttcggccggcagggcaagcggaccttcatggccgagagacagtacacacggatggaggactggctgaccgccaagctggcctacgagggcctgagcaagacctacctgtccaagacactggcccagtacacctccaagacatgcagcaactgtgggtttaccatcaccagcgccgactacgacagggtgctggagaagctgaagaagacagcaacaggctggatgaccacaattaacggcaaggagctgaaggtggagggccagattacctactacaacagatacaagagacagaacgtagtcaaggacctgtccgtcgagctggatagactgagcgaagaatctgtgaacaacgacatctcctcctggacaaagggcagaagcggagaagctctgagcctcctgaagaaaagattctcccatagacccgtgcaggagaagttcgtgtgcctgaactgcggcttcgagacacacgcagccgagcaagccgccctgaacatcgccagatcctggctgttcctgcggagccaggagtacaagaaataccagacaaacaagacaaccggcaacaccgataagagagccttcgtcgagacctggcagtccttttaccggaagaagcttaaggaggtgtggaaacctgccgtgcggtctggcggatctggcggaggctccaccagccccaagaaaaagagaaaagtctaagctgccttctgcggggcttgccttctggccatgcccttcttctctcccttgcacctgtacctcttggtctttgaataaagcctgagtaggaaggctagcaaaaaaaaaaaaaaaaaaaaaaaaaaaaaaaaaaaaaaaaaaaaaaaaaaaaaaaaaaaaaaaaaaaaaaaaaaaaaaaa

SEQ ID NO: 9400 - RNA, 8787 nt, synthetic construct
  source 1..8787: mol_type = other RNA
aggaaataagagagaaaagaagagtaagaagaaatataagagccaccatggcccctaagaagaagcgtaaagtgagccggatgaaccacgaccaggagttcgacccccctaaggtgtaccctcccgtccccgccgagaagagaaagcccatccgggtcctgagcctgttcgatggcatcgccaccggtctgctggtgctgaaggacctgggcatccaggtggataggtacattgcctccgaggtgtgcgaggactccatcaccgtgggaatggtgcgtcatcagggcaagatcatgtacgtgggcgacgtgcggagcgtgacacagaagcatatccaggagtggggccctttcgacctggtgatcggcggcagcccttgcaatgacctgagcatcgtgaacccagcccggaagggcctgtacgagggaaccggcagactgttcttcgagttttacagactgctgcacgacgcccggcctaaggaaggcgacgaccggcccttcttttggctgttcgagaatgtggtggccatgggagtcagcgacaagcgggatattagccggttcctggagagcaaccccgtgatgatcgatgccaaggaagtgagcgccgcccaccgggccagatacttctggggcaatctgcctggcatgaacagacccctggccagcaccgtgaacgacaagctggagctgcaggagtgcctggagcacggccggatcgccaagttcagcaaggtgagaaccatcaccacccgaagcaacagcatcaaacaaggcaaggaccagcactttcctgtgttcatgaacgagaaggaggacatcctgtggtgtaccgagatggagagagtgttcgggttcccagtccactacacagatgtcagcaacatgtctagactggccagacagagactgctgggaagaagctggtccgtccctgtgatcagacacctgttcgcccctctgaaggagtacttcgcctgcgtgagcagcggcaacagcaacgccaacagccggggccccagcttctctagcggcctggtgccactgtccctgagagggagccacatgggccccatggagatctacaaaaccgtgagcgcctggaagcggcagcctgtgcgcgtgctgagcctgtttcggaatatcgataaagtcctgaaaagcctgggattcctggagagcggctctggctccggcggtggcaccctgaagtacgtggaggatgtgacaaacgtggtcagacgggatgtggagaagtggggccccttcgatctggtgtacggcagcacccaacccctgggcagctcttgtgaccggtgccctggctggtacatgtttcagttccaccggatcctgcagtacgccctgccgagacaggagtcccagcggccattcttttggattttcatggacaacttgctgctgaccgaggatgaccaggaaactaccactcggttcctgcagaccgaagccgtgaccctgcaggacgtgagaggccgggactaccagaacgccatgcgggtgtggtccaacatccctggactgaaaagcaagcacgcacctctgacccctaaagaagaggagtacctgcaggcccaggtgcggagcagaagcaagctggacgcccctaaggtggatctgctggtgaagaattgcctcctgcccctgagagagtacttcaagtatttcagccagaatagtctgcccctgggaggcagcggcggcggccaccaggagatggtgaccttcgaggacgtggccgtgcacttcaccaagaccgagtggaccggcctgagccccgcccagagggccctgtacaggagcgtgatgctggagaacttcggcaacctgaccgccctgggctaccccgtgcccaagcccgccctgatcagcctgctggagggcggcgacatggcctggggcctggaggcccaggacgacgcccccgccgagaggaccaagaacatctgcggcggcccaagcagcggcgcccctcctcccagcggcggcaggcggcccaagcagcggcgcccctcctcccagcggcggcagcccagccggctccccaacctctaccgaggagggcacctctgagtccgccacccccgagagcggccctggcacctccaccgagcccagcgagggcagcgcacccggcagccctgccggcagccccacctccacagaggagggaaccagcaccgagcccagcgaaggcagcgccccaggcaccagcaccgagcctagtgagcaggagattaaacggatcaacaagatcagaagaagacttgtgaaagacagcaacaccaagaaggccggcaagacaggccccatgaaaaccctgctggttagagtgatgacacccgatctgagagagcggctggaaaacctgagaaagaagcctgaaaatatcccccagcccatcagcaatacatctagagccaacctgaataagctgctgaccgattacaccgaaatgaagaaggcgatcctgcatgtgtactgggaagagttccagaaggaccctgtgggcctgatgagccgggtggcccagcctgccagcaagaagatcgatcagaacaagctgaaacctgagatggacgagaagggcaacctgaccaccgccggctttgcctgctctcagtgtggccagcccctgttcgtgtacaagctggagcaggtgtctgagaagggcaaggcttacaccaactacttcggacggtgcaatgtggccgagcacgaaaagctgatcctgctggcccagctgaagcccgagaaggatagcgacgaagccgtgacatatagcctgggaaagtttgggcagagggccctggatttctacagcattcatgtgaccaaggagtccacccaccccgtgaagcccctggcccagatcgccggaaacagatacgcctccggacctgtgggaaaggccctgagcgacgcatgtatgggcacaatcgcctccttcctgtctaagtaccaggacatcatcatcgaacaccagaaggtggtgaagggcaaccagaagagactggagagcctgcgggagctggccggcaaggaaaacctggaataccctagcgtgaccctgccacctcagcctcacaccaaggagggcgttgatgcctacaacgaagtgatcgcccgggtgcgaatgtgggtgaacctgaacctgtggcagaagctgaagctaagcagagatgatgccaagcctctgctgagactgaagggattcccttcctttcctctggtcgagagacaggccaacgaagtggactggtgggacatggtgtgtaacgtgaagaagctgatcaacgagaaaaaggaggatggcaaggtgttttggcagaatctggctggctacaagagacaggaagccctgagaccatacctgagcagcgaggaagatcggaagaagggaaagaaattcgctcggtaccagctgggcgacctgctgctgcacctggaaaagaagcacggcgaggactggggaaaggtgtacgacgaggcctgggagcggattgacaagaaagtggaaggcctgagcaagcacatcaagctggaagaggaacggagaagcgaggacgcccagagcaaggccgccctgaccgactggctgcgggctaaggccagcttcgtgatcgagggcctgaaggaggccgacaaggacgagttctgcagatgcgagctgaagctgcagaagtggtacggggacctgcggggaaagcccttcgccatcgaagccgagaacagcatcctggacatcagcggcttcagcaagcagtacaactgtgccttcatctggcagaaggacggcgtgaagaagctgaacctgtacctgatcatcaactacttcaagggcggcaagctgcggttcaagaagatcaaacctgaagccttcgaagccaacagattctacaccgtgatcaacaaaaagagcggcgagatcgtgcccatggaggtgaacttcaacttcgacgaccccaacctgatcatcctgcctctggcctttggcaagagacagggcagagaattcatctggaacgacctgctgtccctggaaaccggcagcctgaagctggccaacggaagagtgatcgagaagacactgtacaacagaagaacccggcaggatgagcctgccctgttcgtggccctgaccttcgagcggcgggaggtcctggactcctccaatatcaaaccaatgaacctgatcggcgtggcaagaggcgaaaacatccccgccgtgatcgccctgaccgaccccgagggctgcccactgagccggtttaaggatagcctgggaaacccaacccacatcctgagaatcggcgagagctataaggagaagcagcggaccatccaggccaagaaggaggtggagcagcggagagccggcggctacagccggaagtacgccagcaaagccaagaatctggcagacgatatggtgagaaacaccgctagagatctgctgtactacgccgtgacccaggatgccatgctgatcttcgccaacctgagccggggcttcggccggcagggcaagcggaccttcatggccgagagacagtacacacggatggaggactggctgaccgccaagctggcctacgagggcctgagcaagacctacctgtccaagacactggcccagtacacctccaagacatgcagcaactgtgggtttaccatcaccagcgccgactacgacagggtgctggagaagctgaagaagacagcaacaggctggatgaccacaattaacggcaaggagctgaaggtggagggccagattacctactacaacagatacaagagacagaacgtagtcaaggacctgtccgtcgagctggatagactgagcgaagaatctgtgaacaacgacatctcctcctggacaaagggcagaagcggagaagctctgagcctcctgaagaaaagattctcccatagacccgtgcaggagaagttcgtgtgcctgaactgcggcttcgagacacacgcagccgagcaagccgccctgaacatcgccagatcctggctgttcctgcggagccaggagtacaagaaataccagacaaacaagacaaccggcaacaccgataagagagccttcgtcgagacctggcagtccttttaccggaagaagcttaaggaggtgtggaaacctgccgtgcggtctggcggatctggcggaggctccaccagccccaagaaaaagagaaaagtctaagctgccttctgcggggcttgccttctggccatgcccttcttctctcccttgcacctgtacctcttggtctttgaataaagcctgagtaggaaggctagcaaaaaaaaaaaaaaaaaaaaaaaaaaaaaaaaaaaaaaaaaaaaaaaaaaaaaaaaaaaaaaaaaaaaaaaaaaaaaaaagcccagccggctccccaacctctaccgaggagggcacctctgagtccgccacccccgagagcggccctggcacctccaccgagcccagcgagggcagcgcacccggcagccctgccggcagccccacctccacagaggagggaaccagcaccgagcccagcgaaggcagcgccccaggcaccagcaccgagcctagtgagcaggagattaaacggatcaacaagatcagaagaagacttgtgaaagacagcaacaccaagaaggccggcaagacaggccccatgaaaaccctgctggttagagtgatgacacccgatctgagagagcggctggaaaacctgagaaagaagcctgaaaatatcccccagcccatcagcaatacatctagagccaacctgaataagctgctgaccgattacaccgaaatgaagaaggcgatcctgcatgtgtactgggaagagttccagaaggaccctgtgggcctgatgagccgggtggcccagcctgccagcaagaagatcgatcagaacaagctgaaacctgagatggacgagaagggcaacctgaccaccgccggctttgcctgctctcagtgtggccagcccctgttcgtgtacaagctggagcaggtgtctgagaagggcaaggcttacaccaactacttcggacggtgcaatgtggccgagcacgaaaagctgatcctgctggcccagctgaagcccgagaaggatagcgacgaagccgtgacatatagcctgggaaagtttgggcagagggccctggatttctacagcattcatgtgaccaaggagtccacccaccccgtgaagcccctggcccagatcgccggaaacagatacgcctccggacctgtgggaaaggccctgagcgacgcatgtatgggcacaatcgcctccttcctgtctaagtaccaggacatcatcatcgaacaccagaaggtggtgaagggcaaccagaagagactggagagcctgcgggagctggccggcaaggaaaacctggaataccctagcgtgaccctgccacctcagcctcacaccaaggagggcgttgatgcctacaacgaagtgatcgcccgggtgcgaatgtgggtgaacctgaacctgtggcagaagctgaagctaagcagagatgatgccaagcctctgctgagactgaagggattcccttcctttcctctggtcgagagacaggccaacgaagtggactggtgggacatggtgtgtaacgtgaagaagctgatcaacgagaaaaaggaggatggcaaggtgttttggcagaatctggctggctacaagagacaggaagccctgagaccatacctgagcagcgaggaagatcggaagaagggaaagaaattcgctcggtaccagctgggcgacctgctgctgcacctggaaaagaagcacggcgaggactggggaaaggtgtacgacgaggcctgggagcggattgacaagaaagtggaaggcctgagcaagcacatcaagctggaagaggaacggagaagcgaggacgcccagagcaaggccgccctgaccgactggctgcgggctaaggccagcttcgtgatcgagggcctgaaggaggccgacaaggacgagttctgcagatgcgagctgaagctgcagaagtggtacggggacctgcggggaaagcccttcgccatcgaagccgagaacagcatcctggacatcagcggcttcagcaagcagtacaactgtgccttcatctggcagaaggacggcgtgaagaagctgaacctgtacctgatcatcaactacttcaagggcggcaagctgcggttcaagaagatcaaacctgaagccttcgaagccaacagattctacaccgtgatcaacaaaaagagcggcgagatcgtgcccatggaggtgaacttcaacttcgacgaccccaacctgatcatcctgcctctggcctttggcaagagacagggcagagaattcatctggaacgacctgctgtccctggaaaccggcagcctgaagctggccaacggaagagtgatcgagaagacactgtacaacagaagaacccggcaggatgagcctgccctgttcgtggccctgaccttcgagcggcgggaggtcctggactcctccaatatcaaaccaatgaacctgatcggcgtggcaagaggcgaaaacatccccgccgtgatcgccctgaccgaccccgagggctgcccactgagccggtttaaggatagcctgggaaacccaacccacatcctgagaatcggcgagagctataaggagaagcagcggaccatccaggccaagaaggaggtggagcagcggagagccggcggctacagccggaagtacgccagcaaagccaagaatctggcagacgatatggtgagaaacaccgctagagatctgctgtactacgccgtgacccaggatgccatgctgatcttcgccaacctgagccggggcttcggccggcagggcaagcggaccttcatggccgagagacagtacacacggatggaggactggctgaccgccaagctggcctacgagggcctgagcaagacctacctgtccaagacactggcccagtacacctccaagacatgcagcaactgtgggtttaccatcaccagcgccgactacgacagggtgctggagaagctgaagaagacagcaacaggctggatgaccacaattaacggcaaggagctgaaggtggagggccagattacctactacaacagatacaagagacagaacgtagtcaaggacctgtccgtcgagctggatagactgagcgaagaatctgtgaacaacgacatctcctcctggacaaagggcagaagcggagaagctctgagcctcctgaagaaaagattctcccatagacccgtgcaggagaagttcgtgtgcctgaactgcggcttcgagacacacgcagccgagcaagccgccctgaacatcgccagatcctggctgttcctgcggagccaggagtacaagaaataccagacaaacaagacaaccggcaacaccgataagagagccttcgtcgagacctggcagtccttttaccggaagaagcttaaggaggtgtggaaacctgccgtgcggtctggcggatctggcggaggctccaccagccccaagaaaaagagaaaagtctaagctgccttctgcggggcttgccttctggccatgcccttcttctctcccttgcacctgtacctcttggtctttgaataaagcctgagtaggaaggctagcaaaaaaaaaaaaaaaaaaaaaaaaaaaaaaaaaaaaaaaaaaaaaaaaaaaaaaaaaaaaaaaaaaaaaaaaaaaaaaaa

SEQ ID NO: 9401 - RNA, 8787 nt, synthetic construct
  source 1..8787: mol_type = other RNA
aggaaataagagagaaaagaagagtaagaagaaatataagagccaccatggcccctaagaagaagcgtaaagtgagccggatgaaccacgaccaggagttcgacccccctaaggtgtaccctcccgtccccgccgagaagagaaagcccatccgggtcctgagcctgttcgatggcatcgccaccggtctgctggtgctgaaggacctgggcatccaggtggataggtacattgcctccgaggtgtgcgaggactccatcaccgtgggaatggtgcgtcatcagggcaagatcatgtacgtgggcgacgtgcggagcgtgacacagaagcatatccaggagtggggccctttcgacctggtgatcggcggcagcccttgcaatgacctgagcatcgtgaacccagcccggaagggcctgtacgagggaaccggcagactgttcttcgagttttacagactgctgcacgacgcccggcctaaggaaggcgacgaccggcccttcttttggctgttcgagaatgtggtggccatgggagtcagcgacaagcgggatattagccggttcctggagagcaaccccgtgatgatcgatgccaaggaagtgagcgccgcccaccgggccagatacttctggggcaatctgcctggcatgaacagacccctggccagcaccgtgaacgacaagctggagctgcaggagtgcctggagcacggccggatcgccaagttcagcaaggtgagaaccatcaccacccgaagcaacagcatcaaacaaggcaaggaccagcactttcctgtgttcatgaacgagaaggaggacatcctgtggtgtaccgagatggagagagtgttcgggttcccagtccactacacagatgtcagcaacatgtctagactggccagacagagactgctgggaagaagctggtccgtccctgtgatcagacacctgttcgcccctctgaaggagtacttcgcctgcgtgagcagcggcaacagcaacgccaacagccggggccccagcttctctagcggcctggtgccactgtccctgagagggagccacatgggccccatggagatctacaaaaccgtgagcgcctggaagcggcagcctgtgcgcgtgctgagcctgtttcggaatatcgataaagtcctgaaaagcctgggattcctggagagcggctctggctccggcggtggcaccctgaagtacgtggaggatgtgacaaacgtggtcagacgggatgtggagaagtggggccccttcgatctggtgtacggcagcacccaacccctgggcagctcttgtgaccggtgccctggctggtacatgtttcagttccaccggatcctgcagtacgccctgccgagacaggagtcccagcggccattcttttggattttcatggacaacttgctgctgaccgaggatgaccaggaaactaccactcggttcctgcagaccgaagccgtgaccctgcaggacgtgagaggccgggactaccagaacgccatgcgggtgtggtccaacatccctggactgaaaagcaagcacgcacctctgacccctaaagaagaggagtacctgcaggcccaggtgcggagcagaagcaagctggacgcccctaaggtggatctgctggtgaagaattgcctcctgcccctgagagagtacttcaagtatttcagccagaatagtctgcccctgggaggcagcggcggcggcaagctgaagcccgtgaagttccaggacgtggccgtgtacttcagcgaggaggagtggcagctgctggagaaccagcagaaggagctgtacaggagcgtgatgaaggagaactacgagaacctgaccagcctgggcttcaccaccaccaagcccaacatcctgaagaggatggagcagggcaggcccctgtgggtgagcaccaggaggaaggtgatcaagcacagcttcagggagggcgagcccggcggcccaagcagcggcgcccctcctcccagcggcggcaggcggcccaagcagcggcgcccctcctcccagcggcggcagcccagccggctccccaacctctaccgaggagggcacctctgagtccgccacccccgagagcggccctggcacctccaccgagcccagcgagggcagcgcacccggcagccctgccggcagccccacctccacagaggagggaaccagcaccgagcccagcgaaggcagcgccccaggcaccagcaccgagcctagtgagcaggagattaaacggatcaacaagatcagaagaagacttgtgaaagacagcaacaccaagaaggccggcaagacaggccccatgaaaaccctgctggttagagtgatgacacccgatctgagagagcggctggaaaacctgagaaagaagcctgaaaatatcccccagcccatcagcaatacatctagagccaacctgaataagctgctgaccgattacaccgaaatgaagaaggcgatcctgcatgtgtactgggaagagttccagaaggaccctgtgggcctgatgagccgggtggcccagcctgccagcaagaagatcgatcagaacaagctgaaacctgagatggacgagaagggcaacctgaccaccgccggctttgcctgctctcagtgtggccagcccctgttcgtgtacaagctggagcaggtgtctgagaagggcaaggcttacaccaactacttcggacggtgcaatgtggccgagcacgaaaagctgatcctgctggcccagctgaagcccgagaaggatagcgacgaagccgtgacatatagcctgggaaagtttgggcagagggccctggatttctacagcattcatgtgaccaaggagtccacccaccccgtgaagcccctggcccagatcgccggaaacagatacgcctccggacctgtgggaaaggccctgagcgacgcatgtatgggcacaatcgcctccttcctgtctaagtaccaggacatcatcatcgaacaccagaaggtggtgaagggcaaccagaagagactggagagcctgcgggagctggccggcaaggaaaacctggaataccctagcgtgaccctgccacctcagcctcacaccaaggagggcgttgatgcctacaacgaagtgatcgcccgggtgcgaatgtgggtgaacctgaacctgtggcagaagctgaagctaagcagagatgatgccaagcctctgctgagactgaagggattcccttcctttcctctggtcgagagacaggccaacgaagtggactggtgggacatggtgtgtaacgtgaagaagctgatcaacgagaaaaaggaggatggcaaggtgttttggcagaatctggctggctacaagagacaggaagccctgagaccatacctgagcagcgaggaagatcggaagaagggaaagaaattcgctcggtaccagctgggcgacctgctgctgcacctggaaaagaagcacggcgaggactggggaaaggtgtacgacgaggcctgggagcggattgacaagaaagtggaaggcctgagcaagcacatcaagctggaagaggaacggagaagcgaggacgcccagagcaaggccgccctgaccgactggctgcgggctaaggccagcttcgtgatcgagggcctgaaggaggccgacaaggacgagttctgcagatgcgagctgaagctgcagaagtggtacggggacctgcggggaaagcccttcgccatcgaagccgagaacagcatcctggacatcagcggcttcagcaagcagtacaactgtgccttcatctggcagaaggacggcgtgaagaagctgaacctgtacctgatcatcaactacttcaagggcggcaagctgcggttcaagaagatcaaacctgaagccttcgaagccaacagattctacaccgtgatcaacaaaaagagcggcgagatcgtgcccatggaggtgaacttcaacttcgacgaccccaacctgatcatcctgcctctggcctttggcaagagacagggcagagaattcatctggaacgacctgctgtccctggaaaccggcagcctgaagctggccaacggaagagtgatcgagaagacactgtacaacagaagaacccggcaggatgagcctgccctgttcgtggccctgaccttcgagcggcgggaggtcctggactcctccaatatcaaaccaatgaacctgatcggcgtggcaagaggcgaaaacatccccgccgtgatcgccctgaccgaccccgagggctgcccactgagccggtttaaggatagcctgggaaacccaacccacatcctgagaatcggcgagagctataaggagaagcagcggaccatccaggccaagaaggaggtggagcagcggagagccggcggctacagccggaagtacgccagcaaagccaagaatctggcagacgatatggtgagaaacaccgctagagatctgctgtactacgccgtgacccaggatgccatgctgatcttcgccaacctgagccggggcttcggccggcagggcaagcggaccttcatggccgagagacagtacacacggatggaggactggctgaccgccaagctggcctacgagggcctgagcaagacctacctgtccaagacactggcccagtacacctccaagacatgcagcaactgtgggtttaccatcaccagcgccgactacgacagggtgctggagaagctgaagaagacagcaacaggctggatgaccacaattaacggcaaggagctgaaggtggagggccagattacctactacaacagatacaagagacagaacgtagtcaaggacctgtccgtcgagctggatagactgagcgaagaatctgtgaacaacgacatctcctcctggacaaagggcagaagcggagaagctctgagcctcctgaagaaaagattctcccatagacccgtgcaggagaagttcgtgtgcctgaactgcggcttcgagacacacgcagccgagcaagccgccctgaacatcgccagatcctggctgttcctgcggagccaggagtacaagaaataccagacaaacaagacaaccggcaacaccgataagagagccttcgtcgagacctggcagtccttttaccggaagaagcttaaggaggtgtggaaacctgccgtgcggtctggcggatctggcggaggctccaccagccccaagaaaaagagaaaagtctaagctgccttctgcggggcttgccttctggccatgcccttcttctctcccttgcacctgtacctcttggtctttgaataaagcctgagtaggaaggctagcaaaaaaaaaaaaaaaaaaaaaaaaaaaaaaaaaaaaaaaaaaaaaaaaaaaaaaaaaaaaaaaaaaaaaaaaaaaaaaaagcccagccggctccccaacctctaccgaggagggcacctctgagtccgccacccccgagagcggccctggcacctccaccgagcccagcgagggcagcgcacccggcagccctgccggcagccccacctccacagaggagggaaccagcaccgagcccagcgaaggcagcgccccaggcaccagcaccgagcctagtgagcaggagattaaacggatcaacaagatcagaagaagacttgtgaaagacagcaacaccaagaaggccggcaagacaggccccatgaaaaccctgctggttagagtgatgacacccgatctgagagagcggctggaaaacctgagaaagaagcctgaaaatatcccccagcccatcagcaatacatctagagccaacctgaataagctgctgaccgattacaccgaaatgaagaaggcgatcctgcatgtgtactgggaagagttccagaaggaccctgtgggcctgatgagccgggtggcccagcctgccagcaagaagatcgatcagaacaagctgaaacctgagatggacgagaagggcaacctgaccaccgccggctttgcctgctctcagtgtggccagcccctgttcgtgtacaagctggagcaggtgtctgagaagggcaaggcttacaccaactacttcggacggtgcaatgtggccgagcacgaaaagctgatcctgctggcccagctgaagcccgagaaggatagcgacgaagccgtgacatatagcctgggaaagtttgggcagagggccctggatttctacagcattcatgtgaccaaggagtccacccaccccgtgaagcccctggcccagatcgccggaaacagatacgcctccggacctgtgggaaaggccctgagcgacgcatgtatgggcacaatcgcctccttcctgtctaagtaccaggacatcatcatcgaacaccagaaggtggtgaagggcaaccagaagagactggagagcctgcgggagctggccggcaaggaaaacctggaataccctagcgtgaccctgccacctcagcctcacaccaaggagggcgttgatgcctacaacgaagtgatcgcccgggtgcgaatgtgggtgaacctgaacctgtggcagaagctgaagctaagcagagatgatgccaagcctctgctgagactgaagggattcccttcctttcctctggtcgagagacaggccaacgaagtggactggtgggacatggtgtgtaacgtgaagaagctgatcaacgagaaaaaggaggatggcaaggtgttttggcagaatctggctggctacaagagacaggaagccctgagaccatacctgagcagcgaggaagatcggaagaagggaaagaaattcgctcggtaccagctgggcgacctgctgctgcacctggaaaagaagcacggcgaggactggggaaaggtgtacgacgaggcctgggagcggattgacaagaaagtggaaggcctgagcaagcacatcaagctggaagaggaacggagaagcgaggacgcccagagcaaggccgccctgaccgactggctgcgggctaaggccagcttcgtgatcgagggcctgaaggaggccgacaaggacgagttctgcagatgcgagctgaagctgcagaagtggtacggggacctgcggggaaagcccttcgccatcgaagccgagaacagcatcctggacatcagcggcttcagcaagcagtacaactgtgccttcatctggcagaaggacggcgtgaagaagctgaacctgtacctgatcatcaactacttcaagggcggcaagctgcggttcaagaagatcaaacctgaagccttcgaagccaacagattctacaccgtgatcaacaaaaagagcggcgagatcgtgcccatggaggtgaacttcaacttcgacgaccccaacctgatcatcctgcctctggcctttggcaagagacagggcagagaattcatctggaacgacctgctgtccctggaaaccggcagcctgaagctggccaacggaagagtgatcgagaagacactgtacaacagaagaacccggcaggatgagcctgccctgttcgtggccctgaccttcgagcggcgggaggtcctggactcctccaatatcaaaccaatgaacctgatcggcgtggcaagaggcgaaaacatccccgccgtgatcgccctgaccgaccccgagggctgcccactgagccggtttaaggatagcctgggaaacccaacccacatcctgagaatcggcgagagctataaggagaagcagcggaccatccaggccaagaaggaggtggagcagcggagagccggcggctacagccggaagtacgccagcaaagccaagaatctggcagacgatatggtgagaaacaccgctagagatctgctgtactacgccgtgacccaggatgccatgctgatcttcgccaacctgagccggggcttcggccggcagggcaagcggaccttcatggccgagagacagtacacacggatggaggactggctgaccgccaagctggcctacgagggcctgagcaagacctacctgtccaagacactggcccagtacacctccaagacatgcagcaactgtgggtttaccatcaccagcgccgactacgacagggtgctggagaagctgaagaagacagcaacaggctggatgaccacaattaacggcaaggagctgaaggtggagggccagattacctactacaacagatacaagagacagaacgtagtcaaggacctgtccgtcgagctggatagactgagcgaagaatctgtgaacaacgacatctcctcctggacaaagggcagaagcggagaagctctgagcctcctgaagaaaagattctcccatagacccgtgcaggagaagttcgtgtgcctgaactgcggcttcgagacacacgcagccgagcaagccgccctgaacatcgccagatcctggctgttcctgcggagccaggagtacaagaaataccagacaaacaagacaaccggcaacaccgataagagagccttcgtcgagacctggcagtccttttaccggaagaagcttaaggaggtgtggaaacctgccgtgcggtctggcggatctggcggaggctccaccagccccaagaaaaagagaaaagtctaagctgccttctgcggggcttgccttctggccatgcccttcttctctcccttgcacctgtacctcttggtctttgaataaagcctgagtaggaaggctagcaaaaaaaaaaaaaaaaaaaaaaaaaaaaaaaaaaaaaaaaaaaaaaaaaaaaaaaaaaaaaaaaaaaaaaaaaaaaaaaa

SEQ ID NO: 9402 - RNA, 8787 nt, synthetic construct
  source 1..8787: mol_type = other RNA
aggaaataagagagaaaagaagagtaagaagaaatataagagccaccatggcccctaagaagaagcgtaaagtgagccggatgaaccacgaccaggagttcgacccccctaaggtgtaccctcccgtccccgccgagaagagaaagcccatccgggtcctgagcctgttcgatggcatcgccaccggtctgctggtgctgaaggacctgggcatccaggtggataggtacattgcctccgaggtgtgcgaggactccatcaccgtgggaatggtgcgtcatcagggcaagatcatgtacgtgggcgacgtgcggagcgtgacacagaagcatatccaggagtggggccctttcgacctggtgatcggcggcagcccttgcaatgacctgagcatcgtgaacccagcccggaagggcctgtacgagggaaccggcagactgttcttcgagttttacagactgctgcacgacgcccggcctaaggaaggcgacgaccggcccttcttttggctgttcgagaatgtggtggccatgggagtcagcgacaagcgggatattagccggttcctggagagcaaccccgtgatgatcgatgccaaggaagtgagcgccgcccaccgggccagatacttctggggcaatctgcctggcatgaacagacccctggccagcaccgtgaacgacaagctggagctgcaggagtgcctggagcacggccggatcgccaagttcagcaaggtgagaaccatcaccacccgaagcaacagcatcaaacaaggcaaggaccagcactttcctgtgttcatgaacgagaaggaggacatcctgtggtgtaccgagatggagagagtgttcgggttcccagtccactacacagatgtcagcaacatgtctagactggccagacagagactgctgggaagaagctggtccgtccctgtgatcagacacctgttcgcccctctgaaggagtacttcgcctgcgtgagcagcggcaacagcaacgccaacagccggggccccagcttctctagcggcctggtgccactgtccctgagagggagccacatgggccccatggagatctacaaaaccgtgagcgcctggaagcggcagcctgtgcgcgtgctgagcctgtttcggaatatcgataaagtcctgaaaagcctgggattcctggagagcggctctggctccggcggtggcaccctgaagtacgtggaggatgtgacaaacgtggtcagacgggatgtggagaagtggggccccttcgatctggtgtacggcagcacccaacccctgggcagctcttgtgaccggtgccctggctggtacatgtttcagttccaccggatcctgcagtacgccctgccgagacaggagtcccagcggccattcttttggattttcatggacaacttgctgctgaccgaggatgaccaggaaactaccactcggttcctgcagaccgaagccgtgaccctgcaggacgtgagaggccgggactaccagaacgccatgcgggtgtggtccaacatccctggactgaaaagcaagcacgcacctctgacccctaaagaagaggagtacctgcaggcccaggtgcggagcagaagcaagctggacgcccctaaggtggatctgctggtgaagaattgcctcctgcccctgagagagtacttcaagtatttcagccagaatagtctgcccctgggaggcagcggcggcggcgaggaggtgcccgtggtgttcgaggacgtggccgtgtacttcaccagggaggagtgggccgccctggacaagaggcagaaggagctgtacagggacgtgatgaggaccaactacgagctgctggccagcctgggccccgccgccgccaagcccgacctgatcagcaagctggagaggagggccgccccctggatcagggaccccgacggccccgagtggggcaagggcaggccccccggcaagggcggcccaagcagcggcgcccctcctcccagcggcggcaggcggcccaagcagcggcgcccctcctcccagcggcggcagcccagccggctccccaacctctaccgaggagggcacctctgagtccgccacccccgagagcggccctggcacctccaccgagcccagcgagggcagcgcacccggcagccctgccggcagccccacctccacagaggagggaaccagcaccgagcccagcgaaggcagcgccccaggcaccagcaccgagcctagtgagcaggagattaaacggatcaacaagatcagaagaagacttgtgaaagacagcaacaccaagaaggccggcaagacaggccccatgaaaaccctgctggttagagtgatgacacccgatctgagagagcggctggaaaacctgagaaagaagcctgaaaatatcccccagcccatcagcaatacatctagagccaacctgaataagctgctgaccgattacaccgaaatgaagaaggcgatcctgcatgtgtactgggaagagttccagaaggaccctgtgggcctgatgagccgggtggcccagcctgccagcaagaagatcgatcagaacaagctgaaacctgagatggacgagaagggcaacctgaccaccgccggctttgcctgctctcagtgtggccagcccctgttcgtgtacaagctggagcaggtgtctgagaagggcaaggcttacaccaactacttcggacggtgcaatgtggccgagcacgaaaagctgatcctgctggcccagctgaagcccgagaaggatagcgacgaagccgtgacatatagcctgggaaagtttgggcagagggccctggatttctacagcattcatgtgaccaaggagtccacccaccccgtgaagcccctggcccagatcgccggaaacagatacgcctccggacctgtgggaaaggccctgagcgacgcatgtatgggcacaatcgcctccttcctgtctaagtaccaggacatcatcatcgaacaccagaaggtggtgaagggcaaccagaagagactggagagcctgcgggagctggccggcaaggaaaacctggaataccctagcgtgaccctgccacctcagcctcacaccaaggagggcgttgatgcctacaacgaagtgatcgcccgggtgcgaatgtgggtgaacctgaacctgtggcagaagctgaagctaagcagagatgatgccaagcctctgctgagactgaagggattcccttcctttcctctggtcgagagacaggccaacgaagtggactggtgggacatggtgtgtaacgtgaagaagctgatcaacgagaaaaaggaggatggcaaggtgttttggcagaatctggctggctacaagagacaggaagccctgagaccatacctgagcagcgaggaagatcggaagaagggaaagaaattcgctcggtaccagctgggcgacctgctgctgcacctggaaaagaagcacggcgaggactggggaaaggtgtacgacgaggcctgggagcggattgacaagaaagtggaaggcctgagcaagcacatcaagctggaagaggaacggagaagcgaggacgcccagagcaaggccgccctgaccgactggctgcgggctaaggccagcttcgtgatcgagggcctgaaggaggccgacaaggacgagttctgcagatgcgagctgaagctgcagaagtggtacggggacctgcggggaaagcccttcgccatcgaagccgagaacagcatcctggacatcagcggcttcagcaagcagtacaactgtgccttcatctggcagaaggacggcgtgaagaagctgaacctgtacctgatcatcaactacttcaagggcggcaagctgcggttcaagaagatcaaacctgaagccttcgaagccaacagattctacaccgtgatcaacaaaaagagcggcgagatcgtgcccatggaggtgaacttcaacttcgacgaccccaacctgatcatcctgcctctggcctttggcaagagacagggcagagaattcatctggaacgacctgctgtccctggaaaccggcagcctgaagctggccaacggaagagtgatcgagaagacactgtacaacagaagaacccggcaggatgagcctgccctgttcgtggccctgaccttcgagcggcgggaggtcctggactcctccaatatcaaaccaatgaacctgatcggcgtggcaagaggcgaaaacatccccgccgtgatcgccctgaccgaccccgagggctgcccactgagccggtttaaggatagcctgggaaacccaacccacatcctgagaatcggcgagagctataaggagaagcagcggaccatccaggccaagaaggaggtggagcagcggagagccggcggctacagccggaagtacgccagcaaagccaagaatctggcagacgatatggtgagaaacaccgctagagatctgctgtactacgccgtgacccaggatgccatgctgatcttcgccaacctgagccggggcttcggccggcagggcaagcggaccttcatggccgagagacagtacacacggatggaggactggctgaccgccaagctggcctacgagggcctgagcaagacctacctgtccaagacactggcccagtacacctccaagacatgcagcaactgtgggtttaccatcaccagcgccgactacgacagggtgctggagaagctgaagaagacagcaacaggctggatgaccacaattaacggcaaggagctgaaggtggagggccagattacctactacaacagatacaagagacagaacgtagtcaaggacctgtccgtcgagctggatagactgagcgaagaatctgtgaacaacgacatctcctcctggacaaagggcagaagcggagaagctctgagcctcctgaagaaaagattctcccatagacccgtgcaggagaagttcgtgtgcctgaactgcggcttcgagacacacgcagccgagcaagccgccctgaacatcgccagatcctggctgttcctgcggagccaggagtacaagaaataccagacaaacaagacaaccggcaacaccgataagagagccttcgtcgagacctggcagtccttttaccggaagaagcttaaggaggtgtggaaacctgccgtgcggtctggcggatctggcggaggctccaccagccccaagaaaaagagaaaagtctaagctgccttctgcggggcttgccttctggccatgcccttcttctctcccttgcacctgtacctcttggtctttgaataaagcctgagtaggaaggctagcaaaaaaaaaaaaaaaaaaaaaaaaaaaaaaaaaaaaaaaaaaaaaaaaaaaaaaaaaaaaaaaaaaaaaaaaaaaaaaaagcccagccggctccccaacctctaccgaggagggcacctctgagtccgccacccccgagagcggccctggcacctccaccgagcccagcgagggcagcgcacccggcagccctgccggcagccccacctccacagaggagggaaccagcaccgagcccagcgaaggcagcgccccaggcaccagcaccgagcctagtgagcaggagattaaacggatcaacaagatcagaagaagacttgtgaaagacagcaacaccaagaaggccggcaagacaggccccatgaaaaccctgctggttagagtgatgacacccgatctgagagagcggctggaaaacctgagaaagaagcctgaaaatatcccccagcccatcagcaatacatctagagccaacctgaataagctgctgaccgattacaccgaaatgaagaaggcgatcctgcatgtgtactgggaagagttccagaaggaccctgtgggcctgatgagccgggtggcccagcctgccagcaagaagatcgatcagaacaagctgaaacctgagatggacgagaagggcaacctgaccaccgccggctttgcctgctctcagtgtggccagcccctgttcgtgtacaagctggagcaggtgtctgagaagggcaaggcttacaccaactacttcggacggtgcaatgtggccgagcacgaaaagctgatcctgctggcccagctgaagcccgagaaggatagcgacgaagccgtgacatatagcctgggaaagtttgggcagagggccctggatttctacagcattcatgtgaccaaggagtccacccaccccgtgaagcccctggcccagatcgccggaaacagatacgcctccggacctgtgggaaaggccctgagcgacgcatgtatgggcacaatcgcctccttcctgtctaagtaccaggacatcatcatcgaacaccagaaggtggtgaagggcaaccagaagagactggagagcctgcgggagctggccggcaaggaaaacctggaataccctagcgtgaccctgccacctcagcctcacaccaaggagggcgttgatgcctacaacgaagtgatcgcccgggtgcgaatgtgggtgaacctgaacctgtggcagaagctgaagctaagcagagatgatgccaagcctctgctgagactgaagggattcccttcctttcctctggtcgagagacaggccaacgaagtggactggtgggacatggtgtgtaacgtgaagaagctgatcaacgagaaaaaggaggatggcaaggtgttttggcagaatctggctggctacaagagacaggaagccctgagaccatacctgagcagcgaggaagatcggaagaagggaaagaaattcgctcggtaccagctgggcgacctgctgctgcacctggaaaagaagcacggcgaggactggggaaaggtgtacgacgaggcctgggagcggattgacaagaaagtggaaggcctgagcaagcacatcaagctggaagaggaacggagaagcgaggacgcccagagcaaggccgccctgaccgactggctgcgggctaaggccagcttcgtgatcgagggcctgaaggaggccgacaaggacgagttctgcagatgcgagctgaagctgcagaagtggtacggggacctgcggggaaagcccttcgccatcgaagccgagaacagcatcctggacatcagcggcttcagcaagcagtacaactgtgccttcatctggcagaaggacggcgtgaagaagctgaacctgtacctgatcatcaactacttcaagggcggcaagctgcggttcaagaagatcaaacctgaagccttcgaagccaacagattctacaccgtgatcaacaaaaagagcggcgagatcgtgcccatggaggtgaacttcaacttcgacgaccccaacctgatcatcctgcctctggcctttggcaagagacagggcagagaattcatctggaacgacctgctgtccctggaaaccggcagcctgaagctggccaacggaagagtgatcgagaagacactgtacaacagaagaacccggcaggatgagcctgccctgttcgtggccctgaccttcgagcggcgggaggtcctggactcctccaatatcaaaccaatgaacctgatcggcgtggcaagaggcgaaaacatccccgccgtgatcgccctgaccgaccccgagggctgcccactgagccggtttaaggatagcctgggaaacccaacccacatcctgagaatcggcgagagctataaggagaagcagcggaccatccaggccaagaaggaggtggagcagcggagagccggcggctacagccggaagtacgccagcaaagccaagaatctggcagacgatatggtgagaaacaccgctagagatctgctgtactacgccgtgacccaggatgccatgctgatcttcgccaacctgagccggggcttcggccggcagggcaagcggaccttcatggccgagagacagtacacacggatggaggactggctgaccgccaagctggcctacgagggcctgagcaagacctacctgtccaagacactggcccagtacacctccaagacatgcagcaactgtgggtttaccatcaccagcgccgactacgacagggtgctggagaagctgaagaagacagcaacaggctggatgaccacaattaacggcaaggagctgaaggtggagggccagattacctactacaacagatacaagagacagaacgtagtcaaggacctgtccgtcgagctggatagactgagcgaagaatctgtgaacaacgacatctcctcctggacaaagggcagaagcggagaagctctgagcctcctgaagaaaagattctcccatagacccgtgcaggagaagttcgtgtgcctgaactgcggcttcgagacacacgcagccgagcaagccgccctgaacatcgccagatcctggctgttcctgcggagccaggagtacaagaaataccagacaaacaagacaaccggcaacaccgataagagagccttcgtcgagacctggcagtccttttaccggaagaagcttaaggaggtgtggaaacctgccgtgcggtctggcggatctggcggaggctccaccagccccaagaaaaagagaaaagtctaagctgccttctgcggggcttgccttctggccatgcccttcttctctcccttgcacctgtacctcttggtctttgaataaagcctgagtaggaaggctagcaaaaaaaaaaaaaaaaaaaaaaaaaaaaaaaaaaaaaaaaaaaaaaaaaaaaaaaaaaaaaaaaaaaaaaaaaaaaaaaa

SEQ ID NO: 9403 - RNA, 8787 nt, synthetic construct
  source 1..8787: mol_type = other RNA
aggaaataagagagaaaagaagagtaagaagaaatataagagccaccatggcccctaagaagaagcgtaaagtgagccggatgaaccacgaccaggagttcgacccccctaaggtgtaccctcccgtccccgccgagaagagaaagcccatccgggtcctgagcctgttcgatggcatcgccaccggtctgctggtgctgaaggacctgggcatccaggtggataggtacattgcctccgaggtgtgcgaggactccatcaccgtgggaatggtgcgtcatcagggcaagatcatgtacgtgggcgacgtgcggagcgtgacacagaagcatatccaggagtggggccctttcgacctggtgatcggcggcagcccttgcaatgacctgagcatcgtgaacccagcccggaagggcctgtacgagggaaccggcagactgttcttcgagttttacagactgctgcacgacgcccggcctaaggaaggcgacgaccggcccttcttttggctgttcgagaatgtggtggccatgggagtcagcgacaagcgggatattagccggttcctggagagcaaccccgtgatgatcgatgccaaggaagtgagcgccgcccaccgggccagatacttctggggcaatctgcctggcatgaacagacccctggccagcaccgtgaacgacaagctggagctgcaggagtgcctggagcacggccggatcgccaagttcagcaaggtgagaaccatcaccacccgaagcaacagcatcaaacaaggcaaggaccagcactttcctgtgttcatgaacgagaaggaggacatcctgtggtgtaccgagatggagagagtgttcgggttcccagtccactacacagatgtcagcaacatgtctagactggccagacagagactgctgggaagaagctggtccgtccctgtgatcagacacctgttcgcccctctgaaggagtacttcgcctgcgtgagcagcggcaacagcaacgccaacagccggggccccagcttctctagcggcctggtgccactgtccctgagagggagccacatgggccccatggagatctacaaaaccgtgagcgcctggaagcggcagcctgtgcgcgtgctgagcctgtttcggaatatcgataaagtcctgaaaagcctgggattcctggagagcggctctggctccggcggtggcaccctgaagtacgtggaggatgtgacaaacgtggtcagacgggatgtggagaagtggggccccttcgatctggtgtacggcagcacccaacccctgggcagctcttgtgaccggtgccctggctggtacatgtttcagttccaccggatcctgcagtacgccctgccgagacaggagtcccagcggccattcttttggattttcatggacaacttgctgctgaccgaggatgaccaggaaactaccactcggttcctgcagaccgaagccgtgaccctgcaggacgtgagaggccgggactaccagaacgccatgcgggtgtggtccaacatccctggactgaaaagcaagcacgcacctctgacccctaaagaagaggagtacctgcaggcccaggtgcggagcagaagcaagctggacgcccctaaggtggatctgctggtgaagaattgcctcctgcccctgagagagtacttcaagtatttcagccagaatagtctgcccctgggaggcagcggcggcggcagccagagcctggtgaccttcggcgacgtggccgtggacttcagccaggaggagtgggagtggctgaacagcgcccagaggaacctgtacaggagcgtgatgctggagaactacaggaacctggtgagcctgggcctgtgcgtgagcaagcccgacgtgatcagcagcctggagcagaggaaggagccctggatggtgaagaggaagctgaccaggggcaggtgccccgacctgaagaccgtgggcggcccaagcagcggcgcccctcctcccagcggcggcaggcggcccaagcagcggcgcccctcctcccagcggcggcagcccagccggctccccaacctctaccgaggagggcacctctgagtccgccacccccgagagcggccctggcacctccaccgagcccagcgagggcagcgcacccggcagccctgccggcagccccacctccacagaggagggaaccagcaccgagcccagcgaaggcagcgccccaggcaccagcaccgagcctagtgagcaggagattaaacggatcaacaagatcagaagaagacttgtgaaagacagcaacaccaagaaggccggcaagacaggccccatgaaaaccctgctggttagagtgatgacacccgatctgagagagcggctggaaaacctgagaaagaagcctgaaaatatcccccagcccatcagcaatacatctagagccaacctgaataagctgctgaccgattacaccgaaatgaagaaggcgatcctgcatgtgtactgggaagagttccagaaggaccctgtgggcctgatgagccgggtggcccagcctgccagcaagaagatcgatcagaacaagctgaaacctgagatggacgagaagggcaacctgaccaccgccggctttgcctgctctcagtgtggccagcccctgttcgtgtacaagctggagcaggtgtctgagaagggcaaggcttacaccaactacttcggacggtgcaatgtggccgagcacgaaaagctgatcctgctggcccagctgaagcccgagaaggatagcgacgaagccgtgacatatagcctgggaaagtttgggcagagggccctggatttctacagcattcatgtgaccaaggagtccacccaccccgtgaagcccctggcccagatcgccggaaacagatacgcctccggacctgtgggaaaggccctgagcgacgcatgtatgggcacaatcgcctccttcctgtctaagtaccaggacatcatcatcgaacaccagaaggtggtgaagggcaaccagaagagactggagagcctgcgggagctggccggcaaggaaaacctggaataccctagcgtgaccctgccacctcagcctcacaccaaggagggcgttgatgcctacaacgaagtgatcgcccgggtgcgaatgtgggtgaacctgaacctgtggcagaagctgaagctaagcagagatgatgccaagcctctgctgagactgaagggattcccttcctttcctctggtcgagagacaggccaacgaagtggactggtgggacatggtgtgtaacgtgaagaagctgatcaacgagaaaaaggaggatggcaaggtgttttggcagaatctggctggctacaagagacaggaagccctgagaccatacctgagcagcgaggaagatcggaagaagggaaagaaattcgctcggtaccagctgggcgacctgctgctgcacctggaaaagaagcacggcgaggactggggaaaggtgtacgacgaggcctgggagcggattgacaagaaagtggaaggcctgagcaagcacatcaagctggaagaggaacggagaagcgaggacgcccagagcaaggccgccctgaccgactggctgcgggctaaggccagcttcgtgatcgagggcctgaaggaggccgacaaggacgagttctgcagatgcgagctgaagctgcagaagtggtacggggacctgcggggaaagcccttcgccatcgaagccgagaacagcatcctggacatcagcggcttcagcaagcagtacaactgtgccttcatctggcagaaggacggcgtgaagaagctgaacctgtacctgatcatcaactacttcaagggcggcaagctgcggttcaagaagatcaaacctgaagccttcgaagccaacagattctacaccgtgatcaacaaaaagagcggcgagatcgtgcccatggaggtgaacttcaacttcgacgaccccaacctgatcatcctgcctctggcctttggcaagagacagggcagagaattcatctggaacgacctgctgtccctggaaaccggcagcctgaagctggccaacggaagagtgatcgagaagacactgtacaacagaagaacccggcaggatgagcctgccctgttcgtggccctgaccttcgagcggcgggaggtcctggactcctccaatatcaaaccaatgaacctgatcggcgtggcaagaggcgaaaacatccccgccgtgatcgccctgaccgaccccgagggctgcccactgagccggtttaaggatagcctgggaaacccaacccacatcctgagaatcggcgagagctataaggagaagcagcggaccatccaggccaagaaggaggtggagcagcggagagccggcggctacagccggaagtacgccagcaaagccaagaatctggcagacgatatggtgagaaacaccgctagagatctgctgtactacgccgtgacccaggatgccatgctgatcttcgccaacctgagccggggcttcggccggcagggcaagcggaccttcatggccgagagacagtacacacggatggaggactggctgaccgccaagctggcctacgagggcctgagcaagacctacctgtccaagacactggcccagtacacctccaagacatgcagcaactgtgggtttaccatcaccagcgccgactacgacagggtgctggagaagctgaagaagacagcaacaggctggatgaccacaattaacggcaaggagctgaaggtggagggccagattacctactacaacagatacaagagacagaacgtagtcaaggacctgtccgtcgagctggatagactgagcgaagaatctgtgaacaacgacatctcctcctggacaaagggcagaagcggagaagctctgagcctcctgaagaaaagattctcccatagacccgtgcaggagaagttcgtgtgcctgaactgcggcttcgagacacacgcagccgagcaagccgccctgaacatcgccagatcctggctgttcctgcggagccaggagtacaagaaataccagacaaacaagacaaccggcaacaccgataagagagccttcgtcgagacctggcagtccttttaccggaagaagcttaaggaggtgtggaaacctgccgtgcggtctggcggatctggcggaggctccaccagccccaagaaaaagagaaaagtctaagctgccttctgcggggcttgccttctggccatgcccttcttctctcccttgcacctgtacctcttggtctttgaataaagcctgagtaggaaggctagcaaaaaaaaaaaaaaaaaaaaaaaaaaaaaaaaaaaaaaaaaaaaaaaaaaaaaaaaaaaaaaaaaaaaaaaaaaaaaaaagcccagccggctccccaacctctaccgaggagggcacctctgagtccgccacccccgagagcggccctggcacctccaccgagcccagcgagggcagcgcacccggcagccctgccggcagccccacctccacagaggagggaaccagcaccgagcccagcgaaggcagcgccccaggcaccagcaccgagcctagtgagcaggagattaaacggatcaacaagatcagaagaagacttgtgaaagacagcaacaccaagaaggccggcaagacaggccccatgaaaaccctgctggttagagtgatgacacccgatctgagagagcggctggaaaacctgagaaagaagcctgaaaatatcccccagcccatcagcaatacatctagagccaacctgaataagctgctgaccgattacaccgaaatgaagaaggcgatcctgcatgtgtactgggaagagttccagaaggaccctgtgggcctgatgagccgggtggcccagcctgccagcaagaagatcgatcagaacaagctgaaacctgagatggacgagaagggcaacctgaccaccgccggctttgcctgctctcagtgtggccagcccctgttcgtgtacaagctggagcaggtgtctgagaagggcaaggcttacaccaactacttcggacggtgcaatgtggccgagcacgaaaagctgatcctgctggcccagctgaagcccgagaaggatagcgacgaagccgtgacatatagcctgggaaagtttgggcagagggccctggatttctacagcattcatgtgaccaaggagtccacccaccccgtgaagcccctggcccagatcgccggaaacagatacgcctccggacctgtgggaaaggccctgagcgacgcatgtatgggcacaatcgcctccttcctgtctaagtaccaggacatcatcatcgaacaccagaaggtggtgaagggcaaccagaagagactggagagcctgcgggagctggccggcaaggaaaacctggaataccctagcgtgaccctgccacctcagcctcacaccaaggagggcgttgatgcctacaacgaagtgatcgcccgggtgcgaatgtgggtgaacctgaacctgtggcagaagctgaagctaagcagagatgatgccaagcctctgctgagactgaagggattcccttcctttcctctggtcgagagacaggccaacgaagtggactggtgggacatggtgtgtaacgtgaagaagctgatcaacgagaaaaaggaggatggcaaggtgttttggcagaatctggctggctacaagagacaggaagccctgagaccatacctgagcagcgaggaagatcggaagaagggaaagaaattcgctcggtaccagctgggcgacctgctgctgcacctggaaaagaagcacggcgaggactggggaaaggtgtacgacgaggcctgggagcggattgacaagaaagtggaaggcctgagcaagcacatcaagctggaagaggaacggagaagcgaggacgcccagagcaaggccgccctgaccgactggctgcgggctaaggccagcttcgtgatcgagggcctgaaggaggccgacaaggacgagttctgcagatgcgagctgaagctgcagaagtggtacggggacctgcggggaaagcccttcgccatcgaagccgagaacagcatcctggacatcagcggcttcagcaagcagtacaactgtgccttcatctggcagaaggacggcgtgaagaagctgaacctgtacctgatcatcaactacttcaagggcggcaagctgcggttcaagaagatcaaacctgaagccttcgaagccaacagattctacaccgtgatcaacaaaaagagcggcgagatcgtgcccatggaggtgaacttcaacttcgacgaccccaacctgatcatcctgcctctggcctttggcaagagacagggcagagaattcatctggaacgacctgctgtccctggaaaccggcagcctgaagctggccaacggaagagtgatcgagaagacactgtacaacagaagaacccggcaggatgagcctgccctgttcgtggccctgaccttcgagcggcgggaggtcctggactcctccaatatcaaaccaatgaacctgatcggcgtggcaagaggcgaaaacatccccgccgtgatcgccctgaccgaccccgagggctgcccactgagccggtttaaggatagcctgggaaacccaacccacatcctgagaatcggcgagagctataaggagaagcagcggaccatccaggccaagaaggaggtggagcagcggagagccggcggctacagccggaagtacgccagcaaagccaagaatctggcagacgatatggtgagaaacaccgctagagatctgctgtactacgccgtgacccaggatgccatgctgatcttcgccaacctgagccggggcttcggccggcagggcaagcggaccttcatggccgagagacagtacacacggatggaggactggctgaccgccaagctggcctacgagggcctgagcaagacctacctgtccaagacactggcccagtacacctccaagacatgcagcaactgtgggtttaccatcaccagcgccgactacgacagggtgctggagaagctgaagaagacagcaacaggctggatgaccacaattaacggcaaggagctgaaggtggagggccagattacctactacaacagatacaagagacagaacgtagtcaaggacctgtccgtcgagctggatagactgagcgaagaatctgtgaacaacgacatctcctcctggacaaagggcagaagcggagaagctctgagcctcctgaagaaaagattctcccatagacccgtgcaggagaagttcgtgtgcctgaactgcggcttcgagacacacgcagccgagcaagccgccctgaacatcgccagatcctggctgttcctgcggagccaggagtacaagaaataccagacaaacaagacaaccggcaacaccgataagagagccttcgtcgagacctggcagtccttttaccggaagaagcttaaggaggtgtggaaacctgccgtgcggtctggcggatctggcggaggctccaccagccccaagaaaaagagaaaagtctaagctgccttctgcggggcttgccttctggccatgcccttcttctctcccttgcacctgtacctcttggtctttgaataaagcctgagtaggaaggctagcaaaaaaaaaaaaaaaaaaaaaaaaaaaaaaaaaaaaaaaaaaaaaaaaaaaaaaaaaaaaaaaaaaaaaaaaaaaaaaaa

SEQ ID NO: 9404 - RNA, 8787 nt, synthetic construct
  source 1..8787: mol_type = other RNA
aggaaataagagagaaaagaagagtaagaagaaatataagagccaccatggcccctaagaagaagcgtaaagtgagccggatgaaccacgaccaggagttcgacccccctaaggtgtaccctcccgtccccgccgagaagagaaagcccatccgggtcctgagcctgttcgatggcatcgccaccggtctgctggtgctgaaggacctgggcatccaggtggataggtacattgcctccgaggtgtgcgaggactccatcaccgtgggaatggtgcgtcatcagggcaagatcatgtacgtgggcgacgtgcggagcgtgacacagaagcatatccaggagtggggccctttcgacctggtgatcggcggcagcccttgcaatgacctgagcatcgtgaacccagcccggaagggcctgtacgagggaaccggcagactgttcttcgagttttacagactgctgcacgacgcccggcctaaggaaggcgacgaccggcccttcttttggctgttcgagaatgtggtggccatgggagtcagcgacaagcgggatattagccggttcctggagagcaaccccgtgatgatcgatgccaaggaagtgagcgccgcccaccgggccagatacttctggggcaatctgcctggcatgaacagacccctggccagcaccgtgaacgacaagctggagctgcaggagtgcctggagcacggccggatcgccaagttcagcaaggtgagaaccatcaccacccgaagcaacagcatcaaacaaggcaaggaccagcactttcctgtgttcatgaacgagaaggaggacatcctgtggtgtaccgagatggagagagtgttcgggttcccagtccactacacagatgtcagcaacatgtctagactggccagacagagactgctgggaagaagctggtccgtccctgtgatcagacacctgttcgcccctctgaaggagtacttcgcctgcgtgagcagcggcaacagcaacgccaacagccggggccccagcttctctagcggcctggtgccactgtccctgagagggagccacatgggccccatggagatctacaaaaccgtgagcgcctggaagcggcagcctgtgcgcgtgctgagcctgtttcggaatatcgataaagtcctgaaaagcctgggattcctggagagcggctctggctccggcggtggcaccctgaagtacgtggaggatgtgacaaacgtggtcagacgggatgtggagaagtggggccccttcgatctggtgtacggcagcacccaacccctgggcagctcttgtgaccggtgccctggctggtacatgtttcagttccaccggatcctgcagtacgccctgccgagacaggagtcccagcggccattcttttggattttcatggacaacttgctgctgaccgaggatgaccaggaaactaccactcggttcctgcagaccgaagccgtgaccctgcaggacgtgagaggccgggactaccagaacgccatgcgggtgtggtccaacatccctggactgaaaagcaagcacgcacctctgacccctaaagaagaggagtacctgcaggcccaggtgcggagcagaagcaagctggacgcccctaaggtggatctgctggtgaagaattgcctcctgcccctgagagagtacttcaagtatttcagccagaatagtctgcccctgggaggcagcggcggcggcgcccaggagagcgtgatgttcagcgacgtgagcatcgacttcagccaggaggagtgggagtgcctgaacgacgaccagagggccctgtacagggacgtgatgctggagaactacagcaacctggtgagcatggccggccacagcatcagcaagcccgacgtgatcagcttcctggagcagggcaaggagccctggctggtggacagggagctgaccaggggccagtggcccgtgctggagagcggcggcccaagcagcggcgcccctcctcccagcggcggcaggcggcccaagcagcggcgcccctcctcccagcggcggcagcccagccggctccccaacctctaccgaggagggcacctctgagtccgccacccccgagagcggccctggcacctccaccgagcccagcgagggcagcgcacccggcagccctgccggcagccccacctccacagaggagggaaccagcaccgagcccagcgaaggcagcgccccaggcaccagcaccgagcctagtgagcaggagattaaacggatcaacaagatcagaagaagacttgtgaaagacagcaacaccaagaaggccggcaagacaggccccatgaaaaccctgctggttagagtgatgacacccgatctgagagagcggctggaaaacctgagaaagaagcctgaaaatatcccccagcccatcagcaatacatctagagccaacctgaataagctgctgaccgattacaccgaaatgaagaaggcgatcctgcatgtgtactgggaagagttccagaaggaccctgtgggcctgatgagccgggtggcccagcctgccagcaagaagatcgatcagaacaagctgaaacctgagatggacgagaagggcaacctgaccaccgccggctttgcctgctctcagtgtggccagcccctgttcgtgtacaagctggagcaggtgtctgagaagggcaaggcttacaccaactacttcggacggtgcaatgtggccgagcacgaaaagctgatcctgctggcccagctgaagcccgagaaggatagcgacgaagccgtgacatatagcctgggaaagtttgggcagagggccctggatttctacagcattcatgtgaccaaggagtccacccaccccgtgaagcccctggcccagatcgccggaaacagatacgcctccggacctgtgggaaaggccctgagcgacgcatgtatgggcacaatcgcctccttcctgtctaagtaccaggacatcatcatcgaacaccagaaggtggtgaagggcaaccagaagagactggagagcctgcgggagctggccggcaaggaaaacctggaataccctagcgtgaccctgccacctcagcctcacaccaaggagggcgttgatgcctacaacgaagtgatcgcccgggtgcgaatgtgggtgaacctgaacctgtggcagaagctgaagctaagcagagatgatgccaagcctctgctgagactgaagggattcccttcctttcctctggtcgagagacaggccaacgaagtggactggtgggacatggtgtgtaacgtgaagaagctgatcaacgagaaaaaggaggatggcaaggtgttttggcagaatctggctggctacaagagacaggaagccctgagaccatacctgagcagcgaggaagatcggaagaagggaaagaaattcgctcggtaccagctgggcgacctgctgctgcacctggaaaagaagcacggcgaggactggggaaaggtgtacgacgaggcctgggagcggattgacaagaaagtggaaggcctgagcaagcacatcaagctggaagaggaacggagaagcgaggacgcccagagcaaggccgccctgaccgactggctgcgggctaaggccagcttcgtgatcgagggcctgaaggaggccgacaaggacgagttctgcagatgcgagctgaagctgcagaagtggtacggggacctgcggggaaagcccttcgccatcgaagccgagaacagcatcctggacatcagcggcttcagcaagcagtacaactgtgccttcatctggcagaaggacggcgtgaagaagctgaacctgtacctgatcatcaactacttcaagggcggcaagctgcggttcaagaagatcaaacctgaagccttcgaagccaacagattctacaccgtgatcaacaaaaagagcggcgagatcgtgcccatggaggtgaacttcaacttcgacgaccccaacctgatcatcctgcctctggcctttggcaagagacagggcagagaattcatctggaacgacctgctgtccctggaaaccggcagcctgaagctggccaacggaagagtgatcgagaagacactgtacaacagaagaacccggcaggatgagcctgccctgttcgtggccctgaccttcgagcggcgggaggtcctggactcctccaatatcaaaccaatgaacctgatcggcgtggcaagaggcgaaaacatccccgccgtgatcgccctgaccgaccccgagggctgcccactgagccggtttaaggatagcctgggaaacccaacccacatcctgagaatcggcgagagctataaggagaagcagcggaccatccaggccaagaaggaggtggagcagcggagagccggcggctacagccggaagtacgccagcaaagccaagaatctggcagacgatatggtgagaaacaccgctagagatctgctgtactacgccgtgacccaggatgccatgctgatcttcgccaacctgagccggggcttcggccggcagggcaagcggaccttcatggccgagagacagtacacacggatggaggactggctgaccgccaagctggcctacgagggcctgagcaagacctacctgtccaagacactggcccagtacacctccaagacatgcagcaactgtgggtttaccatcaccagcgccgactacgacagggtgctggagaagctgaagaagacagcaacaggctggatgaccacaattaacggcaaggagctgaaggtggagggccagattacctactacaacagatacaagagacagaacgtagtcaaggacctgtccgtcgagctggatagactgagcgaagaatctgtgaacaacgacatctcctcctggacaaagggcagaagcggagaagctctgagcctcctgaagaaaagattctcccatagacccgtgcaggagaagttcgtgtgcctgaactgcggcttcgagacacacgcagccgagcaagccgccctgaacatcgccagatcctggctgttcctgcggagccaggagtacaagaaataccagacaaacaagacaaccggcaacaccgataagagagccttcgtcgagacctggcagtccttttaccggaagaagcttaaggaggtgtggaaacctgccgtgcggtctggcggatctggcggaggctccaccagccccaagaaaaagagaaaagtctaagctgccttctgcggggcttgccttctggccatgcccttcttctctcccttgcacctgtacctcttggtctttgaataaagcctgagtaggaaggctagcaaaaaaaaaaaaaaaaaaaaaaaaaaaaaaaaaaaaaaaaaaaaaaaaaaaaaaaaaaaaaaaaaaaaaaaaaaaaaaaagcccagccggctccccaacctctaccgaggagggcacctctgagtccgccacccccgagagcggccctggcacctccaccgagcccagcgagggcagcgcacccggcagccctgccggcagccccacctccacagaggagggaaccagcaccgagcccagcgaaggcagcgccccaggcaccagcaccgagcctagtgagcaggagattaaacggatcaacaagatcagaagaagacttgtgaaagacagcaacaccaagaaggccggcaagacaggccccatgaaaaccctgctggttagagtgatgacacccgatctgagagagcggctggaaaacctgagaaagaagcctgaaaatatcccccagcccatcagcaatacatctagagccaacctgaataagctgctgaccgattacaccgaaatgaagaaggcgatcctgcatgtgtactgggaagagttccagaaggaccctgtgggcctgatgagccgggtggcccagcctgccagcaagaagatcgatcagaacaagctgaaacctgagatggacgagaagggcaacctgaccaccgccggctttgcctgctctcagtgtggccagcccctgttcgtgtacaagctggagcaggtgtctgagaagggcaaggcttacaccaactacttcggacggtgcaatgtggccgagcacgaaaagctgatcctgctggcccagctgaagcccgagaaggatagcgacgaagccgtgacatatagcctgggaaagtttgggcagagggccctggatttctacagcattcatgtgaccaaggagtccacccaccccgtgaagcccctggcccagatcgccggaaacagatacgcctccggacctgtgggaaaggccctgagcgacgcatgtatgggcacaatcgcctccttcctgtctaagtaccaggacatcatcatcgaacaccagaaggtggtgaagggcaaccagaagagactggagagcctgcgggagctggccggcaaggaaaacctggaataccctagcgtgaccctgccacctcagcctcacaccaaggagggcgttgatgcctacaacgaagtgatcgcccgggtgcgaatgtgggtgaacctgaacctgtggcagaagctgaagctaagcagagatgatgccaagcctctgctgagactgaagggattcccttcctttcctctggtcgagagacaggccaacgaagtggactggtgggacatggtgtgtaacgtgaagaagctgatcaacgagaaaaaggaggatggcaaggtgttttggcagaatctggctggctacaagagacaggaagccctgagaccatacctgagcagcgaggaagatcggaagaagggaaagaaattcgctcggtaccagctgggcgacctgctgctgcacctggaaaagaagcacggcgaggactggggaaaggtgtacgacgaggcctgggagcggattgacaagaaagtggaaggcctgagcaagcacatcaagctggaagaggaacggagaagcgaggacgcccagagcaaggccgccctgaccgactggctgcgggctaaggccagcttcgtgatcgagggcctgaaggaggccgacaaggacgagttctgcagatgcgagctgaagctgcagaagtggtacggggacctgcggggaaagcccttcgccatcgaagccgagaacagcatcctggacatcagcggcttcagcaagcagtacaactgtgccttcatctggcagaaggacggcgtgaagaagctgaacctgtacctgatcatcaactacttcaagggcggcaagctgcggttcaagaagatcaaacctgaagccttcgaagccaacagattctacaccgtgatcaacaaaaagagcggcgagatcgtgcccatggaggtgaacttcaacttcgacgaccccaacctgatcatcctgcctctggcctttggcaagagacagggcagagaattcatctggaacgacctgctgtccctggaaaccggcagcctgaagctggccaacggaagagtgatcgagaagacactgtacaacagaagaacccggcaggatgagcctgccctgttcgtggccctgaccttcgagcggcgggaggtcctggactcctccaatatcaaaccaatgaacctgatcggcgtggcaagaggcgaaaacatccccgccgtgatcgccctgaccgaccccgagggctgcccactgagccggtttaaggatagcctgggaaacccaacccacatcctgagaatcggcgagagctataaggagaagcagcggaccatccaggccaagaaggaggtggagcagcggagagccggcggctacagccggaagtacgccagcaaagccaagaatctggcagacgatatggtgagaaacaccgctagagatctgctgtactacgccgtgacccaggatgccatgctgatcttcgccaacctgagccggggcttcggccggcagggcaagcggaccttcatggccgagagacagtacacacggatggaggactggctgaccgccaagctggcctacgagggcctgagcaagacctacctgtccaagacactggcccagtacacctccaagacatgcagcaactgtgggtttaccatcaccagcgccgactacgacagggtgctggagaagctgaagaagacagcaacaggctggatgaccacaattaacggcaaggagctgaaggtggagggccagattacctactacaacagatacaagagacagaacgtagtcaaggacctgtccgtcgagctggatagactgagcgaagaatctgtgaacaacgacatctcctcctggacaaagggcagaagcggagaagctctgagcctcctgaagaaaagattctcccatagacccgtgcaggagaagttcgtgtgcctgaactgcggcttcgagacacacgcagccgagcaagccgccctgaacatcgccagatcctggctgttcctgcggagccaggagtacaagaaataccagacaaacaagacaaccggcaacaccgataagagagccttcgtcgagacctggcagtccttttaccggaagaagcttaaggaggtgtggaaacctgccgtgcggtctggcggatctggcggaggctccaccagccccaagaaaaagagaaaagtctaagctgccttctgcggggcttgccttctggccatgcccttcttctctcccttgcacctgtacctcttggtctttgaataaagcctgagtaggaaggctagcaaaaaaaaaaaaaaaaaaaaaaaaaaaaaaaaaaaaaaaaaaaaaaaaaaaaaaaaaaaaaaaaaaaaaaaaaaaaaaaa

SEQ ID NO: 9405 - RNA, 8787 nt, synthetic construct
  source 1..8787: mol_type = other RNA
aggaaataagagagaaaagaagagtaagaagaaatataagagccaccatggcccctaagaagaagcgtaaagtgagccggatgaaccacgaccaggagttcgacccccctaaggtgtaccctcccgtccccgccgagaagagaaagcccatccgggtcctgagcctgttcgatggcatcgccaccggtctgctggtgctgaaggacctgggcatccaggtggataggtacattgcctccgaggtgtgcgaggactccatcaccgtgggaatggtgcgtcatcagggcaagatcatgtacgtgggcgacgtgcggagcgtgacacagaagcatatccaggagtggggccctttcgacctggtgatcggcggcagcccttgcaatgacctgagcatcgtgaacccagcccggaagggcctgtacgagggaaccggcagactgttcttcgagttttacagactgctgcacgacgcccggcctaaggaaggcgacgaccggcccttcttttggctgttcgagaatgtggtggccatgggagtcagcgacaagcgggatattagccggttcctggagagcaaccccgtgatgatcgatgccaaggaagtgagcgccgcccaccgggccagatacttctggggcaatctgcctggcatgaacagacccctggccagcaccgtgaacgacaagctggagctgcaggagtgcctggagcacggccggatcgccaagttcagcaaggtgagaaccatcaccacccgaagcaacagcatcaaacaaggcaaggaccagcactttcctgtgttcatgaacgagaaggaggacatcctgtggtgtaccgagatggagagagtgttcgggttcccagtccactacacagatgtcagcaacatgtctagactggccagacagagactgctgggaagaagctggtccgtccctgtgatcagacacctgttcgcccctctgaaggagtacttcgcctgcgtgagcagcggcaacagcaacgccaacagccggggccccagcttctctagcggcctggtgccactgtccctgagagggagccacatgggccccatggagatctacaaaaccgtgagcgcctggaagcggcagcctgtgcgcgtgctgagcctgtttcggaatatcgataaagtcctgaaaagcctgggattcctggagagcggctctggctccggcggtggcaccctgaagtacgtggaggatgtgacaaacgtggtcagacgggatgtggagaagtggggccccttcgatctggtgtacggcagcacccaacccctgggcagctcttgtgaccggtgccctggctggtacatgtttcagttccaccggatcctgcagtacgccctgccgagacaggagtcccagcggccattcttttggattttcatggacaacttgctgctgaccgaggatgaccaggaaactaccactcggttcctgcagaccgaagccgtgaccctgcaggacgtgagaggccgggactaccagaacgccatgcgggtgtggtccaacatccctggactgaaaagcaagcacgcacctctgacccctaaagaagaggagtacctgcaggcccaggtgcggagcagaagcaagctggacgcccctaaggtggatctgctggtgaagaattgcctcctgcccctgagagagtacttcaagtatttcagccagaatagtctgcccctgggaggcagcggcggcggcgcccaccacctggtgatgttcagggacgtggccgtggacttcagccaggacgagtgggagtgcctgaacagctaccagaggaacctgtacagggacgtgatcctggagaactacagcaacctggtgagcgtggccggctgcagcatcagcaagcccgacgtgatcaccctgctggagcagggcagggagccctggatggtggtgagggacgagaggaggaggaggaccctggacctggagagcggcggcccaagcagcggcgcccctcctcccagcggcggcaggcggcccaagcagcggcgcccctcctcccagcggcggcagcccagccggctccccaacctctaccgaggagggcacctctgagtccgccacccccgagagcggccctggcacctccaccgagcccagcgagggcagcgcacccggcagccctgccggcagccccacctccacagaggagggaaccagcaccgagcccagcgaaggcagcgccccaggcaccagcaccgagcctagtgagcaggagattaaacggatcaacaagatcagaagaagacttgtgaaagacagcaacaccaagaaggccggcaagacaggccccatgaaaaccctgctggttagagtgatgacacccgatctgagagagcggctggaaaacctgagaaagaagcctgaaaatatcccccagcccatcagcaatacatctagagccaacctgaataagctgctgaccgattacaccgaaatgaagaaggcgatcctgcatgtgtactgggaagagttccagaaggaccctgtgggcctgatgagccgggtggcccagcctgccagcaagaagatcgatcagaacaagctgaaacctgagatggacgagaagggcaacctgaccaccgccggctttgcctgctctcagtgtggccagcccctgttcgtgtacaagctggagcaggtgtctgagaagggcaaggcttacaccaactacttcggacggtgcaatgtggccgagcacgaaaagctgatcctgctggcccagctgaagcccgagaaggatagcgacgaagccgtgacatatagcctgggaaagtttgggcagagggccctggatttctacagcattcatgtgaccaaggagtccacccaccccgtgaagcccctggcccagatcgccggaaacagatacgcctccggacctgtgggaaaggccctgagcgacgcatgtatgggcacaatcgcctccttcctgtctaagtaccaggacatcatcatcgaacaccagaaggtggtgaagggcaaccagaagagactggagagcctgcgggagctggccggcaaggaaaacctggaataccctagcgtgaccctgccacctcagcctcacaccaaggagggcgttgatgcctacaacgaagtgatcgcccgggtgcgaatgtgggtgaacctgaacctgtggcagaagctgaagctaagcagagatgatgccaagcctctgctgagactgaagggattcccttcctttcctctggtcgagagacaggccaacgaagtggactggtgggacatggtgtgtaacgtgaagaagctgatcaacgagaaaaaggaggatggcaaggtgttttggcagaatctggctggctacaagagacaggaagccctgagaccatacctgagcagcgaggaagatcggaagaagggaaagaaattcgctcggtaccagctgggcgacctgctgctgcacctggaaaagaagcacggcgaggactggggaaaggtgtacgacgaggcctgggagcggattgacaagaaagtggaaggcctgagcaagcacatcaagctggaagaggaacggagaagcgaggacgcccagagcaaggccgccctgaccgactggctgcgggctaaggccagcttcgtgatcgagggcctgaaggaggccgacaaggacgagttctgcagatgcgagctgaagctgcagaagtggtacggggacctgcggggaaagcccttcgccatcgaagccgagaacagcatcctggacatcagcggcttcagcaagcagtacaactgtgccttcatctggcagaaggacggcgtgaagaagctgaacctgtacctgatcatcaactacttcaagggcggcaagctgcggttcaagaagatcaaacctgaagccttcgaagccaacagattctacaccgtgatcaacaaaaagagcggcgagatcgtgcccatggaggtgaacttcaacttcgacgaccccaacctgatcatcctgcctctggcctttggcaagagacagggcagagaattcatctggaacgacctgctgtccctggaaaccggcagcctgaagctggccaacggaagagtgatcgagaagacactgtacaacagaagaacccggcaggatgagcctgccctgttcgtggccctgaccttcgagcggcgggaggtcctggactcctccaatatcaaaccaatgaacctgatcggcgtggcaagaggcgaaaacatccccgccgtgatcgccctgaccgaccccgagggctgcccactgagccggtttaaggatagcctgggaaacccaacccacatcctgagaatcggcgagagctataaggagaagcagcggaccatccaggccaagaaggaggtggagcagcggagagccggcggctacagccggaagtacgccagcaaagccaagaatctggcagacgatatggtgagaaacaccgctagagatctgctgtactacgccgtgacccaggatgccatgctgatcttcgccaacctgagccggggcttcggccggcagggcaagcggaccttcatggccgagagacagtacacacggatggaggactggctgaccgccaagctggcctacgagggcctgagcaagacctacctgtccaagacactggcccagtacacctccaagacatgcagcaactgtgggtttaccatcaccagcgccgactacgacagggtgctggagaagctgaagaagacagcaacaggctggatgaccacaattaacggcaaggagctgaaggtggagggccagattacctactacaacagatacaagagacagaacgtagtcaaggacctgtccgtcgagctggatagactgagcgaagaatctgtgaacaacgacatctcctcctggacaaagggcagaagcggagaagctctgagcctcctgaagaaaagattctcccatagacccgtgcaggagaagttcgtgtgcctgaactgcggcttcgagacacacgcagccgagcaagccgccctgaacatcgccagatcctggctgttcctgcggagccaggagtacaagaaataccagacaaacaagacaaccggcaacaccgataagagagccttcgtcgagacctggcagtccttttaccggaagaagcttaaggaggtgtggaaacctgccgtgcggtctggcggatctggcggaggctccaccagccccaagaaaaagagaaaagtctaagctgccttctgcggggcttgccttctggccatgcccttcttctctcccttgcacctgtacctcttggtctttgaataaagcctgagtaggaaggctagcaaaaaaaaaaaaaaaaaaaaaaaaaaaaaaaaaaaaaaaaaaaaaaaaaaaaaaaaaaaaaaaaaaaaaaaaaaaaaaaagcccagccggctccccaacctctaccgaggagggcacctctgagtccgccacccccgagagcggccctggcacctccaccgagcccagcgagggcagcgcacccggcagccctgccggcagccccacctccacagaggagggaaccagcaccgagcccagcgaaggcagcgccccaggcaccagcaccgagcctagtgagcaggagattaaacggatcaacaagatcagaagaagacttgtgaaagacagcaacaccaagaaggccggcaagacaggccccatgaaaaccctgctggttagagtgatgacacccgatctgagagagcggctggaaaacctgagaaagaagcctgaaaatatcccccagcccatcagcaatacatctagagccaacctgaataagctgctgaccgattacaccgaaatgaagaaggcgatcctgcatgtgtactgggaagagttccagaaggaccctgtgggcctgatgagccgggtggcccagcctgccagcaagaagatcgatcagaacaagctgaaacctgagatggacgagaagggcaacctgaccaccgccggctttgcctgctctcagtgtggccagcccctgttcgtgtacaagctggagcaggtgtctgagaagggcaaggcttacaccaactacttcggacggtgcaatgtggccgagcacgaaaagctgatcctgctggcccagctgaagcccgagaaggatagcgacgaagccgtgacatatagcctgggaaagtttgggcagagggccctggatttctacagcattcatgtgaccaaggagtccacccaccccgtgaagcccctggcccagatcgccggaaacagatacgcctccggacctgtgggaaaggccctgagcgacgcatgtatgggcacaatcgcctccttcctgtctaagtaccaggacatcatcatcgaacaccagaaggtggtgaagggcaaccagaagagactggagagcctgcgggagctggccggcaaggaaaacctggaataccctagcgtgaccctgccacctcagcctcacaccaaggagggcgttgatgcctacaacgaagtgatcgcccgggtgcgaatgtgggtgaacctgaacctgtggcagaagctgaagctaagcagagatgatgccaagcctctgctgagactgaagggattcccttcctttcctctggtcgagagacaggccaacgaagtggactggtgggacatggtgtgtaacgtgaagaagctgatcaacgagaaaaaggaggatggcaaggtgttttggcagaatctggctggctacaagagacaggaagccctgagaccatacctgagcagcgaggaagatcggaagaagggaaagaaattcgctcggtaccagctgggcgacctgctgctgcacctggaaaagaagcacggcgaggactggggaaaggtgtacgacgaggcctgggagcggattgacaagaaagtggaaggcctgagcaagcacatcaagctggaagaggaacggagaagcgaggacgcccagagcaaggccgccctgaccgactggctgcgggctaaggccagcttcgtgatcgagggcctgaaggaggccgacaaggacgagttctgcagatgcgagctgaagctgcagaagtggtacggggacctgcggggaaagcccttcgccatcgaagccgagaacagcatcctggacatcagcggcttcagcaagcagtacaactgtgccttcatctggcagaaggacggcgtgaagaagctgaacctgtacctgatcatcaactacttcaagggcggcaagctgcggttcaagaagatcaaacctgaagccttcgaagccaacagattctacaccgtgatcaacaaaaagagcggcgagatcgtgcccatggaggtgaacttcaacttcgacgaccccaacctgatcatcctgcctctggcctttggcaagagacagggcagagaattcatctggaacgacctgctgtccctggaaaccggcagcctgaagctggccaacggaagagtgatcgagaagacactgtacaacagaagaacccggcaggatgagcctgccctgttcgtggccctgaccttcgagcggcgggaggtcctggactcctccaatatcaaaccaatgaacctgatcggcgtggcaagaggcgaaaacatccccgccgtgatcgccctgaccgaccccgagggctgcccactgagccggtttaaggatagcctgggaaacccaacccacatcctgagaatcggcgagagctataaggagaagcagcggaccatccaggccaagaaggaggtggagcagcggagagccggcggctacagccggaagtacgccagcaaagccaagaatctggcagacgatatggtgagaaacaccgctagagatctgctgtactacgccgtgacccaggatgccatgctgatcttcgccaacctgagccggggcttcggccggcagggcaagcggaccttcatggccgagagacagtacacacggatggaggactggctgaccgccaagctggcctacgagggcctgagcaagacctacctgtccaagacactggcccagtacacctccaagacatgcagcaactgtgggtttaccatcaccagcgccgactacgacagggtgctggagaagctgaagaagacagcaacaggctggatgaccacaattaacggcaaggagctgaaggtggagggccagattacctactacaacagatacaagagacagaacgtagtcaaggacctgtccgtcgagctggatagactgagcgaagaatctgtgaacaacgacatctcctcctggacaaagggcagaagcggagaagctctgagcctcctgaagaaaagattctcccatagacccgtgcaggagaagttcgtgtgcctgaactgcggcttcgagacacacgcagccgagcaagccgccctgaacatcgccagatcctggctgttcctgcggagccaggagtacaagaaataccagacaaacaagacaaccggcaacaccgataagagagccttcgtcgagacctggcagtccttttaccggaagaagcttaaggaggtgtggaaacctgccgtgcggtctggcggatctggcggaggctccaccagccccaagaaaaagagaaaagtctaagctgccttctgcggggcttgccttctggccatgcccttcttctctcccttgcacctgtacctcttggtctttgaataaagcctgagtaggaaggctagcaaaaaaaaaaaaaaaaaaaaaaaaaaaaaaaaaaaaaaaaaaaaaaaaaaaaaaaaaaaaaaaaaaaaaaaaaaaaaaaa

SEQ ID NO: 9406 - RNA, 8787 nt, synthetic construct
  source 1..8787: mol_type = other RNA
aggaaataagagagaaaagaagagtaagaagaaatataagagccaccatggcccctaagaagaagcgtaaagtgagccggatgaaccacgaccaggagttcgacccccctaaggtgtaccctcccgtccccgccgagaagagaaagcccatccgggtcctgagcctgttcgatggcatcgccaccggtctgctggtgctgaaggacctgggcatccaggtggataggtacattgcctccgaggtgtgcgaggactccatcaccgtgggaatggtgcgtcatcagggcaagatcatgtacgtgggcgacgtgcggagcgtgacacagaagcatatccaggagtggggccctttcgacctggtgatcggcggcagcccttgcaatgacctgagcatcgtgaacccagcccggaagggcctgtacgagggaaccggcagactgttcttcgagttttacagactgctgcacgacgcccggcctaaggaaggcgacgaccggcccttcttttggctgttcgagaatgtggtggccatgggagtcagcgacaagcgggatattagccggttcctggagagcaaccccgtgatgatcgatgccaaggaagtgagcgccgcccaccgggccagatacttctggggcaatctgcctggcatgaacagacccctggccagcaccgtgaacgacaagctggagctgcaggagtgcctggagcacggccggatcgccaagttcagcaaggtgagaaccatcaccacccgaagcaacagcatcaaacaaggcaaggaccagcactttcctgtgttcatgaacgagaaggaggacatcctgtggtgtaccgagatggagagagtgttcgggttcccagtccactacacagatgtcagcaacatgtctagactggccagacagagactgctgggaagaagctggtccgtccctgtgatcagacacctgttcgcccctctgaaggagtacttcgcctgcgtgagcagcggcaacagcaacgccaacagccggggccccagcttctctagcggcctggtgccactgtccctgagagggagccacatgggccccatggagatctacaaaaccgtgagcgcctggaagcggcagcctgtgcgcgtgctgagcctgtttcggaatatcgataaagtcctgaaaagcctgggattcctggagagcggctctggctccggcggtggcaccctgaagtacgtggaggatgtgacaaacgtggtcagacgggatgtggagaagtggggccccttcgatctggtgtacggcagcacccaacccctgggcagctcttgtgaccggtgccctggctggtacatgtttcagttccaccggatcctgcagtacgccctgccgagacaggagtcccagcggccattcttttggattttcatggacaacttgctgctgaccgaggatgaccaggaaactaccactcggttcctgcagaccgaagccgtgaccctgcaggacgtgagaggccgggactaccagaacgccatgcgggtgtggtccaacatccctggactgaaaagcaagcacgcacctctgacccctaaagaagaggagtacctgcaggcccaggtgcggagcagaagcaagctggacgcccctaaggtggatctgctggtgaagaattgcctcctgcccctgagagagtacttcaagtatttcagccagaatagtctgcccctgggaggcagcggcggcggcgagcccgtgagcttcgaggaggtggccgtgtacttcagcagggaggagtgggccctgctggaccccgcccagagggccctgtacagggacgtgatgctggagacctacgagtgcgtggccagcctggcccccctgcccggccccaagcccatggtgatcagcctgctggaggagggcgaggagccctggatccccgacgtgggcagccccgaggccgtggccggcgacgtgagccccggcgagggcggcccaagcagcggcgcccctcctcccagcggcggcaggcggcccaagcagcggcgcccctcctcccagcggcggcagcccagccggctccccaacctctaccgaggagggcacctctgagtccgccacccccgagagcggccctggcacctccaccgagcccagcgagggcagcgcacccggcagccctgccggcagccccacctccacagaggagggaaccagcaccgagcccagcgaaggcagcgccccaggcaccagcaccgagcctagtgagcaggagattaaacggatcaacaagatcagaagaagacttgtgaaagacagcaacaccaagaaggccggcaagacaggccccatgaaaaccctgctggttagagtgatgacacccgatctgagagagcggctggaaaacctgagaaagaagcctgaaaatatcccccagcccatcagcaatacatctagagccaacctgaataagctgctgaccgattacaccgaaatgaagaaggcgatcctgcatgtgtactgggaagagttccagaaggaccctgtgggcctgatgagccgggtggcccagcctgccagcaagaagatcgatcagaacaagctgaaacctgagatggacgagaagggcaacctgaccaccgccggctttgcctgctctcagtgtggccagcccctgttcgtgtacaagctggagcaggtgtctgagaagggcaaggcttacaccaactacttcggacggtgcaatgtggccgagcacgaaaagctgatcctgctggcccagctgaagcccgagaaggatagcgacgaagccgtgacatatagcctgggaaagtttgggcagagggccctggatttctacagcattcatgtgaccaaggagtccacccaccccgtgaagcccctggcccagatcgccggaaacagatacgcctccggacctgtgggaaaggccctgagcgacgcatgtatgggcacaatcgcctccttcctgtctaagtaccaggacatcatcatcgaacaccagaaggtggtgaagggcaaccagaagagactggagagcctgcgggagctggccggcaaggaaaacctggaataccctagcgtgaccctgccacctcagcctcacaccaaggagggcgttgatgcctacaacgaagtgatcgcccgggtgcgaatgtgggtgaacctgaacctgtggcagaagctgaagctaagcagagatgatgccaagcctctgctgagactgaagggattcccttcctttcctctggtcgagagacaggccaacgaagtggactggtgggacatggtgtgtaacgtgaagaagctgatcaacgagaaaaaggaggatggcaaggtgttttggcagaatctggctggctacaagagacaggaagccctgagaccatacctgagcagcgaggaagatcggaagaagggaaagaaattcgctcggtaccagctgggcgacctgctgctgcacctggaaaagaagcacggcgaggactggggaaaggtgtacgacgaggcctgggagcggattgacaagaaagtggaaggcctgagcaagcacatcaagctggaagaggaacggagaagcgaggacgcccagagcaaggccgccctgaccgactggctgcgggctaaggccagcttcgtgatcgagggcctgaaggaggccgacaaggacgagttctgcagatgcgagctgaagctgcagaagtggtacggggacctgcggggaaagcccttcgccatcgaagccgagaacagcatcctggacatcagcggcttcagcaagcagtacaactgtgccttcatctggcagaaggacggcgtgaagaagctgaacctgtacctgatcatcaactacttcaagggcggcaagctgcggttcaagaagatcaaacctgaagccttcgaagccaacagattctacaccgtgatcaacaaaaagagcggcgagatcgtgcccatggaggtgaacttcaacttcgacgaccccaacctgatcatcctgcctctggcctttggcaagagacagggcagagaattcatctggaacgacctgctgtccctggaaaccggcagcctgaagctggccaacggaagagtgatcgagaagacactgtacaacagaagaacccggcaggatgagcctgccctgttcgtggccctgaccttcgagcggcgggaggtcctggactcctccaatatcaaaccaatgaacctgatcggcgtggcaagaggcgaaaacatccccgccgtgatcgccctgaccgaccccgagggctgcccactgagccggtttaaggatagcctgggaaacccaacccacatcctgagaatcggcgagagctataaggagaagcagcggaccatccaggccaagaaggaggtggagcagcggagagccggcggctacagccggaagtacgccagcaaagccaagaatctggcagacgatatggtgagaaacaccgctagagatctgctgtactacgccgtgacccaggatgccatgctgatcttcgccaacctgagccggggcttcggccggcagggcaagcggaccttcatggccgagagacagtacacacggatggaggactggctgaccgccaagctggcctacgagggcctgagcaagacctacctgtccaagacactggcccagtacacctccaagacatgcagcaactgtgggtttaccatcaccagcgccgactacgacagggtgctggagaagctgaagaagacagcaacaggctggatgaccacaattaacggcaaggagctgaaggtggagggccagattacctactacaacagatacaagagacagaacgtagtcaaggacctgtccgtcgagctggatagactgagcgaagaatctgtgaacaacgacatctcctcctggacaaagggcagaagcggagaagctctgagcctcctgaagaaaagattctcccatagacccgtgcaggagaagttcgtgtgcctgaactgcggcttcgagacacacgcagccgagcaagccgccctgaacatcgccagatcctggctgttcctgcggagccaggagtacaagaaataccagacaaacaagacaaccggcaacaccgataagagagccttcgtcgagacctggcagtccttttaccggaagaagcttaaggaggtgtggaaacctgccgtgcggtctggcggatctggcggaggctccaccagccccaagaaaaagagaaaagtctaagctgccttctgcggggcttgccttctggccatgcccttcttctctcccttgcacctgtacctcttggtctttgaataaagcctgagtaggaaggctagcaaaaaaaaaaaaaaaaaaaaaaaaaaaaaaaaaaaaaaaaaaaaaaaaaaaaaaaaaaaaaaaaaaaaaaaaaaaaaaaagcccagccggctccccaacctctaccgaggagggcacctctgagtccgccacccccgagagcggccctggcacctccaccgagcccagcgagggcagcgcacccggcagccctgccggcagccccacctccacagaggagggaaccagcaccgagcccagcgaaggcagcgccccaggcaccagcaccgagcctagtgagcaggagattaaacggatcaacaagatcagaagaagacttgtgaaagacagcaacaccaagaaggccggcaagacaggccccatgaaaaccctgctggttagagtgatgacacccgatctgagagagcggctggaaaacctgagaaagaagcctgaaaatatcccccagcccatcagcaatacatctagagccaacctgaataagctgctgaccgattacaccgaaatgaagaaggcgatcctgcatgtgtactgggaagagttccagaaggaccctgtgggcctgatgagccgggtggcccagcctgccagcaagaagatcgatcagaacaagctgaaacctgagatggacgagaagggcaacctgaccaccgccggctttgcctgctctcagtgtggccagcccctgttcgtgtacaagctggagcaggtgtctgagaagggcaaggcttacaccaactacttcggacggtgcaatgtggccgagcacgaaaagctgatcctgctggcccagctgaagcccgagaaggatagcgacgaagccgtgacatatagcctgggaaagtttgggcagagggccctggatttctacagcattcatgtgaccaaggagtccacccaccccgtgaagcccctggcccagatcgccggaaacagatacgcctccggacctgtgggaaaggccctgagcgacgcatgtatgggcacaatcgcctccttcctgtctaagtaccaggacatcatcatcgaacaccagaaggtggtgaagggcaaccagaagagactggagagcctgcgggagctggccggcaaggaaaacctggaataccctagcgtgaccctgccacctcagcctcacaccaaggagggcgttgatgcctacaacgaagtgatcgcccgggtgcgaatgtgggtgaacctgaacctgtggcagaagctgaagctaagcagagatgatgccaagcctctgctgagactgaagggattcccttcctttcctctggtcgagagacaggccaacgaagtggactggtgggacatggtgtgtaacgtgaagaagctgatcaacgagaaaaaggaggatggcaaggtgttttggcagaatctggctggctacaagagacaggaagccctgagaccatacctgagcagcgaggaagatcggaagaagggaaagaaattcgctcggtaccagctgggcgacctgctgctgcacctggaaaagaagcacggcgaggactggggaaaggtgtacgacgaggcctgggagcggattgacaagaaagtggaaggcctgagcaagcacatcaagctggaagaggaacggagaagcgaggacgcccagagcaaggccgccctgaccgactggctgcgggctaaggccagcttcgtgatcgagggcctgaaggaggccgacaaggacgagttctgcagatgcgagctgaagctgcagaagtggtacggggacctgcggggaaagcccttcgccatcgaagccgagaacagcatcctggacatcagcggcttcagcaagcagtacaactgtgccttcatctggcagaaggacggcgtgaagaagctgaacctgtacctgatcatcaactacttcaagggcggcaagctgcggttcaagaagatcaaacctgaagccttcgaagccaacagattctacaccgtgatcaacaaaaagagcggcgagatcgtgcccatggaggtgaacttcaacttcgacgaccccaacctgatcatcctgcctctggcctttggcaagagacagggcagagaattcatctggaacgacctgctgtccctggaaaccggcagcctgaagctggccaacggaagagtgatcgagaagacactgtacaacagaagaacccggcaggatgagcctgccctgttcgtggccctgaccttcgagcggcgggaggtcctggactcctccaatatcaaaccaatgaacctgatcggcgtggcaagaggcgaaaacatccccgccgtgatcgccctgaccgaccccgagggctgcccactgagccggtttaaggatagcctgggaaacccaacccacatcctgagaatcggcgagagctataaggagaagcagcggaccatccaggccaagaaggaggtggagcagcggagagccggcggctacagccggaagtacgccagcaaagccaagaatctggcagacgatatggtgagaaacaccgctagagatctgctgtactacgccgtgacccaggatgccatgctgatcttcgccaacctgagccggggcttcggccggcagggcaagcggaccttcatggccgagagacagtacacacggatggaggactggctgaccgccaagctggcctacgagggcctgagcaagacctacctgtccaagacactggcccagtacacctccaagacatgcagcaactgtgggtttaccatcaccagcgccgactacgacagggtgctggagaagctgaagaagacagcaacaggctggatgaccacaattaacggcaaggagctgaaggtggagggccagattacctactacaacagatacaagagacagaacgtagtcaaggacctgtccgtcgagctggatagactgagcgaagaatctgtgaacaacgacatctcctcctggacaaagggcagaagcggagaagctctgagcctcctgaagaaaagattctcccatagacccgtgcaggagaagttcgtgtgcctgaactgcggcttcgagacacacgcagccgagcaagccgccctgaacatcgccagatcctggctgttcctgcggagccaggagtacaagaaataccagacaaacaagacaaccggcaacaccgataagagagccttcgtcgagacctggcagtccttttaccggaagaagcttaaggaggtgtggaaacctgccgtgcggtctggcggatctggcggaggctccaccagccccaagaaaaagagaaaagtctaagctgccttctgcggggcttgccttctggccatgcccttcttctctcccttgcacctgtacctcttggtctttgaataaagcctgagtaggaaggctagcaaaaaaaaaaaaaaaaaaaaaaaaaaaaaaaaaaaaaaaaaaaaaaaaaaaaaaaaaaaaaaaaaaaaaaaaaaaaaaaa

SEQ ID NO: 9407 - RNA, 8787 nt, synthetic construct
  source 1..8787: mol_type = other RNA
aggaaataagagagaaaagaagagtaagaagaaatataagagccaccatggcccctaagaagaagcgtaaagtgagccggatgaaccacgaccaggagttcgacccccctaaggtgtaccctcccgtccccgccgagaagagaaagcccatccgggtcctgagcctgttcgatggcatcgccaccggtctgctggtgctgaaggacctgggcatccaggtggataggtacattgcctccgaggtgtgcgaggactccatcaccgtgggaatggtgcgtcatcagggcaagatcatgtacgtgggcgacgtgcggagcgtgacacagaagcatatccaggagtggggccctttcgacctggtgatcggcggcagcccttgcaatgacctgagcatcgtgaacccagcccggaagggcctgtacgagggaaccggcagactgttcttcgagttttacagactgctgcacgacgcccggcctaaggaaggcgacgaccggcccttcttttggctgttcgagaatgtggtggccatgggagtcagcgacaagcgggatattagccggttcctggagagcaaccccgtgatgatcgatgccaaggaagtgagcgccgcccaccgggccagatacttctggggcaatctgcctggcatgaacagacccctggccagcaccgtgaacgacaagctggagctgcaggagtgcctggagcacggccggatcgccaagttcagcaaggtgagaaccatcaccacccgaagcaacagcatcaaacaaggcaaggaccagcactttcctgtgttcatgaacgagaaggaggacatcctgtggtgtaccgagatggagagagtgttcgggttcccagtccactacacagatgtcagcaacatgtctagactggccagacagagactgctgggaagaagctggtccgtccctgtgatcagacacctgttcgcccctctgaaggagtacttcgcctgcgtgagcagcggcaacagcaacgccaacagccggggccccagcttctctagcggcctggtgccactgtccctgagagggagccacatgggccccatggagatctacaaaaccgtgagcgcctggaagcggcagcctgtgcgcgtgctgagcctgtttcggaatatcgataaagtcctgaaaagcctgggattcctggagagcggctctggctccggcggtggcaccctgaagtacgtggaggatgtgacaaacgtggtcagacgggatgtggagaagtggggccccttcgatctggtgtacggcagcacccaacccctgggcagctcttgtgaccggtgccctggctggtacatgtttcagttccaccggatcctgcagtacgccctgccgagacaggagtcccagcggccattcttttggattttcatggacaacttgctgctgaccgaggatgaccaggaaactaccactcggttcctgcagaccgaagccgtgaccctgcaggacgtgagaggccgggactaccagaacgccatgcgggtgtggtccaacatccctggactgaaaagcaagcacgcacctctgacccctaaagaagaggagtacctgcaggcccaggtgcggagcagaagcaagctggacgcccctaaggtggatctgctggtgaagaattgcctcctgcccctgagagagtacttcaagtatttcagccagaatagtctgcccctgggaggcagcggcggcggcaaggaggccttcgtggccttcggcgacgtggccgtggacttcacccaggaggagtggaggctgctgagccccgcccagaggaccctgcacagggaggtgatgctggagacctacaaccacctggtgagcctggagatccccttcagcaagcccaagctgatcagccagctggagaggggcgaggagccctggatcgaggagaggcagaggcccctgggcctgtgccccgccagcaggcccaccggcggcccaagcagcggcgcccctcctcccagcggcggcaggcggcccaagcagcggcgcccctcctcccagcggcggcagcccagccggctccccaacctctaccgaggagggcacctctgagtccgccacccccgagagcggccctggcacctccaccgagcccagcgagggcagcgcacccggcagccctgccggcagccccacctccacagaggagggaaccagcaccgagcccagcgaaggcagcgccccaggcaccagcaccgagcctagtgagcaggagattaaacggatcaacaagatcagaagaagacttgtgaaagacagcaacaccaagaaggccggcaagacaggccccatgaaaaccctgctggttagagtgatgacacccgatctgagagagcggctggaaaacctgagaaagaagcctgaaaatatcccccagcccatcagcaatacatctagagccaacctgaataagctgctgaccgattacaccgaaatgaagaaggcgatcctgcatgtgtactgggaagagttccagaaggaccctgtgggcctgatgagccgggtggcccagcctgccagcaagaagatcgatcagaacaagctgaaacctgagatggacgagaagggcaacctgaccaccgccggctttgcctgctctcagtgtggccagcccctgttcgtgtacaagctggagcaggtgtctgagaagggcaaggcttacaccaactacttcggacggtgcaatgtggccgagcacgaaaagctgatcctgctggcccagctgaagcccgagaaggatagcgacgaagccgtgacatatagcctgggaaagtttgggcagagggccctggatttctacagcattcatgtgaccaaggagtccacccaccccgtgaagcccctggcccagatcgccggaaacagatacgcctccggacctgtgggaaaggccctgagcgacgcatgtatgggcacaatcgcctccttcctgtctaagtaccaggacatcatcatcgaacaccagaaggtggtgaagggcaaccagaagagactggagagcctgcgggagctggccggcaaggaaaacctggaataccctagcgtgaccctgccacctcagcctcacaccaaggagggcgttgatgcctacaacgaagtgatcgcccgggtgcgaatgtgggtgaacctgaacctgtggcagaagctgaagctaagcagagatgatgccaagcctctgctgagactgaagggattcccttcctttcctctggtcgagagacaggccaacgaagtggactggtgggacatggtgtgtaacgtgaagaagctgatcaacgagaaaaaggaggatggcaaggtgttttggcagaatctggctggctacaagagacaggaagccctgagaccatacctgagcagcgaggaagatcggaagaagggaaagaaattcgctcggtaccagctgggcgacctgctgctgcacctggaaaagaagcacggcgaggactggggaaaggtgtacgacgaggcctgggagcggattgacaagaaagtggaaggcctgagcaagcacatcaagctggaagaggaacggagaagcgaggacgcccagagcaaggccgccctgaccgactggctgcgggctaaggccagcttcgtgatcgagggcctgaaggaggccgacaaggacgagttctgcagatgcgagctgaagctgcagaagtggtacggggacctgcggggaaagcccttcgccatcgaagccgagaacagcatcctggacatcagcggcttcagcaagcagtacaactgtgccttcatctggcagaaggacggcgtgaagaagctgaacctgtacctgatcatcaactacttcaagggcggcaagctgcggttcaagaagatcaaacctgaagccttcgaagccaacagattctacaccgtgatcaacaaaaagagcggcgagatcgtgcccatggaggtgaacttcaacttcgacgaccccaacctgatcatcctgcctctggcctttggcaagagacagggcagagaattcatctggaacgacctgctgtccctggaaaccggcagcctgaagctggccaacggaagagtgatcgagaagacactgtacaacagaagaacccggcaggatgagcctgccctgttcgtggccctgaccttcgagcggcgggaggtcctggactcctccaatatcaaaccaatgaacctgatcggcgtggcaagaggcgaaaacatccccgccgtgatcgccctgaccgaccccgagggctgcccactgagccggtttaaggatagcctgggaaacccaacccacatcctgagaatcggcgagagctataaggagaagcagcggaccatccaggccaagaaggaggtggagcagcggagagccggcggctacagccggaagtacgccagcaaagccaagaatctggcagacgatatggtgagaaacaccgctagagatctgctgtactacgccgtgacccaggatgccatgctgatcttcgccaacctgagccggggcttcggccggcagggcaagcggaccttcatggccgagagacagtacacacggatggaggactggctgaccgccaagctggcctacgagggcctgagcaagacctacctgtccaagacactggcccagtacacctccaagacatgcagcaactgtgggtttaccatcaccagcgccgactacgacagggtgctggagaagctgaagaagacagcaacaggctggatgaccacaattaacggcaaggagctgaaggtggagggccagattacctactacaacagatacaagagacagaacgtagtcaaggacctgtccgtcgagctggatagactgagcgaagaatctgtgaacaacgacatctcctcctggacaaagggcagaagcggagaagctctgagcctcctgaagaaaagattctcccatagacccgtgcaggagaagttcgtgtgcctgaactgcggcttcgagacacacgcagccgagcaagccgccctgaacatcgccagatcctggctgttcctgcggagccaggagtacaagaaataccagacaaacaagacaaccggcaacaccgataagagagccttcgtcgagacctggcagtccttttaccggaagaagcttaaggaggtgtggaaacctgccgtgcggtctggcggatctggcggaggctccaccagccccaagaaaaagagaaaagtctaagctgccttctgcggggcttgccttctggccatgcccttcttctctcccttgcacctgtacctcttggtctttgaataaagcctgagtaggaaggctagcaaaaaaaaaaaaaaaaaaaaaaaaaaaaaaaaaaaaaaaaaaaaaaaaaaaaaaaaaaaaaaaaaaaaaaaaaaaaaaaagcccagccggctccccaacctctaccgaggagggcacctctgagtccgccacccccgagagcggccctggcacctccaccgagcccagcgagggcagcgcacccggcagccctgccggcagccccacctccacagaggagggaaccagcaccgagcccagcgaaggcagcgccccaggcaccagcaccgagcctagtgagcaggagattaaacggatcaacaagatcagaagaagacttgtgaaagacagcaacaccaagaaggccggcaagacaggccccatgaaaaccctgctggttagagtgatgacacccgatctgagagagcggctggaaaacctgagaaagaagcctgaaaatatcccccagcccatcagcaatacatctagagccaacctgaataagctgctgaccgattacaccgaaatgaagaaggcgatcctgcatgtgtactgggaagagttccagaaggaccctgtgggcctgatgagccgggtggcccagcctgccagcaagaagatcgatcagaacaagctgaaacctgagatggacgagaagggcaacctgaccaccgccggctttgcctgctctcagtgtggccagcccctgttcgtgtacaagctggagcaggtgtctgagaagggcaaggcttacaccaactacttcggacggtgcaatgtggccgagcacgaaaagctgatcctgctggcccagctgaagcccgagaaggatagcgacgaagccgtgacatatagcctgggaaagtttgggcagagggccctggatttctacagcattcatgtgaccaaggagtccacccaccccgtgaagcccctggcccagatcgccggaaacagatacgcctccggacctgtgggaaaggccctgagcgacgcatgtatgggcacaatcgcctccttcctgtctaagtaccaggacatcatcatcgaacaccagaaggtggtgaagggcaaccagaagagactggagagcctgcgggagctggccggcaaggaaaacctggaataccctagcgtgaccctgccacctcagcctcacaccaaggagggcgttgatgcctacaacgaagtgatcgcccgggtgcgaatgtgggtgaacctgaacctgtggcagaagctgaagctaagcagagatgatgccaagcctctgctgagactgaagggattcccttcctttcctctggtcgagagacaggccaacgaagtggactggtgggacatggtgtgtaacgtgaagaagctgatcaacgagaaaaaggaggatggcaaggtgttttggcagaatctggctggctacaagagacaggaagccctgagaccatacctgagcagcgaggaagatcggaagaagggaaagaaattcgctcggtaccagctgggcgacctgctgctgcacctggaaaagaagcacggcgaggactggggaaaggtgtacgacgaggcctgggagcggattgacaagaaagtggaaggcctgagcaagcacatcaagctggaagaggaacggagaagcgaggacgcccagagcaaggccgccctgaccgactggctgcgggctaaggccagcttcgtgatcgagggcctgaaggaggccgacaaggacgagttctgcagatgcgagctgaagctgcagaagtggtacggggacctgcggggaaagcccttcgccatcgaagccgagaacagcatcctggacatcagcggcttcagcaagcagtacaactgtgccttcatctggcagaaggacggcgtgaagaagctgaacctgtacctgatcatcaactacttcaagggcggcaagctgcggttcaagaagatcaaacctgaagccttcgaagccaacagattctacaccgtgatcaacaaaaagagcggcgagatcgtgcccatggaggtgaacttcaacttcgacgaccccaacctgatcatcctgcctctggcctttggcaagagacagggcagagaattcatctggaacgacctgctgtccctggaaaccggcagcctgaagctggccaacggaagagtgatcgagaagacactgtacaacagaagaacccggcaggatgagcctgccctgttcgtggccctgaccttcgagcggcgggaggtcctggactcctccaatatcaaaccaatgaacctgatcggcgtggcaagaggcgaaaacatccccgccgtgatcgccctgaccgaccccgagggctgcccactgagccggtttaaggatagcctgggaaacccaacccacatcctgagaatcggcgagagctataaggagaagcagcggaccatccaggccaagaaggaggtggagcagcggagagccggcggctacagccggaagtacgccagcaaagccaagaatctggcagacgatatggtgagaaacaccgctagagatctgctgtactacgccgtgacccaggatgccatgctgatcttcgccaacctgagccggggcttcggccggcagggcaagcggaccttcatggccgagagacagtacacacggatggaggactggctgaccgccaagctggcctacgagggcctgagcaagacctacctgtccaagacactggcccagtacacctccaagacatgcagcaactgtgggtttaccatcaccagcgccgactacgacagggtgctggagaagctgaagaagacagcaacaggctggatgaccacaattaacggcaaggagctgaaggtggagggccagattacctactacaacagatacaagagacagaacgtagtcaaggacctgtccgtcgagctggatagactgagcgaagaatctgtgaacaacgacatctcctcctggacaaagggcagaagcggagaagctctgagcctcctgaagaaaagattctcccatagacccgtgcaggagaagttcgtgtgcctgaactgcggcttcgagacacacgcagccgagcaagccgccctgaacatcgccagatcctggctgttcctgcggagccaggagtacaagaaataccagacaaacaagacaaccggcaacaccgataagagagccttcgtcgagacctggcagtccttttaccggaagaagcttaaggaggtgtggaaacctgccgtgcggtctggcggatctggcggaggctccaccagccccaagaaaaagagaaaagtctaagctgccttctgcggggcttgccttctggccatgcccttcttctctcccttgcacctgtacctcttggtctttgaataaagcctgagtaggaaggctagcaaaaaaaaaaaaaaaaaaaaaaaaaaaaaaaaaaaaaaaaaaaaaaaaaaaaaaaaaaaaaaaaaaaaaaaaaaaaaaaa

SEQ ID NO: 9408 - RNA, 8787 nt, synthetic construct
  source 1..8787: mol_type = other RNA
aggaaataagagagaaaagaagagtaagaagaaatataagagccaccatggcccctaagaagaagcgtaaagtgagccggatgaaccacgaccaggagttcgacccccctaaggtgtaccctcccgtccccgccgagaagagaaagcccatccgggtcctgagcctgttcgatggcatcgccaccggtctgctggtgctgaaggacctgggcatccaggtggataggtacattgcctccgaggtgtgcgaggactccatcaccgtgggaatggtgcgtcatcagggcaagatcatgtacgtgggcgacgtgcggagcgtgacacagaagcatatccaggagtggggccctttcgacctggtgatcggcggcagcccttgcaatgacctgagcatcgtgaacccagcccggaagggcctgtacgagggaaccggcagactgttcttcgagttttacagactgctgcacgacgcccggcctaaggaaggcgacgaccggcccttcttttggctgttcgagaatgtggtggccatgggagtcagcgacaagcgggatattagccggttcctggagagcaaccccgtgatgatcgatgccaaggaagtgagcgccgcccaccgggccagatacttctggggcaatctgcctggcatgaacagacccctggccagcaccgtgaacgacaagctggagctgcaggagtgcctggagcacggccggatcgccaagttcagcaaggtgagaaccatcaccacccgaagcaacagcatcaaacaaggcaaggaccagcactttcctgtgttcatgaacgagaaggaggacatcctgtggtgtaccgagatggagagagtgttcgggttcccagtccactacacagatgtcagcaacatgtctagactggccagacagagactgctgggaagaagctggtccgtccctgtgatcagacacctgttcgcccctctgaaggagtacttcgcctgcgtgagcagcggcaacagcaacgccaacagccggggccccagcttctctagcggcctggtgccactgtccctgagagggagccacatgggccccatggagatctacaaaaccgtgagcgcctggaagcggcagcctgtgcgcgtgctgagcctgtttcggaatatcgataaagtcctgaaaagcctgggattcctggagagcggctctggctccggcggtggcaccctgaagtacgtggaggatgtgacaaacgtggtcagacgggatgtggagaagtggggccccttcgatctggtgtacggcagcacccaacccctgggcagctcttgtgaccggtgccctggctggtacatgtttcagttccaccggatcctgcagtacgccctgccgagacaggagtcccagcggccattcttttggattttcatggacaacttgctgctgaccgaggatgaccaggaaactaccactcggttcctgcagaccgaagccgtgaccctgcaggacgtgagaggccgggactaccagaacgccatgcgggtgtggtccaacatccctggactgaaaagcaagcacgcacctctgacccctaaagaagaggagtacctgcaggcccaggtgcggagcagaagcaagctggacgcccctaaggtggatctgctggtgaagaattgcctcctgcccctgagagagtacttcaagtatttcagccagaatagtctgcccctgggaggcagcggcggcggcccccaggagagcgtgaccttcaaggacatcgccgtggacttcacccaggaggagtgggccctgctggacaccagccagaggaagctgtacagggacgtgatgctggagaacatcagccacctggtgagcgtgggctaccacctgtgcaagagcgacgtggtgagccagctggagcagggcgtggagctgtggagggagggcaggggcttcccccagggccccaaccccgacaggaagagcggcggcggcccaagcagcggcgcccctcctcccagcggcggcaggcggcccaagcagcggcgcccctcctcccagcggcggcagcccagccggctccccaacctctaccgaggagggcacctctgagtccgccacccccgagagcggccctggcacctccaccgagcccagcgagggcagcgcacccggcagccctgccggcagccccacctccacagaggagggaaccagcaccgagcccagcgaaggcagcgccccaggcaccagcaccgagcctagtgagcaggagattaaacggatcaacaagatcagaagaagacttgtgaaagacagcaacaccaagaaggccggcaagacaggccccatgaaaaccctgctggttagagtgatgacacccgatctgagagagcggctggaaaacctgagaaagaagcctgaaaatatcccccagcccatcagcaatacatctagagccaacctgaataagctgctgaccgattacaccgaaatgaagaaggcgatcctgcatgtgtactgggaagagttccagaaggaccctgtgggcctgatgagccgggtggcccagcctgccagcaagaagatcgatcagaacaagctgaaacctgagatggacgagaagggcaacctgaccaccgccggctttgcctgctctcagtgtggccagcccctgttcgtgtacaagctggagcaggtgtctgagaagggcaaggcttacaccaactacttcggacggtgcaatgtggccgagcacgaaaagctgatcctgctggcccagctgaagcccgagaaggatagcgacgaagccgtgacatatagcctgggaaagtttgggcagagggccctggatttctacagcattcatgtgaccaaggagtccacccaccccgtgaagcccctggcccagatcgccggaaacagatacgcctccggacctgtgggaaaggccctgagcgacgcatgtatgggcacaatcgcctccttcctgtctaagtaccaggacatcatcatcgaacaccagaaggtggtgaagggcaaccagaagagactggagagcctgcgggagctggccggcaaggaaaacctggaataccctagcgtgaccctgccacctcagcctcacaccaaggagggcgttgatgcctacaacgaagtgatcgcccgggtgcgaatgtgggtgaacctgaacctgtggcagaagctgaagctaagcagagatgatgccaagcctctgctgagactgaagggattcccttcctttcctctggtcgagagacaggccaacgaagtggactggtgggacatggtgtgtaacgtgaagaagctgatcaacgagaaaaaggaggatggcaaggtgttttggcagaatctggctggctacaagagacaggaagccctgagaccatacctgagcagcgaggaagatcggaagaagggaaagaaattcgctcggtaccagctgggcgacctgctgctgcacctggaaaagaagcacggcgaggactggggaaaggtgtacgacgaggcctgggagcggattgacaagaaagtggaaggcctgagcaagcacatcaagctggaagaggaacggagaagcgaggacgcccagagcaaggccgccctgaccgactggctgcgggctaaggccagcttcgtgatcgagggcctgaaggaggccgacaaggacgagttctgcagatgcgagctgaagctgcagaagtggtacggggacctgcggggaaagcccttcgccatcgaagccgagaacagcatcctggacatcagcggcttcagcaagcagtacaactgtgccttcatctggcagaaggacggcgtgaagaagctgaacctgtacctgatcatcaactacttcaagggcggcaagctgcggttcaagaagatcaaacctgaagccttcgaagccaacagattctacaccgtgatcaacaaaaagagcggcgagatcgtgcccatggaggtgaacttcaacttcgacgaccccaacctgatcatcctgcctctggcctttggcaagagacagggcagagaattcatctggaacgacctgctgtccctggaaaccggcagcctgaagctggccaacggaagagtgatcgagaagacactgtacaacagaagaacccggcaggatgagcctgccctgttcgtggccctgaccttcgagcggcgggaggtcctggactcctccaatatcaaaccaatgaacctgatcggcgtggcaagaggcgaaaacatccccgccgtgatcgccctgaccgaccccgagggctgcccactgagccggtttaaggatagcctgggaaacccaacccacatcctgagaatcggcgagagctataaggagaagcagcggaccatccaggccaagaaggaggtggagcagcggagagccggcggctacagccggaagtacgccagcaaagccaagaatctggcagacgatatggtgagaaacaccgctagagatctgctgtactacgccgtgacccaggatgccatgctgatcttcgccaacctgagccggggcttcggccggcagggcaagcggaccttcatggccgagagacagtacacacggatggaggactggctgaccgccaagctggcctacgagggcctgagcaagacctacctgtccaagacactggcccagtacacctccaagacatgcagcaactgtgggtttaccatcaccagcgccgactacgacagggtgctggagaagctgaagaagacagcaacaggctggatgaccacaattaacggcaaggagctgaaggtggagggccagattacctactacaacagatacaagagacagaacgtagtcaaggacctgtccgtcgagctggatagactgagcgaagaatctgtgaacaacgacatctcctcctggacaaagggcagaagcggagaagctctgagcctcctgaagaaaagattctcccatagacccgtgcaggagaagttcgtgtgcctgaactgcggcttcgagacacacgcagccgagcaagccgccctgaacatcgccagatcctggctgttcctgcggagccaggagtacaagaaataccagacaaacaagacaaccggcaacaccgataagagagccttcgtcgagacctggcagtccttttaccggaagaagcttaaggaggtgtggaaacctgccgtgcggtctggcggatctggcggaggctccaccagccccaagaaaaagagaaaagtctaagctgccttctgcggggcttgccttctggccatgcccttcttctctcccttgcacctgtacctcttggtctttgaataaagcctgagtaggaaggctagcaaaaaaaaaaaaaaaaaaaaaaaaaaaaaaaaaaaaaaaaaaaaaaaaaaaaaaaaaaaaaaaaaaaaaaaaaaaaaaaagcccagccggctccccaacctctaccgaggagggcacctctgagtccgccacccccgagagcggccctggcacctccaccgagcccagcgagggcagcgcacccggcagccctgccggcagccccacctccacagaggagggaaccagcaccgagcccagcgaaggcagcgccccaggcaccagcaccgagcctagtgagcaggagattaaacggatcaacaagatcagaagaagacttgtgaaagacagcaacaccaagaaggccggcaagacaggccccatgaaaaccctgctggttagagtgatgacacccgatctgagagagcggctggaaaacctgagaaagaagcctgaaaatatcccccagcccatcagcaatacatctagagccaacctgaataagctgctgaccgattacaccgaaatgaagaaggcgatcctgcatgtgtactgggaagagttccagaaggaccctgtgggcctgatgagccgggtggcccagcctgccagcaagaagatcgatcagaacaagctgaaacctgagatggacgagaagggcaacctgaccaccgccggctttgcctgctctcagtgtggccagcccctgttcgtgtacaagctggagcaggtgtctgagaagggcaaggcttacaccaactacttcggacggtgcaatgtggccgagcacgaaaagctgatcctgctggcccagctgaagcccgagaaggatagcgacgaagccgtgacatatagcctgggaaagtttgggcagagggccctggatttctacagcattcatgtgaccaaggagtccacccaccccgtgaagcccctggcccagatcgccggaaacagatacgcctccggacctgtgggaaaggccctgagcgacgcatgtatgggcacaatcgcctccttcctgtctaagtaccaggacatcatcatcgaacaccagaaggtggtgaagggcaaccagaagagactggagagcctgcgggagctggccggcaaggaaaacctggaataccctagcgtgaccctgccacctcagcctcacaccaaggagggcgttgatgcctacaacgaagtgatcgcccgggtgcgaatgtgggtgaacctgaacctgtggcagaagctgaagctaagcagagatgatgccaagcctctgctgagactgaagggattcccttcctttcctctggtcgagagacaggccaacgaagtggactggtgggacatggtgtgtaacgtgaagaagctgatcaacgagaaaaaggaggatggcaaggtgttttggcagaatctggctggctacaagagacaggaagccctgagaccatacctgagcagcgaggaagatcggaagaagggaaagaaattcgctcggtaccagctgggcgacctgctgctgcacctggaaaagaagcacggcgaggactggggaaaggtgtacgacgaggcctgggagcggattgacaagaaagtggaaggcctgagcaagcacatcaagctggaagaggaacggagaagcgaggacgcccagagcaaggccgccctgaccgactggctgcgggctaaggccagcttcgtgatcgagggcctgaaggaggccgacaaggacgagttctgcagatgcgagctgaagctgcagaagtggtacggggacctgcggggaaagcccttcgccatcgaagccgagaacagcatcctggacatcagcggcttcagcaagcagtacaactgtgccttcatctggcagaaggacggcgtgaagaagctgaacctgtacctgatcatcaactacttcaagggcggcaagctgcggttcaagaagatcaaacctgaagccttcgaagccaacagattctacaccgtgatcaacaaaaagagcggcgagatcgtgcccatggaggtgaacttcaacttcgacgaccccaacctgatcatcctgcctctggcctttggcaagagacagggcagagaattcatctggaacgacctgctgtccctggaaaccggcagcctgaagctggccaacggaagagtgatcgagaagacactgtacaacagaagaacccggcaggatgagcctgccctgttcgtggccctgaccttcgagcggcgggaggtcctggactcctccaatatcaaaccaatgaacctgatcggcgtggcaagaggcgaaaacatccccgccgtgatcgccctgaccgaccccgagggctgcccactgagccggtttaaggatagcctgggaaacccaacccacatcctgagaatcggcgagagctataaggagaagcagcggaccatccaggccaagaaggaggtggagcagcggagagccggcggctacagccggaagtacgccagcaaagccaagaatctggcagacgatatggtgagaaacaccgctagagatctgctgtactacgccgtgacccaggatgccatgctgatcttcgccaacctgagccggggcttcggccggcagggcaagcggaccttcatggccgagagacagtacacacggatggaggactggctgaccgccaagctggcctacgagggcctgagcaagacctacctgtccaagacactggcccagtacacctccaagacatgcagcaactgtgggtttaccatcaccagcgccgactacgacagggtgctggagaagctgaagaagacagcaacaggctggatgaccacaattaacggcaaggagctgaaggtggagggccagattacctactacaacagatacaagagacagaacgtagtcaaggacctgtccgtcgagctggatagactgagcgaagaatctgtgaacaacgacatctcctcctggacaaagggcagaagcggagaagctctgagcctcctgaagaaaagattctcccatagacccgtgcaggagaagttcgtgtgcctgaactgcggcttcgagacacacgcagccgagcaagccgccctgaacatcgccagatcctggctgttcctgcggagccaggagtacaagaaataccagacaaacaagacaaccggcaacaccgataagagagccttcgtcgagacctggcagtccttttaccggaagaagcttaaggaggtgtggaaacctgccgtgcggtctggcggatctggcggaggctccaccagccccaagaaaaagagaaaagtctaagctgccttctgcggggcttgccttctggccatgcccttcttctctcccttgcacctgtacctcttggtctttgaataaagcctgagtaggaaggctagcaaaaaaaaaaaaaaaaaaaaaaaaaaaaaaaaaaaaaaaaaaaaaaaaaaaaaaaaaaaaaaaaaaaaaaaaaaaaaaaa

SEQ ID NO: 9409 - RNA, 8787 nt, synthetic construct
  source 1..8787: mol_type = other RNA
aggaaataagagagaaaagaagagtaagaagaaatataagagccaccatggcccctaagaagaagcgtaaagtgagccggatgaaccacgaccaggagttcgacccccctaaggtgtaccctcccgtccccgccgagaagagaaagcccatccgggtcctgagcctgttcgatggcatcgccaccggtctgctggtgctgaaggacctgggcatccaggtggataggtacattgcctccgaggtgtgcgaggactccatcaccgtgggaatggtgcgtcatcagggcaagatcatgtacgtgggcgacgtgcggagcgtgacacagaagcatatccaggagtggggccctttcgacctggtgatcggcggcagcccttgcaatgacctgagcatcgtgaacccagcccggaagggcctgtacgagggaaccggcagactgttcttcgagttttacagactgctgcacgacgcccggcctaaggaaggcgacgaccggcccttcttttggctgttcgagaatgtggtggccatgggagtcagcgacaagcgggatattagccggttcctggagagcaaccccgtgatgatcgatgccaaggaagtgagcgccgcccaccgggccagatacttctggggcaatctgcctggcatgaacagacccctggccagcaccgtgaacgacaagctggagctgcaggagtgcctggagcacggccggatcgccaagttcagcaaggtgagaaccatcaccacccgaagcaacagcatcaaacaaggcaaggaccagcactttcctgtgttcatgaacgagaaggaggacatcctgtggtgtaccgagatggagagagtgttcgggttcccagtccactacacagatgtcagcaacatgtctagactggccagacagagactgctgggaagaagctggtccgtccctgtgatcagacacctgttcgcccctctgaaggagtacttcgcctgcgtgagcagcggcaacagcaacgccaacagccggggccccagcttctctagcggcctggtgccactgtccctgagagggagccacatgggccccatggagatctacaaaaccgtgagcgcctggaagcggcagcctgtgcgcgtgctgagcctgtttcggaatatcgataaagtcctgaaaagcctgggattcctggagagcggctctggctccggcggtggcaccctgaagtacgtggaggatgtgacaaacgtggtcagacgggatgtggagaagtggggccccttcgatctggtgtacggcagcacccaacccctgggcagctcttgtgaccggtgccctggctggtacatgtttcagttccaccggatcctgcagtacgccctgccgagacaggagtcccagcggccattcttttggattttcatggacaacttgctgctgaccgaggatgaccaggaaactaccactcggttcctgcagaccgaagccgtgaccctgcaggacgtgagaggccgggactaccagaacgccatgcgggtgtggtccaacatccctggactgaaaagcaagcacgcacctctgacccctaaagaagaggagtacctgcaggcccaggtgcggagcagaagcaagctggacgcccctaaggtggatctgctggtgaagaattgcctcctgcccctgagagagtacttcaagtatttcagccagaatagtctgcccctgggaggcagcggcggcggcatggccgagggcctgaagttcaaggacgtggtgatctacttcagccagaaggagtgggagtgcctgcacagcgcccagaaggacctgtacagggacgtgatgctggagaactacggcaacctggtgctgctgggcctgagcgacaccaagcccaacgtgatcagcctgctggagcagaagaaggagccctggatggtgaagaggaaggagaccaaggagtggtgccccgactgggagttcggcggcggcccaagcagcggcgcccctcctcccagcggcggcaggcggcccaagcagcggcgcccctcctcccagcggcggcagcccagccggctccccaacctctaccgaggagggcacctctgagtccgccacccccgagagcggccctggcacctccaccgagcccagcgagggcagcgcacccggcagccctgccggcagccccacctccacagaggagggaaccagcaccgagcccagcgaaggcagcgccccaggcaccagcaccgagcctagtgagcaggagattaaacggatcaacaagatcagaagaagacttgtgaaagacagcaacaccaagaaggccggcaagacaggccccatgaaaaccctgctggttagagtgatgacacccgatctgagagagcggctggaaaacctgagaaagaagcctgaaaatatcccccagcccatcagcaatacatctagagccaacctgaataagctgctgaccgattacaccgaaatgaagaaggcgatcctgcatgtgtactgggaagagttccagaaggaccctgtgggcctgatgagccgggtggcccagcctgccagcaagaagatcgatcagaacaagctgaaacctgagatggacgagaagggcaacctgaccaccgccggctttgcctgctctcagtgtggccagcccctgttcgtgtacaagctggagcaggtgtctgagaagggcaaggcttacaccaactacttcggacggtgcaatgtggccgagcacgaaaagctgatcctgctggcccagctgaagcccgagaaggatagcgacgaagccgtgacatatagcctgggaaagtttgggcagagggccctggatttctacagcattcatgtgaccaaggagtccacccaccccgtgaagcccctggcccagatcgccggaaacagatacgcctccggacctgtgggaaaggccctgagcgacgcatgtatgggcacaatcgcctccttcctgtctaagtaccaggacatcatcatcgaacaccagaaggtggtgaagggcaaccagaagagactggagagcctgcgggagctggccggcaaggaaaacctggaataccctagcgtgaccctgccacctcagcctcacaccaaggagggcgttgatgcctacaacgaagtgatcgcccgggtgcgaatgtgggtgaacctgaacctgtggcagaagctgaagctaagcagagatgatgccaagcctctgctgagactgaagggattcccttcctttcctctggtcgagagacaggccaacgaagtggactggtgggacatggtgtgtaacgtgaagaagctgatcaacgagaaaaaggaggatggcaaggtgttttggcagaatctggctggctacaagagacaggaagccctgagaccatacctgagcagcgaggaagatcggaagaagggaaagaaattcgctcggtaccagctgggcgacctgctgctgcacctggaaaagaagcacggcgaggactggggaaaggtgtacgacgaggcctgggagcggattgacaagaaagtggaaggcctgagcaagcacatcaagctggaagaggaacggagaagcgaggacgcccagagcaaggccgccctgaccgactggctgcgggctaaggccagcttcgtgatcgagggcctgaaggaggccgacaaggacgagttctgcagatgcgagctgaagctgcagaagtggtacggggacctgcggggaaagcccttcgccatcgaagccgagaacagcatcctggacatcagcggcttcagcaagcagtacaactgtgccttcatctggcagaaggacggcgtgaagaagctgaacctgtacctgatcatcaactacttcaagggcggcaagctgcggttcaagaagatcaaacctgaagccttcgaagccaacagattctacaccgtgatcaacaaaaagagcggcgagatcgtgcccatggaggtgaacttcaacttcgacgaccccaacctgatcatcctgcctctggcctttggcaagagacagggcagagaattcatctggaacgacctgctgtccctggaaaccggcagcctgaagctggccaacggaagagtgatcgagaagacactgtacaacagaagaacccggcaggatgagcctgccctgttcgtggccctgaccttcgagcggcgggaggtcctggactcctccaatatcaaaccaatgaacctgatcggcgtggcaagaggcgaaaacatccccgccgtgatcgccctgaccgaccccgagggctgcccactgagccggtttaaggatagcctgggaaacccaacccacatcctgagaatcggcgagagctataaggagaagcagcggaccatccaggccaagaaggaggtggagcagcggagagccggcggctacagccggaagtacgccagcaaagccaagaatctggcagacgatatggtgagaaacaccgctagagatctgctgtactacgccgtgacccaggatgccatgctgatcttcgccaacctgagccggggcttcggccggcagggcaagcggaccttcatggccgagagacagtacacacggatggaggactggctgaccgccaagctggcctacgagggcctgagcaagacctacctgtccaagacactggcccagtacacctccaagacatgcagcaactgtgggtttaccatcaccagcgccgactacgacagggtgctggagaagctgaagaagacagcaacaggctggatgaccacaattaacggcaaggagctgaaggtggagggccagattacctactacaacagatacaagagacagaacgtagtcaaggacctgtccgtcgagctggatagactgagcgaagaatctgtgaacaacgacatctcctcctggacaaagggcagaagcggagaagctctgagcctcctgaagaaaagattctcccatagacccgtgcaggagaagttcgtgtgcctgaactgcggcttcgagacacacgcagccgagcaagccgccctgaacatcgccagatcctggctgttcctgcggagccaggagtacaagaaataccagacaaacaagacaaccggcaacaccgataagagagccttcgtcgagacctggcagtccttttaccggaagaagcttaaggaggtgtggaaacctgccgtgcggtctggcggatctggcggaggctccaccagccccaagaaaaagagaaaagtctaagctgccttctgcggggcttgccttctggccatgcccttcttctctcccttgcacctgtacctcttggtctttgaataaagcctgagtaggaaggctagcaaaaaaaaaaaaaaaaaaaaaaaaaaaaaaaaaaaaaaaaaaaaaaaaaaaaaaaaaaaaaaaaaaaaaaaaaaaaaaaagcccagccggctccccaacctctaccgaggagggcacctctgagtccgccacccccgagagcggccctggcacctccaccgagcccagcgagggcagcgcacccggcagccctgccggcagccccacctccacagaggagggaaccagcaccgagcccagcgaaggcagcgccccaggcaccagcaccgagcctagtgagcaggagattaaacggatcaacaagatcagaagaagacttgtgaaagacagcaacaccaagaaggccggcaagacaggccccatgaaaaccctgctggttagagtgatgacacccgatctgagagagcggctggaaaacctgagaaagaagcctgaaaatatcccccagcccatcagcaatacatctagagccaacctgaataagctgctgaccgattacaccgaaatgaagaaggcgatcctgcatgtgtactgggaagagttccagaaggaccctgtgggcctgatgagccgggtggcccagcctgccagcaagaagatcgatcagaacaagctgaaacctgagatggacgagaagggcaacctgaccaccgccggctttgcctgctctcagtgtggccagcccctgttcgtgtacaagctggagcaggtgtctgagaagggcaaggcttacaccaactacttcggacggtgcaatgtggccgagcacgaaaagctgatcctgctggcccagctgaagcccgagaaggatagcgacgaagccgtgacatatagcctgggaaagtttgggcagagggccctggatttctacagcattcatgtgaccaaggagtccacccaccccgtgaagcccctggcccagatcgccggaaacagatacgcctccggacctgtgggaaaggccctgagcgacgcatgtatgggcacaatcgcctccttcctgtctaagtaccaggacatcatcatcgaacaccagaaggtggtgaagggcaaccagaagagactggagagcctgcgggagctggccggcaaggaaaacctggaataccctagcgtgaccctgccacctcagcctcacaccaaggagggcgttgatgcctacaacgaagtgatcgcccgggtgcgaatgtgggtgaacctgaacctgtggcagaagctgaagctaagcagagatgatgccaagcctctgctgagactgaagggattcccttcctttcctctggtcgagagacaggccaacgaagtggactggtgggacatggtgtgtaacgtgaagaagctgatcaacgagaaaaaggaggatggcaaggtgttttggcagaatctggctggctacaagagacaggaagccctgagaccatacctgagcagcgaggaagatcggaagaagggaaagaaattcgctcggtaccagctgggcgacctgctgctgcacctggaaaagaagcacggcgaggactggggaaaggtgtacgacgaggcctgggagcggattgacaagaaagtggaaggcctgagcaagcacatcaagctggaagaggaacggagaagcgaggacgcccagagcaaggccgccctgaccgactggctgcgggctaaggccagcttcgtgatcgagggcctgaaggaggccgacaaggacgagttctgcagatgcgagctgaagctgcagaagtggtacggggacctgcggggaaagcccttcgccatcgaagccgagaacagcatcctggacatcagcggcttcagcaagcagtacaactgtgccttcatctggcagaaggacggcgtgaagaagctgaacctgtacctgatcatcaactacttcaagggcggcaagctgcggttcaagaagatcaaacctgaagccttcgaagccaacagattctacaccgtgatcaacaaaaagagcggcgagatcgtgcccatggaggtgaacttcaacttcgacgaccccaacctgatcatcctgcctctggcctttggcaagagacagggcagagaattcatctggaacgacctgctgtccctggaaaccggcagcctgaagctggccaacggaagagtgatcgagaagacactgtacaacagaagaacccggcaggatgagcctgccctgttcgtggccctgaccttcgagcggcgggaggtcctggactcctccaatatcaaaccaatgaacctgatcggcgtggcaagaggcgaaaacatccccgccgtgatcgccctgaccgaccccgagggctgcccactgagccggtttaaggatagcctgggaaacccaacccacatcctgagaatcggcgagagctataaggagaagcagcggaccatccaggccaagaaggaggtggagcagcggagagccggcggctacagccggaagtacgccagcaaagccaagaatctggcagacgatatggtgagaaacaccgctagagatctgctgtactacgccgtgacccaggatgccatgctgatcttcgccaacctgagccggggcttcggccggcagggcaagcggaccttcatggccgagagacagtacacacggatggaggactggctgaccgccaagctggcctacgagggcctgagcaagacctacctgtccaagacactggcccagtacacctccaagacatgcagcaactgtgggtttaccatcaccagcgccgactacgacagggtgctggagaagctgaagaagacagcaacaggctggatgaccacaattaacggcaaggagctgaaggtggagggccagattacctactacaacagatacaagagacagaacgtagtcaaggacctgtccgtcgagctggatagactgagcgaagaatctgtgaacaacgacatctcctcctggacaaagggcagaagcggagaagctctgagcctcctgaagaaaagattctcccatagacccgtgcaggagaagttcgtgtgcctgaactgcggcttcgagacacacgcagccgagcaagccgccctgaacatcgccagatcctggctgttcctgcggagccaggagtacaagaaataccagacaaacaagacaaccggcaacaccgataagagagccttcgtcgagacctggcagtccttttaccggaagaagcttaaggaggtgtggaaacctgccgtgcggtctggcggatctggcggaggctccaccagccccaagaaaaagagaaaagtctaagctgccttctgcggggcttgccttctggccatgcccttcttctctcccttgcacctgtacctcttggtctttgaataaagcctgagtaggaaggctagcaaaaaaaaaaaaaaaaaaaaaaaaaaaaaaaaaaaaaaaaaaaaaaaaaaaaaaaaaaaaaaaaaaaaaaaaaaaaaaaa

SEQ ID NO: 9410 - RNA, 8787 nt, synthetic construct
  source 1..8787: mol_type = other RNA
aggaaataagagagaaaagaagagtaagaagaaatataagagccaccatggcccctaagaagaagcgtaaagtgagccggatgaaccacgaccaggagttcgacccccctaaggtgtaccctcccgtccccgccgagaagagaaagcccatccgggtcctgagcctgttcgatggcatcgccaccggtctgctggtgctgaaggacctgggcatccaggtggataggtacattgcctccgaggtgtgcgaggactccatcaccgtgggaatggtgcgtcatcagggcaagatcatgtacgtgggcgacgtgcggagcgtgacacagaagcatatccaggagtggggccctttcgacctggtgatcggcggcagcccttgcaatgacctgagcatcgtgaacccagcccggaagggcctgtacgagggaaccggcagactgttcttcgagttttacagactgctgcacgacgcccggcctaaggaaggcgacgaccggcccttcttttggctgttcgagaatgtggtggccatgggagtcagcgacaagcgggatattagccggttcctggagagcaaccccgtgatgatcgatgccaaggaagtgagcgccgcccaccgggccagatacttctggggcaatctgcctggcatgaacagacccctggccagcaccgtgaacgacaagctggagctgcaggagtgcctggagcacggccggatcgccaagttcagcaaggtgagaaccatcaccacccgaagcaacagcatcaaacaaggcaaggaccagcactttcctgtgttcatgaacgagaaggaggacatcctgtggtgtaccgagatggagagagtgttcgggttcccagtccactacacagatgtcagcaacatgtctagactggccagacagagactgctgggaagaagctggtccgtccctgtgatcagacacctgttcgcccctctgaaggagtacttcgcctgcgtgagcagcggcaacagcaacgccaacagccggggccccagcttctctagcggcctggtgccactgtccctgagagggagccacatgggccccatggagatctacaaaaccgtgagcgcctggaagcggcagcctgtgcgcgtgctgagcctgtttcggaatatcgataaagtcctgaaaagcctgggattcctggagagcggctctggctccggcggtggcaccctgaagtacgtggaggatgtgacaaacgtggtcagacgggatgtggagaagtggggccccttcgatctggtgtacggcagcacccaacccctgggcagctcttgtgaccggtgccctggctggtacatgtttcagttccaccggatcctgcagtacgccctgccgagacaggagtcccagcggccattcttttggattttcatggacaacttgctgctgaccgaggatgaccaggaaactaccactcggttcctgcagaccgaagccgtgaccctgcaggacgtgagaggccgggactaccagaacgccatgcgggtgtggtccaacatccctggactgaaaagcaagcacgcacctctgacccctaaagaagaggagtacctgcaggcccaggtgcggagcagaagcaagctggacgcccctaaggtggatctgctggtgaagaattgcctcctgcccctgagagagtacttcaagtatttcagccagaatagtctgcccctgggaggcagcggcggcggcgagggcgaggcccagaagaggaaggccgaggagagcggcatgcccctgacccagggccacctgaccttcagggacgtggccatcgagttcagccaggaggagtggaagtgcctggaccccgtgcagaaggccctgtacagggacgtgatgctggagaactacaggaacctggtgagcctgggcatctgcctgcccgacctgagcatcttcagcatgatgaagcagaggaccgagagctggaccggcggcccaagcagcggcgcccctcctcccagcggcggcaggcggcccaagcagcggcgcccctcctcccagcggcggcagcccagccggctccccaacctctaccgaggagggcacctctgagtccgccacccccgagagcggccctggcacctccaccgagcccagcgagggcagcgcacccggcagccctgccggcagccccacctccacagaggagggaaccagcaccgagcccagcgaaggcagcgccccaggcaccagcaccgagcctagtgagcaggagattaaacggatcaacaagatcagaagaagacttgtgaaagacagcaacaccaagaaggccggcaagacaggccccatgaaaaccctgctggttagagtgatgacacccgatctgagagagcggctggaaaacctgagaaagaagcctgaaaatatcccccagcccatcagcaatacatctagagccaacctgaataagctgctgaccgattacaccgaaatgaagaaggcgatcctgcatgtgtactgggaagagttccagaaggaccctgtgggcctgatgagccgggtggcccagcctgccagcaagaagatcgatcagaacaagctgaaacctgagatggacgagaagggcaacctgaccaccgccggctttgcctgctctcagtgtggccagcccctgttcgtgtacaagctggagcaggtgtctgagaagggcaaggcttacaccaactacttcggacggtgcaatgtggccgagcacgaaaagctgatcctgctggcccagctgaagcccgagaaggatagcgacgaagccgtgacatatagcctgggaaagtttgggcagagggccctggatttctacagcattcatgtgaccaaggagtccacccaccccgtgaagcccctggcccagatcgccggaaacagatacgcctccggacctgtgggaaaggccctgagcgacgcatgtatgggcacaatcgcctccttcctgtctaagtaccaggacatcatcatcgaacaccagaaggtggtgaagggcaaccagaagagactggagagcctgcgggagctggccggcaaggaaaacctggaataccctagcgtgaccctgccacctcagcctcacaccaaggagggcgttgatgcctacaacgaagtgatcgcccgggtgcgaatgtgggtgaacctgaacctgtggcagaagctgaagctaagcagagatgatgccaagcctctgctgagactgaagggattcccttcctttcctctggtcgagagacaggccaacgaagtggactggtgggacatggtgtgtaacgtgaagaagctgatcaacgagaaaaaggaggatggcaaggtgttttggcagaatctggctggctacaagagacaggaagccctgagaccatacctgagcagcgaggaagatcggaagaagggaaagaaattcgctcggtaccagctgggcgacctgctgctgcacctggaaaagaagcacggcgaggactggggaaaggtgtacgacgaggcctgggagcggattgacaagaaagtggaaggcctgagcaagcacatcaagctggaagaggaacggagaagcgaggacgcccagagcaaggccgccctgaccgactggctgcgggctaaggccagcttcgtgatcgagggcctgaaggaggccgacaaggacgagttctgcagatgcgagctgaagctgcagaagtggtacggggacctgcggggaaagcccttcgccatcgaagccgagaacagcatcctggacatcagcggcttcagcaagcagtacaactgtgccttcatctggcagaaggacggcgtgaagaagctgaacctgtacctgatcatcaactacttcaagggcggcaagctgcggttcaagaagatcaaacctgaagccttcgaagccaacagattctacaccgtgatcaacaaaaagagcggcgagatcgtgcccatggaggtgaacttcaacttcgacgaccccaacctgatcatcctgcctctggcctttggcaagagacagggcagagaattcatctggaacgacctgctgtccctggaaaccggcagcctgaagctggccaacggaagagtgatcgagaagacactgtacaacagaagaacccggcaggatgagcctgccctgttcgtggccctgaccttcgagcggcgggaggtcctggactcctccaatatcaaaccaatgaacctgatcggcgtggcaagaggcgaaaacatccccgccgtgatcgccctgaccgaccccgagggctgcccactgagccggtttaaggatagcctgggaaacccaacccacatcctgagaatcggcgagagctataaggagaagcagcggaccatccaggccaagaaggaggtggagcagcggagagccggcggctacagccggaagtacgccagcaaagccaagaatctggcagacgatatggtgagaaacaccgctagagatctgctgtactacgccgtgacccaggatgccatgctgatcttcgccaacctgagccggggcttcggccggcagggcaagcggaccttcatggccgagagacagtacacacggatggaggactggctgaccgccaagctggcctacgagggcctgagcaagacctacctgtccaagacactggcccagtacacctccaagacatgcagcaactgtgggtttaccatcaccagcgccgactacgacagggtgctggagaagctgaagaagacagcaacaggctggatgaccacaattaacggcaaggagctgaaggtggagggccagattacctactacaacagatacaagagacagaacgtagtcaaggacctgtccgtcgagctggatagactgagcgaagaatctgtgaacaacgacatctcctcctggacaaagggcagaagcggagaagctctgagcctcctgaagaaaagattctcccatagacccgtgcaggagaagttcgtgtgcctgaactgcggcttcgagacacacgcagccgagcaagccgccctgaacatcgccagatcctggctgttcctgcggagccaggagtacaagaaataccagacaaacaagacaaccggcaacaccgataagagagccttcgtcgagacctggcagtccttttaccggaagaagcttaaggaggtgtggaaacctgccgtgcggtctggcggatctggcggaggctccaccagccccaagaaaaagagaaaagtctaagctgccttctgcggggcttgccttctggccatgcccttcttctctcccttgcacctgtacctcttggtctttgaataaagcctgagtaggaaggctagcaaaaaaaaaaaaaaaaaaaaaaaaaaaaaaaaaaaaaaaaaaaaaaaaaaaaaaaaaaaaaaaaaaaaaaaaaaaaaaaagcccagccggctccccaacctctaccgaggagggcacctctgagtccgccacccccgagagcggccctggcacctccaccgagcccagcgagggcagcgcacccggcagccctgccggcagccccacctccacagaggagggaaccagcaccgagcccagcgaaggcagcgccccaggcaccagcaccgagcctagtgagcaggagattaaacggatcaacaagatcagaagaagacttgtgaaagacagcaacaccaagaaggccggcaagacaggccccatgaaaaccctgctggttagagtgatgacacccgatctgagagagcggctggaaaacctgagaaagaagcctgaaaatatcccccagcccatcagcaatacatctagagccaacctgaataagctgctgaccgattacaccgaaatgaagaaggcgatcctgcatgtgtactgggaagagttccagaaggaccctgtgggcctgatgagccgggtggcccagcctgccagcaagaagatcgatcagaacaagctgaaacctgagatggacgagaagggcaacctgaccaccgccggctttgcctgctctcagtgtggccagcccctgttcgtgtacaagctggagcaggtgtctgagaagggcaaggcttacaccaactacttcggacggtgcaatgtggccgagcacgaaaagctgatcctgctggcccagctgaagcccgagaaggatagcgacgaagccgtgacatatagcctgggaaagtttgggcagagggccctggatttctacagcattcatgtgaccaaggagtccacccaccccgtgaagcccctggcccagatcgccggaaacagatacgcctccggacctgtgggaaaggccctgagcgacgcatgtatgggcacaatcgcctccttcctgtctaagtaccaggacatcatcatcgaacaccagaaggtggtgaagggcaaccagaagagactggagagcctgcgggagctggccggcaaggaaaacctggaataccctagcgtgaccctgccacctcagcctcacaccaaggagggcgttgatgcctacaacgaagtgatcgcccgggtgcgaatgtgggtgaacctgaacctgtggcagaagctgaagctaagcagagatgatgccaagcctctgctgagactgaagggattcccttcctttcctctggtcgagagacaggccaacgaagtggactggtgggacatggtgtgtaacgtgaagaagctgatcaacgagaaaaaggaggatggcaaggtgttttggcagaatctggctggctacaagagacaggaagccctgagaccatacctgagcagcgaggaagatcggaagaagggaaagaaattcgctcggtaccagctgggcgacctgctgctgcacctggaaaagaagcacggcgaggactggggaaaggtgtacgacgaggcctgggagcggattgacaagaaagtggaaggcctgagcaagcacatcaagctggaagaggaacggagaagcgaggacgcccagagcaaggccgccctgaccgactggctgcgggctaaggccagcttcgtgatcgagggcctgaaggaggccgacaaggacgagttctgcagatgcgagctgaagctgcagaagtggtacggggacctgcggggaaagcccttcgccatcgaagccgagaacagcatcctggacatcagcggcttcagcaagcagtacaactgtgccttcatctggcagaaggacggcgtgaagaagctgaacctgtacctgatcatcaactacttcaagggcggcaagctgcggttcaagaagatcaaacctgaagccttcgaagccaacagattctacaccgtgatcaacaaaaagagcggcgagatcgtgcccatggaggtgaacttcaacttcgacgaccccaacctgatcatcctgcctctggcctttggcaagagacagggcagagaattcatctggaacgacctgctgtccctggaaaccggcagcctgaagctggccaacggaagagtgatcgagaagacactgtacaacagaagaacccggcaggatgagcctgccctgttcgtggccctgaccttcgagcggcgggaggtcctggactcctccaatatcaaaccaatgaacctgatcggcgtggcaagaggcgaaaacatccccgccgtgatcgccctgaccgaccccgagggctgcccactgagccggtttaaggatagcctgggaaacccaacccacatcctgagaatcggcgagagctataaggagaagcagcggaccatccaggccaagaaggaggtggagcagcggagagccggcggctacagccggaagtacgccagcaaagccaagaatctggcagacgatatggtgagaaacaccgctagagatctgctgtactacgccgtgacccaggatgccatgctgatcttcgccaacctgagccggggcttcggccggcagggcaagcggaccttcatggccgagagacagtacacacggatggaggactggctgaccgccaagctggcctacgagggcctgagcaagacctacctgtccaagacactggcccagtacacctccaagacatgcagcaactgtgggtttaccatcaccagcgccgactacgacagggtgctggagaagctgaagaagacagcaacaggctggatgaccacaattaacggcaaggagctgaaggtggagggccagattacctactacaacagatacaagagacagaacgtagtcaaggacctgtccgtcgagctggatagactgagcgaagaatctgtgaacaacgacatctcctcctggacaaagggcagaagcggagaagctctgagcctcctgaagaaaagattctcccatagacccgtgcaggagaagttcgtgtgcctgaactgcggcttcgagacacacgcagccgagcaagccgccctgaacatcgccagatcctggctgttcctgcggagccaggagtacaagaaataccagacaaacaagacaaccggcaacaccgataagagagccttcgtcgagacctggcagtccttttaccggaagaagcttaaggaggtgtggaaacctgccgtgcggtctggcggatctggcggaggctccaccagccccaagaaaaagagaaaagtctaagctgccttctgcggggcttgccttctggccatgcccttcttctctcccttgcacctgtacctcttggtctttgaataaagcctgagtaggaaggctagcaaaaaaaaaaaaaaaaaaaaaaaaaaaaaaaaaaaaaaaaaaaaaaaaaaaaaaaaaaaaaaaaaaaaaaaaaaaaaaaa

SEQ ID NO: 9411 - RNA, 8787 nt, synthetic construct
  source 1..8787: mol_type = other RNA
aggaaataagagagaaaagaagagtaagaagaaatataagagccaccatggcccctaagaagaagcgtaaagtgagccggatgaaccacgaccaggagttcgacccccctaaggtgtaccctcccgtccccgccgagaagagaaagcccatccgggtcctgagcctgttcgatggcatcgccaccggtctgctggtgctgaaggacctgggcatccaggtggataggtacattgcctccgaggtgtgcgaggactccatcaccgtgggaatggtgcgtcatcagggcaagatcatgtacgtgggcgacgtgcggagcgtgacacagaagcatatccaggagtggggccctttcgacctggtgatcggcggcagcccttgcaatgacctgagcatcgtgaacccagcccggaagggcctgtacgagggaaccggcagactgttcttcgagttttacagactgctgcacgacgcccggcctaaggaaggcgacgaccggcccttcttttggctgttcgagaatgtggtggccatgggagtcagcgacaagcgggatattagccggttcctggagagcaaccccgtgatgatcgatgccaaggaagtgagcgccgcccaccgggccagatacttctggggcaatctgcctggcatgaacagacccctggccagcaccgtgaacgacaagctggagctgcaggagtgcctggagcacggccggatcgccaagttcagcaaggtgagaaccatcaccacccgaagcaacagcatcaaacaaggcaaggaccagcactttcctgtgttcatgaacgagaaggaggacatcctgtggtgtaccgagatggagagagtgttcgggttcccagtccactacacagatgtcagcaacatgtctagactggccagacagagactgctgggaagaagctggtccgtccctgtgatcagacacctgttcgcccctctgaaggagtacttcgcctgcgtgagcagcggcaacagcaacgccaacagccggggccccagcttctctagcggcctggtgccactgtccctgagagggagccacatgggccccatggagatctacaaaaccgtgagcgcctggaagcggcagcctgtgcgcgtgctgagcctgtttcggaatatcgataaagtcctgaaaagcctgggattcctggagagcggctctggctccggcggtggcaccctgaagtacgtggaggatgtgacaaacgtggtcagacgggatgtggagaagtggggccccttcgatctggtgtacggcagcacccaacccctgggcagctcttgtgaccggtgccctggctggtacatgtttcagttccaccggatcctgcagtacgccctgccgagacaggagtcccagcggccattcttttggattttcatggacaacttgctgctgaccgaggatgaccaggaaactaccactcggttcctgcagaccgaagccgtgaccctgcaggacgtgagaggccgggactaccagaacgccatgcgggtgtggtccaacatccctggactgaaaagcaagcacgcacctctgacccctaaagaagaggagtacctgcaggcccaggtgcggagcagaagcaagctggacgcccctaaggtggatctgctggtgaagaattgcctcctgcccctgagagagtacttcaagtatttcagccagaatagtctgcccctgggaggcagcggcggcggcatggaggaccccctgagcttcaccgacgtggccatcgacttcagcgccgacgagtgcgagtgcctggacagcgcccagtggaacctgtacaaggaggtgatgctggagaactacagcaacctggtgttcctgggcctggccttcagcaagccccacctggtgaccttcctggagcagagcagcgacccctggagcgtgaagaggaaggccagcgccaccatccccctgggcagcaagccccacggcggcccaagcagcggcgcccctcctcccagcggcggcaggcggcccaagcagcggcgcccctcctcccagcggcggcagcccagccggctccccaacctctaccgaggagggcacctctgagtccgccacccccgagagcggccctggcacctccaccgagcccagcgagggcagcgcacccggcagccctgccggcagccccacctccacagaggagggaaccagcaccgagcccagcgaaggcagcgccccaggcaccagcaccgagcctagtgagcaggagattaaacggatcaacaagatcagaagaagacttgtgaaagacagcaacaccaagaaggccggcaagacaggccccatgaaaaccctgctggttagagtgatgacacccgatctgagagagcggctggaaaacctgagaaagaagcctgaaaatatcccccagcccatcagcaatacatctagagccaacctgaataagctgctgaccgattacaccgaaatgaagaaggcgatcctgcatgtgtactgggaagagttccagaaggaccctgtgggcctgatgagccgggtggcccagcctgccagcaagaagatcgatcagaacaagctgaaacctgagatggacgagaagggcaacctgaccaccgccggctttgcctgctctcagtgtggccagcccctgttcgtgtacaagctggagcaggtgtctgagaagggcaaggcttacaccaactacttcggacggtgcaatgtggccgagcacgaaaagctgatcctgctggcccagctgaagcccgagaaggatagcgacgaagccgtgacatatagcctgggaaagtttgggcagagggccctggatttctacagcattcatgtgaccaaggagtccacccaccccgtgaagcccctggcccagatcgccggaaacagatacgcctccggacctgtgggaaaggccctgagcgacgcatgtatgggcacaatcgcctccttcctgtctaagtaccaggacatcatcatcgaacaccagaaggtggtgaagggcaaccagaagagactggagagcctgcgggagctggccggcaaggaaaacctggaataccctagcgtgaccctgccacctcagcctcacaccaaggagggcgttgatgcctacaacgaagtgatcgcccgggtgcgaatgtgggtgaacctgaacctgtggcagaagctgaagctaagcagagatgatgccaagcctctgctgagactgaagggattcccttcctttcctctggtcgagagacaggccaacgaagtggactggtgggacatggtgtgtaacgtgaagaagctgatcaacgagaaaaaggaggatggcaaggtgttttggcagaatctggctggctacaagagacaggaagccctgagaccatacctgagcagcgaggaagatcggaagaagggaaagaaattcgctcggtaccagctgggcgacctgctgctgcacctggaaaagaagcacggcgaggactggggaaaggtgtacgacgaggcctgggagcggattgacaagaaagtggaaggcctgagcaagcacatcaagctggaagaggaacggagaagcgaggacgcccagagcaaggccgccctgaccgactggctgcgggctaaggccagcttcgtgatcgagggcctgaaggaggccgacaaggacgagttctgcagatgcgagctgaagctgcagaagtggtacggggacctgcggggaaagcccttcgccatcgaagccgagaacagcatcctggacatcagcggcttcagcaagcagtacaactgtgccttcatctggcagaaggacggcgtgaagaagctgaacctgtacctgatcatcaactacttcaagggcggcaagctgcggttcaagaagatcaaacctgaagccttcgaagccaacagattctacaccgtgatcaacaaaaagagcggcgagatcgtgcccatggaggtgaacttcaacttcgacgaccccaacctgatcatcctgcctctggcctttggcaagagacagggcagagaattcatctggaacgacctgctgtccctggaaaccggcagcctgaagctggccaacggaagagtgatcgagaagacactgtacaacagaagaacccggcaggatgagcctgccctgttcgtggccctgaccttcgagcggcgggaggtcctggactcctccaatatcaaaccaatgaacctgatcggcgtggcaagaggcgaaaacatccccgccgtgatcgccctgaccgaccccgagggctgcccactgagccggtttaaggatagcctgggaaacccaacccacatcctgagaatcggcgagagctataaggagaagcagcggaccatccaggccaagaaggaggtggagcagcggagagccggcggctacagccggaagtacgccagcaaagccaagaatctggcagacgatatggtgagaaacaccgctagagatctgctgtactacgccgtgacccaggatgccatgctgatcttcgccaacctgagccggggcttcggccggcagggcaagcggaccttcatggccgagagacagtacacacggatggaggactggctgaccgccaagctggcctacgagggcctgagcaagacctacctgtccaagacactggcccagtacacctccaagacatgcagcaactgtgggtttaccatcaccagcgccgactacgacagggtgctggagaagctgaagaagacagcaacaggctggatgaccacaattaacggcaaggagctgaaggtggagggccagattacctactacaacagatacaagagacagaacgtagtcaaggacctgtccgtcgagctggatagactgagcgaagaatctgtgaacaacgacatctcctcctggacaaagggcagaagcggagaagctctgagcctcctgaagaaaagattctcccatagacccgtgcaggagaagttcgtgtgcctgaactgcggcttcgagacacacgcagccgagcaagccgccctgaacatcgccagatcctggctgttcctgcggagccaggagtacaagaaataccagacaaacaagacaaccggcaacaccgataagagagccttcgtcgagacctggcagtccttttaccggaagaagcttaaggaggtgtggaaacctgccgtgcggtctggcggatctggcggaggctccaccagccccaagaaaaagagaaaagtctaagctgccttctgcggggcttgccttctggccatgcccttcttctctcccttgcacctgtacctcttggtctttgaataaagcctgagtaggaaggctagcaaaaaaaaaaaaaaaaaaaaaaaaaaaaaaaaaaaaaaaaaaaaaaaaaaaaaaaaaaaaaaaaaaaaaaaaaaaaaaaagcccagccggctccccaacctctaccgaggagggcacctctgagtccgccacccccgagagcggccctggcacctccaccgagcccagcgagggcagcgcacccggcagccctgccggcagccccacctccacagaggagggaaccagcaccgagcccagcgaaggcagcgccccaggcaccagcaccgagcctagtgagcaggagattaaacggatcaacaagatcagaagaagacttgtgaaagacagcaacaccaagaaggccggcaagacaggccccatgaaaaccctgctggttagagtgatgacacccgatctgagagagcggctggaaaacctgagaaagaagcctgaaaatatcccccagcccatcagcaatacatctagagccaacctgaataagctgctgaccgattacaccgaaatgaagaaggcgatcctgcatgtgtactgggaagagttccagaaggaccctgtgggcctgatgagccgggtggcccagcctgccagcaagaagatcgatcagaacaagctgaaacctgagatggacgagaagggcaacctgaccaccgccggctttgcctgctctcagtgtggccagcccctgttcgtgtacaagctggagcaggtgtctgagaagggcaaggcttacaccaactacttcggacggtgcaatgtggccgagcacgaaaagctgatcctgctggcccagctgaagcccgagaaggatagcgacgaagccgtgacatatagcctgggaaagtttgggcagagggccctggatttctacagcattcatgtgaccaaggagtccacccaccccgtgaagcccctggcccagatcgccggaaacagatacgcctccggacctgtgggaaaggccctgagcgacgcatgtatgggcacaatcgcctccttcctgtctaagtaccaggacatcatcatcgaacaccagaaggtggtgaagggcaaccagaagagactggagagcctgcgggagctggccggcaaggaaaacctggaataccctagcgtgaccctgccacctcagcctcacaccaaggagggcgttgatgcctacaacgaagtgatcgcccgggtgcgaatgtgggtgaacctgaacctgtggcagaagctgaagctaagcagagatgatgccaagcctctgctgagactgaagggattcccttcctttcctctggtcgagagacaggccaacgaagtggactggtgggacatggtgtgtaacgtgaagaagctgatcaacgagaaaaaggaggatggcaaggtgttttggcagaatctggctggctacaagagacaggaagccctgagaccatacctgagcagcgaggaagatcggaagaagggaaagaaattcgctcggtaccagctgggcgacctgctgctgcacctggaaaagaagcacggcgaggactggggaaaggtgtacgacgaggcctgggagcggattgacaagaaagtggaaggcctgagcaagcacatcaagctggaagaggaacggagaagcgaggacgcccagagcaaggccgccctgaccgactggctgcgggctaaggccagcttcgtgatcgagggcctgaaggaggccgacaaggacgagttctgcagatgcgagctgaagctgcagaagtggtacggggacctgcggggaaagcccttcgccatcgaagccgagaacagcatcctggacatcagcggcttcagcaagcagtacaactgtgccttcatctggcagaaggacggcgtgaagaagctgaacctgtacctgatcatcaactacttcaagggcggcaagctgcggttcaagaagatcaaacctgaagccttcgaagccaacagattctacaccgtgatcaacaaaaagagcggcgagatcgtgcccatggaggtgaacttcaacttcgacgaccccaacctgatcatcctgcctctggcctttggcaagagacagggcagagaattcatctggaacgacctgctgtccctggaaaccggcagcctgaagctggccaacggaagagtgatcgagaagacactgtacaacagaagaacccggcaggatgagcctgccctgttcgtggccctgaccttcgagcggcgggaggtcctggactcctccaatatcaaaccaatgaacctgatcggcgtggcaagaggcgaaaacatccccgccgtgatcgccctgaccgaccccgagggctgcccactgagccggtttaaggatagcctgggaaacccaacccacatcctgagaatcggcgagagctataaggagaagcagcggaccatccaggccaagaaggaggtggagcagcggagagccggcggctacagccggaagtacgccagcaaagccaagaatctggcagacgatatggtgagaaacaccgctagagatctgctgtactacgccgtgacccaggatgccatgctgatcttcgccaacctgagccggggcttcggccggcagggcaagcggaccttcatggccgagagacagtacacacggatggaggactggctgaccgccaagctggcctacgagggcctgagcaagacctacctgtccaagacactggcccagtacacctccaagacatgcagcaactgtgggtttaccatcaccagcgccgactacgacagggtgctggagaagctgaagaagacagcaacaggctggatgaccacaattaacggcaaggagctgaaggtggagggccagattacctactacaacagatacaagagacagaacgtagtcaaggacctgtccgtcgagctggatagactgagcgaagaatctgtgaacaacgacatctcctcctggacaaagggcagaagcggagaagctctgagcctcctgaagaaaagattctcccatagacccgtgcaggagaagttcgtgtgcctgaactgcggcttcgagacacacgcagccgagcaagccgccctgaacatcgccagatcctggctgttcctgcggagccaggagtacaagaaataccagacaaacaagacaaccggcaacaccgataagagagccttcgtcgagacctggcagtccttttaccggaagaagcttaaggaggtgtggaaacctgccgtgcggtctggcggatctggcggaggctccaccagccccaagaaaaagagaaaagtctaagctgccttctgcggggcttgccttctggccatgcccttcttctctcccttgcacctgtacctcttggtctttgaataaagcctgagtaggaaggctagcaaaaaaaaaaaaaaaaaaaaaaaaaaaaaaaaaaaaaaaaaaaaaaaaaaaaaaaaaaaaaaaaaaaaaaaaaaaaaaaa

SEQ ID NO: 9412 - RNA, 8787 nt, synthetic construct
  source 1..8787: mol_type = other RNA
aggaaataagagagaaaagaagagtaagaagaaatataagagccaccatggcccctaagaagaagcgtaaagtgagccggatgaaccacgaccaggagttcgacccccctaaggtgtaccctcccgtccccgccgagaagagaaagcccatccgggtcctgagcctgttcgatggcatcgccaccggtctgctggtgctgaaggacctgggcatccaggtggataggtacattgcctccgaggtgtgcgaggactccatcaccgtgggaatggtgcgtcatcagggcaagatcatgtacgtgggcgacgtgcggagcgtgacacagaagcatatccaggagtggggccctttcgacctggtgatcggcggcagcccttgcaatgacctgagcatcgtgaacccagcccggaagggcctgtacgagggaaccggcagactgttcttcgagttttacagactgctgcacgacgcccggcctaaggaaggcgacgaccggcccttcttttggctgttcgagaatgtggtggccatgggagtcagcgacaagcgggatattagccggttcctggagagcaaccccgtgatgatcgatgccaaggaagtgagcgccgcccaccgggccagatacttctggggcaatctgcctggcatgaacagacccctggccagcaccgtgaacgacaagctggagctgcaggagtgcctggagcacggccggatcgccaagttcagcaaggtgagaaccatcaccacccgaagcaacagcatcaaacaaggcaaggaccagcactttcctgtgttcatgaacgagaaggaggacatcctgtggtgtaccgagatggagagagtgttcgggttcccagtccactacacagatgtcagcaacatgtctagactggccagacagagactgctgggaagaagctggtccgtccctgtgatcagacacctgttcgcccctctgaaggagtacttcgcctgcgtgagcagcggcaacagcaacgccaacagccggggccccagcttctctagcggcctggtgccactgtccctgagagggagccacatgggccccatggagatctacaaaaccgtgagcgcctggaagcggcagcctgtgcgcgtgctgagcctgtttcggaatatcgataaagtcctgaaaagcctgggattcctggagagcggctctggctccggcggtggcaccctgaagtacgtggaggatgtgacaaacgtggtcagacgggatgtggagaagtggggccccttcgatctggtgtacggcagcacccaacccctgggcagctcttgtgaccggtgccctggctggtacatgtttcagttccaccggatcctgcagtacgccctgccgagacaggagtcccagcggccattcttttggattttcatggacaacttgctgctgaccgaggatgaccaggaaactaccactcggttcctgcagaccgaagccgtgaccctgcaggacgtgagaggccgggactaccagaacgccatgcgggtgtggtccaacatccctggactgaaaagcaagcacgcacctctgacccctaaagaagaggagtacctgcaggcccaggtgcggagcagaagcaagctggacgcccctaaggtggatctgctggtgaagaattgcctcctgcccctgagagagtacttcaagtatttcagccagaatagtctgcccctgggaggcagcggcggcggcgcccccggcagcgtgaccttcagggacgtggccatcgacttcagccaggaggagtggaagtggctgcagcccgcccagagggacctgtacaggtgcgtgatgctggagaactacggccacctggtgagcctgggcctgtgcatcagcaagcccgacgtggtgagcctgctggagcagggcaaggagccctggctgggcaagggcggcgtgaacagggacctgttcagcgtgagcgacggcaagggcggcccaagcagcggcgcccctcctcccagcggcggcaggcggcccaagcagcggcgcccctcctcccagcggcggcagcccagccggctccccaacctctaccgaggagggcacctctgagtccgccacccccgagagcggccctggcacctccaccgagcccagcgagggcagcgcacccggcagccctgccggcagccccacctccacagaggagggaaccagcaccgagcccagcgaaggcagcgccccaggcaccagcaccgagcctagtgagcaggagattaaacggatcaacaagatcagaagaagacttgtgaaagacagcaacaccaagaaggccggcaagacaggccccatgaaaaccctgctggttagagtgatgacacccgatctgagagagcggctggaaaacctgagaaagaagcctgaaaatatcccccagcccatcagcaatacatctagagccaacctgaataagctgctgaccgattacaccgaaatgaagaaggcgatcctgcatgtgtactgggaagagttccagaaggaccctgtgggcctgatgagccgggtggcccagcctgccagcaagaagatcgatcagaacaagctgaaacctgagatggacgagaagggcaacctgaccaccgccggctttgcctgctctcagtgtggccagcccctgttcgtgtacaagctggagcaggtgtctgagaagggcaaggcttacaccaactacttcggacggtgcaatgtggccgagcacgaaaagctgatcctgctggcccagctgaagcccgagaaggatagcgacgaagccgtgacatatagcctgggaaagtttgggcagagggccctggatttctacagcattcatgtgaccaaggagtccacccaccccgtgaagcccctggcccagatcgccggaaacagatacgcctccggacctgtgggaaaggccctgagcgacgcatgtatgggcacaatcgcctccttcctgtctaagtaccaggacatcatcatcgaacaccagaaggtggtgaagggcaaccagaagagactggagagcctgcgggagctggccggcaaggaaaacctggaataccctagcgtgaccctgccacctcagcctcacaccaaggagggcgttgatgcctacaacgaagtgatcgcccgggtgcgaatgtgggtgaacctgaacctgtggcagaagctgaagctaagcagagatgatgccaagcctctgctgagactgaagggattcccttcctttcctctggtcgagagacaggccaacgaagtggactggtgggacatggtgtgtaacgtgaagaagctgatcaacgagaaaaaggaggatggcaaggtgttttggcagaatctggctggctacaagagacaggaagccctgagaccatacctgagcagcgaggaagatcggaagaagggaaagaaattcgctcggtaccagctgggcgacctgctgctgcacctggaaaagaagcacggcgaggactggggaaaggtgtacgacgaggcctgggagcggattgacaagaaagtggaaggcctgagcaagcacatcaagctggaagaggaacggagaagcgaggacgcccagagcaaggccgccctgaccgactggctgcgggctaaggccagcttcgtgatcgagggcctgaaggaggccgacaaggacgagttctgcagatgcgagctgaagctgcagaagtggtacggggacctgcggggaaagcccttcgccatcgaagccgagaacagcatcctggacatcagcggcttcagcaagcagtacaactgtgccttcatctggcagaaggacggcgtgaagaagctgaacctgtacctgatcatcaactacttcaagggcggcaagctgcggttcaagaagatcaaacctgaagccttcgaagccaacagattctacaccgtgatcaacaaaaagagcggcgagatcgtgcccatggaggtgaacttcaacttcgacgaccccaacctgatcatcctgcctctggcctttggcaagagacagggcagagaattcatctggaacgacctgctgtccctggaaaccggcagcctgaagctggccaacggaagagtgatcgagaagacactgtacaacagaagaacccggcaggatgagcctgccctgttcgtggccctgaccttcgagcggcgggaggtcctggactcctccaatatcaaaccaatgaacctgatcggcgtggcaagaggcgaaaacatccccgccgtgatcgccctgaccgaccccgagggctgcccactgagccggtttaaggatagcctgggaaacccaacccacatcctgagaatcggcgagagctataaggagaagcagcggaccatccaggccaagaaggaggtggagcagcggagagccggcggctacagccggaagtacgccagcaaagccaagaatctggcagacgatatggtgagaaacaccgctagagatctgctgtactacgccgtgacccaggatgccatgctgatcttcgccaacctgagccggggcttcggccggcagggcaagcggaccttcatggccgagagacagtacacacggatggaggactggctgaccgccaagctggcctacgagggcctgagcaagacctacctgtccaagacactggcccagtacacctccaagacatgcagcaactgtgggtttaccatcaccagcgccgactacgacagggtgctggagaagctgaagaagacagcaacaggctggatgaccacaattaacggcaaggagctgaaggtggagggccagattacctactacaacagatacaagagacagaacgtagtcaaggacctgtccgtcgagctggatagactgagcgaagaatctgtgaacaacgacatctcctcctggacaaagggcagaagcggagaagctctgagcctcctgaagaaaagattctcccatagacccgtgcaggagaagttcgtgtgcctgaactgcggcttcgagacacacgcagccgagcaagccgccctgaacatcgccagatcctggctgttcctgcggagccaggagtacaagaaataccagacaaacaagacaaccggcaacaccgataagagagccttcgtcgagacctggcagtccttttaccggaagaagcttaaggaggtgtggaaacctgccgtgcggtctggcggatctggcggaggctccaccagccccaagaaaaagagaaaagtctaagctgccttctgcggggcttgccttctggccatgcccttcttctctcccttgcacctgtacctcttggtctttgaataaagcctgagtaggaaggctagcaaaaaaaaaaaaaaaaaaaaaaaaaaaaaaaaaaaaaaaaaaaaaaaaaaaaaaaaaaaaaaaaaaaaaaaaaaaaaaaagcccagccggctccccaacctctaccgaggagggcacctctgagtccgccacccccgagagcggccctggcacctccaccgagcccagcgagggcagcgcacccggcagccctgccggcagccccacctccacagaggagggaaccagcaccgagcccagcgaaggcagcgccccaggcaccagcaccgagcctagtgagcaggagattaaacggatcaacaagatcagaagaagacttgtgaaagacagcaacaccaagaaggccggcaagacaggccccatgaaaaccctgctggttagagtgatgacacccgatctgagagagcggctggaaaacctgagaaagaagcctgaaaatatcccccagcccatcagcaatacatctagagccaacctgaataagctgctgaccgattacaccgaaatgaagaaggcgatcctgcatgtgtactgggaagagttccagaaggaccctgtgggcctgatgagccgggtggcccagcctgccagcaagaagatcgatcagaacaagctgaaacctgagatggacgagaagggcaacctgaccaccgccggctttgcctgctctcagtgtggccagcccctgttcgtgtacaagctggagcaggtgtctgagaagggcaaggcttacaccaactacttcggacggtgcaatgtggccgagcacgaaaagctgatcctgctggcccagctgaagcccgagaaggatagcgacgaagccgtgacatatagcctgggaaagtttgggcagagggccctggatttctacagcattcatgtgaccaaggagtccacccaccccgtgaagcccctggcccagatcgccggaaacagatacgcctccggacctgtgggaaaggccctgagcgacgcatgtatgggcacaatcgcctccttcctgtctaagtaccaggacatcatcatcgaacaccagaaggtggtgaagggcaaccagaagagactggagagcctgcgggagctggccggcaaggaaaacctggaataccctagcgtgaccctgccacctcagcctcacaccaaggagggcgttgatgcctacaacgaagtgatcgcccgggtgcgaatgtgggtgaacctgaacctgtggcagaagctgaagctaagcagagatgatgccaagcctctgctgagactgaagggattcccttcctttcctctggtcgagagacaggccaacgaagtggactggtgggacatggtgtgtaacgtgaagaagctgatcaacgagaaaaaggaggatggcaaggtgttttggcagaatctggctggctacaagagacaggaagccctgagaccatacctgagcagcgaggaagatcggaagaagggaaagaaattcgctcggtaccagctgggcgacctgctgctgcacctggaaaagaagcacggcgaggactggggaaaggtgtacgacgaggcctgggagcggattgacaagaaagtggaaggcctgagcaagcacatcaagctggaagaggaacggagaagcgaggacgcccagagcaaggccgccctgaccgactggctgcgggctaaggccagcttcgtgatcgagggcctgaaggaggccgacaaggacgagttctgcagatgcgagctgaagctgcagaagtggtacggggacctgcggggaaagcccttcgccatcgaagccgagaacagcatcctggacatcagcggcttcagcaagcagtacaactgtgccttcatctggcagaaggacggcgtgaagaagctgaacctgtacctgatcatcaactacttcaagggcggcaagctgcggttcaagaagatcaaacctgaagccttcgaagccaacagattctacaccgtgatcaacaaaaagagcggcgagatcgtgcccatggaggtgaacttcaacttcgacgaccccaacctgatcatcctgcctctggcctttggcaagagacagggcagagaattcatctggaacgacctgctgtccctggaaaccggcagcctgaagctggccaacggaagagtgatcgagaagacactgtacaacagaagaacccggcaggatgagcctgccctgttcgtggccctgaccttcgagcggcgggaggtcctggactcctccaatatcaaaccaatgaacctgatcggcgtggcaagaggcgaaaacatccccgccgtgatcgccctgaccgaccccgagggctgcccactgagccggtttaaggatagcctgggaaacccaacccacatcctgagaatcggcgagagctataaggagaagcagcggaccatccaggccaagaaggaggtggagcagcggagagccggcggctacagccggaagtacgccagcaaagccaagaatctggcagacgatatggtgagaaacaccgctagagatctgctgtactacgccgtgacccaggatgccatgctgatcttcgccaacctgagccggggcttcggccggcagggcaagcggaccttcatggccgagagacagtacacacggatggaggactggctgaccgccaagctggcctacgagggcctgagcaagacctacctgtccaagacactggcccagtacacctccaagacatgcagcaactgtgggtttaccatcaccagcgccgactacgacagggtgctggagaagctgaagaagacagcaacaggctggatgaccacaattaacggcaaggagctgaaggtggagggccagattacctactacaacagatacaagagacagaacgtagtcaaggacctgtccgtcgagctggatagactgagcgaagaatctgtgaacaacgacatctcctcctggacaaagggcagaagcggagaagctctgagcctcctgaagaaaagattctcccatagacccgtgcaggagaagttcgtgtgcctgaactgcggcttcgagacacacgcagccgagcaagccgccctgaacatcgccagatcctggctgttcctgcggagccaggagtacaagaaataccagacaaacaagacaaccggcaacaccgataagagagccttcgtcgagacctggcagtccttttaccggaagaagcttaaggaggtgtggaaacctgccgtgcggtctggcggatctggcggaggctccaccagccccaagaaaaagagaaaagtctaagctgccttctgcggggcttgccttctggccatgcccttcttctctcccttgcacctgtacctcttggtctttgaataaagcctgagtaggaaggctagcaaaaaaaaaaaaaaaaaaaaaaaaaaaaaaaaaaaaaaaaaaaaaaaaaaaaaaaaaaaaaaaaaaaaaaaaaaaaaaaa

SEQ ID NO: 9413 - RNA, 8787 nt, synthetic construct
  source 1..8787: mol_type = other RNA
aggaaataagagagaaaagaagagtaagaagaaatataagagccaccatggcccctaagaagaagcgtaaagtgagccggatgaaccacgaccaggagttcgacccccctaaggtgtaccctcccgtccccgccgagaagagaaagcccatccgggtcctgagcctgttcgatggcatcgccaccggtctgctggtgctgaaggacctgggcatccaggtggataggtacattgcctccgaggtgtgcgaggactccatcaccgtgggaatggtgcgtcatcagggcaagatcatgtacgtgggcgacgtgcggagcgtgacacagaagcatatccaggagtggggccctttcgacctggtgatcggcggcagcccttgcaatgacctgagcatcgtgaacccagcccggaagggcctgtacgagggaaccggcagactgttcttcgagttttacagactgctgcacgacgcccggcctaaggaaggcgacgaccggcccttcttttggctgttcgagaatgtggtggccatgggagtcagcgacaagcgggatattagccggttcctggagagcaaccccgtgatgatcgatgccaaggaagtgagcgccgcccaccgggccagatacttctggggcaatctgcctggcatgaacagacccctggccagcaccgtgaacgacaagctggagctgcaggagtgcctggagcacggccggatcgccaagttcagcaaggtgagaaccatcaccacccgaagcaacagcatcaaacaaggcaaggaccagcactttcctgtgttcatgaacgagaaggaggacatcctgtggtgtaccgagatggagagagtgttcgggttcccagtccactacacagatgtcagcaacatgtctagactggccagacagagactgctgggaagaagctggtccgtccctgtgatcagacacctgttcgcccctctgaaggagtacttcgcctgcgtgagcagcggcaacagcaacgccaacagccggggccccagcttctctagcggcctggtgccactgtccctgagagggagccacatgggccccatggagatctacaaaaccgtgagcgcctggaagcggcagcctgtgcgcgtgctgagcctgtttcggaatatcgataaagtcctgaaaagcctgggattcctggagagcggctctggctccggcggtggcaccctgaagtacgtggaggatgtgacaaacgtggtcagacgggatgtggagaagtggggccccttcgatctggtgtacggcagcacccaacccctgggcagctcttgtgaccggtgccctggctggtacatgtttcagttccaccggatcctgcagtacgccctgccgagacaggagtcccagcggccattcttttggattttcatggacaacttgctgctgaccgaggatgaccaggaaactaccactcggttcctgcagaccgaagccgtgaccctgcaggacgtgagaggccgggactaccagaacgccatgcgggtgtggtccaacatccctggactgaaaagcaagcacgcacctctgacccctaaagaagaggagtacctgcaggcccaggtgcggagcagaagcaagctggacgcccctaaggtggatctgctggtgaagaattgcctcctgcccctgagagagtacttcaagtatttcagccagaatagtctgcccctgggaggcagcggcggcggcggcagcgtgatgttcagcgacgtgagcgtggacttcagccaggacgagtgggagtgcctggaccccgtgcagagggacctgtacagggaggtgatgctggagaactacagcaacctggtgagcgtgggcctgtacatccccaagccccaggtgatcagcctgctggagcagggcaaggagccctggatggtgggcaaggagctgaccaggggcctgtgcagcgacctggagagcatgtgcgagggcggcccaagcagcggcgcccctcctcccagcggcggcaggcggcccaagcagcggcgcccctcctcccagcggcggcagcccagccggctccccaacctctaccgaggagggcacctctgagtccgccacccccgagagcggccctggcacctccaccgagcccagcgagggcagcgcacccggcagccctgccggcagccccacctccacagaggagggaaccagcaccgagcccagcgaaggcagcgccccaggcaccagcaccgagcctagtgagcaggagattaaacggatcaacaagatcagaagaagacttgtgaaagacagcaacaccaagaaggccggcaagacaggccccatgaaaaccctgctggttagagtgatgacacccgatctgagagagcggctggaaaacctgagaaagaagcctgaaaatatcccccagcccatcagcaatacatctagagccaacctgaataagctgctgaccgattacaccgaaatgaagaaggcgatcctgcatgtgtactgggaagagttccagaaggaccctgtgggcctgatgagccgggtggcccagcctgccagcaagaagatcgatcagaacaagctgaaacctgagatggacgagaagggcaacctgaccaccgccggctttgcctgctctcagtgtggccagcccctgttcgtgtacaagctggagcaggtgtctgagaagggcaaggcttacaccaactacttcggacggtgcaatgtggccgagcacgaaaagctgatcctgctggcccagctgaagcccgagaaggatagcgacgaagccgtgacatatagcctgggaaagtttgggcagagggccctggatttctacagcattcatgtgaccaaggagtccacccaccccgtgaagcccctggcccagatcgccggaaacagatacgcctccggacctgtgggaaaggccctgagcgacgcatgtatgggcacaatcgcctccttcctgtctaagtaccaggacatcatcatcgaacaccagaaggtggtgaagggcaaccagaagagactggagagcctgcgggagctggccggcaaggaaaacctggaataccctagcgtgaccctgccacctcagcctcacaccaaggagggcgttgatgcctacaacgaagtgatcgcccgggtgcgaatgtgggtgaacctgaacctgtggcagaagctgaagctaagcagagatgatgccaagcctctgctgagactgaagggattcccttcctttcctctggtcgagagacaggccaacgaagtggactggtgggacatggtgtgtaacgtgaagaagctgatcaacgagaaaaaggaggatggcaaggtgttttggcagaatctggctggctacaagagacaggaagccctgagaccatacctgagcagcgaggaagatcggaagaagggaaagaaattcgctcggtaccagctgggcgacctgctgctgcacctggaaaagaagcacggcgaggactggggaaaggtgtacgacgaggcctgggagcggattgacaagaaagtggaaggcctgagcaagcacatcaagctggaagaggaacggagaagcgaggacgcccagagcaaggccgccctgaccgactggctgcgggctaaggccagcttcgtgatcgagggcctgaaggaggccgacaaggacgagttctgcagatgcgagctgaagctgcagaagtggtacggggacctgcggggaaagcccttcgccatcgaagccgagaacagcatcctggacatcagcggcttcagcaagcagtacaactgtgccttcatctggcagaaggacggcgtgaagaagctgaacctgtacctgatcatcaactacttcaagggcggcaagctgcggttcaagaagatcaaacctgaagccttcgaagccaacagattctacaccgtgatcaacaaaaagagcggcgagatcgtgcccatggaggtgaacttcaacttcgacgaccccaacctgatcatcctgcctctggcctttggcaagagacagggcagagaattcatctggaacgacctgctgtccctggaaaccggcagcctgaagctggccaacggaagagtgatcgagaagacactgtacaacagaagaacccggcaggatgagcctgccctgttcgtggccctgaccttcgagcggcgggaggtcctggactcctccaatatcaaaccaatgaacctgatcggcgtggcaagaggcgaaaacatccccgccgtgatcgccctgaccgaccccgagggctgcccactgagccggtttaaggatagcctgggaaacccaacccacatcctgagaatcggcgagagctataaggagaagcagcggaccatccaggccaagaaggaggtggagcagcggagagccggcggctacagccggaagtacgccagcaaagccaagaatctggcagacgatatggtgagaaacaccgctagagatctgctgtactacgccgtgacccaggatgccatgctgatcttcgccaacctgagccggggcttcggccggcagggcaagcggaccttcatggccgagagacagtacacacggatggaggactggctgaccgccaagctggcctacgagggcctgagcaagacctacctgtccaagacactggcccagtacacctccaagacatgcagcaactgtgggtttaccatcaccagcgccgactacgacagggtgctggagaagctgaagaagacagcaacaggctggatgaccacaattaacggcaaggagctgaaggtggagggccagattacctactacaacagatacaagagacagaacgtagtcaaggacctgtccgtcgagctggatagactgagcgaagaatctgtgaacaacgacatctcctcctggacaaagggcagaagcggagaagctctgagcctcctgaagaaaagattctcccatagacccgtgcaggagaagttcgtgtgcctgaactgcggcttcgagacacacgcagccgagcaagccgccctgaacatcgccagatcctggctgttcctgcggagccaggagtacaagaaataccagacaaacaagacaaccggcaacaccgataagagagccttcgtcgagacctggcagtccttttaccggaagaagcttaaggaggtgtggaaacctgccgtgcggtctggcggatctggcggaggctccaccagccccaagaaaaagagaaaagtctaagctgccttctgcggggcttgccttctggccatgcccttcttctctcccttgcacctgtacctcttggtctttgaataaagcctgagtaggaaggctagcaaaaaaaaaaaaaaaaaaaaaaaaaaaaaaaaaaaaaaaaaaaaaaaaaaaaaaaaaaaaaaaaaaaaaaaaaaaaaaaagcccagccggctccccaacctctaccgaggagggcacctctgagtccgccacccccgagagcggccctggcacctccaccgagcccagcgagggcagcgcacccggcagccctgccggcagccccacctccacagaggagggaaccagcaccgagcccagcgaaggcagcgccccaggcaccagcaccgagcctagtgagcaggagattaaacggatcaacaagatcagaagaagacttgtgaaagacagcaacaccaagaaggccggcaagacaggccccatgaaaaccctgctggttagagtgatgacacccgatctgagagagcggctggaaaacctgagaaagaagcctgaaaatatcccccagcccatcagcaatacatctagagccaacctgaataagctgctgaccgattacaccgaaatgaagaaggcgatcctgcatgtgtactgggaagagttccagaaggaccctgtgggcctgatgagccgggtggcccagcctgccagcaagaagatcgatcagaacaagctgaaacctgagatggacgagaagggcaacctgaccaccgccggctttgcctgctctcagtgtggccagcccctgttcgtgtacaagctggagcaggtgtctgagaagggcaaggcttacaccaactacttcggacggtgcaatgtggccgagcacgaaaagctgatcctgctggcccagctgaagcccgagaaggatagcgacgaagccgtgacatatagcctgggaaagtttgggcagagggccctggatttctacagcattcatgtgaccaaggagtccacccaccccgtgaagcccctggcccagatcgccggaaacagatacgcctccggacctgtgggaaaggccctgagcgacgcatgtatgggcacaatcgcctccttcctgtctaagtaccaggacatcatcatcgaacaccagaaggtggtgaagggcaaccagaagagactggagagcctgcgggagctggccggcaaggaaaacctggaataccctagcgtgaccctgccacctcagcctcacaccaaggagggcgttgatgcctacaacgaagtgatcgcccgggtgcgaatgtgggtgaacctgaacctgtggcagaagctgaagctaagcagagatgatgccaagcctctgctgagactgaagggattcccttcctttcctctggtcgagagacaggccaacgaagtggactggtgggacatggtgtgtaacgtgaagaagctgatcaacgagaaaaaggaggatggcaaggtgttttggcagaatctggctggctacaagagacaggaagccctgagaccatacctgagcagcgaggaagatcggaagaagggaaagaaattcgctcggtaccagctgggcgacctgctgctgcacctggaaaagaagcacggcgaggactggggaaaggtgtacgacgaggcctgggagcggattgacaagaaagtggaaggcctgagcaagcacatcaagctggaagaggaacggagaagcgaggacgcccagagcaaggccgccctgaccgactggctgcgggctaaggccagcttcgtgatcgagggcctgaaggaggccgacaaggacgagttctgcagatgcgagctgaagctgcagaagtggtacggggacctgcggggaaagcccttcgccatcgaagccgagaacagcatcctggacatcagcggcttcagcaagcagtacaactgtgccttcatctggcagaaggacggcgtgaagaagctgaacctgtacctgatcatcaactacttcaagggcggcaagctgcggttcaagaagatcaaacctgaagccttcgaagccaacagattctacaccgtgatcaacaaaaagagcggcgagatcgtgcccatggaggtgaacttcaacttcgacgaccccaacctgatcatcctgcctctggcctttggcaagagacagggcagagaattcatctggaacgacctgctgtccctggaaaccggcagcctgaagctggccaacggaagagtgatcgagaagacactgtacaacagaagaacccggcaggatgagcctgccctgttcgtggccctgaccttcgagcggcgggaggtcctggactcctccaatatcaaaccaatgaacctgatcggcgtggcaagaggcgaaaacatccccgccgtgatcgccctgaccgaccccgagggctgcccactgagccggtttaaggatagcctgggaaacccaacccacatcctgagaatcggcgagagctataaggagaagcagcggaccatccaggccaagaaggaggtggagcagcggagagccggcggctacagccggaagtacgccagcaaagccaagaatctggcagacgatatggtgagaaacaccgctagagatctgctgtactacgccgtgacccaggatgccatgctgatcttcgccaacctgagccggggcttcggccggcagggcaagcggaccttcatggccgagagacagtacacacggatggaggactggctgaccgccaagctggcctacgagggcctgagcaagacctacctgtccaagacactggcccagtacacctccaagacatgcagcaactgtgggtttaccatcaccagcgccgactacgacagggtgctggagaagctgaagaagacagcaacaggctggatgaccacaattaacggcaaggagctgaaggtggagggccagattacctactacaacagatacaagagacagaacgtagtcaaggacctgtccgtcgagctggatagactgagcgaagaatctgtgaacaacgacatctcctcctggacaaagggcagaagcggagaagctctgagcctcctgaagaaaagattctcccatagacccgtgcaggagaagttcgtgtgcctgaactgcggcttcgagacacacgcagccgagcaagccgccctgaacatcgccagatcctggctgttcctgcggagccaggagtacaagaaataccagacaaacaagacaaccggcaacaccgataagagagccttcgtcgagacctggcagtccttttaccggaagaagcttaaggaggtgtggaaacctgccgtgcggtctggcggatctggcggaggctccaccagccccaagaaaaagagaaaagtctaagctgccttctgcggggcttgccttctggccatgcccttcttctctcccttgcacctgtacctcttggtctttgaataaagcctgagtaggaaggctagcaaaaaaaaaaaaaaaaaaaaaaaaaaaaaaaaaaaaaaaaaaaaaaaaaaaaaaaaaaaaaaaaaaaaaaaaaaaaaaaa

SEQ ID NO: 9414 - RNA, 8787 nt, synthetic construct
  source 1..8787: mol_type = other RNA
aggaaataagagagaaaagaagagtaagaagaaatataagagccaccatggcccctaagaagaagcgtaaagtgagccggatgaaccacgaccaggagttcgacccccctaaggtgtaccctcccgtccccgccgagaagagaaagcccatccgggtcctgagcctgttcgatggcatcgccaccggtctgctggtgctgaaggacctgggcatccaggtggataggtacattgcctccgaggtgtgcgaggactccatcaccgtgggaatggtgcgtcatcagggcaagatcatgtacgtgggcgacgtgcggagcgtgacacagaagcatatccaggagtggggccctttcgacctggtgatcggcggcagcccttgcaatgacctgagcatcgtgaacccagcccggaagggcctgtacgagggaaccggcagactgttcttcgagttttacagactgctgcacgacgcccggcctaaggaaggcgacgaccggcccttcttttggctgttcgagaatgtggtggccatgggagtcagcgacaagcgggatattagccggttcctggagagcaaccccgtgatgatcgatgccaaggaagtgagcgccgcccaccgggccagatacttctggggcaatctgcctggcatgaacagacccctggccagcaccgtgaacgacaagctggagctgcaggagtgcctggagcacggccggatcgccaagttcagcaaggtgagaaccatcaccacccgaagcaacagcatcaaacaaggcaaggaccagcactttcctgtgttcatgaacgagaaggaggacatcctgtggtgtaccgagatggagagagtgttcgggttcccagtccactacacagatgtcagcaacatgtctagactggccagacagagactgctgggaagaagctggtccgtccctgtgatcagacacctgttcgcccctctgaaggagtacttcgcctgcgtgagcagcggcaacagcaacgccaacagccggggccccagcttctctagcggcctggtgccactgtccctgagagggagccacatgggccccatggagatctacaaaaccgtgagcgcctggaagcggcagcctgtgcgcgtgctgagcctgtttcggaatatcgataaagtcctgaaaagcctgggattcctggagagcggctctggctccggcggtggcaccctgaagtacgtggaggatgtgacaaacgtggtcagacgggatgtggagaagtggggccccttcgatctggtgtacggcagcacccaacccctgggcagctcttgtgaccggtgccctggctggtacatgtttcagttccaccggatcctgcagtacgccctgccgagacaggagtcccagcggccattcttttggattttcatggacaacttgctgctgaccgaggatgaccaggaaactaccactcggttcctgcagaccgaagccgtgaccctgcaggacgtgagaggccgggactaccagaacgccatgcgggtgtggtccaacatccctggactgaaaagcaagcacgcacctctgacccctaaagaagaggagtacctgcaggcccaggtgcggagcagaagcaagctggacgcccctaaggtggatctgctggtgaagaattgcctcctgcccctgagagagtacttcaagtatttcagccagaatagtctgcccctgggaggcagcggcggcggcggcagcgtgtgcgaggtgagcgtgagcttcgaggacgtgaccgtggacttcagcagggaggagtggcagcacctggaccccgcccagaggaggctgtactgggacgtgaccctggagaactacagccacctgtgcagcgtgggctaccaggtgcccaagcccgaggtgatcttcaagctggagcagggcgagggcccctggaccctggaggaggagaccccccaccagagctgcagcggcgccggcggcccaagcagcggcgcccctcctcccagcggcggcaggcggcccaagcagcggcgcccctcctcccagcggcggcagcccagccggctccccaacctctaccgaggagggcacctctgagtccgccacccccgagagcggccctggcacctccaccgagcccagcgagggcagcgcacccggcagccctgccggcagccccacctccacagaggagggaaccagcaccgagcccagcgaaggcagcgccccaggcaccagcaccgagcctagtgagcaggagattaaacggatcaacaagatcagaagaagacttgtgaaagacagcaacaccaagaaggccggcaagacaggccccatgaaaaccctgctggttagagtgatgacacccgatctgagagagcggctggaaaacctgagaaagaagcctgaaaatatcccccagcccatcagcaatacatctagagccaacctgaataagctgctgaccgattacaccgaaatgaagaaggcgatcctgcatgtgtactgggaagagttccagaaggaccctgtgggcctgatgagccgggtggcccagcctgccagcaagaagatcgatcagaacaagctgaaacctgagatggacgagaagggcaacctgaccaccgccggctttgcctgctctcagtgtggccagcccctgttcgtgtacaagctggagcaggtgtctgagaagggcaaggcttacaccaactacttcggacggtgcaatgtggccgagcacgaaaagctgatcctgctggcccagctgaagcccgagaaggatagcgacgaagccgtgacatatagcctgggaaagtttgggcagagggccctggatttctacagcattcatgtgaccaaggagtccacccaccccgtgaagcccctggcccagatcgccggaaacagatacgcctccggacctgtgggaaaggccctgagcgacgcatgtatgggcacaatcgcctccttcctgtctaagtaccaggacatcatcatcgaacaccagaaggtggtgaagggcaaccagaagagactggagagcctgcgggagctggccggcaaggaaaacctggaataccctagcgtgaccctgccacctcagcctcacaccaaggagggcgttgatgcctacaacgaagtgatcgcccgggtgcgaatgtgggtgaacctgaacctgtggcagaagctgaagctaagcagagatgatgccaagcctctgctgagactgaagggattcccttcctttcctctggtcgagagacaggccaacgaagtggactggtgggacatggtgtgtaacgtgaagaagctgatcaacgagaaaaaggaggatggcaaggtgttttggcagaatctggctggctacaagagacaggaagccctgagaccatacctgagcagcgaggaagatcggaagaagggaaagaaattcgctcggtaccagctgggcgacctgctgctgcacctggaaaagaagcacggcgaggactggggaaaggtgtacgacgaggcctgggagcggattgacaagaaagtggaaggcctgagcaagcacatcaagctggaagaggaacggagaagcgaggacgcccagagcaaggccgccctgaccgactggctgcgggctaaggccagcttcgtgatcgagggcctgaaggaggccgacaaggacgagttctgcagatgcgagctgaagctgcagaagtggtacggggacctgcggggaaagcccttcgccatcgaagccgagaacagcatcctggacatcagcggcttcagcaagcagtacaactgtgccttcatctggcagaaggacggcgtgaagaagctgaacctgtacctgatcatcaactacttcaagggcggcaagctgcggttcaagaagatcaaacctgaagccttcgaagccaacagattctacaccgtgatcaacaaaaagagcggcgagatcgtgcccatggaggtgaacttcaacttcgacgaccccaacctgatcatcctgcctctggcctttggcaagagacagggcagagaattcatctggaacgacctgctgtccctggaaaccggcagcctgaagctggccaacggaagagtgatcgagaagacactgtacaacagaagaacccggcaggatgagcctgccctgttcgtggccctgaccttcgagcggcgggaggtcctggactcctccaatatcaaaccaatgaacctgatcggcgtggcaagaggcgaaaacatccccgccgtgatcgccctgaccgaccccgagggctgcccactgagccggtttaaggatagcctgggaaacccaacccacatcctgagaatcggcgagagctataaggagaagcagcggaccatccaggccaagaaggaggtggagcagcggagagccggcggctacagccggaagtacgccagcaaagccaagaatctggcagacgatatggtgagaaacaccgctagagatctgctgtactacgccgtgacccaggatgccatgctgatcttcgccaacctgagccggggcttcggccggcagggcaagcggaccttcatggccgagagacagtacacacggatggaggactggctgaccgccaagctggcctacgagggcctgagcaagacctacctgtccaagacactggcccagtacacctccaagacatgcagcaactgtgggtttaccatcaccagcgccgactacgacagggtgctggagaagctgaagaagacagcaacaggctggatgaccacaattaacggcaaggagctgaaggtggagggccagattacctactacaacagatacaagagacagaacgtagtcaaggacctgtccgtcgagctggatagactgagcgaagaatctgtgaacaacgacatctcctcctggacaaagggcagaagcggagaagctctgagcctcctgaagaaaagattctcccatagacccgtgcaggagaagttcgtgtgcctgaactgcggcttcgagacacacgcagccgagcaagccgccctgaacatcgccagatcctggctgttcctgcggagccaggagtacaagaaataccagacaaacaagacaaccggcaacaccgataagagagccttcgtcgagacctggcagtccttttaccggaagaagcttaaggaggtgtggaaacctgccgtgcggtctggcggatctggcggaggctccaccagccccaagaaaaagagaaaagtctaagctgccttctgcggggcttgccttctggccatgcccttcttctctcccttgcacctgtacctcttggtctttgaataaagcctgagtaggaaggctagcaaaaaaaaaaaaaaaaaaaaaaaaaaaaaaaaaaaaaaaaaaaaaaaaaaaaaaaaaaaaaaaaaaaaaaaaaaaaaaaagcccagccggctccccaacctctaccgaggagggcacctctgagtccgccacccccgagagcggccctggcacctccaccgagcccagcgagggcagcgcacccggcagccctgccggcagccccacctccacagaggagggaaccagcaccgagcccagcgaaggcagcgccccaggcaccagcaccgagcctagtgagcaggagattaaacggatcaacaagatcagaagaagacttgtgaaagacagcaacaccaagaaggccggcaagacaggccccatgaaaaccctgctggttagagtgatgacacccgatctgagagagcggctggaaaacctgagaaagaagcctgaaaatatcccccagcccatcagcaatacatctagagccaacctgaataagctgctgaccgattacaccgaaatgaagaaggcgatcctgcatgtgtactgggaagagttccagaaggaccctgtgggcctgatgagccgggtggcccagcctgccagcaagaagatcgatcagaacaagctgaaacctgagatggacgagaagggcaacctgaccaccgccggctttgcctgctctcagtgtggccagcccctgttcgtgtacaagctggagcaggtgtctgagaagggcaaggcttacaccaactacttcggacggtgcaatgtggccgagcacgaaaagctgatcctgctggcccagctgaagcccgagaaggatagcgacgaagccgtgacatatagcctgggaaagtttgggcagagggccctggatttctacagcattcatgtgaccaaggagtccacccaccccgtgaagcccctggcccagatcgccggaaacagatacgcctccggacctgtgggaaaggccctgagcgacgcatgtatgggcacaatcgcctccttcctgtctaagtaccaggacatcatcatcgaacaccagaaggtggtgaagggcaaccagaagagactggagagcctgcgggagctggccggcaaggaaaacctggaataccctagcgtgaccctgccacctcagcctcacaccaaggagggcgttgatgcctacaacgaagtgatcgcccgggtgcgaatgtgggtgaacctgaacctgtggcagaagctgaagctaagcagagatgatgccaagcctctgctgagactgaagggattcccttcctttcctctggtcgagagacaggccaacgaagtggactggtgggacatggtgtgtaacgtgaagaagctgatcaacgagaaaaaggaggatggcaaggtgttttggcagaatctggctggctacaagagacaggaagccctgagaccatacctgagcagcgaggaagatcggaagaagggaaagaaattcgctcggtaccagctgggcgacctgctgctgcacctggaaaagaagcacggcgaggactggggaaaggtgtacgacgaggcctgggagcggattgacaagaaagtggaaggcctgagcaagcacatcaagctggaagaggaacggagaagcgaggacgcccagagcaaggccgccctgaccgactggctgcgggctaaggccagcttcgtgatcgagggcctgaaggaggccgacaaggacgagttctgcagatgcgagctgaagctgcagaagtggtacggggacctgcggggaaagcccttcgccatcgaagccgagaacagcatcctggacatcagcggcttcagcaagcagtacaactgtgccttcatctggcagaaggacggcgtgaagaagctgaacctgtacctgatcatcaactacttcaagggcggcaagctgcggttcaagaagatcaaacctgaagccttcgaagccaacagattctacaccgtgatcaacaaaaagagcggcgagatcgtgcccatggaggtgaacttcaacttcgacgaccccaacctgatcatcctgcctctggcctttggcaagagacagggcagagaattcatctggaacgacctgctgtccctggaaaccggcagcctgaagctggccaacggaagagtgatcgagaagacactgtacaacagaagaacccggcaggatgagcctgccctgttcgtggccctgaccttcgagcggcgggaggtcctggactcctccaatatcaaaccaatgaacctgatcggcgtggcaagaggcgaaaacatccccgccgtgatcgccctgaccgaccccgagggctgcccactgagccggtttaaggatagcctgggaaacccaacccacatcctgagaatcggcgagagctataaggagaagcagcggaccatccaggccaagaaggaggtggagcagcggagagccggcggctacagccggaagtacgccagcaaagccaagaatctggcagacgatatggtgagaaacaccgctagagatctgctgtactacgccgtgacccaggatgccatgctgatcttcgccaacctgagccggggcttcggccggcagggcaagcggaccttcatggccgagagacagtacacacggatggaggactggctgaccgccaagctggcctacgagggcctgagcaagacctacctgtccaagacactggcccagtacacctccaagacatgcagcaactgtgggtttaccatcaccagcgccgactacgacagggtgctggagaagctgaagaagacagcaacaggctggatgaccacaattaacggcaaggagctgaaggtggagggccagattacctactacaacagatacaagagacagaacgtagtcaaggacctgtccgtcgagctggatagactgagcgaagaatctgtgaacaacgacatctcctcctggacaaagggcagaagcggagaagctctgagcctcctgaagaaaagattctcccatagacccgtgcaggagaagttcgtgtgcctgaactgcggcttcgagacacacgcagccgagcaagccgccctgaacatcgccagatcctggctgttcctgcggagccaggagtacaagaaataccagacaaacaagacaaccggcaacaccgataagagagccttcgtcgagacctggcagtccttttaccggaagaagcttaaggaggtgtggaaacctgccgtgcggtctggcggatctggcggaggctccaccagccccaagaaaaagagaaaagtctaagctgccttctgcggggcttgccttctggccatgcccttcttctctcccttgcacctgtacctcttggtctttgaataaagcctgagtaggaaggctagcaaaaaaaaaaaaaaaaaaaaaaaaaaaaaaaaaaaaaaaaaaaaaaaaaaaaaaaaaaaaaaaaaaaaaaaaaaaaaaaa

SEQ ID NO: 9415 - RNA, 8787 nt, synthetic construct
  source 1..8787: mol_type = other RNA
aggaaataagagagaaaagaagagtaagaagaaatataagagccaccatggcccctaagaagaagcgtaaagtgagccggatgaaccacgaccaggagttcgacccccctaaggtgtaccctcccgtccccgccgagaagagaaagcccatccgggtcctgagcctgttcgatggcatcgccaccggtctgctggtgctgaaggacctgggcatccaggtggataggtacattgcctccgaggtgtgcgaggactccatcaccgtgggaatggtgcgtcatcagggcaagatcatgtacgtgggcgacgtgcggagcgtgacacagaagcatatccaggagtggggccctttcgacctggtgatcggcggcagcccttgcaatgacctgagcatcgtgaacccagcccggaagggcctgtacgagggaaccggcagactgttcttcgagttttacagactgctgcacgacgcccggcctaaggaaggcgacgaccggcccttcttttggctgttcgagaatgtggtggccatgggagtcagcgacaagcgggatattagccggttcctggagagcaaccccgtgatgatcgatgccaaggaagtgagcgccgcccaccgggccagatacttctggggcaatctgcctggcatgaacagacccctggccagcaccgtgaacgacaagctggagctgcaggagtgcctggagcacggccggatcgccaagttcagcaaggtgagaaccatcaccacccgaagcaacagcatcaaacaaggcaaggaccagcactttcctgtgttcatgaacgagaaggaggacatcctgtggtgtaccgagatggagagagtgttcgggttcccagtccactacacagatgtcagcaacatgtctagactggccagacagagactgctgggaagaagctggtccgtccctgtgatcagacacctgttcgcccctctgaaggagtacttcgcctgcgtgagcagcggcaacagcaacgccaacagccggggccccagcttctctagcggcctggtgccactgtccctgagagggagccacatgggccccatggagatctacaaaaccgtgagcgcctggaagcggcagcctgtgcgcgtgctgagcctgtttcggaatatcgataaagtcctgaaaagcctgggattcctggagagcggctctggctccggcggtggcaccctgaagtacgtggaggatgtgacaaacgtggtcagacgggatgtggagaagtggggccccttcgatctggtgtacggcagcacccaacccctgggcagctcttgtgaccggtgccctggctggtacatgtttcagttccaccggatcctgcagtacgccctgccgagacaggagtcccagcggccattcttttggattttcatggacaacttgctgctgaccgaggatgaccaggaaactaccactcggttcctgcagaccgaagccgtgaccctgcaggacgtgagaggccgggactaccagaacgccatgcgggtgtggtccaacatccctggactgaaaagcaagcacgcacctctgacccctaaagaagaggagtacctgcaggcccaggtgcggagcagaagcaagctggacgcccctaaggtggatctgctggtgaagaattgcctcctgcccctgagagagtacttcaagtatttcagccagaatagtctgcccctgggaggcagcggcggcggcatggtgttcgaggacgtggccgtgtacttcagcagggaggagtggggcctgctggacagcgcccagagggccctgtacaggcaggtgatgctggagaacttcgccctggtggccagcctgggcctgagcgccagcaggcccaggatcatcctgcagctggagaggggcgaggagccctgggtgctgagcggcctggacgtggccctggccagggacgcccagaggaggcccagccccgcccagggcggcccaagcagcggcgcccctcctcccagcggcggcaggcggcccaagcagcggcgcccctcctcccagcggcggcagcccagccggctccccaacctctaccgaggagggcacctctgagtccgccacccccgagagcggccctggcacctccaccgagcccagcgagggcagcgcacccggcagccctgccggcagccccacctccacagaggagggaaccagcaccgagcccagcgaaggcagcgccccaggcaccagcaccgagcctagtgagcaggagattaaacggatcaacaagatcagaagaagacttgtgaaagacagcaacaccaagaaggccggcaagacaggccccatgaaaaccctgctggttagagtgatgacacccgatctgagagagcggctggaaaacctgagaaagaagcctgaaaatatcccccagcccatcagcaatacatctagagccaacctgaataagctgctgaccgattacaccgaaatgaagaaggcgatcctgcatgtgtactgggaagagttccagaaggaccctgtgggcctgatgagccgggtggcccagcctgccagcaagaagatcgatcagaacaagctgaaacctgagatggacgagaagggcaacctgaccaccgccggctttgcctgctctcagtgtggccagcccctgttcgtgtacaagctggagcaggtgtctgagaagggcaaggcttacaccaactacttcggacggtgcaatgtggccgagcacgaaaagctgatcctgctggcccagctgaagcccgagaaggatagcgacgaagccgtgacatatagcctgggaaagtttgggcagagggccctggatttctacagcattcatgtgaccaaggagtccacccaccccgtgaagcccctggcccagatcgccggaaacagatacgcctccggacctgtgggaaaggccctgagcgacgcatgtatgggcacaatcgcctccttcctgtctaagtaccaggacatcatcatcgaacaccagaaggtggtgaagggcaaccagaagagactggagagcctgcgggagctggccggcaaggaaaacctggaataccctagcgtgaccctgccacctcagcctcacaccaaggagggcgttgatgcctacaacgaagtgatcgcccgggtgcgaatgtgggtgaacctgaacctgtggcagaagctgaagctaagcagagatgatgccaagcctctgctgagactgaagggattcccttcctttcctctggtcgagagacaggccaacgaagtggactggtgggacatggtgtgtaacgtgaagaagctgatcaacgagaaaaaggaggatggcaaggtgttttggcagaatctggctggctacaagagacaggaagccctgagaccatacctgagcagcgaggaagatcggaagaagggaaagaaattcgctcggtaccagctgggcgacctgctgctgcacctggaaaagaagcacggcgaggactggggaaaggtgtacgacgaggcctgggagcggattgacaagaaagtggaaggcctgagcaagcacatcaagctggaagaggaacggagaagcgaggacgcccagagcaaggccgccctgaccgactggctgcgggctaaggccagcttcgtgatcgagggcctgaaggaggccgacaaggacgagttctgcagatgcgagctgaagctgcagaagtggtacggggacctgcggggaaagcccttcgccatcgaagccgagaacagcatcctggacatcagcggcttcagcaagcagtacaactgtgccttcatctggcagaaggacggcgtgaagaagctgaacctgtacctgatcatcaactacttcaagggcggcaagctgcggttcaagaagatcaaacctgaagccttcgaagccaacagattctacaccgtgatcaacaaaaagagcggcgagatcgtgcccatggaggtgaacttcaacttcgacgaccccaacctgatcatcctgcctctggcctttggcaagagacagggcagagaattcatctggaacgacctgctgtccctggaaaccggcagcctgaagctggccaacggaagagtgatcgagaagacactgtacaacagaagaacccggcaggatgagcctgccctgttcgtggccctgaccttcgagcggcgggaggtcctggactcctccaatatcaaaccaatgaacctgatcggcgtggcaagaggcgaaaacatccccgccgtgatcgccctgaccgaccccgagggctgcccactgagccggtttaaggatagcctgggaaacccaacccacatcctgagaatcggcgagagctataaggagaagcagcggaccatccaggccaagaaggaggtggagcagcggagagccggcggctacagccggaagtacgccagcaaagccaagaatctggcagacgatatggtgagaaacaccgctagagatctgctgtactacgccgtgacccaggatgccatgctgatcttcgccaacctgagccggggcttcggccggcagggcaagcggaccttcatggccgagagacagtacacacggatggaggactggctgaccgccaagctggcctacgagggcctgagcaagacctacctgtccaagacactggcccagtacacctccaagacatgcagcaactgtgggtttaccatcaccagcgccgactacgacagggtgctggagaagctgaagaagacagcaacaggctggatgaccacaattaacggcaaggagctgaaggtggagggccagattacctactacaacagatacaagagacagaacgtagtcaaggacctgtccgtcgagctggatagactgagcgaagaatctgtgaacaacgacatctcctcctggacaaagggcagaagcggagaagctctgagcctcctgaagaaaagattctcccatagacccgtgcaggagaagttcgtgtgcctgaactgcggcttcgagacacacgcagccgagcaagccgccctgaacatcgccagatcctggctgttcctgcggagccaggagtacaagaaataccagacaaacaagacaaccggcaacaccgataagagagccttcgtcgagacctggcagtccttttaccggaagaagcttaaggaggtgtggaaacctgccgtgcggtctggcggatctggcggaggctccaccagccccaagaaaaagagaaaagtctaagctgccttctgcggggcttgccttctggccatgcccttcttctctcccttgcacctgtacctcttggtctttgaataaagcctgagtaggaaggctagcaaaaaaaaaaaaaaaaaaaaaaaaaaaaaaaaaaaaaaaaaaaaaaaaaaaaaaaaaaaaaaaaaaaaaaaaaaaaaaaagcccagccggctccccaacctctaccgaggagggcacctctgagtccgccacccccgagagcggccctggcacctccaccgagcccagcgagggcagcgcacccggcagccctgccggcagccccacctccacagaggagggaaccagcaccgagcccagcgaaggcagcgccccaggcaccagcaccgagcctagtgagcaggagattaaacggatcaacaagatcagaagaagacttgtgaaagacagcaacaccaagaaggccggcaagacaggccccatgaaaaccctgctggttagagtgatgacacccgatctgagagagcggctggaaaacctgagaaagaagcctgaaaatatcccccagcccatcagcaatacatctagagccaacctgaataagctgctgaccgattacaccgaaatgaagaaggcgatcctgcatgtgtactgggaagagttccagaaggaccctgtgggcctgatgagccgggtggcccagcctgccagcaagaagatcgatcagaacaagctgaaacctgagatggacgagaagggcaacctgaccaccgccggctttgcctgctctcagtgtggccagcccctgttcgtgtacaagctggagcaggtgtctgagaagggcaaggcttacaccaactacttcggacggtgcaatgtggccgagcacgaaaagctgatcctgctggcccagctgaagcccgagaaggatagcgacgaagccgtgacatatagcctgggaaagtttgggcagagggccctggatttctacagcattcatgtgaccaaggagtccacccaccccgtgaagcccctggcccagatcgccggaaacagatacgcctccggacctgtgggaaaggccctgagcgacgcatgtatgggcacaatcgcctccttcctgtctaagtaccaggacatcatcatcgaacaccagaaggtggtgaagggcaaccagaagagactggagagcctgcgggagctggccggcaaggaaaacctggaataccctagcgtgaccctgccacctcagcctcacaccaaggagggcgttgatgcctacaacgaagtgatcgcccgggtgcgaatgtgggtgaacctgaacctgtggcagaagctgaagctaagcagagatgatgccaagcctctgctgagactgaagggattcccttcctttcctctggtcgagagacaggccaacgaagtggactggtgggacatggtgtgtaacgtgaagaagctgatcaacgagaaaaaggaggatggcaaggtgttttggcagaatctggctggctacaagagacaggaagccctgagaccatacctgagcagcgaggaagatcggaagaagggaaagaaattcgctcggtaccagctgggcgacctgctgctgcacctggaaaagaagcacggcgaggactggggaaaggtgtacgacgaggcctgggagcggattgacaagaaagtggaaggcctgagcaagcacatcaagctggaagaggaacggagaagcgaggacgcccagagcaaggccgccctgaccgactggctgcgggctaaggccagcttcgtgatcgagggcctgaaggaggccgacaaggacgagttctgcagatgcgagctgaagctgcagaagtggtacggggacctgcggggaaagcccttcgccatcgaagccgagaacagcatcctggacatcagcggcttcagcaagcagtacaactgtgccttcatctggcagaaggacggcgtgaagaagctgaacctgtacctgatcatcaactacttcaagggcggcaagctgcggttcaagaagatcaaacctgaagccttcgaagccaacagattctacaccgtgatcaacaaaaagagcggcgagatcgtgcccatggaggtgaacttcaacttcgacgaccccaacctgatcatcctgcctctggcctttggcaagagacagggcagagaattcatctggaacgacctgctgtccctggaaaccggcagcctgaagctggccaacggaagagtgatcgagaagacactgtacaacagaagaacccggcaggatgagcctgccctgttcgtggccctgaccttcgagcggcgggaggtcctggactcctccaatatcaaaccaatgaacctgatcggcgtggcaagaggcgaaaacatccccgccgtgatcgccctgaccgaccccgagggctgcccactgagccggtttaaggatagcctgggaaacccaacccacatcctgagaatcggcgagagctataaggagaagcagcggaccatccaggccaagaaggaggtggagcagcggagagccggcggctacagccggaagtacgccagcaaagccaagaatctggcagacgatatggtgagaaacaccgctagagatctgctgtactacgccgtgacccaggatgccatgctgatcttcgccaacctgagccggggcttcggccggcagggcaagcggaccttcatggccgagagacagtacacacggatggaggactggctgaccgccaagctggcctacgagggcctgagcaagacctacctgtccaagacactggcccagtacacctccaagacatgcagcaactgtgggtttaccatcaccagcgccgactacgacagggtgctggagaagctgaagaagacagcaacaggctggatgaccacaattaacggcaaggagctgaaggtggagggccagattacctactacaacagatacaagagacagaacgtagtcaaggacctgtccgtcgagctggatagactgagcgaagaatctgtgaacaacgacatctcctcctggacaaagggcagaagcggagaagctctgagcctcctgaagaaaagattctcccatagacccgtgcaggagaagttcgtgtgcctgaactgcggcttcgagacacacgcagccgagcaagccgccctgaacatcgccagatcctggctgttcctgcggagccaggagtacaagaaataccagacaaacaagacaaccggcaacaccgataagagagccttcgtcgagacctggcagtccttttaccggaagaagcttaaggaggtgtggaaacctgccgtgcggtctggcggatctggcggaggctccaccagccccaagaaaaagagaaaagtctaagctgccttctgcggggcttgccttctggccatgcccttcttctctcccttgcacctgtacctcttggtctttgaataaagcctgagtaggaaggctagcaaaaaaaaaaaaaaaaaaaaaaaaaaaaaaaaaaaaaaaaaaaaaaaaaaaaaaaaaaaaaaaaaaaaaaaaaaaaaaaa

SEQ ID NO: 9416 - RNA, 8787 nt, synthetic construct
  source 1..8787: mol_type = other RNA
aggaaataagagagaaaagaagagtaagaagaaatataagagccaccatggcccctaagaagaagcgtaaagtgagccggatgaaccacgaccaggagttcgacccccctaaggtgtaccctcccgtccccgccgagaagagaaagcccatccgggtcctgagcctgttcgatggcatcgccaccggtctgctggtgctgaaggacctgggcatccaggtggataggtacattgcctccgaggtgtgcgaggactccatcaccgtgggaatggtgcgtcatcagggcaagatcatgtacgtgggcgacgtgcggagcgtgacacagaagcatatccaggagtggggccctttcgacctggtgatcggcggcagcccttgcaatgacctgagcatcgtgaacccagcccggaagggcctgtacgagggaaccggcagactgttcttcgagttttacagactgctgcacgacgcccggcctaaggaaggcgacgaccggcccttcttttggctgttcgagaatgtggtggccatgggagtcagcgacaagcgggatattagccggttcctggagagcaaccccgtgatgatcgatgccaaggaagtgagcgccgcccaccgggccagatacttctggggcaatctgcctggcatgaacagacccctggccagcaccgtgaacgacaagctggagctgcaggagtgcctggagcacggccggatcgccaagttcagcaaggtgagaaccatcaccacccgaagcaacagcatcaaacaaggcaaggaccagcactttcctgtgttcatgaacgagaaggaggacatcctgtggtgtaccgagatggagagagtgttcgggttcccagtccactacacagatgtcagcaacatgtctagactggccagacagagactgctgggaagaagctggtccgtccctgtgatcagacacctgttcgcccctctgaaggagtacttcgcctgcgtgagcagcggcaacagcaacgccaacagccggggccccagcttctctagcggcctggtgccactgtccctgagagggagccacatgggccccatggagatctacaaaaccgtgagcgcctggaagcggcagcctgtgcgcgtgctgagcctgtttcggaatatcgataaagtcctgaaaagcctgggattcctggagagcggctctggctccggcggtggcaccctgaagtacgtggaggatgtgacaaacgtggtcagacgggatgtggagaagtggggccccttcgatctggtgtacggcagcacccaacccctgggcagctcttgtgaccggtgccctggctggtacatgtttcagttccaccggatcctgcagtacgccctgccgagacaggagtcccagcggccattcttttggattttcatggacaacttgctgctgaccgaggatgaccaggaaactaccactcggttcctgcagaccgaagccgtgaccctgcaggacgtgagaggccgggactaccagaacgccatgcgggtgtggtccaacatccctggactgaaaagcaagcacgcacctctgacccctaaagaagaggagtacctgcaggcccaggtgcggagcagaagcaagctggacgcccctaaggtggatctgctggtgaagaattgcctcctgcccctgagagagtacttcaagtatttcagccagaatagtctgcccctgggaggcagcggcggcggcagcatcaccttcaaggacgtggtggtggacttcacccaggaggagtggtgcctgctggaccccagccagaaggagctgtacagggaggtgatgctggagaacgtgcagaacctgttcttcgtggaggccgagaccaacttcgaggtgaaggagatgagcaccaagatgaggctgttcgtggagggcagcaacagccccaggggcatgaagaggaacccctgcgacttcctgttcagggagatcggcggcccaagcagcggcgcccctcctcccagcggcggcaggcggcccaagcagcggcgcccctcctcccagcggcggcagcccagccggctccccaacctctaccgaggagggcacctctgagtccgccacccccgagagcggccctggcacctccaccgagcccagcgagggcagcgcacccggcagccctgccggcagccccacctccacagaggagggaaccagcaccgagcccagcgaaggcagcgccccaggcaccagcaccgagcctagtgagcaggagattaaacggatcaacaagatcagaagaagacttgtgaaagacagcaacaccaagaaggccggcaagacaggccccatgaaaaccctgctggttagagtgatgacacccgatctgagagagcggctggaaaacctgagaaagaagcctgaaaatatcccccagcccatcagcaatacatctagagccaacctgaataagctgctgaccgattacaccgaaatgaagaaggcgatcctgcatgtgtactgggaagagttccagaaggaccctgtgggcctgatgagccgggtggcccagcctgccagcaagaagatcgatcagaacaagctgaaacctgagatggacgagaagggcaacctgaccaccgccggctttgcctgctctcagtgtggccagcccctgttcgtgtacaagctggagcaggtgtctgagaagggcaaggcttacaccaactacttcggacggtgcaatgtggccgagcacgaaaagctgatcctgctggcccagctgaagcccgagaaggatagcgacgaagccgtgacatatagcctgggaaagtttgggcagagggccctggatttctacagcattcatgtgaccaaggagtccacccaccccgtgaagcccctggcccagatcgccggaaacagatacgcctccggacctgtgggaaaggccctgagcgacgcatgtatgggcacaatcgcctccttcctgtctaagtaccaggacatcatcatcgaacaccagaaggtggtgaagggcaaccagaagagactggagagcctgcgggagctggccggcaaggaaaacctggaataccctagcgtgaccctgccacctcagcctcacaccaaggagggcgttgatgcctacaacgaagtgatcgcccgggtgcgaatgtgggtgaacctgaacctgtggcagaagctgaagctaagcagagatgatgccaagcctctgctgagactgaagggattcccttcctttcctctggtcgagagacaggccaacgaagtggactggtgggacatggtgtgtaacgtgaagaagctgatcaacgagaaaaaggaggatggcaaggtgttttggcagaatctggctggctacaagagacaggaagccctgagaccatacctgagcagcgaggaagatcggaagaagggaaagaaattcgctcggtaccagctgggcgacctgctgctgcacctggaaaagaagcacggcgaggactggggaaaggtgtacgacgaggcctgggagcggattgacaagaaagtggaaggcctgagcaagcacatcaagctggaagaggaacggagaagcgaggacgcccagagcaaggccgccctgaccgactggctgcgggctaaggccagcttcgtgatcgagggcctgaaggaggccgacaaggacgagttctgcagatgcgagctgaagctgcagaagtggtacggggacctgcggggaaagcccttcgccatcgaagccgagaacagcatcctggacatcagcggcttcagcaagcagtacaactgtgccttcatctggcagaaggacggcgtgaagaagctgaacctgtacctgatcatcaactacttcaagggcggcaagctgcggttcaagaagatcaaacctgaagccttcgaagccaacagattctacaccgtgatcaacaaaaagagcggcgagatcgtgcccatggaggtgaacttcaacttcgacgaccccaacctgatcatcctgcctctggcctttggcaagagacagggcagagaattcatctggaacgacctgctgtccctggaaaccggcagcctgaagctggccaacggaagagtgatcgagaagacactgtacaacagaagaacccggcaggatgagcctgccctgttcgtggccctgaccttcgagcggcgggaggtcctggactcctccaatatcaaaccaatgaacctgatcggcgtggcaagaggcgaaaacatccccgccgtgatcgccctgaccgaccccgagggctgcccactgagccggtttaaggatagcctgggaaacccaacccacatcctgagaatcggcgagagctataaggagaagcagcggaccatccaggccaagaaggaggtggagcagcggagagccggcggctacagccggaagtacgccagcaaagccaagaatctggcagacgatatggtgagaaacaccgctagagatctgctgtactacgccgtgacccaggatgccatgctgatcttcgccaacctgagccggggcttcggccggcagggcaagcggaccttcatggccgagagacagtacacacggatggaggactggctgaccgccaagctggcctacgagggcctgagcaagacctacctgtccaagacactggcccagtacacctccaagacatgcagcaactgtgggtttaccatcaccagcgccgactacgacagggtgctggagaagctgaagaagacagcaacaggctggatgaccacaattaacggcaaggagctgaaggtggagggccagattacctactacaacagatacaagagacagaacgtagtcaaggacctgtccgtcgagctggatagactgagcgaagaatctgtgaacaacgacatctcctcctggacaaagggcagaagcggagaagctctgagcctcctgaagaaaagattctcccatagacccgtgcaggagaagttcgtgtgcctgaactgcggcttcgagacacacgcagccgagcaagccgccctgaacatcgccagatcctggctgttcctgcggagccaggagtacaagaaataccagacaaacaagacaaccggcaacaccgataagagagccttcgtcgagacctggcagtccttttaccggaagaagcttaaggaggtgtggaaacctgccgtgcggtctggcggatctggcggaggctccaccagccccaagaaaaagagaaaagtctaagctgccttctgcggggcttgccttctggccatgcccttcttctctcccttgcacctgtacctcttggtctttgaataaagcctgagtaggaaggctagcaaaaaaaaaaaaaaaaaaaaaaaaaaaaaaaaaaaaaaaaaaaaaaaaaaaaaaaaaaaaaaaaaaaaaaaaaaaaaaaagcccagccggctccccaacctctaccgaggagggcacctctgagtccgccacccccgagagcggccctggcacctccaccgagcccagcgagggcagcgcacccggcagccctgccggcagccccacctccacagaggagggaaccagcaccgagcccagcgaaggcagcgccccaggcaccagcaccgagcctagtgagcaggagattaaacggatcaacaagatcagaagaagacttgtgaaagacagcaacaccaagaaggccggcaagacaggccccatgaaaaccctgctggttagagtgatgacacccgatctgagagagcggctggaaaacctgagaaagaagcctgaaaatatcccccagcccatcagcaatacatctagagccaacctgaataagctgctgaccgattacaccgaaatgaagaaggcgatcctgcatgtgtactgggaagagttccagaaggaccctgtgggcctgatgagccgggtggcccagcctgccagcaagaagatcgatcagaacaagctgaaacctgagatggacgagaagggcaacctgaccaccgccggctttgcctgctctcagtgtggccagcccctgttcgtgtacaagctggagcaggtgtctgagaagggcaaggcttacaccaactacttcggacggtgcaatgtggccgagcacgaaaagctgatcctgctggcccagctgaagcccgagaaggatagcgacgaagccgtgacatatagcctgggaaagtttgggcagagggccctggatttctacagcattcatgtgaccaaggagtccacccaccccgtgaagcccctggcccagatcgccggaaacagatacgcctccggacctgtgggaaaggccctgagcgacgcatgtatgggcacaatcgcctccttcctgtctaagtaccaggacatcatcatcgaacaccagaaggtggtgaagggcaaccagaagagactggagagcctgcgggagctggccggcaaggaaaacctggaataccctagcgtgaccctgccacctcagcctcacaccaaggagggcgttgatgcctacaacgaagtgatcgcccgggtgcgaatgtgggtgaacctgaacctgtggcagaagctgaagctaagcagagatgatgccaagcctctgctgagactgaagggattcccttcctttcctctggtcgagagacaggccaacgaagtggactggtgggacatggtgtgtaacgtgaagaagctgatcaacgagaaaaaggaggatggcaaggtgttttggcagaatctggctggctacaagagacaggaagccctgagaccatacctgagcagcgaggaagatcggaagaagggaaagaaattcgctcggtaccagctgggcgacctgctgctgcacctggaaaagaagcacggcgaggactggggaaaggtgtacgacgaggcctgggagcggattgacaagaaagtggaaggcctgagcaagcacatcaagctggaagaggaacggagaagcgaggacgcccagagcaaggccgccctgaccgactggctgcgggctaaggccagcttcgtgatcgagggcctgaaggaggccgacaaggacgagttctgcagatgcgagctgaagctgcagaagtggtacggggacctgcggggaaagcccttcgccatcgaagccgagaacagcatcctggacatcagcggcttcagcaagcagtacaactgtgccttcatctggcagaaggacggcgtgaagaagctgaacctgtacctgatcatcaactacttcaagggcggcaagctgcggttcaagaagatcaaacctgaagccttcgaagccaacagattctacaccgtgatcaacaaaaagagcggcgagatcgtgcccatggaggtgaacttcaacttcgacgaccccaacctgatcatcctgcctctggcctttggcaagagacagggcagagaattcatctggaacgacctgctgtccctggaaaccggcagcctgaagctggccaacggaagagtgatcgagaagacactgtacaacagaagaacccggcaggatgagcctgccctgttcgtggccctgaccttcgagcggcgggaggtcctggactcctccaatatcaaaccaatgaacctgatcggcgtggcaagaggcgaaaacatccccgccgtgatcgccctgaccgaccccgagggctgcccactgagccggtttaaggatagcctgggaaacccaacccacatcctgagaatcggcgagagctataaggagaagcagcggaccatccaggccaagaaggaggtggagcagcggagagccggcggctacagccggaagtacgccagcaaagccaagaatctggcagacgatatggtgagaaacaccgctagagatctgctgtactacgccgtgacccaggatgccatgctgatcttcgccaacctgagccggggcttcggccggcagggcaagcggaccttcatggccgagagacagtacacacggatggaggactggctgaccgccaagctggcctacgagggcctgagcaagacctacctgtccaagacactggcccagtacacctccaagacatgcagcaactgtgggtttaccatcaccagcgccgactacgacagggtgctggagaagctgaagaagacagcaacaggctggatgaccacaattaacggcaaggagctgaaggtggagggccagattacctactacaacagatacaagagacagaacgtagtcaaggacctgtccgtcgagctggatagactgagcgaagaatctgtgaacaacgacatctcctcctggacaaagggcagaagcggagaagctctgagcctcctgaagaaaagattctcccatagacccgtgcaggagaagttcgtgtgcctgaactgcggcttcgagacacacgcagccgagcaagccgccctgaacatcgccagatcctggctgttcctgcggagccaggagtacaagaaataccagacaaacaagacaaccggcaacaccgataagagagccttcgtcgagacctggcagtccttttaccggaagaagcttaaggaggtgtggaaacctgccgtgcggtctggcggatctggcggaggctccaccagccccaagaaaaagagaaaagtctaagctgccttctgcggggcttgccttctggccatgcccttcttctctcccttgcacctgtacctcttggtctttgaataaagcctgagtaggaaggctagcaaaaaaaaaaaaaaaaaaaaaaaaaaaaaaaaaaaaaaaaaaaaaaaaaaaaaaaaaaaaaaaaaaaaaaaaaaaaaaaa

SEQ ID NO: 9417 - RNA, 8787 nt, synthetic construct
  source 1..8787: mol_type = other RNA
aggaaataagagagaaaagaagagtaagaagaaatataagagccaccatggcccctaagaagaagcgtaaagtgagccggatgaaccacgaccaggagttcgacccccctaaggtgtaccctcccgtccccgccgagaagagaaagcccatccgggtcctgagcctgttcgatggcatcgccaccggtctgctggtgctgaaggacctgggcatccaggtggataggtacattgcctccgaggtgtgcgaggactccatcaccgtgggaatggtgcgtcatcagggcaagatcatgtacgtgggcgacgtgcggagcgtgacacagaagcatatccaggagtggggccctttcgacctggtgatcggcggcagcccttgcaatgacctgagcatcgtgaacccagcccggaagggcctgtacgagggaaccggcagactgttcttcgagttttacagactgctgcacgacgcccggcctaaggaaggcgacgaccggcccttcttttggctgttcgagaatgtggtggccatgggagtcagcgacaagcgggatattagccggttcctggagagcaaccccgtgatgatcgatgccaaggaagtgagcgccgcccaccgggccagatacttctggggcaatctgcctggcatgaacagacccctggccagcaccgtgaacgacaagctggagctgcaggagtgcctggagcacggccggatcgccaagttcagcaaggtgagaaccatcaccacccgaagcaacagcatcaaacaaggcaaggaccagcactttcctgtgttcatgaacgagaaggaggacatcctgtggtgtaccgagatggagagagtgttcgggttcccagtccactacacagatgtcagcaacatgtctagactggccagacagagactgctgggaagaagctggtccgtccctgtgatcagacacctgttcgcccctctgaaggagtacttcgcctgcgtgagcagcggcaacagcaacgccaacagccggggccccagcttctctagcggcctggtgccactgtccctgagagggagccacatgggccccatggagatctacaaaaccgtgagcgcctggaagcggcagcctgtgcgcgtgctgagcctgtttcggaatatcgataaagtcctgaaaagcctgggattcctggagagcggctctggctccggcggtggcaccctgaagtacgtggaggatgtgacaaacgtggtcagacgggatgtggagaagtggggccccttcgatctggtgtacggcagcacccaacccctgggcagctcttgtgaccggtgccctggctggtacatgtttcagttccaccggatcctgcagtacgccctgccgagacaggagtcccagcggccattcttttggattttcatggacaacttgctgctgaccgaggatgaccaggaaactaccactcggttcctgcagaccgaagccgtgaccctgcaggacgtgagaggccgggactaccagaacgccatgcgggtgtggtccaacatccctggactgaaaagcaagcacgcacctctgacccctaaagaagaggagtacctgcaggcccaggtgcggagcagaagcaagctggacgcccctaaggtggatctgctggtgaagaattgcctcctgcccctgagagagtacttcaagtatttcagccagaatagtctgcccctgggaggcagcggcggcggccagagcctggtgaccttcggcgacgtggccgtggacttcagcagggaggagtgggagtggctgaacagcgcccagaggaccctgcacagggacgtgatgctggagaactacaggaacctggtgagcctgggcctgtgcgtgagcaagcccgacatgatcagcagcctggagcagaggaaggagccctggatgctgaagaggaagctgaccaggggcaggtgccccgacctgaagaccatgcagggcggcccaagcagcggcgcccctcctcccagcggcggcaggcggcccaagcagcggcgcccctcctcccagcggcggcagcccagccggctccccaacctctaccgaggagggcacctctgagtccgccacccccgagagcggccctggcacctccaccgagcccagcgagggcagcgcacccggcagccctgccggcagccccacctccacagaggagggaaccagcaccgagcccagcgaaggcagcgccccaggcaccagcaccgagcctagtgagcaggagattaaacggatcaacaagatcagaagaagacttgtgaaagacagcaacaccaagaaggccggcaagacaggccccatgaaaaccctgctggttagagtgatgacacccgatctgagagagcggctggaaaacctgagaaagaagcctgaaaatatcccccagcccatcagcaatacatctagagccaacctgaataagctgctgaccgattacaccgaaatgaagaaggcgatcctgcatgtgtactgggaagagttccagaaggaccctgtgggcctgatgagccgggtggcccagcctgccagcaagaagatcgatcagaacaagctgaaacctgagatggacgagaagggcaacctgaccaccgccggctttgcctgctctcagtgtggccagcccctgttcgtgtacaagctggagcaggtgtctgagaagggcaaggcttacaccaactacttcggacggtgcaatgtggccgagcacgaaaagctgatcctgctggcccagctgaagcccgagaaggatagcgacgaagccgtgacatatagcctgggaaagtttgggcagagggccctggatttctacagcattcatgtgaccaaggagtccacccaccccgtgaagcccctggcccagatcgccggaaacagatacgcctccggacctgtgggaaaggccctgagcgacgcatgtatgggcacaatcgcctccttcctgtctaagtaccaggacatcatcatcgaacaccagaaggtggtgaagggcaaccagaagagactggagagcctgcgggagctggccggcaaggaaaacctggaataccctagcgtgaccctgccacctcagcctcacaccaaggagggcgttgatgcctacaacgaagtgatcgcccgggtgcgaatgtgggtgaacctgaacctgtggcagaagctgaagctaagcagagatgatgccaagcctctgctgagactgaagggattcccttcctttcctctggtcgagagacaggccaacgaagtggactggtgggacatggtgtgtaacgtgaagaagctgatcaacgagaaaaaggaggatggcaaggtgttttggcagaatctggctggctacaagagacaggaagccctgagaccatacctgagcagcgaggaagatcggaagaagggaaagaaattcgctcggtaccagctgggcgacctgctgctgcacctggaaaagaagcacggcgaggactggggaaaggtgtacgacgaggcctgggagcggattgacaagaaagtggaaggcctgagcaagcacatcaagctggaagaggaacggagaagcgaggacgcccagagcaaggccgccctgaccgactggctgcgggctaaggccagcttcgtgatcgagggcctgaaggaggccgacaaggacgagttctgcagatgcgagctgaagctgcagaagtggtacggggacctgcggggaaagcccttcgccatcgaagccgagaacagcatcctggacatcagcggcttcagcaagcagtacaactgtgccttcatctggcagaaggacggcgtgaagaagctgaacctgtacctgatcatcaactacttcaagggcggcaagctgcggttcaagaagatcaaacctgaagccttcgaagccaacagattctacaccgtgatcaacaaaaagagcggcgagatcgtgcccatggaggtgaacttcaacttcgacgaccccaacctgatcatcctgcctctggcctttggcaagagacagggcagagaattcatctggaacgacctgctgtccctggaaaccggcagcctgaagctggccaacggaagagtgatcgagaagacactgtacaacagaagaacccggcaggatgagcctgccctgttcgtggccctgaccttcgagcggcgggaggtcctggactcctccaatatcaaaccaatgaacctgatcggcgtggcaagaggcgaaaacatccccgccgtgatcgccctgaccgaccccgagggctgcccactgagccggtttaaggatagcctgggaaacccaacccacatcctgagaatcggcgagagctataaggagaagcagcggaccatccaggccaagaaggaggtggagcagcggagagccggcggctacagccggaagtacgccagcaaagccaagaatctggcagacgatatggtgagaaacaccgctagagatctgctgtactacgccgtgacccaggatgccatgctgatcttcgccaacctgagccggggcttcggccggcagggcaagcggaccttcatggccgagagacagtacacacggatggaggactggctgaccgccaagctggcctacgagggcctgagcaagacctacctgtccaagacactggcccagtacacctccaagacatgcagcaactgtgggtttaccatcaccagcgccgactacgacagggtgctggagaagctgaagaagacagcaacaggctggatgaccacaattaacggcaaggagctgaaggtggagggccagattacctactacaacagatacaagagacagaacgtagtcaaggacctgtccgtcgagctggatagactgagcgaagaatctgtgaacaacgacatctcctcctggacaaagggcagaagcggagaagctctgagcctcctgaagaaaagattctcccatagacccgtgcaggagaagttcgtgtgcctgaactgcggcttcgagacacacgcagccgagcaagccgccctgaacatcgccagatcctggctgttcctgcggagccaggagtacaagaaataccagacaaacaagacaaccggcaacaccgataagagagccttcgtcgagacctggcagtccttttaccggaagaagcttaaggaggtgtggaaacctgccgtgcggtctggcggatctggcggaggctccaccagccccaagaaaaagagaaaagtctaagctgccttctgcggggcttgccttctggccatgcccttcttctctcccttgcacctgtacctcttggtctttgaataaagcctgagtaggaaggctagcaaaaaaaaaaaaaaaaaaaaaaaaaaaaaaaaaaaaaaaaaaaaaaaaaaaaaaaaaaaaaaaaaaaaaaaaaaaaaaaagcccagccggctccccaacctctaccgaggagggcacctctgagtccgccacccccgagagcggccctggcacctccaccgagcccagcgagggcagcgcacccggcagccctgccggcagccccacctccacagaggagggaaccagcaccgagcccagcgaaggcagcgccccaggcaccagcaccgagcctagtgagcaggagattaaacggatcaacaagatcagaagaagacttgtgaaagacagcaacaccaagaaggccggcaagacaggccccatgaaaaccctgctggttagagtgatgacacccgatctgagagagcggctggaaaacctgagaaagaagcctgaaaatatcccccagcccatcagcaatacatctagagccaacctgaataagctgctgaccgattacaccgaaatgaagaaggcgatcctgcatgtgtactgggaagagttccagaaggaccctgtgggcctgatgagccgggtggcccagcctgccagcaagaagatcgatcagaacaagctgaaacctgagatggacgagaagggcaacctgaccaccgccggctttgcctgctctcagtgtggccagcccctgttcgtgtacaagctggagcaggtgtctgagaagggcaaggcttacaccaactacttcggacggtgcaatgtggccgagcacgaaaagctgatcctgctggcccagctgaagcccgagaaggatagcgacgaagccgtgacatatagcctgggaaagtttgggcagagggccctggatttctacagcattcatgtgaccaaggagtccacccaccccgtgaagcccctggcccagatcgccggaaacagatacgcctccggacctgtgggaaaggccctgagcgacgcatgtatgggcacaatcgcctccttcctgtctaagtaccaggacatcatcatcgaacaccagaaggtggtgaagggcaaccagaagagactggagagcctgcgggagctggccggcaaggaaaacctggaataccctagcgtgaccctgccacctcagcctcacaccaaggagggcgttgatgcctacaacgaagtgatcgcccgggtgcgaatgtgggtgaacctgaacctgtggcagaagctgaagctaagcagagatgatgccaagcctctgctgagactgaagggattcccttcctttcctctggtcgagagacaggccaacgaagtggactggtgggacatggtgtgtaacgtgaagaagctgatcaacgagaaaaaggaggatggcaaggtgttttggcagaatctggctggctacaagagacaggaagccctgagaccatacctgagcagcgaggaagatcggaagaagggaaagaaattcgctcggtaccagctgggcgacctgctgctgcacctggaaaagaagcacggcgaggactggggaaaggtgtacgacgaggcctgggagcggattgacaagaaagtggaaggcctgagcaagcacatcaagctggaagaggaacggagaagcgaggacgcccagagcaaggccgccctgaccgactggctgcgggctaaggccagcttcgtgatcgagggcctgaaggaggccgacaaggacgagttctgcagatgcgagctgaagctgcagaagtggtacggggacctgcggggaaagcccttcgccatcgaagccgagaacagcatcctggacatcagcggcttcagcaagcagtacaactgtgccttcatctggcagaaggacggcgtgaagaagctgaacctgtacctgatcatcaactacttcaagggcggcaagctgcggttcaagaagatcaaacctgaagccttcgaagccaacagattctacaccgtgatcaacaaaaagagcggcgagatcgtgcccatggaggtgaacttcaacttcgacgaccccaacctgatcatcctgcctctggcctttggcaagagacagggcagagaattcatctggaacgacctgctgtccctggaaaccggcagcctgaagctggccaacggaagagtgatcgagaagacactgtacaacagaagaacccggcaggatgagcctgccctgttcgtggccctgaccttcgagcggcgggaggtcctggactcctccaatatcaaaccaatgaacctgatcggcgtggcaagaggcgaaaacatccccgccgtgatcgccctgaccgaccccgagggctgcccactgagccggtttaaggatagcctgggaaacccaacccacatcctgagaatcggcgagagctataaggagaagcagcggaccatccaggccaagaaggaggtggagcagcggagagccggcggctacagccggaagtacgccagcaaagccaagaatctggcagacgatatggtgagaaacaccgctagagatctgctgtactacgccgtgacccaggatgccatgctgatcttcgccaacctgagccggggcttcggccggcagggcaagcggaccttcatggccgagagacagtacacacggatggaggactggctgaccgccaagctggcctacgagggcctgagcaagacctacctgtccaagacactggcccagtacacctccaagacatgcagcaactgtgggtttaccatcaccagcgccgactacgacagggtgctggagaagctgaagaagacagcaacaggctggatgaccacaattaacggcaaggagctgaaggtggagggccagattacctactacaacagatacaagagacagaacgtagtcaaggacctgtccgtcgagctggatagactgagcgaagaatctgtgaacaacgacatctcctcctggacaaagggcagaagcggagaagctctgagcctcctgaagaaaagattctcccatagacccgtgcaggagaagttcgtgtgcctgaactgcggcttcgagacacacgcagccgagcaagccgccctgaacatcgccagatcctggctgttcctgcggagccaggagtacaagaaataccagacaaacaagacaaccggcaacaccgataagagagccttcgtcgagacctggcagtccttttaccggaagaagcttaaggaggtgtggaaacctgccgtgcggtctggcggatctggcggaggctccaccagccccaagaaaaagagaaaagtctaagctgccttctgcggggcttgccttctggccatgcccttcttctctcccttgcacctgtacctcttggtctttgaataaagcctgagtaggaaggctagcaaaaaaaaaaaaaaaaaaaaaaaaaaaaaaaaaaaaaaaaaaaaaaaaaaaaaaaaaaaaaaaaaaaaaaaaaaaaaaaa

SEQ ID NO: 9418 - RNA, 8787 nt, synthetic construct
  source 1..8787: mol_type = other RNA
aggaaataagagagaaaagaagagtaagaagaaatataagagccaccatggcccctaagaagaagcgtaaagtgagccggatgaaccacgaccaggagttcgacccccctaaggtgtaccctcccgtccccgccgagaagagaaagcccatccgggtcctgagcctgttcgatggcatcgccaccggtctgctggtgctgaaggacctgggcatccaggtggataggtacattgcctccgaggtgtgcgaggactccatcaccgtgggaatggtgcgtcatcagggcaagatcatgtacgtgggcgacgtgcggagcgtgacacagaagcatatccaggagtggggccctttcgacctggtgatcggcggcagcccttgcaatgacctgagcatcgtgaacccagcccggaagggcctgtacgagggaaccggcagactgttcttcgagttttacagactgctgcacgacgcccggcctaaggaaggcgacgaccggcccttcttttggctgttcgagaatgtggtggccatgggagtcagcgacaagcgggatattagccggttcctggagagcaaccccgtgatgatcgatgccaaggaagtgagcgccgcccaccgggccagatacttctggggcaatctgcctggcatgaacagacccctggccagcaccgtgaacgacaagctggagctgcaggagtgcctggagcacggccggatcgccaagttcagcaaggtgagaaccatcaccacccgaagcaacagcatcaaacaaggcaaggaccagcactttcctgtgttcatgaacgagaaggaggacatcctgtggtgtaccgagatggagagagtgttcgggttcccagtccactacacagatgtcagcaacatgtctagactggccagacagagactgctgggaagaagctggtccgtccctgtgatcagacacctgttcgcccctctgaaggagtacttcgcctgcgtgagcagcggcaacagcaacgccaacagccggggccccagcttctctagcggcctggtgccactgtccctgagagggagccacatgggccccatggagatctacaaaaccgtgagcgcctggaagcggcagcctgtgcgcgtgctgagcctgtttcggaatatcgataaagtcctgaaaagcctgggattcctggagagcggctctggctccggcggtggcaccctgaagtacgtggaggatgtgacaaacgtggtcagacgggatgtggagaagtggggccccttcgatctggtgtacggcagcacccaacccctgggcagctcttgtgaccggtgccctggctggtacatgtttcagttccaccggatcctgcagtacgccctgccgagacaggagtcccagcggccattcttttggattttcatggacaacttgctgctgaccgaggatgaccaggaaactaccactcggttcctgcagaccgaagccgtgaccctgcaggacgtgagaggccgggactaccagaacgccatgcgggtgtggtccaacatccctggactgaaaagcaagcacgcacctctgacccctaaagaagaggagtacctgcaggcccaggtgcggagcagaagcaagctggacgcccctaaggtggatctgctggtgaagaattgcctcctgcccctgagagagtacttcaagtatttcagccagaatagtctgcccctgggaggcagcggcggcggcccccagaagagcgtgaccttcgaggacgtggccgtgtacttcacccccaccgagtgggacggcctgagccccgcccagagggccctgtacagggacgtgatgctggagaactacggcaacgtggccagcctgggcttccccctgatcaagcccgccgtgatcctgcagctggagggcggcggcgagctgggcggccccagccccctggccgccgagaccggcaccgacccccccggcctgtggggcggcccaagcagcggcgcccctcctcccagcggcggcaggcggcccaagcagcggcgcccctcctcccagcggcggcagcccagccggctccccaacctctaccgaggagggcacctctgagtccgccacccccgagagcggccctggcacctccaccgagcccagcgagggcagcgcacccggcagccctgccggcagccccacctccacagaggagggaaccagcaccgagcccagcgaaggcagcgccccaggcaccagcaccgagcctagtgagcaggagattaaacggatcaacaagatcagaagaagacttgtgaaagacagcaacaccaagaaggccggcaagacaggccccatgaaaaccctgctggttagagtgatgacacccgatctgagagagcggctggaaaacctgagaaagaagcctgaaaatatcccccagcccatcagcaatacatctagagccaacctgaataagctgctgaccgattacaccgaaatgaagaaggcgatcctgcatgtgtactgggaagagttccagaaggaccctgtgggcctgatgagccgggtggcccagcctgccagcaagaagatcgatcagaacaagctgaaacctgagatggacgagaagggcaacctgaccaccgccggctttgcctgctctcagtgtggccagcccctgttcgtgtacaagctggagcaggtgtctgagaagggcaaggcttacaccaactacttcggacggtgcaatgtggccgagcacgaaaagctgatcctgctggcccagctgaagcccgagaaggatagcgacgaagccgtgacatatagcctgggaaagtttgggcagagggccctggatttctacagcattcatgtgaccaaggagtccacccaccccgtgaagcccctggcccagatcgccggaaacagatacgcctccggacctgtgggaaaggccctgagcgacgcatgtatgggcacaatcgcctccttcctgtctaagtaccaggacatcatcatcgaacaccagaaggtggtgaagggcaaccagaagagactggagagcctgcgggagctggccggcaaggaaaacctggaataccctagcgtgaccctgccacctcagcctcacaccaaggagggcgttgatgcctacaacgaagtgatcgcccgggtgcgaatgtgggtgaacctgaacctgtggcagaagctgaagctaagcagagatgatgccaagcctctgctgagactgaagggattcccttcctttcctctggtcgagagacaggccaacgaagtggactggtgggacatggtgtgtaacgtgaagaagctgatcaacgagaaaaaggaggatggcaaggtgttttggcagaatctggctggctacaagagacaggaagccctgagaccatacctgagcagcgaggaagatcggaagaagggaaagaaattcgctcggtaccagctgggcgacctgctgctgcacctggaaaagaagcacggcgaggactggggaaaggtgtacgacgaggcctgggagcggattgacaagaaagtggaaggcctgagcaagcacatcaagctggaagaggaacggagaagcgaggacgcccagagcaaggccgccctgaccgactggctgcgggctaaggccagcttcgtgatcgagggcctgaaggaggccgacaaggacgagttctgcagatgcgagctgaagctgcagaagtggtacggggacctgcggggaaagcccttcgccatcgaagccgagaacagcatcctggacatcagcggcttcagcaagcagtacaactgtgccttcatctggcagaaggacggcgtgaagaagctgaacctgtacctgatcatcaactacttcaagggcggcaagctgcggttcaagaagatcaaacctgaagccttcgaagccaacagattctacaccgtgatcaacaaaaagagcggcgagatcgtgcccatggaggtgaacttcaacttcgacgaccccaacctgatcatcctgcctctggcctttggcaagagacagggcagagaattcatctggaacgacctgctgtccctggaaaccggcagcctgaagctggccaacggaagagtgatcgagaagacactgtacaacagaagaacccggcaggatgagcctgccctgttcgtggccctgaccttcgagcggcgggaggtcctggactcctccaatatcaaaccaatgaacctgatcggcgtggcaagaggcgaaaacatccccgccgtgatcgccctgaccgaccccgagggctgcccactgagccggtttaaggatagcctgggaaacccaacccacatcctgagaatcggcgagagctataaggagaagcagcggaccatccaggccaagaaggaggtggagcagcggagagccggcggctacagccggaagtacgccagcaaagccaagaatctggcagacgatatggtgagaaacaccgctagagatctgctgtactacgccgtgacccaggatgccatgctgatcttcgccaacctgagccggggcttcggccggcagggcaagcggaccttcatggccgagagacagtacacacggatggaggactggctgaccgccaagctggcctacgagggcctgagcaagacctacctgtccaagacactggcccagtacacctccaagacatgcagcaactgtgggtttaccatcaccagcgccgactacgacagggtgctggagaagctgaagaagacagcaacaggctggatgaccacaattaacggcaaggagctgaaggtggagggccagattacctactacaacagatacaagagacagaacgtagtcaaggacctgtccgtcgagctggatagactgagcgaagaatctgtgaacaacgacatctcctcctggacaaagggcagaagcggagaagctctgagcctcctgaagaaaagattctcccatagacccgtgcaggagaagttcgtgtgcctgaactgcggcttcgagacacacgcagccgagcaagccgccctgaacatcgccagatcctggctgttcctgcggagccaggagtacaagaaataccagacaaacaagacaaccggcaacaccgataagagagccttcgtcgagacctggcagtccttttaccggaagaagcttaaggaggtgtggaaacctgccgtgcggtctggcggatctggcggaggctccaccagccccaagaaaaagagaaaagtctaagctgccttctgcggggcttgccttctggccatgcccttcttctctcccttgcacctgtacctcttggtctttgaataaagcctgagtaggaaggctagcaaaaaaaaaaaaaaaaaaaaaaaaaaaaaaaaaaaaaaaaaaaaaaaaaaaaaaaaaaaaaaaaaaaaaaaaaaaaaaaagcccagccggctccccaacctctaccgaggagggcacctctgagtccgccacccccgagagcggccctggcacctccaccgagcccagcgagggcagcgcacccggcagccctgccggcagccccacctccacagaggagggaaccagcaccgagcccagcgaaggcagcgccccaggcaccagcaccgagcctagtgagcaggagattaaacggatcaacaagatcagaagaagacttgtgaaagacagcaacaccaagaaggccggcaagacaggccccatgaaaaccctgctggttagagtgatgacacccgatctgagagagcggctggaaaacctgagaaagaagcctgaaaatatcccccagcccatcagcaatacatctagagccaacctgaataagctgctgaccgattacaccgaaatgaagaaggcgatcctgcatgtgtactgggaagagttccagaaggaccctgtgggcctgatgagccgggtggcccagcctgccagcaagaagatcgatcagaacaagctgaaacctgagatggacgagaagggcaacctgaccaccgccggctttgcctgctctcagtgtggccagcccctgttcgtgtacaagctggagcaggtgtctgagaagggcaaggcttacaccaactacttcggacggtgcaatgtggccgagcacgaaaagctgatcctgctggcccagctgaagcccgagaaggatagcgacgaagccgtgacatatagcctgggaaagtttgggcagagggccctggatttctacagcattcatgtgaccaaggagtccacccaccccgtgaagcccctggcccagatcgccggaaacagatacgcctccggacctgtgggaaaggccctgagcgacgcatgtatgggcacaatcgcctccttcctgtctaagtaccaggacatcatcatcgaacaccagaaggtggtgaagggcaaccagaagagactggagagcctgcgggagctggccggcaaggaaaacctggaataccctagcgtgaccctgccacctcagcctcacaccaaggagggcgttgatgcctacaacgaagtgatcgcccgggtgcgaatgtgggtgaacctgaacctgtggcagaagctgaagctaagcagagatgatgccaagcctctgctgagactgaagggattcccttcctttcctctggtcgagagacaggccaacgaagtggactggtgggacatggtgtgtaacgtgaagaagctgatcaacgagaaaaaggaggatggcaaggtgttttggcagaatctggctggctacaagagacaggaagccctgagaccatacctgagcagcgaggaagatcggaagaagggaaagaaattcgctcggtaccagctgggcgacctgctgctgcacctggaaaagaagcacggcgaggactggggaaaggtgtacgacgaggcctgggagcggattgacaagaaagtggaaggcctgagcaagcacatcaagctggaagaggaacggagaagcgaggacgcccagagcaaggccgccctgaccgactggctgcgggctaaggccagcttcgtgatcgagggcctgaaggaggccgacaaggacgagttctgcagatgcgagctgaagctgcagaagtggtacggggacctgcggggaaagcccttcgccatcgaagccgagaacagcatcctggacatcagcggcttcagcaagcagtacaactgtgccttcatctggcagaaggacggcgtgaagaagctgaacctgtacctgatcatcaactacttcaagggcggcaagctgcggttcaagaagatcaaacctgaagccttcgaagccaacagattctacaccgtgatcaacaaaaagagcggcgagatcgtgcccatggaggtgaacttcaacttcgacgaccccaacctgatcatcctgcctctggcctttggcaagagacagggcagagaattcatctggaacgacctgctgtccctggaaaccggcagcctgaagctggccaacggaagagtgatcgagaagacactgtacaacagaagaacccggcaggatgagcctgccctgttcgtggccctgaccttcgagcggcgggaggtcctggactcctccaatatcaaaccaatgaacctgatcggcgtggcaagaggcgaaaacatccccgccgtgatcgccctgaccgaccccgagggctgcccactgagccggtttaaggatagcctgggaaacccaacccacatcctgagaatcggcgagagctataaggagaagcagcggaccatccaggccaagaaggaggtggagcagcggagagccggcggctacagccggaagtacgccagcaaagccaagaatctggcagacgatatggtgagaaacaccgctagagatctgctgtactacgccgtgacccaggatgccatgctgatcttcgccaacctgagccggggcttcggccggcagggcaagcggaccttcatggccgagagacagtacacacggatggaggactggctgaccgccaagctggcctacgagggcctgagcaagacctacctgtccaagacactggcccagtacacctccaagacatgcagcaactgtgggtttaccatcaccagcgccgactacgacagggtgctggagaagctgaagaagacagcaacaggctggatgaccacaattaacggcaaggagctgaaggtggagggccagattacctactacaacagatacaagagacagaacgtagtcaaggacctgtccgtcgagctggatagactgagcgaagaatctgtgaacaacgacatctcctcctggacaaagggcagaagcggagaagctctgagcctcctgaagaaaagattctcccatagacccgtgcaggagaagttcgtgtgcctgaactgcggcttcgagacacacgcagccgagcaagccgccctgaacatcgccagatcctggctgttcctgcggagccaggagtacaagaaataccagacaaacaagacaaccggcaacaccgataagagagccttcgtcgagacctggcagtccttttaccggaagaagcttaaggaggtgtggaaacctgccgtgcggtctggcggatctggcggaggctccaccagccccaagaaaaagagaaaagtctaagctgccttctgcggggcttgccttctggccatgcccttcttctctcccttgcacctgtacctcttggtctttgaataaagcctgagtaggaaggctagcaaaaaaaaaaaaaaaaaaaaaaaaaaaaaaaaaaaaaaaaaaaaaaaaaaaaaaaaaaaaaaaaaaaaaaaaaaaaaaaa

SEQ ID NO: 9419 - RNA, 8787 nt, synthetic construct
  source 1..8787: mol_type = other RNA
aggaaataagagagaaaagaagagtaagaagaaatataagagccaccatggcccctaagaagaagcgtaaagtgagccggatgaaccacgaccaggagttcgacccccctaaggtgtaccctcccgtccccgccgagaagagaaagcccatccgggtcctgagcctgttcgatggcatcgccaccggtctgctggtgctgaaggacctgggcatccaggtggataggtacattgcctccgaggtgtgcgaggactccatcaccgtgggaatggtgcgtcatcagggcaagatcatgtacgtgggcgacgtgcggagcgtgacacagaagcatatccaggagtggggccctttcgacctggtgatcggcggcagcccttgcaatgacctgagcatcgtgaacccagcccggaagggcctgtacgagggaaccggcagactgttcttcgagttttacagactgctgcacgacgcccggcctaaggaaggcgacgaccggcccttcttttggctgttcgagaatgtggtggccatgggagtcagcgacaagcgggatattagccggttcctggagagcaaccccgtgatgatcgatgccaaggaagtgagcgccgcccaccgggccagatacttctggggcaatctgcctggcatgaacagacccctggccagcaccgtgaacgacaagctggagctgcaggagtgcctggagcacggccggatcgccaagttcagcaaggtgagaaccatcaccacccgaagcaacagcatcaaacaaggcaaggaccagcactttcctgtgttcatgaacgagaaggaggacatcctgtggtgtaccgagatggagagagtgttcgggttcccagtccactacacagatgtcagcaacatgtctagactggccagacagagactgctgggaagaagctggtccgtccctgtgatcagacacctgttcgcccctctgaaggagtacttcgcctgcgtgagcagcggcaacagcaacgccaacagccggggccccagcttctctagcggcctggtgccactgtccctgagagggagccacatgggccccatggagatctacaaaaccgtgagcgcctggaagcggcagcctgtgcgcgtgctgagcctgtttcggaatatcgataaagtcctgaaaagcctgggattcctggagagcggctctggctccggcggtggcaccctgaagtacgtggaggatgtgacaaacgtggtcagacgggatgtggagaagtggggccccttcgatctggtgtacggcagcacccaacccctgggcagctcttgtgaccggtgccctggctggtacatgtttcagttccaccggatcctgcagtacgccctgccgagacaggagtcccagcggccattcttttggattttcatggacaacttgctgctgaccgaggatgaccaggaaactaccactcggttcctgcagaccgaagccgtgaccctgcaggacgtgagaggccgggactaccagaacgccatgcgggtgtggtccaacatccctggactgaaaagcaagcacgcacctctgacccctaaagaagaggagtacctgcaggcccaggtgcggagcagaagcaagctggacgcccctaaggtggatctgctggtgaagaattgcctcctgcccctgagagagtacttcaagtatttcagccagaatagtctgcccctgggaggcagcggcggcggcagcaaggcccccgtgaccttcggcgacctggccatctacttcagccaggaggagtgggagtggctgagccccatccagaaggacctgtacgaggacgtgatgctggagaactacaccaacctggtgagcctgggcctgagcagcaggaggcccaacgtgatcgccctgctggagaagggcaaggccccctggatggtggagccccccaggaggaggcagggccccgacagcaggagcaagtgcggcggcccaagcagcggcgcccctcctcccagcggcggcaggcggcccaagcagcggcgcccctcctcccagcggcggcagcccagccggctccccaacctctaccgaggagggcacctctgagtccgccacccccgagagcggccctggcacctccaccgagcccagcgagggcagcgcacccggcagccctgccggcagccccacctccacagaggagggaaccagcaccgagcccagcgaaggcagcgccccaggcaccagcaccgagcctagtgagcaggagattaaacggatcaacaagatcagaagaagacttgtgaaagacagcaacaccaagaaggccggcaagacaggccccatgaaaaccctgctggttagagtgatgacacccgatctgagagagcggctggaaaacctgagaaagaagcctgaaaatatcccccagcccatcagcaatacatctagagccaacctgaataagctgctgaccgattacaccgaaatgaagaaggcgatcctgcatgtgtactgggaagagttccagaaggaccctgtgggcctgatgagccgggtggcccagcctgccagcaagaagatcgatcagaacaagctgaaacctgagatggacgagaagggcaacctgaccaccgccggctttgcctgctctcagtgtggccagcccctgttcgtgtacaagctggagcaggtgtctgagaagggcaaggcttacaccaactacttcggacggtgcaatgtggccgagcacgaaaagctgatcctgctggcccagctgaagcccgagaaggatagcgacgaagccgtgacatatagcctgggaaagtttgggcagagggccctggatttctacagcattcatgtgaccaaggagtccacccaccccgtgaagcccctggcccagatcgccggaaacagatacgcctccggacctgtgggaaaggccctgagcgacgcatgtatgggcacaatcgcctccttcctgtctaagtaccaggacatcatcatcgaacaccagaaggtggtgaagggcaaccagaagagactggagagcctgcgggagctggccggcaaggaaaacctggaataccctagcgtgaccctgccacctcagcctcacaccaaggagggcgttgatgcctacaacgaagtgatcgcccgggtgcgaatgtgggtgaacctgaacctgtggcagaagctgaagctaagcagagatgatgccaagcctctgctgagactgaagggattcccttcctttcctctggtcgagagacaggccaacgaagtggactggtgggacatggtgtgtaacgtgaagaagctgatcaacgagaaaaaggaggatggcaaggtgttttggcagaatctggctggctacaagagacaggaagccctgagaccatacctgagcagcgaggaagatcggaagaagggaaagaaattcgctcggtaccagctgggcgacctgctgctgcacctggaaaagaagcacggcgaggactggggaaaggtgtacgacgaggcctgggagcggattgacaagaaagtggaaggcctgagcaagcacatcaagctggaagaggaacggagaagcgaggacgcccagagcaaggccgccctgaccgactggctgcgggctaaggccagcttcgtgatcgagggcctgaaggaggccgacaaggacgagttctgcagatgcgagctgaagctgcagaagtggtacggggacctgcggggaaagcccttcgccatcgaagccgagaacagcatcctggacatcagcggcttcagcaagcagtacaactgtgccttcatctggcagaaggacggcgtgaagaagctgaacctgtacctgatcatcaactacttcaagggcggcaagctgcggttcaagaagatcaaacctgaagccttcgaagccaacagattctacaccgtgatcaacaaaaagagcggcgagatcgtgcccatggaggtgaacttcaacttcgacgaccccaacctgatcatcctgcctctggcctttggcaagagacagggcagagaattcatctggaacgacctgctgtccctggaaaccggcagcctgaagctggccaacggaagagtgatcgagaagacactgtacaacagaagaacccggcaggatgagcctgccctgttcgtggccctgaccttcgagcggcgggaggtcctggactcctccaatatcaaaccaatgaacctgatcggcgtggcaagaggcgaaaacatccccgccgtgatcgccctgaccgaccccgagggctgcccactgagccggtttaaggatagcctgggaaacccaacccacatcctgagaatcggcgagagctataaggagaagcagcggaccatccaggccaagaaggaggtggagcagcggagagccggcggctacagccggaagtacgccagcaaagccaagaatctggcagacgatatggtgagaaacaccgctagagatctgctgtactacgccgtgacccaggatgccatgctgatcttcgccaacctgagccggggcttcggccggcagggcaagcggaccttcatggccgagagacagtacacacggatggaggactggctgaccgccaagctggcctacgagggcctgagcaagacctacctgtccaagacactggcccagtacacctccaagacatgcagcaactgtgggtttaccatcaccagcgccgactacgacagggtgctggagaagctgaagaagacagcaacaggctggatgaccacaattaacggcaaggagctgaaggtggagggccagattacctactacaacagatacaagagacagaacgtagtcaaggacctgtccgtcgagctggatagactgagcgaagaatctgtgaacaacgacatctcctcctggacaaagggcagaagcggagaagctctgagcctcctgaagaaaagattctcccatagacccgtgcaggagaagttcgtgtgcctgaactgcggcttcgagacacacgcagccgagcaagccgccctgaacatcgccagatcctggctgttcctgcggagccaggagtacaagaaataccagacaaacaagacaaccggcaacaccgataagagagccttcgtcgagacctggcagtccttttaccggaagaagcttaaggaggtgtggaaacctgccgtgcggtctggcggatctggcggaggctccaccagccccaagaaaaagagaaaagtctaagctgccttctgcggggcttgccttctggccatgcccttcttctctcccttgcacctgtacctcttggtctttgaataaagcctgagtaggaaggctagcaaaaaaaaaaaaaaaaaaaaaaaaaaaaaaaaaaaaaaaaaaaaaaaaaaaaaaaaaaaaaaaaaaaaaaaaaaaaaaaagcccagccggctccccaacctctaccgaggagggcacctctgagtccgccacccccgagagcggccctggcacctccaccgagcccagcgagggcagcgcacccggcagccctgccggcagccccacctccacagaggagggaaccagcaccgagcccagcgaaggcagcgccccaggcaccagcaccgagcctagtgagcaggagattaaacggatcaacaagatcagaagaagacttgtgaaagacagcaacaccaagaaggccggcaagacaggccccatgaaaaccctgctggttagagtgatgacacccgatctgagagagcggctggaaaacctgagaaagaagcctgaaaatatcccccagcccatcagcaatacatctagagccaacctgaataagctgctgaccgattacaccgaaatgaagaaggcgatcctgcatgtgtactgggaagagttccagaaggaccctgtgggcctgatgagccgggtggcccagcctgccagcaagaagatcgatcagaacaagctgaaacctgagatggacgagaagggcaacctgaccaccgccggctttgcctgctctcagtgtggccagcccctgttcgtgtacaagctggagcaggtgtctgagaagggcaaggcttacaccaactacttcggacggtgcaatgtggccgagcacgaaaagctgatcctgctggcccagctgaagcccgagaaggatagcgacgaagccgtgacatatagcctgggaaagtttgggcagagggccctggatttctacagcattcatgtgaccaaggagtccacccaccccgtgaagcccctggcccagatcgccggaaacagatacgcctccggacctgtgggaaaggccctgagcgacgcatgtatgggcacaatcgcctccttcctgtctaagtaccaggacatcatcatcgaacaccagaaggtggtgaagggcaaccagaagagactggagagcctgcgggagctggccggcaaggaaaacctggaataccctagcgtgaccctgccacctcagcctcacaccaaggagggcgttgatgcctacaacgaagtgatcgcccgggtgcgaatgtgggtgaacctgaacctgtggcagaagctgaagctaagcagagatgatgccaagcctctgctgagactgaagggattcccttcctttcctctggtcgagagacaggccaacgaagtggactggtgggacatggtgtgtaacgtgaagaagctgatcaacgagaaaaaggaggatggcaaggtgttttggcagaatctggctggctacaagagacaggaagccctgagaccatacctgagcagcgaggaagatcggaagaagggaaagaaattcgctcggtaccagctgggcgacctgctgctgcacctggaaaagaagcacggcgaggactggggaaaggtgtacgacgaggcctgggagcggattgacaagaaagtggaaggcctgagcaagcacatcaagctggaagaggaacggagaagcgaggacgcccagagcaaggccgccctgaccgactggctgcgggctaaggccagcttcgtgatcgagggcctgaaggaggccgacaaggacgagttctgcagatgcgagctgaagctgcagaagtggtacggggacctgcggggaaagcccttcgccatcgaagccgagaacagcatcctggacatcagcggcttcagcaagcagtacaactgtgccttcatctggcagaaggacggcgtgaagaagctgaacctgtacctgatcatcaactacttcaagggcggcaagctgcggttcaagaagatcaaacctgaagccttcgaagccaacagattctacaccgtgatcaacaaaaagagcggcgagatcgtgcccatggaggtgaacttcaacttcgacgaccccaacctgatcatcctgcctctggcctttggcaagagacagggcagagaattcatctggaacgacctgctgtccctggaaaccggcagcctgaagctggccaacggaagagtgatcgagaagacactgtacaacagaagaacccggcaggatgagcctgccctgttcgtggccctgaccttcgagcggcgggaggtcctggactcctccaatatcaaaccaatgaacctgatcggcgtggcaagaggcgaaaacatccccgccgtgatcgccctgaccgaccccgagggctgcccactgagccggtttaaggatagcctgggaaacccaacccacatcctgagaatcggcgagagctataaggagaagcagcggaccatccaggccaagaaggaggtggagcagcggagagccggcggctacagccggaagtacgccagcaaagccaagaatctggcagacgatatggtgagaaacaccgctagagatctgctgtactacgccgtgacccaggatgccatgctgatcttcgccaacctgagccggggcttcggccggcagggcaagcggaccttcatggccgagagacagtacacacggatggaggactggctgaccgccaagctggcctacgagggcctgagcaagacctacctgtccaagacactggcccagtacacctccaagacatgcagcaactgtgggtttaccatcaccagcgccgactacgacagggtgctggagaagctgaagaagacagcaacaggctggatgaccacaattaacggcaaggagctgaaggtggagggccagattacctactacaacagatacaagagacagaacgtagtcaaggacctgtccgtcgagctggatagactgagcgaagaatctgtgaacaacgacatctcctcctggacaaagggcagaagcggagaagctctgagcctcctgaagaaaagattctcccatagacccgtgcaggagaagttcgtgtgcctgaactgcggcttcgagacacacgcagccgagcaagccgccctgaacatcgccagatcctggctgttcctgcggagccaggagtacaagaaataccagacaaacaagacaaccggcaacaccgataagagagccttcgtcgagacctggcagtccttttaccggaagaagcttaaggaggtgtggaaacctgccgtgcggtctggcggatctggcggaggctccaccagccccaagaaaaagagaaaagtctaagctgccttctgcggggcttgccttctggccatgcccttcttctctcccttgcacctgtacctcttggtctttgaataaagcctgagtaggaaggctagcaaaaaaaaaaaaaaaaaaaaaaaaaaaaaaaaaaaaaaaaaaaaaaaaaaaaaaaaaaaaaaaaaaaaaaaaaaaaaaaa

SEQ ID NO: 9420 - RNA, 8787 nt, synthetic construct
  source 1..8787: mol_type = other RNA
aggaaataagagagaaaagaagagtaagaagaaatataagagccaccatggcccctaagaagaagcgtaaagtgagccggatgaaccacgaccaggagttcgacccccctaaggtgtaccctcccgtccccgccgagaagagaaagcccatccgggtcctgagcctgttcgatggcatcgccaccggtctgctggtgctgaaggacctgggcatccaggtggataggtacattgcctccgaggtgtgcgaggactccatcaccgtgggaatggtgcgtcatcagggcaagatcatgtacgtgggcgacgtgcggagcgtgacacagaagcatatccaggagtggggccctttcgacctggtgatcggcggcagcccttgcaatgacctgagcatcgtgaacccagcccggaagggcctgtacgagggaaccggcagactgttcttcgagttttacagactgctgcacgacgcccggcctaaggaaggcgacgaccggcccttcttttggctgttcgagaatgtggtggccatgggagtcagcgacaagcgggatattagccggttcctggagagcaaccccgtgatgatcgatgccaaggaagtgagcgccgcccaccgggccagatacttctggggcaatctgcctggcatgaacagacccctggccagcaccgtgaacgacaagctggagctgcaggagtgcctggagcacggccggatcgccaagttcagcaaggtgagaaccatcaccacccgaagcaacagcatcaaacaaggcaaggaccagcactttcctgtgttcatgaacgagaaggaggacatcctgtggtgtaccgagatggagagagtgttcgggttcccagtccactacacagatgtcagcaacatgtctagactggccagacagagactgctgggaagaagctggtccgtccctgtgatcagacacctgttcgcccctctgaaggagtacttcgcctgcgtgagcagcggcaacagcaacgccaacagccggggccccagcttctctagcggcctggtgccactgtccctgagagggagccacatgggccccatggagatctacaaaaccgtgagcgcctggaagcggcagcctgtgcgcgtgctgagcctgtttcggaatatcgataaagtcctgaaaagcctgggattcctggagagcggctctggctccggcggtggcaccctgaagtacgtggaggatgtgacaaacgtggtcagacgggatgtggagaagtggggccccttcgatctggtgtacggcagcacccaacccctgggcagctcttgtgaccggtgccctggctggtacatgtttcagttccaccggatcctgcagtacgccctgccgagacaggagtcccagcggccattcttttggattttcatggacaacttgctgctgaccgaggatgaccaggaaactaccactcggttcctgcagaccgaagccgtgaccctgcaggacgtgagaggccgggactaccagaacgccatgcgggtgtggtccaacatccctggactgaaaagcaagcacgcacctctgacccctaaagaagaggagtacctgcaggcccaggtgcggagcagaagcaagctggacgcccctaaggtggatctgctggtgaagaattgcctcctgcccctgagagagtacttcaagtatttcagccagaatagtctgcccctgggaggcagcggcggcggcttccagggcagcgtgagcttcaaggacgtgaccgtggacttcagcagggaggagtggcagcagctggacctggcccagaagagcctgtacagggacgtgatgctggagaactacttcaacctgatcagcgtgggctgccaggtgcccaagcccgaggtgatcttcaacctggagaggggcgagcagccctgcatgctggacggcgagatcagcagccagagctacctggaccagggcatcggcggcggcccaagcagcggcgcccctcctcccagcggcggcaggcggcccaagcagcggcgcccctcctcccagcggcggcagcccagccggctccccaacctctaccgaggagggcacctctgagtccgccacccccgagagcggccctggcacctccaccgagcccagcgagggcagcgcacccggcagccctgccggcagccccacctccacagaggagggaaccagcaccgagcccagcgaaggcagcgccccaggcaccagcaccgagcctagtgagcaggagattaaacggatcaacaagatcagaagaagacttgtgaaagacagcaacaccaagaaggccggcaagacaggccccatgaaaaccctgctggttagagtgatgacacccgatctgagagagcggctggaaaacctgagaaagaagcctgaaaatatcccccagcccatcagcaatacatctagagccaacctgaataagctgctgaccgattacaccgaaatgaagaaggcgatcctgcatgtgtactgggaagagttccagaaggaccctgtgggcctgatgagccgggtggcccagcctgccagcaagaagatcgatcagaacaagctgaaacctgagatggacgagaagggcaacctgaccaccgccggctttgcctgctctcagtgtggccagcccctgttcgtgtacaagctggagcaggtgtctgagaagggcaaggcttacaccaactacttcggacggtgcaatgtggccgagcacgaaaagctgatcctgctggcccagctgaagcccgagaaggatagcgacgaagccgtgacatatagcctgggaaagtttgggcagagggccctggatttctacagcattcatgtgaccaaggagtccacccaccccgtgaagcccctggcccagatcgccggaaacagatacgcctccggacctgtgggaaaggccctgagcgacgcatgtatgggcacaatcgcctccttcctgtctaagtaccaggacatcatcatcgaacaccagaaggtggtgaagggcaaccagaagagactggagagcctgcgggagctggccggcaaggaaaacctggaataccctagcgtgaccctgccacctcagcctcacaccaaggagggcgttgatgcctacaacgaagtgatcgcccgggtgcgaatgtgggtgaacctgaacctgtggcagaagctgaagctaagcagagatgatgccaagcctctgctgagactgaagggattcccttcctttcctctggtcgagagacaggccaacgaagtggactggtgggacatggtgtgtaacgtgaagaagctgatcaacgagaaaaaggaggatggcaaggtgttttggcagaatctggctggctacaagagacaggaagccctgagaccatacctgagcagcgaggaagatcggaagaagggaaagaaattcgctcggtaccagctgggcgacctgctgctgcacctggaaaagaagcacggcgaggactggggaaaggtgtacgacgaggcctgggagcggattgacaagaaagtggaaggcctgagcaagcacatcaagctggaagaggaacggagaagcgaggacgcccagagcaaggccgccctgaccgactggctgcgggctaaggccagcttcgtgatcgagggcctgaaggaggccgacaaggacgagttctgcagatgcgagctgaagctgcagaagtggtacggggacctgcggggaaagcccttcgccatcgaagccgagaacagcatcctggacatcagcggcttcagcaagcagtacaactgtgccttcatctggcagaaggacggcgtgaagaagctgaacctgtacctgatcatcaactacttcaagggcggcaagctgcggttcaagaagatcaaacctgaagccttcgaagccaacagattctacaccgtgatcaacaaaaagagcggcgagatcgtgcccatggaggtgaacttcaacttcgacgaccccaacctgatcatcctgcctctggcctttggcaagagacagggcagagaattcatctggaacgacctgctgtccctggaaaccggcagcctgaagctggccaacggaagagtgatcgagaagacactgtacaacagaagaacccggcaggatgagcctgccctgttcgtggccctgaccttcgagcggcgggaggtcctggactcctccaatatcaaaccaatgaacctgatcggcgtggcaagaggcgaaaacatccccgccgtgatcgccctgaccgaccccgagggctgcccactgagccggtttaaggatagcctgggaaacccaacccacatcctgagaatcggcgagagctataaggagaagcagcggaccatccaggccaagaaggaggtggagcagcggagagccggcggctacagccggaagtacgccagcaaagccaagaatctggcagacgatatggtgagaaacaccgctagagatctgctgtactacgccgtgacccaggatgccatgctgatcttcgccaacctgagccggggcttcggccggcagggcaagcggaccttcatggccgagagacagtacacacggatggaggactggctgaccgccaagctggcctacgagggcctgagcaagacctacctgtccaagacactggcccagtacacctccaagacatgcagcaactgtgggtttaccatcaccagcgccgactacgacagggtgctggagaagctgaagaagacagcaacaggctggatgaccacaattaacggcaaggagctgaaggtggagggccagattacctactacaacagatacaagagacagaacgtagtcaaggacctgtccgtcgagctggatagactgagcgaagaatctgtgaacaacgacatctcctcctggacaaagggcagaagcggagaagctctgagcctcctgaagaaaagattctcccatagacccgtgcaggagaagttcgtgtgcctgaactgcggcttcgagacacacgcagccgagcaagccgccctgaacatcgccagatcctggctgttcctgcggagccaggagtacaagaaataccagacaaacaagacaaccggcaacaccgataagagagccttcgtcgagacctggcagtccttttaccggaagaagcttaaggaggtgtggaaacctgccgtgcggtctggcggatctggcggaggctccaccagccccaagaaaaagagaaaagtctaagctgccttctgcggggcttgccttctggccatgcccttcttctctcccttgcacctgtacctcttggtctttgaataaagcctgagtaggaaggctagcaaaaaaaaaaaaaaaaaaaaaaaaaaaaaaaaaaaaaaaaaaaaaaaaaaaaaaaaaaaaaaaaaaaaaaaaaaaaaaaagcccagccggctccccaacctctaccgaggagggcacctctgagtccgccacccccgagagcggccctggcacctccaccgagcccagcgagggcagcgcacccggcagccctgccggcagccccacctccacagaggagggaaccagcaccgagcccagcgaaggcagcgccccaggcaccagcaccgagcctagtgagcaggagattaaacggatcaacaagatcagaagaagacttgtgaaagacagcaacaccaagaaggccggcaagacaggccccatgaaaaccctgctggttagagtgatgacacccgatctgagagagcggctggaaaacctgagaaagaagcctgaaaatatcccccagcccatcagcaatacatctagagccaacctgaataagctgctgaccgattacaccgaaatgaagaaggcgatcctgcatgtgtactgggaagagttccagaaggaccctgtgggcctgatgagccgggtggcccagcctgccagcaagaagatcgatcagaacaagctgaaacctgagatggacgagaagggcaacctgaccaccgccggctttgcctgctctcagtgtggccagcccctgttcgtgtacaagctggagcaggtgtctgagaagggcaaggcttacaccaactacttcggacggtgcaatgtggccgagcacgaaaagctgatcctgctggcccagctgaagcccgagaaggatagcgacgaagccgtgacatatagcctgggaaagtttgggcagagggccctggatttctacagcattcatgtgaccaaggagtccacccaccccgtgaagcccctggcccagatcgccggaaacagatacgcctccggacctgtgggaaaggccctgagcgacgcatgtatgggcacaatcgcctccttcctgtctaagtaccaggacatcatcatcgaacaccagaaggtggtgaagggcaaccagaagagactggagagcctgcgggagctggccggcaaggaaaacctggaataccctagcgtgaccctgccacctcagcctcacaccaaggagggcgttgatgcctacaacgaagtgatcgcccgggtgcgaatgtgggtgaacctgaacctgtggcagaagctgaagctaagcagagatgatgccaagcctctgctgagactgaagggattcccttcctttcctctggtcgagagacaggccaacgaagtggactggtgggacatggtgtgtaacgtgaagaagctgatcaacgagaaaaaggaggatggcaaggtgttttggcagaatctggctggctacaagagacaggaagccctgagaccatacctgagcagcgaggaagatcggaagaagggaaagaaattcgctcggtaccagctgggcgacctgctgctgcacctggaaaagaagcacggcgaggactggggaaaggtgtacgacgaggcctgggagcggattgacaagaaagtggaaggcctgagcaagcacatcaagctggaagaggaacggagaagcgaggacgcccagagcaaggccgccctgaccgactggctgcgggctaaggccagcttcgtgatcgagggcctgaaggaggccgacaaggacgagttctgcagatgcgagctgaagctgcagaagtggtacggggacctgcggggaaagcccttcgccatcgaagccgagaacagcatcctggacatcagcggcttcagcaagcagtacaactgtgccttcatctggcagaaggacggcgtgaagaagctgaacctgtacctgatcatcaactacttcaagggcggcaagctgcggttcaagaagatcaaacctgaagccttcgaagccaacagattctacaccgtgatcaacaaaaagagcggcgagatcgtgcccatggaggtgaacttcaacttcgacgaccccaacctgatcatcctgcctctggcctttggcaagagacagggcagagaattcatctggaacgacctgctgtccctggaaaccggcagcctgaagctggccaacggaagagtgatcgagaagacactgtacaacagaagaacccggcaggatgagcctgccctgttcgtggccctgaccttcgagcggcgggaggtcctggactcctccaatatcaaaccaatgaacctgatcggcgtggcaagaggcgaaaacatccccgccgtgatcgccctgaccgaccccgagggctgcccactgagccggtttaaggatagcctgggaaacccaacccacatcctgagaatcggcgagagctataaggagaagcagcggaccatccaggccaagaaggaggtggagcagcggagagccggcggctacagccggaagtacgccagcaaagccaagaatctggcagacgatatggtgagaaacaccgctagagatctgctgtactacgccgtgacccaggatgccatgctgatcttcgccaacctgagccggggcttcggccggcagggcaagcggaccttcatggccgagagacagtacacacggatggaggactggctgaccgccaagctggcctacgagggcctgagcaagacctacctgtccaagacactggcccagtacacctccaagacatgcagcaactgtgggtttaccatcaccagcgccgactacgacagggtgctggagaagctgaagaagacagcaacaggctggatgaccacaattaacggcaaggagctgaaggtggagggccagattacctactacaacagatacaagagacagaacgtagtcaaggacctgtccgtcgagctggatagactgagcgaagaatctgtgaacaacgacatctcctcctggacaaagggcagaagcggagaagctctgagcctcctgaagaaaagattctcccatagacccgtgcaggagaagttcgtgtgcctgaactgcggcttcgagacacacgcagccgagcaagccgccctgaacatcgccagatcctggctgttcctgcggagccaggagtacaagaaataccagacaaacaagacaaccggcaacaccgataagagagccttcgtcgagacctggcagtccttttaccggaagaagcttaaggaggtgtggaaacctgccgtgcggtctggcggatctggcggaggctccaccagccccaagaaaaagagaaaagtctaagctgccttctgcggggcttgccttctggccatgcccttcttctctcccttgcacctgtacctcttggtctttgaataaagcctgagtaggaaggctagcaaaaaaaaaaaaaaaaaaaaaaaaaaaaaaaaaaaaaaaaaaaaaaaaaaaaaaaaaaaaaaaaaaaaaaaaaaaaaaaa

SEQ ID NO: 9421 - RNA, 8787 nt, synthetic construct
  source 1..8787: mol_type = other RNA
aggaaataagagagaaaagaagagtaagaagaaatataagagccaccatggcccctaagaagaagcgtaaagtgagccggatgaaccacgaccaggagttcgacccccctaaggtgtaccctcccgtccccgccgagaagagaaagcccatccgggtcctgagcctgttcgatggcatcgccaccggtctgctggtgctgaaggacctgggcatccaggtggataggtacattgcctccgaggtgtgcgaggactccatcaccgtgggaatggtgcgtcatcagggcaagatcatgtacgtgggcgacgtgcggagcgtgacacagaagcatatccaggagtggggccctttcgacctggtgatcggcggcagcccttgcaatgacctgagcatcgtgaacccagcccggaagggcctgtacgagggaaccggcagactgttcttcgagttttacagactgctgcacgacgcccggcctaaggaaggcgacgaccggcccttcttttggctgttcgagaatgtggtggccatgggagtcagcgacaagcgggatattagccggttcctggagagcaaccccgtgatgatcgatgccaaggaagtgagcgccgcccaccgggccagatacttctggggcaatctgcctggcatgaacagacccctggccagcaccgtgaacgacaagctggagctgcaggagtgcctggagcacggccggatcgccaagttcagcaaggtgagaaccatcaccacccgaagcaacagcatcaaacaaggcaaggaccagcactttcctgtgttcatgaacgagaaggaggacatcctgtggtgtaccgagatggagagagtgttcgggttcccagtccactacacagatgtcagcaacatgtctagactggccagacagagactgctgggaagaagctggtccgtccctgtgatcagacacctgttcgcccctctgaaggagtacttcgcctgcgtgagcagcggcaacagcaacgccaacagccggggccccagcttctctagcggcctggtgccactgtccctgagagggagccacatgggccccatggagatctacaaaaccgtgagcgcctggaagcggcagcctgtgcgcgtgctgagcctgtttcggaatatcgataaagtcctgaaaagcctgggattcctggagagcggctctggctccggcggtggcaccctgaagtacgtggaggatgtgacaaacgtggtcagacgggatgtggagaagtggggccccttcgatctggtgtacggcagcacccaacccctgggcagctcttgtgaccggtgccctggctggtacatgtttcagttccaccggatcctgcagtacgccctgccgagacaggagtcccagcggccattcttttggattttcatggacaacttgctgctgaccgaggatgaccaggaaactaccactcggttcctgcagaccgaagccgtgaccctgcaggacgtgagaggccgggactaccagaacgccatgcgggtgtggtccaacatccctggactgaaaagcaagcacgcacctctgacccctaaagaagaggagtacctgcaggcccaggtgcggagcagaagcaagctggacgcccctaaggtggatctgctggtgaagaattgcctcctgcccctgagagagtacttcaagtatttcagccagaatagtctgcccctgggaggcagcggcggcggcatgagcctgggcagcgagctgttcagggacgtggccatcgtgttcagccaggaggagtggcagtggctggcccccgcccagagggacctgtacagggacgtgatgctggagacctacagcaacctggtgagcctgggcctggccatcagcaagcccgacgtgatcagcttcctggagcagggcaaggagccctggatggtggagagggtggtgagcaggggcctgtgccccgtgctggagagcggcggcccaagcagcggcgcccctcctcccagcggcggcaggcggcccaagcagcggcgcccctcctcccagcggcggcagcccagccggctccccaacctctaccgaggagggcacctctgagtccgccacccccgagagcggccctggcacctccaccgagcccagcgagggcagcgcacccggcagccctgccggcagccccacctccacagaggagggaaccagcaccgagcccagcgaaggcagcgccccaggcaccagcaccgagcctagtgagcaggagattaaacggatcaacaagatcagaagaagacttgtgaaagacagcaacaccaagaaggccggcaagacaggccccatgaaaaccctgctggttagagtgatgacacccgatctgagagagcggctggaaaacctgagaaagaagcctgaaaatatcccccagcccatcagcaatacatctagagccaacctgaataagctgctgaccgattacaccgaaatgaagaaggcgatcctgcatgtgtactgggaagagttccagaaggaccctgtgggcctgatgagccgggtggcccagcctgccagcaagaagatcgatcagaacaagctgaaacctgagatggacgagaagggcaacctgaccaccgccggctttgcctgctctcagtgtggccagcccctgttcgtgtacaagctggagcaggtgtctgagaagggcaaggcttacaccaactacttcggacggtgcaatgtggccgagcacgaaaagctgatcctgctggcccagctgaagcccgagaaggatagcgacgaagccgtgacatatagcctgggaaagtttgggcagagggccctggatttctacagcattcatgtgaccaaggagtccacccaccccgtgaagcccctggcccagatcgccggaaacagatacgcctccggacctgtgggaaaggccctgagcgacgcatgtatgggcacaatcgcctccttcctgtctaagtaccaggacatcatcatcgaacaccagaaggtggtgaagggcaaccagaagagactggagagcctgcgggagctggccggcaaggaaaacctggaataccctagcgtgaccctgccacctcagcctcacaccaaggagggcgttgatgcctacaacgaagtgatcgcccgggtgcgaatgtgggtgaacctgaacctgtggcagaagctgaagctaagcagagatgatgccaagcctctgctgagactgaagggattcccttcctttcctctggtcgagagacaggccaacgaagtggactggtgggacatggtgtgtaacgtgaagaagctgatcaacgagaaaaaggaggatggcaaggtgttttggcagaatctggctggctacaagagacaggaagccctgagaccatacctgagcagcgaggaagatcggaagaagggaaagaaattcgctcggtaccagctgggcgacctgctgctgcacctggaaaagaagcacggcgaggactggggaaaggtgtacgacgaggcctgggagcggattgacaagaaagtggaaggcctgagcaagcacatcaagctggaagaggaacggagaagcgaggacgcccagagcaaggccgccctgaccgactggctgcgggctaaggccagcttcgtgatcgagggcctgaaggaggccgacaaggacgagttctgcagatgcgagctgaagctgcagaagtggtacggggacctgcggggaaagcccttcgccatcgaagccgagaacagcatcctggacatcagcggcttcagcaagcagtacaactgtgccttcatctggcagaaggacggcgtgaagaagctgaacctgtacctgatcatcaactacttcaagggcggcaagctgcggttcaagaagatcaaacctgaagccttcgaagccaacagattctacaccgtgatcaacaaaaagagcggcgagatcgtgcccatggaggtgaacttcaacttcgacgaccccaacctgatcatcctgcctctggcctttggcaagagacagggcagagaattcatctggaacgacctgctgtccctggaaaccggcagcctgaagctggccaacggaagagtgatcgagaagacactgtacaacagaagaacccggcaggatgagcctgccctgttcgtggccctgaccttcgagcggcgggaggtcctggactcctccaatatcaaaccaatgaacctgatcggcgtggcaagaggcgaaaacatccccgccgtgatcgccctgaccgaccccgagggctgcccactgagccggtttaaggatagcctgggaaacccaacccacatcctgagaatcggcgagagctataaggagaagcagcggaccatccaggccaagaaggaggtggagcagcggagagccggcggctacagccggaagtacgccagcaaagccaagaatctggcagacgatatggtgagaaacaccgctagagatctgctgtactacgccgtgacccaggatgccatgctgatcttcgccaacctgagccggggcttcggccggcagggcaagcggaccttcatggccgagagacagtacacacggatggaggactggctgaccgccaagctggcctacgagggcctgagcaagacctacctgtccaagacactggcccagtacacctccaagacatgcagcaactgtgggtttaccatcaccagcgccgactacgacagggtgctggagaagctgaagaagacagcaacaggctggatgaccacaattaacggcaaggagctgaaggtggagggccagattacctactacaacagatacaagagacagaacgtagtcaaggacctgtccgtcgagctggatagactgagcgaagaatctgtgaacaacgacatctcctcctggacaaagggcagaagcggagaagctctgagcctcctgaagaaaagattctcccatagacccgtgcaggagaagttcgtgtgcctgaactgcggcttcgagacacacgcagccgagcaagccgccctgaacatcgccagatcctggctgttcctgcggagccaggagtacaagaaataccagacaaacaagacaaccggcaacaccgataagagagccttcgtcgagacctggcagtccttttaccggaagaagcttaaggaggtgtggaaacctgccgtgcggtctggcggatctggcggaggctccaccagccccaagaaaaagagaaaagtctaagctgccttctgcggggcttgccttctggccatgcccttcttctctcccttgcacctgtacctcttggtctttgaataaagcctgagtaggaaggctagcaaaaaaaaaaaaaaaaaaaaaaaaaaaaaaaaaaaaaaaaaaaaaaaaaaaaaaaaaaaaaaaaaaaaaaaaaaaaaaaagcccagccggctccccaacctctaccgaggagggcacctctgagtccgccacccccgagagcggccctggcacctccaccgagcccagcgagggcagcgcacccggcagccctgccggcagccccacctccacagaggagggaaccagcaccgagcccagcgaaggcagcgccccaggcaccagcaccgagcctagtgagcaggagattaaacggatcaacaagatcagaagaagacttgtgaaagacagcaacaccaagaaggccggcaagacaggccccatgaaaaccctgctggttagagtgatgacacccgatctgagagagcggctggaaaacctgagaaagaagcctgaaaatatcccccagcccatcagcaatacatctagagccaacctgaataagctgctgaccgattacaccgaaatgaagaaggcgatcctgcatgtgtactgggaagagttccagaaggaccctgtgggcctgatgagccgggtggcccagcctgccagcaagaagatcgatcagaacaagctgaaacctgagatggacgagaagggcaacctgaccaccgccggctttgcctgctctcagtgtggccagcccctgttcgtgtacaagctggagcaggtgtctgagaagggcaaggcttacaccaactacttcggacggtgcaatgtggccgagcacgaaaagctgatcctgctggcccagctgaagcccgagaaggatagcgacgaagccgtgacatatagcctgggaaagtttgggcagagggccctggatttctacagcattcatgtgaccaaggagtccacccaccccgtgaagcccctggcccagatcgccggaaacagatacgcctccggacctgtgggaaaggccctgagcgacgcatgtatgggcacaatcgcctccttcctgtctaagtaccaggacatcatcatcgaacaccagaaggtggtgaagggcaaccagaagagactggagagcctgcgggagctggccggcaaggaaaacctggaataccctagcgtgaccctgccacctcagcctcacaccaaggagggcgttgatgcctacaacgaagtgatcgcccgggtgcgaatgtgggtgaacctgaacctgtggcagaagctgaagctaagcagagatgatgccaagcctctgctgagactgaagggattcccttcctttcctctggtcgagagacaggccaacgaagtggactggtgggacatggtgtgtaacgtgaagaagctgatcaacgagaaaaaggaggatggcaaggtgttttggcagaatctggctggctacaagagacaggaagccctgagaccatacctgagcagcgaggaagatcggaagaagggaaagaaattcgctcggtaccagctgggcgacctgctgctgcacctggaaaagaagcacggcgaggactggggaaaggtgtacgacgaggcctgggagcggattgacaagaaagtggaaggcctgagcaagcacatcaagctggaagaggaacggagaagcgaggacgcccagagcaaggccgccctgaccgactggctgcgggctaaggccagcttcgtgatcgagggcctgaaggaggccgacaaggacgagttctgcagatgcgagctgaagctgcagaagtggtacggggacctgcggggaaagcccttcgccatcgaagccgagaacagcatcctggacatcagcggcttcagcaagcagtacaactgtgccttcatctggcagaaggacggcgtgaagaagctgaacctgtacctgatcatcaactacttcaagggcggcaagctgcggttcaagaagatcaaacctgaagccttcgaagccaacagattctacaccgtgatcaacaaaaagagcggcgagatcgtgcccatggaggtgaacttcaacttcgacgaccccaacctgatcatcctgcctctggcctttggcaagagacagggcagagaattcatctggaacgacctgctgtccctggaaaccggcagcctgaagctggccaacggaagagtgatcgagaagacactgtacaacagaagaacccggcaggatgagcctgccctgttcgtggccctgaccttcgagcggcgggaggtcctggactcctccaatatcaaaccaatgaacctgatcggcgtggcaagaggcgaaaacatccccgccgtgatcgccctgaccgaccccgagggctgcccactgagccggtttaaggatagcctgggaaacccaacccacatcctgagaatcggcgagagctataaggagaagcagcggaccatccaggccaagaaggaggtggagcagcggagagccggcggctacagccggaagtacgccagcaaagccaagaatctggcagacgatatggtgagaaacaccgctagagatctgctgtactacgccgtgacccaggatgccatgctgatcttcgccaacctgagccggggcttcggccggcagggcaagcggaccttcatggccgagagacagtacacacggatggaggactggctgaccgccaagctggcctacgagggcctgagcaagacctacctgtccaagacactggcccagtacacctccaagacatgcagcaactgtgggtttaccatcaccagcgccgactacgacagggtgctggagaagctgaagaagacagcaacaggctggatgaccacaattaacggcaaggagctgaaggtggagggccagattacctactacaacagatacaagagacagaacgtagtcaaggacctgtccgtcgagctggatagactgagcgaagaatctgtgaacaacgacatctcctcctggacaaagggcagaagcggagaagctctgagcctcctgaagaaaagattctcccatagacccgtgcaggagaagttcgtgtgcctgaactgcggcttcgagacacacgcagccgagcaagccgccctgaacatcgccagatcctggctgttcctgcggagccaggagtacaagaaataccagacaaacaagacaaccggcaacaccgataagagagccttcgtcgagacctggcagtccttttaccggaagaagcttaaggaggtgtggaaacctgccgtgcggtctggcggatctggcggaggctccaccagccccaagaaaaagagaaaagtctaagctgccttctgcggggcttgccttctggccatgcccttcttctctcccttgcacctgtacctcttggtctttgaataaagcctgagtaggaaggctagcaaaaaaaaaaaaaaaaaaaaaaaaaaaaaaaaaaaaaaaaaaaaaaaaaaaaaaaaaaaaaaaaaaaaaaaaaaaaaaaa

SEQ ID NO: 9422 - RNA, 8787 nt, synthetic construct
  source 1..8787: mol_type = other RNA
aggaaataagagagaaaagaagagtaagaagaaatataagagccaccatggcccctaagaagaagcgtaaagtgagccggatgaaccacgaccaggagttcgacccccctaaggtgtaccctcccgtccccgccgagaagagaaagcccatccgggtcctgagcctgttcgatggcatcgccaccggtctgctggtgctgaaggacctgggcatccaggtggataggtacattgcctccgaggtgtgcgaggactccatcaccgtgggaatggtgcgtcatcagggcaagatcatgtacgtgggcgacgtgcggagcgtgacacagaagcatatccaggagtggggccctttcgacctggtgatcggcggcagcccttgcaatgacctgagcatcgtgaacccagcccggaagggcctgtacgagggaaccggcagactgttcttcgagttttacagactgctgcacgacgcccggcctaaggaaggcgacgaccggcccttcttttggctgttcgagaatgtggtggccatgggagtcagcgacaagcgggatattagccggttcctggagagcaaccccgtgatgatcgatgccaaggaagtgagcgccgcccaccgggccagatacttctggggcaatctgcctggcatgaacagacccctggccagcaccgtgaacgacaagctggagctgcaggagtgcctggagcacggccggatcgccaagttcagcaaggtgagaaccatcaccacccgaagcaacagcatcaaacaaggcaaggaccagcactttcctgtgttcatgaacgagaaggaggacatcctgtggtgtaccgagatggagagagtgttcgggttcccagtccactacacagatgtcagcaacatgtctagactggccagacagagactgctgggaagaagctggtccgtccctgtgatcagacacctgttcgcccctctgaaggagtacttcgcctgcgtgagcagcggcaacagcaacgccaacagccggggccccagcttctctagcggcctggtgccactgtccctgagagggagccacatgggccccatggagatctacaaaaccgtgagcgcctggaagcggcagcctgtgcgcgtgctgagcctgtttcggaatatcgataaagtcctgaaaagcctgggattcctggagagcggctctggctccggcggtggcaccctgaagtacgtggaggatgtgacaaacgtggtcagacgggatgtggagaagtggggccccttcgatctggtgtacggcagcacccaacccctgggcagctcttgtgaccggtgccctggctggtacatgtttcagttccaccggatcctgcagtacgccctgccgagacaggagtcccagcggccattcttttggattttcatggacaacttgctgctgaccgaggatgaccaggaaactaccactcggttcctgcagaccgaagccgtgaccctgcaggacgtgagaggccgggactaccagaacgccatgcgggtgtggtccaacatccctggactgaaaagcaagcacgcacctctgacccctaaagaagaggagtacctgcaggcccaggtgcggagcagaagcaagctggacgcccctaaggtggatctgctggtgaagaattgcctcctgcccctgagagagtacttcaagtatttcagccagaatagtctgcccctgggaggcagcggcggcggcgcccaggagagcgtgatgttcagcgacgtgagcatcgacttcagccaggaggagtgggagtgcctgaccgacgaccagaggcacctgtacagggacgtgatgctggagaactacagcaacctggtgagcatgggccacagcatcagcaagcccaacgtgatcagctacctggagcagggcaaggagccctggctggtggacaggggcaggaccaggggccagtggcccgtgctggagagcaccggcggcccaagcagcggcgcccctcctcccagcggcggcaggcggcccaagcagcggcgcccctcctcccagcggcggcagcccagccggctccccaacctctaccgaggagggcacctctgagtccgccacccccgagagcggccctggcacctccaccgagcccagcgagggcagcgcacccggcagccctgccggcagccccacctccacagaggagggaaccagcaccgagcccagcgaaggcagcgccccaggcaccagcaccgagcctagtgagcaggagattaaacggatcaacaagatcagaagaagacttgtgaaagacagcaacaccaagaaggccggcaagacaggccccatgaaaaccctgctggttagagtgatgacacccgatctgagagagcggctggaaaacctgagaaagaagcctgaaaatatcccccagcccatcagcaatacatctagagccaacctgaataagctgctgaccgattacaccgaaatgaagaaggcgatcctgcatgtgtactgggaagagttccagaaggaccctgtgggcctgatgagccgggtggcccagcctgccagcaagaagatcgatcagaacaagctgaaacctgagatggacgagaagggcaacctgaccaccgccggctttgcctgctctcagtgtggccagcccctgttcgtgtacaagctggagcaggtgtctgagaagggcaaggcttacaccaactacttcggacggtgcaatgtggccgagcacgaaaagctgatcctgctggcccagctgaagcccgagaaggatagcgacgaagccgtgacatatagcctgggaaagtttgggcagagggccctggatttctacagcattcatgtgaccaaggagtccacccaccccgtgaagcccctggcccagatcgccggaaacagatacgcctccggacctgtgggaaaggccctgagcgacgcatgtatgggcacaatcgcctccttcctgtctaagtaccaggacatcatcatcgaacaccagaaggtggtgaagggcaaccagaagagactggagagcctgcgggagctggccggcaaggaaaacctggaataccctagcgtgaccctgccacctcagcctcacaccaaggagggcgttgatgcctacaacgaagtgatcgcccgggtgcgaatgtgggtgaacctgaacctgtggcagaagctgaagctaagcagagatgatgccaagcctctgctgagactgaagggattcccttcctttcctctggtcgagagacaggccaacgaagtggactggtgggacatggtgtgtaacgtgaagaagctgatcaacgagaaaaaggaggatggcaaggtgttttggcagaatctggctggctacaagagacaggaagccctgagaccatacctgagcagcgaggaagatcggaagaagggaaagaaattcgctcggtaccagctgggcgacctgctgctgcacctggaaaagaagcacggcgaggactggggaaaggtgtacgacgaggcctgggagcggattgacaagaaagtggaaggcctgagcaagcacatcaagctggaagaggaacggagaagcgaggacgcccagagcaaggccgccctgaccgactggctgcgggctaaggccagcttcgtgatcgagggcctgaaggaggccgacaaggacgagttctgcagatgcgagctgaagctgcagaagtggtacggggacctgcggggaaagcccttcgccatcgaagccgagaacagcatcctggacatcagcggcttcagcaagcagtacaactgtgccttcatctggcagaaggacggcgtgaagaagctgaacctgtacctgatcatcaactacttcaagggcggcaagctgcggttcaagaagatcaaacctgaagccttcgaagccaacagattctacaccgtgatcaacaaaaagagcggcgagatcgtgcccatggaggtgaacttcaacttcgacgaccccaacctgatcatcctgcctctggcctttggcaagagacagggcagagaattcatctggaacgacctgctgtccctggaaaccggcagcctgaagctggccaacggaagagtgatcgagaagacactgtacaacagaagaacccggcaggatgagcctgccctgttcgtggccctgaccttcgagcggcgggaggtcctggactcctccaatatcaaaccaatgaacctgatcggcgtggcaagaggcgaaaacatccccgccgtgatcgccctgaccgaccccgagggctgcccactgagccggtttaaggatagcctgggaaacccaacccacatcctgagaatcggcgagagctataaggagaagcagcggaccatccaggccaagaaggaggtggagcagcggagagccggcggctacagccggaagtacgccagcaaagccaagaatctggcagacgatatggtgagaaacaccgctagagatctgctgtactacgccgtgacccaggatgccatgctgatcttcgccaacctgagccggggcttcggccggcagggcaagcggaccttcatggccgagagacagtacacacggatggaggactggctgaccgccaagctggcctacgagggcctgagcaagacctacctgtccaagacactggcccagtacacctccaagacatgcagcaactgtgggtttaccatcaccagcgccgactacgacagggtgctggagaagctgaagaagacagcaacaggctggatgaccacaattaacggcaaggagctgaaggtggagggccagattacctactacaacagatacaagagacagaacgtagtcaaggacctgtccgtcgagctggatagactgagcgaagaatctgtgaacaacgacatctcctcctggacaaagggcagaagcggagaagctctgagcctcctgaagaaaagattctcccatagacccgtgcaggagaagttcgtgtgcctgaactgcggcttcgagacacacgcagccgagcaagccgccctgaacatcgccagatcctggctgttcctgcggagccaggagtacaagaaataccagacaaacaagacaaccggcaacaccgataagagagccttcgtcgagacctggcagtccttttaccggaagaagcttaaggaggtgtggaaacctgccgtgcggtctggcggatctggcggaggctccaccagccccaagaaaaagagaaaagtctaagctgccttctgcggggcttgccttctggccatgcccttcttctctcccttgcacctgtacctcttggtctttgaataaagcctgagtaggaaggctagcaaaaaaaaaaaaaaaaaaaaaaaaaaaaaaaaaaaaaaaaaaaaaaaaaaaaaaaaaaaaaaaaaaaaaaaaaaaaaaaagcccagccggctccccaacctctaccgaggagggcacctctgagtccgccacccccgagagcggccctggcacctccaccgagcccagcgagggcagcgcacccggcagccctgccggcagccccacctccacagaggagggaaccagcaccgagcccagcgaaggcagcgccccaggcaccagcaccgagcctagtgagcaggagattaaacggatcaacaagatcagaagaagacttgtgaaagacagcaacaccaagaaggccggcaagacaggccccatgaaaaccctgctggttagagtgatgacacccgatctgagagagcggctggaaaacctgagaaagaagcctgaaaatatcccccagcccatcagcaatacatctagagccaacctgaataagctgctgaccgattacaccgaaatgaagaaggcgatcctgcatgtgtactgggaagagttccagaaggaccctgtgggcctgatgagccgggtggcccagcctgccagcaagaagatcgatcagaacaagctgaaacctgagatggacgagaagggcaacctgaccaccgccggctttgcctgctctcagtgtggccagcccctgttcgtgtacaagctggagcaggtgtctgagaagggcaaggcttacaccaactacttcggacggtgcaatgtggccgagcacgaaaagctgatcctgctggcccagctgaagcccgagaaggatagcgacgaagccgtgacatatagcctgggaaagtttgggcagagggccctggatttctacagcattcatgtgaccaaggagtccacccaccccgtgaagcccctggcccagatcgccggaaacagatacgcctccggacctgtgggaaaggccctgagcgacgcatgtatgggcacaatcgcctccttcctgtctaagtaccaggacatcatcatcgaacaccagaaggtggtgaagggcaaccagaagagactggagagcctgcgggagctggccggcaaggaaaacctggaataccctagcgtgaccctgccacctcagcctcacaccaaggagggcgttgatgcctacaacgaagtgatcgcccgggtgcgaatgtgggtgaacctgaacctgtggcagaagctgaagctaagcagagatgatgccaagcctctgctgagactgaagggattcccttcctttcctctggtcgagagacaggccaacgaagtggactggtgggacatggtgtgtaacgtgaagaagctgatcaacgagaaaaaggaggatggcaaggtgttttggcagaatctggctggctacaagagacaggaagccctgagaccatacctgagcagcgaggaagatcggaagaagggaaagaaattcgctcggtaccagctgggcgacctgctgctgcacctggaaaagaagcacggcgaggactggggaaaggtgtacgacgaggcctgggagcggattgacaagaaagtggaaggcctgagcaagcacatcaagctggaagaggaacggagaagcgaggacgcccagagcaaggccgccctgaccgactggctgcgggctaaggccagcttcgtgatcgagggcctgaaggaggccgacaaggacgagttctgcagatgcgagctgaagctgcagaagtggtacggggacctgcggggaaagcccttcgccatcgaagccgagaacagcatcctggacatcagcggcttcagcaagcagtacaactgtgccttcatctggcagaaggacggcgtgaagaagctgaacctgtacctgatcatcaactacttcaagggcggcaagctgcggttcaagaagatcaaacctgaagccttcgaagccaacagattctacaccgtgatcaacaaaaagagcggcgagatcgtgcccatggaggtgaacttcaacttcgacgaccccaacctgatcatcctgcctctggcctttggcaagagacagggcagagaattcatctggaacgacctgctgtccctggaaaccggcagcctgaagctggccaacggaagagtgatcgagaagacactgtacaacagaagaacccggcaggatgagcctgccctgttcgtggccctgaccttcgagcggcgggaggtcctggactcctccaatatcaaaccaatgaacctgatcggcgtggcaagaggcgaaaacatccccgccgtgatcgccctgaccgaccccgagggctgcccactgagccggtttaaggatagcctgggaaacccaacccacatcctgagaatcggcgagagctataaggagaagcagcggaccatccaggccaagaaggaggtggagcagcggagagccggcggctacagccggaagtacgccagcaaagccaagaatctggcagacgatatggtgagaaacaccgctagagatctgctgtactacgccgtgacccaggatgccatgctgatcttcgccaacctgagccggggcttcggccggcagggcaagcggaccttcatggccgagagacagtacacacggatggaggactggctgaccgccaagctggcctacgagggcctgagcaagacctacctgtccaagacactggcccagtacacctccaagacatgcagcaactgtgggtttaccatcaccagcgccgactacgacagggtgctggagaagctgaagaagacagcaacaggctggatgaccacaattaacggcaaggagctgaaggtggagggccagattacctactacaacagatacaagagacagaacgtagtcaaggacctgtccgtcgagctggatagactgagcgaagaatctgtgaacaacgacatctcctcctggacaaagggcagaagcggagaagctctgagcctcctgaagaaaagattctcccatagacccgtgcaggagaagttcgtgtgcctgaactgcggcttcgagacacacgcagccgagcaagccgccctgaacatcgccagatcctggctgttcctgcggagccaggagtacaagaaataccagacaaacaagacaaccggcaacaccgataagagagccttcgtcgagacctggcagtccttttaccggaagaagcttaaggaggtgtggaaacctgccgtgcggtctggcggatctggcggaggctccaccagccccaagaaaaagagaaaagtctaagctgccttctgcggggcttgccttctggccatgcccttcttctctcccttgcacctgtacctcttggtctttgaataaagcctgagtaggaaggctagcaaaaaaaaaaaaaaaaaaaaaaaaaaaaaaaaaaaaaaaaaaaaaaaaaaaaaaaaaaaaaaaaaaaaaaaaaaaaaaaa

SEQ ID NO: 9423 - RNA, 8787 nt, synthetic construct
  source 1..8787: mol_type = other RNA
aggaaataagagagaaaagaagagtaagaagaaatataagagccaccatggcccctaagaagaagcgtaaagtgagccggatgaaccacgaccaggagttcgacccccctaaggtgtaccctcccgtccccgccgagaagagaaagcccatccgggtcctgagcctgttcgatggcatcgccaccggtctgctggtgctgaaggacctgggcatccaggtggataggtacattgcctccgaggtgtgcgaggactccatcaccgtgggaatggtgcgtcatcagggcaagatcatgtacgtgggcgacgtgcggagcgtgacacagaagcatatccaggagtggggccctttcgacctggtgatcggcggcagcccttgcaatgacctgagcatcgtgaacccagcccggaagggcctgtacgagggaaccggcagactgttcttcgagttttacagactgctgcacgacgcccggcctaaggaaggcgacgaccggcccttcttttggctgttcgagaatgtggtggccatgggagtcagcgacaagcgggatattagccggttcctggagagcaaccccgtgatgatcgatgccaaggaagtgagcgccgcccaccgggccagatacttctggggcaatctgcctggcatgaacagacccctggccagcaccgtgaacgacaagctggagctgcaggagtgcctggagcacggccggatcgccaagttcagcaaggtgagaaccatcaccacccgaagcaacagcatcaaacaaggcaaggaccagcactttcctgtgttcatgaacgagaaggaggacatcctgtggtgtaccgagatggagagagtgttcgggttcccagtccactacacagatgtcagcaacatgtctagactggccagacagagactgctgggaagaagctggtccgtccctgtgatcagacacctgttcgcccctctgaaggagtacttcgcctgcgtgagcagcggcaacagcaacgccaacagccggggccccagcttctctagcggcctggtgccactgtccctgagagggagccacatgggccccatggagatctacaaaaccgtgagcgcctggaagcggcagcctgtgcgcgtgctgagcctgtttcggaatatcgataaagtcctgaaaagcctgggattcctggagagcggctctggctccggcggtggcaccctgaagtacgtggaggatgtgacaaacgtggtcagacgggatgtggagaagtggggccccttcgatctggtgtacggcagcacccaacccctgggcagctcttgtgaccggtgccctggctggtacatgtttcagttccaccggatcctgcagtacgccctgccgagacaggagtcccagcggccattcttttggattttcatggacaacttgctgctgaccgaggatgaccaggaaactaccactcggttcctgcagaccgaagccgtgaccctgcaggacgtgagaggccgggactaccagaacgccatgcgggtgtggtccaacatccctggactgaaaagcaagcacgcacctctgacccctaaagaagaggagtacctgcaggcccaggtgcggagcagaagcaagctggacgcccctaaggtggatctgctggtgaagaattgcctcctgcccctgagagagtacttcaagtatttcagccagaatagtctgcccctgggaggcagcggcggcggcctgcaggtgagcgtgagcttcgaggacgtgaccgtggacttcagcagggaggagtggcagcacctggaccccgcccagaggaggctgtacagggacgtgaccctggagaactacagccacctgcacagcgtgggctaccaggtgcccaagcccgaggtgatcttcaagctggagcagggcgagggcccctggaccctggagggcgagaccccccaccagggctgcagcgacgaggccatcggcggcggcccaagcagcggcgcccctcctcccagcggcggcaggcggcccaagcagcggcgcccctcctcccagcggcggcagcccagccggctccccaacctctaccgaggagggcacctctgagtccgccacccccgagagcggccctggcacctccaccgagcccagcgagggcagcgcacccggcagccctgccggcagccccacctccacagaggagggaaccagcaccgagcccagcgaaggcagcgccccaggcaccagcaccgagcctagtgagcaggagattaaacggatcaacaagatcagaagaagacttgtgaaagacagcaacaccaagaaggccggcaagacaggccccatgaaaaccctgctggttagagtgatgacacccgatctgagagagcggctggaaaacctgagaaagaagcctgaaaatatcccccagcccatcagcaatacatctagagccaacctgaataagctgctgaccgattacaccgaaatgaagaaggcgatcctgcatgtgtactgggaagagttccagaaggaccctgtgggcctgatgagccgggtggcccagcctgccagcaagaagatcgatcagaacaagctgaaacctgagatggacgagaagggcaacctgaccaccgccggctttgcctgctctcagtgtggccagcccctgttcgtgtacaagctggagcaggtgtctgagaagggcaaggcttacaccaactacttcggacggtgcaatgtggccgagcacgaaaagctgatcctgctggcccagctgaagcccgagaaggatagcgacgaagccgtgacatatagcctgggaaagtttgggcagagggccctggatttctacagcattcatgtgaccaaggagtccacccaccccgtgaagcccctggcccagatcgccggaaacagatacgcctccggacctgtgggaaaggccctgagcgacgcatgtatgggcacaatcgcctccttcctgtctaagtaccaggacatcatcatcgaacaccagaaggtggtgaagggcaaccagaagagactggagagcctgcgggagctggccggcaaggaaaacctggaataccctagcgtgaccctgccacctcagcctcacaccaaggagggcgttgatgcctacaacgaagtgatcgcccgggtgcgaatgtgggtgaacctgaacctgtggcagaagctgaagctaagcagagatgatgccaagcctctgctgagactgaagggattcccttcctttcctctggtcgagagacaggccaacgaagtggactggtgggacatggtgtgtaacgtgaagaagctgatcaacgagaaaaaggaggatggcaaggtgttttggcagaatctggctggctacaagagacaggaagccctgagaccatacctgagcagcgaggaagatcggaagaagggaaagaaattcgctcggtaccagctgggcgacctgctgctgcacctggaaaagaagcacggcgaggactggggaaaggtgtacgacgaggcctgggagcggattgacaagaaagtggaaggcctgagcaagcacatcaagctggaagaggaacggagaagcgaggacgcccagagcaaggccgccctgaccgactggctgcgggctaaggccagcttcgtgatcgagggcctgaaggaggccgacaaggacgagttctgcagatgcgagctgaagctgcagaagtggtacggggacctgcggggaaagcccttcgccatcgaagccgagaacagcatcctggacatcagcggcttcagcaagcagtacaactgtgccttcatctggcagaaggacggcgtgaagaagctgaacctgtacctgatcatcaactacttcaagggcggcaagctgcggttcaagaagatcaaacctgaagccttcgaagccaacagattctacaccgtgatcaacaaaaagagcggcgagatcgtgcccatggaggtgaacttcaacttcgacgaccccaacctgatcatcctgcctctggcctttggcaagagacagggcagagaattcatctggaacgacctgctgtccctggaaaccggcagcctgaagctggccaacggaagagtgatcgagaagacactgtacaacagaagaacccggcaggatgagcctgccctgttcgtggccctgaccttcgagcggcgggaggtcctggactcctccaatatcaaaccaatgaacctgatcggcgtggcaagaggcgaaaacatccccgccgtgatcgccctgaccgaccccgagggctgcccactgagccggtttaaggatagcctgggaaacccaacccacatcctgagaatcggcgagagctataaggagaagcagcggaccatccaggccaagaaggaggtggagcagcggagagccggcggctacagccggaagtacgccagcaaagccaagaatctggcagacgatatggtgagaaacaccgctagagatctgctgtactacgccgtgacccaggatgccatgctgatcttcgccaacctgagccggggcttcggccggcagggcaagcggaccttcatggccgagagacagtacacacggatggaggactggctgaccgccaagctggcctacgagggcctgagcaagacctacctgtccaagacactggcccagtacacctccaagacatgcagcaactgtgggtttaccatcaccagcgccgactacgacagggtgctggagaagctgaagaagacagcaacaggctggatgaccacaattaacggcaaggagctgaaggtggagggccagattacctactacaacagatacaagagacagaacgtagtcaaggacctgtccgtcgagctggatagactgagcgaagaatctgtgaacaacgacatctcctcctggacaaagggcagaagcggagaagctctgagcctcctgaagaaaagattctcccatagacccgtgcaggagaagttcgtgtgcctgaactgcggcttcgagacacacgcagccgagcaagccgccctgaacatcgccagatcctggctgttcctgcggagccaggagtacaagaaataccagacaaacaagacaaccggcaacaccgataagagagccttcgtcgagacctggcagtccttttaccggaagaagcttaaggaggtgtggaaacctgccgtgcggtctggcggatctggcggaggctccaccagccccaagaaaaagagaaaagtctaagctgccttctgcggggcttgccttctggccatgcccttcttctctcccttgcacctgtacctcttggtctttgaataaagcctgagtaggaaggctagcaaaaaaaaaaaaaaaaaaaaaaaaaaaaaaaaaaaaaaaaaaaaaaaaaaaaaaaaaaaaaaaaaaaaaaaaaaaaaaaagcccagccggctccccaacctctaccgaggagggcacctctgagtccgccacccccgagagcggccctggcacctccaccgagcccagcgagggcagcgcacccggcagccctgccggcagccccacctccacagaggagggaaccagcaccgagcccagcgaaggcagcgccccaggcaccagcaccgagcctagtgagcaggagattaaacggatcaacaagatcagaagaagacttgtgaaagacagcaacaccaagaaggccggcaagacaggccccatgaaaaccctgctggttagagtgatgacacccgatctgagagagcggctggaaaacctgagaaagaagcctgaaaatatcccccagcccatcagcaatacatctagagccaacctgaataagctgctgaccgattacaccgaaatgaagaaggcgatcctgcatgtgtactgggaagagttccagaaggaccctgtgggcctgatgagccgggtggcccagcctgccagcaagaagatcgatcagaacaagctgaaacctgagatggacgagaagggcaacctgaccaccgccggctttgcctgctctcagtgtggccagcccctgttcgtgtacaagctggagcaggtgtctgagaagggcaaggcttacaccaactacttcggacggtgcaatgtggccgagcacgaaaagctgatcctgctggcccagctgaagcccgagaaggatagcgacgaagccgtgacatatagcctgggaaagtttgggcagagggccctggatttctacagcattcatgtgaccaaggagtccacccaccccgtgaagcccctggcccagatcgccggaaacagatacgcctccggacctgtgggaaaggccctgagcgacgcatgtatgggcacaatcgcctccttcctgtctaagtaccaggacatcatcatcgaacaccagaaggtggtgaagggcaaccagaagagactggagagcctgcgggagctggccggcaaggaaaacctggaataccctagcgtgaccctgccacctcagcctcacaccaaggagggcgttgatgcctacaacgaagtgatcgcccgggtgcgaatgtgggtgaacctgaacctgtggcagaagctgaagctaagcagagatgatgccaagcctctgctgagactgaagggattcccttcctttcctctggtcgagagacaggccaacgaagtggactggtgggacatggtgtgtaacgtgaagaagctgatcaacgagaaaaaggaggatggcaaggtgttttggcagaatctggctggctacaagagacaggaagccctgagaccatacctgagcagcgaggaagatcggaagaagggaaagaaattcgctcggtaccagctgggcgacctgctgctgcacctggaaaagaagcacggcgaggactggggaaaggtgtacgacgaggcctgggagcggattgacaagaaagtggaaggcctgagcaagcacatcaagctggaagaggaacggagaagcgaggacgcccagagcaaggccgccctgaccgactggctgcgggctaaggccagcttcgtgatcgagggcctgaaggaggccgacaaggacgagttctgcagatgcgagctgaagctgcagaagtggtacggggacctgcggggaaagcccttcgccatcgaagccgagaacagcatcctggacatcagcggcttcagcaagcagtacaactgtgccttcatctggcagaaggacggcgtgaagaagctgaacctgtacctgatcatcaactacttcaagggcggcaagctgcggttcaagaagatcaaacctgaagccttcgaagccaacagattctacaccgtgatcaacaaaaagagcggcgagatcgtgcccatggaggtgaacttcaacttcgacgaccccaacctgatcatcctgcctctggcctttggcaagagacagggcagagaattcatctggaacgacctgctgtccctggaaaccggcagcctgaagctggccaacggaagagtgatcgagaagacactgtacaacagaagaacccggcaggatgagcctgccctgttcgtggccctgaccttcgagcggcgggaggtcctggactcctccaatatcaaaccaatgaacctgatcggcgtggcaagaggcgaaaacatccccgccgtgatcgccctgaccgaccccgagggctgcccactgagccggtttaaggatagcctgggaaacccaacccacatcctgagaatcggcgagagctataaggagaagcagcggaccatccaggccaagaaggaggtggagcagcggagagccggcggctacagccggaagtacgccagcaaagccaagaatctggcagacgatatggtgagaaacaccgctagagatctgctgtactacgccgtgacccaggatgccatgctgatcttcgccaacctgagccggggcttcggccggcagggcaagcggaccttcatggccgagagacagtacacacggatggaggactggctgaccgccaagctggcctacgagggcctgagcaagacctacctgtccaagacactggcccagtacacctccaagacatgcagcaactgtgggtttaccatcaccagcgccgactacgacagggtgctggagaagctgaagaagacagcaacaggctggatgaccacaattaacggcaaggagctgaaggtggagggccagattacctactacaacagatacaagagacagaacgtagtcaaggacctgtccgtcgagctggatagactgagcgaagaatctgtgaacaacgacatctcctcctggacaaagggcagaagcggagaagctctgagcctcctgaagaaaagattctcccatagacccgtgcaggagaagttcgtgtgcctgaactgcggcttcgagacacacgcagccgagcaagccgccctgaacatcgccagatcctggctgttcctgcggagccaggagtacaagaaataccagacaaacaagacaaccggcaacaccgataagagagccttcgtcgagacctggcagtccttttaccggaagaagcttaaggaggtgtggaaacctgccgtgcggtctggcggatctggcggaggctccaccagccccaagaaaaagagaaaagtctaagctgccttctgcggggcttgccttctggccatgcccttcttctctcccttgcacctgtacctcttggtctttgaataaagcctgagtaggaaggctagcaaaaaaaaaaaaaaaaaaaaaaaaaaaaaaaaaaaaaaaaaaaaaaaaaaaaaaaaaaaaaaaaaaaaaaaaaaaaaaaa

SEQ ID NO: 9424 - RNA, 8787 nt, synthetic construct
  source 1..8787: mol_type = other RNA
aggaaataagagagaaaagaagagtaagaagaaatataagagccaccatggcccctaagaagaagcgtaaagtgagccggatgaaccacgaccaggagttcgacccccctaaggtgtaccctcccgtccccgccgagaagagaaagcccatccgggtcctgagcctgttcgatggcatcgccaccggtctgctggtgctgaaggacctgggcatccaggtggataggtacattgcctccgaggtgtgcgaggactccatcaccgtgggaatggtgcgtcatcagggcaagatcatgtacgtgggcgacgtgcggagcgtgacacagaagcatatccaggagtggggccctttcgacctggtgatcggcggcagcccttgcaatgacctgagcatcgtgaacccagcccggaagggcctgtacgagggaaccggcagactgttcttcgagttttacagactgctgcacgacgcccggcctaaggaaggcgacgaccggcccttcttttggctgttcgagaatgtggtggccatgggagtcagcgacaagcgggatattagccggttcctggagagcaaccccgtgatgatcgatgccaaggaagtgagcgccgcccaccgggccagatacttctggggcaatctgcctggcatgaacagacccctggccagcaccgtgaacgacaagctggagctgcaggagtgcctggagcacggccggatcgccaagttcagcaaggtgagaaccatcaccacccgaagcaacagcatcaaacaaggcaaggaccagcactttcctgtgttcatgaacgagaaggaggacatcctgtggtgtaccgagatggagagagtgttcgggttcccagtccactacacagatgtcagcaacatgtctagactggccagacagagactgctgggaagaagctggtccgtccctgtgatcagacacctgttcgcccctctgaaggagtacttcgcctgcgtgagcagcggcaacagcaacgccaacagccggggccccagcttctctagcggcctggtgccactgtccctgagagggagccacatgggccccatggagatctacaaaaccgtgagcgcctggaagcggcagcctgtgcgcgtgctgagcctgtttcggaatatcgataaagtcctgaaaagcctgggattcctggagagcggctctggctccggcggtggcaccctgaagtacgtggaggatgtgacaaacgtggtcagacgggatgtggagaagtggggccccttcgatctggtgtacggcagcacccaacccctgggcagctcttgtgaccggtgccctggctggtacatgtttcagttccaccggatcctgcagtacgccctgccgagacaggagtcccagcggccattcttttggattttcatggacaacttgctgctgaccgaggatgaccaggaaactaccactcggttcctgcagaccgaagccgtgaccctgcaggacgtgagaggccgggactaccagaacgccatgcgggtgtggtccaacatccctggactgaaaagcaagcacgcacctctgacccctaaagaagaggagtacctgcaggcccaggtgcggagcagaagcaagctggacgcccctaaggtggatctgctggtgaagaattgcctcctgcccctgagagagtacttcaagtatttcagccagaatagtctgcccctgggaggcagcggcggcggcagcctgggcagcgacctgttcagggacgtggccatcgtgttcagccaggaggagtgggagcagctggcccccacccagagggacctgtacagggacgtgatgctggagacctacagcaacctggtgagcctgggcctggccgtgagcaagcccgacgtgatcagcttcctggagcagggcaaggagccctggaccgtggaggaggtggccgccggcggcctgtgccccgtgctgaagagcaggggcggcccaagcagcggcgcccctcctcccagcggcggcaggcggcccaagcagcggcgcccctcctcccagcggcggcagcccagccggctccccaacctctaccgaggagggcacctctgagtccgccacccccgagagcggccctggcacctccaccgagcccagcgagggcagcgcacccggcagccctgccggcagccccacctccacagaggagggaaccagcaccgagcccagcgaaggcagcgccccaggcaccagcaccgagcctagtgagcaggagattaaacggatcaacaagatcagaagaagacttgtgaaagacagcaacaccaagaaggccggcaagacaggccccatgaaaaccctgctggttagagtgatgacacccgatctgagagagcggctggaaaacctgagaaagaagcctgaaaatatcccccagcccatcagcaatacatctagagccaacctgaataagctgctgaccgattacaccgaaatgaagaaggcgatcctgcatgtgtactgggaagagttccagaaggaccctgtgggcctgatgagccgggtggcccagcctgccagcaagaagatcgatcagaacaagctgaaacctgagatggacgagaagggcaacctgaccaccgccggctttgcctgctctcagtgtggccagcccctgttcgtgtacaagctggagcaggtgtctgagaagggcaaggcttacaccaactacttcggacggtgcaatgtggccgagcacgaaaagctgatcctgctggcccagctgaagcccgagaaggatagcgacgaagccgtgacatatagcctgggaaagtttgggcagagggccctggatttctacagcattcatgtgaccaaggagtccacccaccccgtgaagcccctggcccagatcgccggaaacagatacgcctccggacctgtgggaaaggccctgagcgacgcatgtatgggcacaatcgcctccttcctgtctaagtaccaggacatcatcatcgaacaccagaaggtggtgaagggcaaccagaagagactggagagcctgcgggagctggccggcaaggaaaacctggaataccctagcgtgaccctgccacctcagcctcacaccaaggagggcgttgatgcctacaacgaagtgatcgcccgggtgcgaatgtgggtgaacctgaacctgtggcagaagctgaagctaagcagagatgatgccaagcctctgctgagactgaagggattcccttcctttcctctggtcgagagacaggccaacgaagtggactggtgggacatggtgtgtaacgtgaagaagctgatcaacgagaaaaaggaggatggcaaggtgttttggcagaatctggctggctacaagagacaggaagccctgagaccatacctgagcagcgaggaagatcggaagaagggaaagaaattcgctcggtaccagctgggcgacctgctgctgcacctggaaaagaagcacggcgaggactggggaaaggtgtacgacgaggcctgggagcggattgacaagaaagtggaaggcctgagcaagcacatcaagctggaagaggaacggagaagcgaggacgcccagagcaaggccgccctgaccgactggctgcgggctaaggccagcttcgtgatcgagggcctgaaggaggccgacaaggacgagttctgcagatgcgagctgaagctgcagaagtggtacggggacctgcggggaaagcccttcgccatcgaagccgagaacagcatcctggacatcagcggcttcagcaagcagtacaactgtgccttcatctggcagaaggacggcgtgaagaagctgaacctgtacctgatcatcaactacttcaagggcggcaagctgcggttcaagaagatcaaacctgaagccttcgaagccaacagattctacaccgtgatcaacaaaaagagcggcgagatcgtgcccatggaggtgaacttcaacttcgacgaccccaacctgatcatcctgcctctggcctttggcaagagacagggcagagaattcatctggaacgacctgctgtccctggaaaccggcagcctgaagctggccaacggaagagtgatcgagaagacactgtacaacagaagaacccggcaggatgagcctgccctgttcgtggccctgaccttcgagcggcgggaggtcctggactcctccaatatcaaaccaatgaacctgatcggcgtggcaagaggcgaaaacatccccgccgtgatcgccctgaccgaccccgagggctgcccactgagccggtttaaggatagcctgggaaacccaacccacatcctgagaatcggcgagagctataaggagaagcagcggaccatccaggccaagaaggaggtggagcagcggagagccggcggctacagccggaagtacgccagcaaagccaagaatctggcagacgatatggtgagaaacaccgctagagatctgctgtactacgccgtgacccaggatgccatgctgatcttcgccaacctgagccggggcttcggccggcagggcaagcggaccttcatggccgagagacagtacacacggatggaggactggctgaccgccaagctggcctacgagggcctgagcaagacctacctgtccaagacactggcccagtacacctccaagacatgcagcaactgtgggtttaccatcaccagcgccgactacgacagggtgctggagaagctgaagaagacagcaacaggctggatgaccacaattaacggcaaggagctgaaggtggagggccagattacctactacaacagatacaagagacagaacgtagtcaaggacctgtccgtcgagctggatagactgagcgaagaatctgtgaacaacgacatctcctcctggacaaagggcagaagcggagaagctctgagcctcctgaagaaaagattctcccatagacccgtgcaggagaagttcgtgtgcctgaactgcggcttcgagacacacgcagccgagcaagccgccctgaacatcgccagatcctggctgttcctgcggagccaggagtacaagaaataccagacaaacaagacaaccggcaacaccgataagagagccttcgtcgagacctggcagtccttttaccggaagaagcttaaggaggtgtggaaacctgccgtgcggtctggcggatctggcggaggctccaccagccccaagaaaaagagaaaagtctaagctgccttctgcggggcttgccttctggccatgcccttcttctctcccttgcacctgtacctcttggtctttgaataaagcctgagtaggaaggctagcaaaaaaaaaaaaaaaaaaaaaaaaaaaaaaaaaaaaaaaaaaaaaaaaaaaaaaaaaaaaaaaaaaaaaaaaaaaaaaaagcccagccggctccccaacctctaccgaggagggcacctctgagtccgccacccccgagagcggccctggcacctccaccgagcccagcgagggcagcgcacccggcagccctgccggcagccccacctccacagaggagggaaccagcaccgagcccagcgaaggcagcgccccaggcaccagcaccgagcctagtgagcaggagattaaacggatcaacaagatcagaagaagacttgtgaaagacagcaacaccaagaaggccggcaagacaggccccatgaaaaccctgctggttagagtgatgacacccgatctgagagagcggctggaaaacctgagaaagaagcctgaaaatatcccccagcccatcagcaatacatctagagccaacctgaataagctgctgaccgattacaccgaaatgaagaaggcgatcctgcatgtgtactgggaagagttccagaaggaccctgtgggcctgatgagccgggtggcccagcctgccagcaagaagatcgatcagaacaagctgaaacctgagatggacgagaagggcaacctgaccaccgccggctttgcctgctctcagtgtggccagcccctgttcgtgtacaagctggagcaggtgtctgagaagggcaaggcttacaccaactacttcggacggtgcaatgtggccgagcacgaaaagctgatcctgctggcccagctgaagcccgagaaggatagcgacgaagccgtgacatatagcctgggaaagtttgggcagagggccctggatttctacagcattcatgtgaccaaggagtccacccaccccgtgaagcccctggcccagatcgccggaaacagatacgcctccggacctgtgggaaaggccctgagcgacgcatgtatgggcacaatcgcctccttcctgtctaagtaccaggacatcatcatcgaacaccagaaggtggtgaagggcaaccagaagagactggagagcctgcgggagctggccggcaaggaaaacctggaataccctagcgtgaccctgccacctcagcctcacaccaaggagggcgttgatgcctacaacgaagtgatcgcccgggtgcgaatgtgggtgaacctgaacctgtggcagaagctgaagctaagcagagatgatgccaagcctctgctgagactgaagggattcccttcctttcctctggtcgagagacaggccaacgaagtggactggtgggacatggtgtgtaacgtgaagaagctgatcaacgagaaaaaggaggatggcaaggtgttttggcagaatctggctggctacaagagacaggaagccctgagaccatacctgagcagcgaggaagatcggaagaagggaaagaaattcgctcggtaccagctgggcgacctgctgctgcacctggaaaagaagcacggcgaggactggggaaaggtgtacgacgaggcctgggagcggattgacaagaaagtggaaggcctgagcaagcacatcaagctggaagaggaacggagaagcgaggacgcccagagcaaggccgccctgaccgactggctgcgggctaaggccagcttcgtgatcgagggcctgaaggaggccgacaaggacgagttctgcagatgcgagctgaagctgcagaagtggtacggggacctgcggggaaagcccttcgccatcgaagccgagaacagcatcctggacatcagcggcttcagcaagcagtacaactgtgccttcatctggcagaaggacggcgtgaagaagctgaacctgtacctgatcatcaactacttcaagggcggcaagctgcggttcaagaagatcaaacctgaagccttcgaagccaacagattctacaccgtgatcaacaaaaagagcggcgagatcgtgcccatggaggtgaacttcaacttcgacgaccccaacctgatcatcctgcctctggcctttggcaagagacagggcagagaattcatctggaacgacctgctgtccctggaaaccggcagcctgaagctggccaacggaagagtgatcgagaagacactgtacaacagaagaacccggcaggatgagcctgccctgttcgtggccctgaccttcgagcggcgggaggtcctggactcctccaatatcaaaccaatgaacctgatcggcgtggcaagaggcgaaaacatccccgccgtgatcgccctgaccgaccccgagggctgcccactgagccggtttaaggatagcctgggaaacccaacccacatcctgagaatcggcgagagctataaggagaagcagcggaccatccaggccaagaaggaggtggagcagcggagagccggcggctacagccggaagtacgccagcaaagccaagaatctggcagacgatatggtgagaaacaccgctagagatctgctgtactacgccgtgacccaggatgccatgctgatcttcgccaacctgagccggggcttcggccggcagggcaagcggaccttcatggccgagagacagtacacacggatggaggactggctgaccgccaagctggcctacgagggcctgagcaagacctacctgtccaagacactggcccagtacacctccaagacatgcagcaactgtgggtttaccatcaccagcgccgactacgacagggtgctggagaagctgaagaagacagcaacaggctggatgaccacaattaacggcaaggagctgaaggtggagggccagattacctactacaacagatacaagagacagaacgtagtcaaggacctgtccgtcgagctggatagactgagcgaagaatctgtgaacaacgacatctcctcctggacaaagggcagaagcggagaagctctgagcctcctgaagaaaagattctcccatagacccgtgcaggagaagttcgtgtgcctgaactgcggcttcgagacacacgcagccgagcaagccgccctgaacatcgccagatcctggctgttcctgcggagccaggagtacaagaaataccagacaaacaagacaaccggcaacaccgataagagagccttcgtcgagacctggcagtccttttaccggaagaagcttaaggaggtgtggaaacctgccgtgcggtctggcggatctggcggaggctccaccagccccaagaaaaagagaaaagtctaagctgccttctgcggggcttgccttctggccatgcccttcttctctcccttgcacctgtacctcttggtctttgaataaagcctgagtaggaaggctagcaaaaaaaaaaaaaaaaaaaaaaaaaaaaaaaaaaaaaaaaaaaaaaaaaaaaaaaaaaaaaaaaaaaaaaaaaaaaaaaa

SEQ ID NO: 9425 - RNA, 8787 nt, synthetic construct
  source 1..8787: mol_type = other RNA
aggaaataagagagaaaagaagagtaagaagaaatataagagccaccatggcccctaagaagaagcgtaaagtgagccggatgaaccacgaccaggagttcgacccccctaaggtgtaccctcccgtccccgccgagaagagaaagcccatccgggtcctgagcctgttcgatggcatcgccaccggtctgctggtgctgaaggacctgggcatccaggtggataggtacattgcctccgaggtgtgcgaggactccatcaccgtgggaatggtgcgtcatcagggcaagatcatgtacgtgggcgacgtgcggagcgtgacacagaagcatatccaggagtggggccctttcgacctggtgatcggcggcagcccttgcaatgacctgagcatcgtgaacccagcccggaagggcctgtacgagggaaccggcagactgttcttcgagttttacagactgctgcacgacgcccggcctaaggaaggcgacgaccggcccttcttttggctgttcgagaatgtggtggccatgggagtcagcgacaagcgggatattagccggttcctggagagcaaccccgtgatgatcgatgccaaggaagtgagcgccgcccaccgggccagatacttctggggcaatctgcctggcatgaacagacccctggccagcaccgtgaacgacaagctggagctgcaggagtgcctggagcacggccggatcgccaagttcagcaaggtgagaaccatcaccacccgaagcaacagcatcaaacaaggcaaggaccagcactttcctgtgttcatgaacgagaaggaggacatcctgtggtgtaccgagatggagagagtgttcgggttcccagtccactacacagatgtcagcaacatgtctagactggccagacagagactgctgggaagaagctggtccgtccctgtgatcagacacctgttcgcccctctgaaggagtacttcgcctgcgtgagcagcggcaacagcaacgccaacagccggggccccagcttctctagcggcctggtgccactgtccctgagagggagccacatgggccccatggagatctacaaaaccgtgagcgcctggaagcggcagcctgtgcgcgtgctgagcctgtttcggaatatcgataaagtcctgaaaagcctgggattcctggagagcggctctggctccggcggtggcaccctgaagtacgtggaggatgtgacaaacgtggtcagacgggatgtggagaagtggggccccttcgatctggtgtacggcagcacccaacccctgggcagctcttgtgaccggtgccctggctggtacatgtttcagttccaccggatcctgcagtacgccctgccgagacaggagtcccagcggccattcttttggattttcatggacaacttgctgctgaccgaggatgaccaggaaactaccactcggttcctgcagaccgaagccgtgaccctgcaggacgtgagaggccgggactaccagaacgccatgcgggtgtggtccaacatccctggactgaaaagcaagcacgcacctctgacccctaaagaagaggagtacctgcaggcccaggtgcggagcagaagcaagctggacgcccctaaggtggatctgctggtgaagaattgcctcctgcccctgagagagtacttcaagtatttcagccagaatagtctgcccctgggaggcagcggcggcggcgccagcgtgaccgtgaccttcgacgacgtggccctgtacttcagcgagcaggagtgggagatcctggagaagtggcagaagcagatgtacaagcaggagatgaagaccaactaccagaccctggacagcctgggctacgccttcagcaagcccgacctgatcacctggatggagcagggcaggatgctgttcatcagcgagcagggctgcctggacaagaccaggaggaccaccagcccccccggcggcccaagcagcggcgcccctcctcccagcggcggcaggcggcccaagcagcggcgcccctcctcccagcggcggcagcccagccggctccccaacctctaccgaggagggcacctctgagtccgccacccccgagagcggccctggcacctccaccgagcccagcgagggcagcgcacccggcagccctgccggcagccccacctccacagaggagggaaccagcaccgagcccagcgaaggcagcgccccaggcaccagcaccgagcctagtgagcaggagattaaacggatcaacaagatcagaagaagacttgtgaaagacagcaacaccaagaaggccggcaagacaggccccatgaaaaccctgctggttagagtgatgacacccgatctgagagagcggctggaaaacctgagaaagaagcctgaaaatatcccccagcccatcagcaatacatctagagccaacctgaataagctgctgaccgattacaccgaaatgaagaaggcgatcctgcatgtgtactgggaagagttccagaaggaccctgtgggcctgatgagccgggtggcccagcctgccagcaagaagatcgatcagaacaagctgaaacctgagatggacgagaagggcaacctgaccaccgccggctttgcctgctctcagtgtggccagcccctgttcgtgtacaagctggagcaggtgtctgagaagggcaaggcttacaccaactacttcggacggtgcaatgtggccgagcacgaaaagctgatcctgctggcccagctgaagcccgagaaggatagcgacgaagccgtgacatatagcctgggaaagtttgggcagagggccctggatttctacagcattcatgtgaccaaggagtccacccaccccgtgaagcccctggcccagatcgccggaaacagatacgcctccggacctgtgggaaaggccctgagcgacgcatgtatgggcacaatcgcctccttcctgtctaagtaccaggacatcatcatcgaacaccagaaggtggtgaagggcaaccagaagagactggagagcctgcgggagctggccggcaaggaaaacctggaataccctagcgtgaccctgccacctcagcctcacaccaaggagggcgttgatgcctacaacgaagtgatcgcccgggtgcgaatgtgggtgaacctgaacctgtggcagaagctgaagctaagcagagatgatgccaagcctctgctgagactgaagggattcccttcctttcctctggtcgagagacaggccaacgaagtggactggtgggacatggtgtgtaacgtgaagaagctgatcaacgagaaaaaggaggatggcaaggtgttttggcagaatctggctggctacaagagacaggaagccctgagaccatacctgagcagcgaggaagatcggaagaagggaaagaaattcgctcggtaccagctgggcgacctgctgctgcacctggaaaagaagcacggcgaggactggggaaaggtgtacgacgaggcctgggagcggattgacaagaaagtggaaggcctgagcaagcacatcaagctggaagaggaacggagaagcgaggacgcccagagcaaggccgccctgaccgactggctgcgggctaaggccagcttcgtgatcgagggcctgaaggaggccgacaaggacgagttctgcagatgcgagctgaagctgcagaagtggtacggggacctgcggggaaagcccttcgccatcgaagccgagaacagcatcctggacatcagcggcttcagcaagcagtacaactgtgccttcatctggcagaaggacggcgtgaagaagctgaacctgtacctgatcatcaactacttcaagggcggcaagctgcggttcaagaagatcaaacctgaagccttcgaagccaacagattctacaccgtgatcaacaaaaagagcggcgagatcgtgcccatggaggtgaacttcaacttcgacgaccccaacctgatcatcctgcctctggcctttggcaagagacagggcagagaattcatctggaacgacctgctgtccctggaaaccggcagcctgaagctggccaacggaagagtgatcgagaagacactgtacaacagaagaacccggcaggatgagcctgccctgttcgtggccctgaccttcgagcggcgggaggtcctggactcctccaatatcaaaccaatgaacctgatcggcgtggcaagaggcgaaaacatccccgccgtgatcgccctgaccgaccccgagggctgcccactgagccggtttaaggatagcctgggaaacccaacccacatcctgagaatcggcgagagctataaggagaagcagcggaccatccaggccaagaaggaggtggagcagcggagagccggcggctacagccggaagtacgccagcaaagccaagaatctggcagacgatatggtgagaaacaccgctagagatctgctgtactacgccgtgacccaggatgccatgctgatcttcgccaacctgagccggggcttcggccggcagggcaagcggaccttcatggccgagagacagtacacacggatggaggactggctgaccgccaagctggcctacgagggcctgagcaagacctacctgtccaagacactggcccagtacacctccaagacatgcagcaactgtgggtttaccatcaccagcgccgactacgacagggtgctggagaagctgaagaagacagcaacaggctggatgaccacaattaacggcaaggagctgaaggtggagggccagattacctactacaacagatacaagagacagaacgtagtcaaggacctgtccgtcgagctggatagactgagcgaagaatctgtgaacaacgacatctcctcctggacaaagggcagaagcggagaagctctgagcctcctgaagaaaagattctcccatagacccgtgcaggagaagttcgtgtgcctgaactgcggcttcgagacacacgcagccgagcaagccgccctgaacatcgccagatcctggctgttcctgcggagccaggagtacaagaaataccagacaaacaagacaaccggcaacaccgataagagagccttcgtcgagacctggcagtccttttaccggaagaagcttaaggaggtgtggaaacctgccgtgcggtctggcggatctggcggaggctccaccagccccaagaaaaagagaaaagtctaagctgccttctgcggggcttgccttctggccatgcccttcttctctcccttgcacctgtacctcttggtctttgaataaagcctgagtaggaaggctagcaaaaaaaaaaaaaaaaaaaaaaaaaaaaaaaaaaaaaaaaaaaaaaaaaaaaaaaaaaaaaaaaaaaaaaaaaaaaaaaagcccagccggctccccaacctctaccgaggagggcacctctgagtccgccacccccgagagcggccctggcacctccaccgagcccagcgagggcagcgcacccggcagccctgccggcagccccacctccacagaggagggaaccagcaccgagcccagcgaaggcagcgccccaggcaccagcaccgagcctagtgagcaggagattaaacggatcaacaagatcagaagaagacttgtgaaagacagcaacaccaagaaggccggcaagacaggccccatgaaaaccctgctggttagagtgatgacacccgatctgagagagcggctggaaaacctgagaaagaagcctgaaaatatcccccagcccatcagcaatacatctagagccaacctgaataagctgctgaccgattacaccgaaatgaagaaggcgatcctgcatgtgtactgggaagagttccagaaggaccctgtgggcctgatgagccgggtggcccagcctgccagcaagaagatcgatcagaacaagctgaaacctgagatggacgagaagggcaacctgaccaccgccggctttgcctgctctcagtgtggccagcccctgttcgtgtacaagctggagcaggtgtctgagaagggcaaggcttacaccaactacttcggacggtgcaatgtggccgagcacgaaaagctgatcctgctggcccagctgaagcccgagaaggatagcgacgaagccgtgacatatagcctgggaaagtttgggcagagggccctggatttctacagcattcatgtgaccaaggagtccacccaccccgtgaagcccctggcccagatcgccggaaacagatacgcctccggacctgtgggaaaggccctgagcgacgcatgtatgggcacaatcgcctccttcctgtctaagtaccaggacatcatcatcgaacaccagaaggtggtgaagggcaaccagaagagactggagagcctgcgggagctggccggcaaggaaaacctggaataccctagcgtgaccctgccacctcagcctcacaccaaggagggcgttgatgcctacaacgaagtgatcgcccgggtgcgaatgtgggtgaacctgaacctgtggcagaagctgaagctaagcagagatgatgccaagcctctgctgagactgaagggattcccttcctttcctctggtcgagagacaggccaacgaagtggactggtgggacatggtgtgtaacgtgaagaagctgatcaacgagaaaaaggaggatggcaaggtgttttggcagaatctggctggctacaagagacaggaagccctgagaccatacctgagcagcgaggaagatcggaagaagggaaagaaattcgctcggtaccagctgggcgacctgctgctgcacctggaaaagaagcacggcgaggactggggaaaggtgtacgacgaggcctgggagcggattgacaagaaagtggaaggcctgagcaagcacatcaagctggaagaggaacggagaagcgaggacgcccagagcaaggccgccctgaccgactggctgcgggctaaggccagcttcgtgatcgagggcctgaaggaggccgacaaggacgagttctgcagatgcgagctgaagctgcagaagtggtacggggacctgcggggaaagcccttcgccatcgaagccgagaacagcatcctggacatcagcggcttcagcaagcagtacaactgtgccttcatctggcagaaggacggcgtgaagaagctgaacctgtacctgatcatcaactacttcaagggcggcaagctgcggttcaagaagatcaaacctgaagccttcgaagccaacagattctacaccgtgatcaacaaaaagagcggcgagatcgtgcccatggaggtgaacttcaacttcgacgaccccaacctgatcatcctgcctctggcctttggcaagagacagggcagagaattcatctggaacgacctgctgtccctggaaaccggcagcctgaagctggccaacggaagagtgatcgagaagacactgtacaacagaagaacccggcaggatgagcctgccctgttcgtggccctgaccttcgagcggcgggaggtcctggactcctccaatatcaaaccaatgaacctgatcggcgtggcaagaggcgaaaacatccccgccgtgatcgccctgaccgaccccgagggctgcccactgagccggtttaaggatagcctgggaaacccaacccacatcctgagaatcggcgagagctataaggagaagcagcggaccatccaggccaagaaggaggtggagcagcggagagccggcggctacagccggaagtacgccagcaaagccaagaatctggcagacgatatggtgagaaacaccgctagagatctgctgtactacgccgtgacccaggatgccatgctgatcttcgccaacctgagccggggcttcggccggcagggcaagcggaccttcatggccgagagacagtacacacggatggaggactggctgaccgccaagctggcctacgagggcctgagcaagacctacctgtccaagacactggcccagtacacctccaagacatgcagcaactgtgggtttaccatcaccagcgccgactacgacagggtgctggagaagctgaagaagacagcaacaggctggatgaccacaattaacggcaaggagctgaaggtggagggccagattacctactacaacagatacaagagacagaacgtagtcaaggacctgtccgtcgagctggatagactgagcgaagaatctgtgaacaacgacatctcctcctggacaaagggcagaagcggagaagctctgagcctcctgaagaaaagattctcccatagacccgtgcaggagaagttcgtgtgcctgaactgcggcttcgagacacacgcagccgagcaagccgccctgaacatcgccagatcctggctgttcctgcggagccaggagtacaagaaataccagacaaacaagacaaccggcaacaccgataagagagccttcgtcgagacctggcagtccttttaccggaagaagcttaaggaggtgtggaaacctgccgtgcggtctggcggatctggcggaggctccaccagccccaagaaaaagagaaaagtctaagctgccttctgcggggcttgccttctggccatgcccttcttctctcccttgcacctgtacctcttggtctttgaataaagcctgagtaggaaggctagcaaaaaaaaaaaaaaaaaaaaaaaaaaaaaaaaaaaaaaaaaaaaaaaaaaaaaaaaaaaaaaaaaaaaaaaaaaaaaaaa

SEQ ID NO: 9426 - RNA, 8787 nt, synthetic construct
  source 1..8787: mol_type = other RNA
aggaaataagagagaaaagaagagtaagaagaaatataagagccaccatggcccctaagaagaagcgtaaagtgagccggatgaaccacgaccaggagttcgacccccctaaggtgtaccctcccgtccccgccgagaagagaaagcccatccgggtcctgagcctgttcgatggcatcgccaccggtctgctggtgctgaaggacctgggcatccaggtggataggtacattgcctccgaggtgtgcgaggactccatcaccgtgggaatggtgcgtcatcagggcaagatcatgtacgtgggcgacgtgcggagcgtgacacagaagcatatccaggagtggggccctttcgacctggtgatcggcggcagcccttgcaatgacctgagcatcgtgaacccagcccggaagggcctgtacgagggaaccggcagactgttcttcgagttttacagactgctgcacgacgcccggcctaaggaaggcgacgaccggcccttcttttggctgttcgagaatgtggtggccatgggagtcagcgacaagcgggatattagccggttcctggagagcaaccccgtgatgatcgatgccaaggaagtgagcgccgcccaccgggccagatacttctggggcaatctgcctggcatgaacagacccctggccagcaccgtgaacgacaagctggagctgcaggagtgcctggagcacggccggatcgccaagttcagcaaggtgagaaccatcaccacccgaagcaacagcatcaaacaaggcaaggaccagcactttcctgtgttcatgaacgagaaggaggacatcctgtggtgtaccgagatggagagagtgttcgggttcccagtccactacacagatgtcagcaacatgtctagactggccagacagagactgctgggaagaagctggtccgtccctgtgatcagacacctgttcgcccctctgaaggagtacttcgcctgcgtgagcagcggcaacagcaacgccaacagccggggccccagcttctctagcggcctggtgccactgtccctgagagggagccacatgggccccatggagatctacaaaaccgtgagcgcctggaagcggcagcctgtgcgcgtgctgagcctgtttcggaatatcgataaagtcctgaaaagcctgggattcctggagagcggctctggctccggcggtggcaccctgaagtacgtggaggatgtgacaaacgtggtcagacgggatgtggagaagtggggccccttcgatctggtgtacggcagcacccaacccctgggcagctcttgtgaccggtgccctggctggtacatgtttcagttccaccggatcctgcagtacgccctgccgagacaggagtcccagcggccattcttttggattttcatggacaacttgctgctgaccgaggatgaccaggaaactaccactcggttcctgcagaccgaagccgtgaccctgcaggacgtgagaggccgggactaccagaacgccatgcgggtgtggtccaacatccctggactgaaaagcaagcacgcacctctgacccctaaagaagaggagtacctgcaggcccaggtgcggagcagaagcaagctggacgcccctaaggtggatctgctggtgaagaattgcctcctgcccctgagagagtacttcaagtatttcagccagaatagtctgcccctgggaggcagcggcggcggccagccccaggaggccgtgaccttcaaggacgtggaggtgaccttcagccaggacgagtggggctggctggacgccagccagaggaacctgtacagggacgtgatgctggagaactacggcaacgtgaccagcctggtgggccccttcaccaagcccgccctgatcagctggctggaggccagggagccctggggcctgaacgtgcagggcgcccaccccaagaggagccccagcgccgcccccggcggcccaagcagcggcgcccctcctcccagcggcggcaggcggcccaagcagcggcgcccctcctcccagcggcggcagcccagccggctccccaacctctaccgaggagggcacctctgagtccgccacccccgagagcggccctggcacctccaccgagcccagcgagggcagcgcacccggcagccctgccggcagccccacctccacagaggagggaaccagcaccgagcccagcgaaggcagcgccccaggcaccagcaccgagcctagtgagcaggagattaaacggatcaacaagatcagaagaagacttgtgaaagacagcaacaccaagaaggccggcaagacaggccccatgaaaaccctgctggttagagtgatgacacccgatctgagagagcggctggaaaacctgagaaagaagcctgaaaatatcccccagcccatcagcaatacatctagagccaacctgaataagctgctgaccgattacaccgaaatgaagaaggcgatcctgcatgtgtactgggaagagttccagaaggaccctgtgggcctgatgagccgggtggcccagcctgccagcaagaagatcgatcagaacaagctgaaacctgagatggacgagaagggcaacctgaccaccgccggctttgcctgctctcagtgtggccagcccctgttcgtgtacaagctggagcaggtgtctgagaagggcaaggcttacaccaactacttcggacggtgcaatgtggccgagcacgaaaagctgatcctgctggcccagctgaagcccgagaaggatagcgacgaagccgtgacatatagcctgggaaagtttgggcagagggccctggatttctacagcattcatgtgaccaaggagtccacccaccccgtgaagcccctggcccagatcgccggaaacagatacgcctccggacctgtgggaaaggccctgagcgacgcatgtatgggcacaatcgcctccttcctgtctaagtaccaggacatcatcatcgaacaccagaaggtggtgaagggcaaccagaagagactggagagcctgcgggagctggccggcaaggaaaacctggaataccctagcgtgaccctgccacctcagcctcacaccaaggagggcgttgatgcctacaacgaagtgatcgcccgggtgcgaatgtgggtgaacctgaacctgtggcagaagctgaagctaagcagagatgatgccaagcctctgctgagactgaagggattcccttcctttcctctggtcgagagacaggccaacgaagtggactggtgggacatggtgtgtaacgtgaagaagctgatcaacgagaaaaaggaggatggcaaggtgttttggcagaatctggctggctacaagagacaggaagccctgagaccatacctgagcagcgaggaagatcggaagaagggaaagaaattcgctcggtaccagctgggcgacctgctgctgcacctggaaaagaagcacggcgaggactggggaaaggtgtacgacgaggcctgggagcggattgacaagaaagtggaaggcctgagcaagcacatcaagctggaagaggaacggagaagcgaggacgcccagagcaaggccgccctgaccgactggctgcgggctaaggccagcttcgtgatcgagggcctgaaggaggccgacaaggacgagttctgcagatgcgagctgaagctgcagaagtggtacggggacctgcggggaaagcccttcgccatcgaagccgagaacagcatcctggacatcagcggcttcagcaagcagtacaactgtgccttcatctggcagaaggacggcgtgaagaagctgaacctgtacctgatcatcaactacttcaagggcggcaagctgcggttcaagaagatcaaacctgaagccttcgaagccaacagattctacaccgtgatcaacaaaaagagcggcgagatcgtgcccatggaggtgaacttcaacttcgacgaccccaacctgatcatcctgcctctggcctttggcaagagacagggcagagaattcatctggaacgacctgctgtccctggaaaccggcagcctgaagctggccaacggaagagtgatcgagaagacactgtacaacagaagaacccggcaggatgagcctgccctgttcgtggccctgaccttcgagcggcgggaggtcctggactcctccaatatcaaaccaatgaacctgatcggcgtggcaagaggcgaaaacatccccgccgtgatcgccctgaccgaccccgagggctgcccactgagccggtttaaggatagcctgggaaacccaacccacatcctgagaatcggcgagagctataaggagaagcagcggaccatccaggccaagaaggaggtggagcagcggagagccggcggctacagccggaagtacgccagcaaagccaagaatctggcagacgatatggtgagaaacaccgctagagatctgctgtactacgccgtgacccaggatgccatgctgatcttcgccaacctgagccggggcttcggccggcagggcaagcggaccttcatggccgagagacagtacacacggatggaggactggctgaccgccaagctggcctacgagggcctgagcaagacctacctgtccaagacactggcccagtacacctccaagacatgcagcaactgtgggtttaccatcaccagcgccgactacgacagggtgctggagaagctgaagaagacagcaacaggctggatgaccacaattaacggcaaggagctgaaggtggagggccagattacctactacaacagatacaagagacagaacgtagtcaaggacctgtccgtcgagctggatagactgagcgaagaatctgtgaacaacgacatctcctcctggacaaagggcagaagcggagaagctctgagcctcctgaagaaaagattctcccatagacccgtgcaggagaagttcgtgtgcctgaactgcggcttcgagacacacgcagccgagcaagccgccctgaacatcgccagatcctggctgttcctgcggagccaggagtacaagaaataccagacaaacaagacaaccggcaacaccgataagagagccttcgtcgagacctggcagtccttttaccggaagaagcttaaggaggtgtggaaacctgccgtgcggtctggcggatctggcggaggctccaccagccccaagaaaaagagaaaagtctaagctgccttctgcggggcttgccttctggccatgcccttcttctctcccttgcacctgtacctcttggtctttgaataaagcctgagtaggaaggctagcaaaaaaaaaaaaaaaaaaaaaaaaaaaaaaaaaaaaaaaaaaaaaaaaaaaaaaaaaaaaaaaaaaaaaaaaaaaaaaaagcccagccggctccccaacctctaccgaggagggcacctctgagtccgccacccccgagagcggccctggcacctccaccgagcccagcgagggcagcgcacccggcagccctgccggcagccccacctccacagaggagggaaccagcaccgagcccagcgaaggcagcgccccaggcaccagcaccgagcctagtgagcaggagattaaacggatcaacaagatcagaagaagacttgtgaaagacagcaacaccaagaaggccggcaagacaggccccatgaaaaccctgctggttagagtgatgacacccgatctgagagagcggctggaaaacctgagaaagaagcctgaaaatatcccccagcccatcagcaatacatctagagccaacctgaataagctgctgaccgattacaccgaaatgaagaaggcgatcctgcatgtgtactgggaagagttccagaaggaccctgtgggcctgatgagccgggtggcccagcctgccagcaagaagatcgatcagaacaagctgaaacctgagatggacgagaagggcaacctgaccaccgccggctttgcctgctctcagtgtggccagcccctgttcgtgtacaagctggagcaggtgtctgagaagggcaaggcttacaccaactacttcggacggtgcaatgtggccgagcacgaaaagctgatcctgctggcccagctgaagcccgagaaggatagcgacgaagccgtgacatatagcctgggaaagtttgggcagagggccctggatttctacagcattcatgtgaccaaggagtccacccaccccgtgaagcccctggcccagatcgccggaaacagatacgcctccggacctgtgggaaaggccctgagcgacgcatgtatgggcacaatcgcctccttcctgtctaagtaccaggacatcatcatcgaacaccagaaggtggtgaagggcaaccagaagagactggagagcctgcgggagctggccggcaaggaaaacctggaataccctagcgtgaccctgccacctcagcctcacaccaaggagggcgttgatgcctacaacgaagtgatcgcccgggtgcgaatgtgggtgaacctgaacctgtggcagaagctgaagctaagcagagatgatgccaagcctctgctgagactgaagggattcccttcctttcctctggtcgagagacaggccaacgaagtggactggtgggacatggtgtgtaacgtgaagaagctgatcaacgagaaaaaggaggatggcaaggtgttttggcagaatctggctggctacaagagacaggaagccctgagaccatacctgagcagcgaggaagatcggaagaagggaaagaaattcgctcggtaccagctgggcgacctgctgctgcacctggaaaagaagcacggcgaggactggggaaaggtgtacgacgaggcctgggagcggattgacaagaaagtggaaggcctgagcaagcacatcaagctggaagaggaacggagaagcgaggacgcccagagcaaggccgccctgaccgactggctgcgggctaaggccagcttcgtgatcgagggcctgaaggaggccgacaaggacgagttctgcagatgcgagctgaagctgcagaagtggtacggggacctgcggggaaagcccttcgccatcgaagccgagaacagcatcctggacatcagcggcttcagcaagcagtacaactgtgccttcatctggcagaaggacggcgtgaagaagctgaacctgtacctgatcatcaactacttcaagggcggcaagctgcggttcaagaagatcaaacctgaagccttcgaagccaacagattctacaccgtgatcaacaaaaagagcggcgagatcgtgcccatggaggtgaacttcaacttcgacgaccccaacctgatcatcctgcctctggcctttggcaagagacagggcagagaattcatctggaacgacctgctgtccctggaaaccggcagcctgaagctggccaacggaagagtgatcgagaagacactgtacaacagaagaacccggcaggatgagcctgccctgttcgtggccctgaccttcgagcggcgggaggtcctggactcctccaatatcaaaccaatgaacctgatcggcgtggcaagaggcgaaaacatccccgccgtgatcgccctgaccgaccccgagggctgcccactgagccggtttaaggatagcctgggaaacccaacccacatcctgagaatcggcgagagctataaggagaagcagcggaccatccaggccaagaaggaggtggagcagcggagagccggcggctacagccggaagtacgccagcaaagccaagaatctggcagacgatatggtgagaaacaccgctagagatctgctgtactacgccgtgacccaggatgccatgctgatcttcgccaacctgagccggggcttcggccggcagggcaagcggaccttcatggccgagagacagtacacacggatggaggactggctgaccgccaagctggcctacgagggcctgagcaagacctacctgtccaagacactggcccagtacacctccaagacatgcagcaactgtgggtttaccatcaccagcgccgactacgacagggtgctggagaagctgaagaagacagcaacaggctggatgaccacaattaacggcaaggagctgaaggtggagggccagattacctactacaacagatacaagagacagaacgtagtcaaggacctgtccgtcgagctggatagactgagcgaagaatctgtgaacaacgacatctcctcctggacaaagggcagaagcggagaagctctgagcctcctgaagaaaagattctcccatagacccgtgcaggagaagttcgtgtgcctgaactgcggcttcgagacacacgcagccgagcaagccgccctgaacatcgccagatcctggctgttcctgcggagccaggagtacaagaaataccagacaaacaagacaaccggcaacaccgataagagagccttcgtcgagacctggcagtccttttaccggaagaagcttaaggaggtgtggaaacctgccgtgcggtctggcggatctggcggaggctccaccagccccaagaaaaagagaaaagtctaagctgccttctgcggggcttgccttctggccatgcccttcttctctcccttgcacctgtacctcttggtctttgaataaagcctgagtaggaaggctagcaaaaaaaaaaaaaaaaaaaaaaaaaaaaaaaaaaaaaaaaaaaaaaaaaaaaaaaaaaaaaaaaaaaaaaaaaaaaaaaa

SEQ ID NO: 9427 - RNA, 8787 nt, synthetic construct
  source 1..8787: mol_type = other RNA
aggaaataagagagaaaagaagagtaagaagaaatataagagccaccatggcccctaagaagaagcgtaaagtgagccggatgaaccacgaccaggagttcgacccccctaaggtgtaccctcccgtccccgccgagaagagaaagcccatccgggtcctgagcctgttcgatggcatcgccaccggtctgctggtgctgaaggacctgggcatccaggtggataggtacattgcctccgaggtgtgcgaggactccatcaccgtgggaatggtgcgtcatcagggcaagatcatgtacgtgggcgacgtgcggagcgtgacacagaagcatatccaggagtggggccctttcgacctggtgatcggcggcagcccttgcaatgacctgagcatcgtgaacccagcccggaagggcctgtacgagggaaccggcagactgttcttcgagttttacagactgctgcacgacgcccggcctaaggaaggcgacgaccggcccttcttttggctgttcgagaatgtggtggccatgggagtcagcgacaagcgggatattagccggttcctggagagcaaccccgtgatgatcgatgccaaggaagtgagcgccgcccaccgggccagatacttctggggcaatctgcctggcatgaacagacccctggccagcaccgtgaacgacaagctggagctgcaggagtgcctggagcacggccggatcgccaagttcagcaaggtgagaaccatcaccacccgaagcaacagcatcaaacaaggcaaggaccagcactttcctgtgttcatgaacgagaaggaggacatcctgtggtgtaccgagatggagagagtgttcgggttcccagtccactacacagatgtcagcaacatgtctagactggccagacagagactgctgggaagaagctggtccgtccctgtgatcagacacctgttcgcccctctgaaggagtacttcgcctgcgtgagcagcggcaacagcaacgccaacagccggggccccagcttctctagcggcctggtgccactgtccctgagagggagccacatgggccccatggagatctacaaaaccgtgagcgcctggaagcggcagcctgtgcgcgtgctgagcctgtttcggaatatcgataaagtcctgaaaagcctgggattcctggagagcggctctggctccggcggtggcaccctgaagtacgtggaggatgtgacaaacgtggtcagacgggatgtggagaagtggggccccttcgatctggtgtacggcagcacccaacccctgggcagctcttgtgaccggtgccctggctggtacatgtttcagttccaccggatcctgcagtacgccctgccgagacaggagtcccagcggccattcttttggattttcatggacaacttgctgctgaccgaggatgaccaggaaactaccactcggttcctgcagaccgaagccgtgaccctgcaggacgtgagaggccgggactaccagaacgccatgcgggtgtggtccaacatccctggactgaaaagcaagcacgcacctctgacccctaaagaagaggagtacctgcaggcccaggtgcggagcagaagcaagctggacgcccctaaggtggatctgctggtgaagaattgcctcctgcccctgagagagtacttcaagtatttcagccagaatagtctgcccctgggaggcagcggcggcggccaggccgaggtgaccttcgaggacgtggccgtgttcctgagccaggaggagtggggcctgctgggccccgcccagaagggcctgtacagggaggtgatgctggagacctacaggaacctggtgagcctgggcgccggcctggccggccccaagcccgaggtgatcgcccagctggagcagggcgacgagctgtgggtgctggacatgcacggcgccgagcagcccagcgtggacggcagcgccggcggcccaagcagcggcgcccctcctcccagcggcggcaggcggcccaagcagcggcgcccctcctcccagcggcggcagcccagccggctccccaacctctaccgaggagggcacctctgagtccgccacccccgagagcggccctggcacctccaccgagcccagcgagggcagcgcacccggcagccctgccggcagccccacctccacagaggagggaaccagcaccgagcccagcgaaggcagcgccccaggcaccagcaccgagcctagtgagcaggagattaaacggatcaacaagatcagaagaagacttgtgaaagacagcaacaccaagaaggccggcaagacaggccccatgaaaaccctgctggttagagtgatgacacccgatctgagagagcggctggaaaacctgagaaagaagcctgaaaatatcccccagcccatcagcaatacatctagagccaacctgaataagctgctgaccgattacaccgaaatgaagaaggcgatcctgcatgtgtactgggaagagttccagaaggaccctgtgggcctgatgagccgggtggcccagcctgccagcaagaagatcgatcagaacaagctgaaacctgagatggacgagaagggcaacctgaccaccgccggctttgcctgctctcagtgtggccagcccctgttcgtgtacaagctggagcaggtgtctgagaagggcaaggcttacaccaactacttcggacggtgcaatgtggccgagcacgaaaagctgatcctgctggcccagctgaagcccgagaaggatagcgacgaagccgtgacatatagcctgggaaagtttgggcagagggccctggatttctacagcattcatgtgaccaaggagtccacccaccccgtgaagcccctggcccagatcgccggaaacagatacgcctccggacctgtgggaaaggccctgagcgacgcatgtatgggcacaatcgcctccttcctgtctaagtaccaggacatcatcatcgaacaccagaaggtggtgaagggcaaccagaagagactggagagcctgcgggagctggccggcaaggaaaacctggaataccctagcgtgaccctgccacctcagcctcacaccaaggagggcgttgatgcctacaacgaagtgatcgcccgggtgcgaatgtgggtgaacctgaacctgtggcagaagctgaagctaagcagagatgatgccaagcctctgctgagactgaagggattcccttcctttcctctggtcgagagacaggccaacgaagtggactggtgggacatggtgtgtaacgtgaagaagctgatcaacgagaaaaaggaggatggcaaggtgttttggcagaatctggctggctacaagagacaggaagccctgagaccatacctgagcagcgaggaagatcggaagaagggaaagaaattcgctcggtaccagctgggcgacctgctgctgcacctggaaaagaagcacggcgaggactggggaaaggtgtacgacgaggcctgggagcggattgacaagaaagtggaaggcctgagcaagcacatcaagctggaagaggaacggagaagcgaggacgcccagagcaaggccgccctgaccgactggctgcgggctaaggccagcttcgtgatcgagggcctgaaggaggccgacaaggacgagttctgcagatgcgagctgaagctgcagaagtggtacggggacctgcggggaaagcccttcgccatcgaagccgagaacagcatcctggacatcagcggcttcagcaagcagtacaactgtgccttcatctggcagaaggacggcgtgaagaagctgaacctgtacctgatcatcaactacttcaagggcggcaagctgcggttcaagaagatcaaacctgaagccttcgaagccaacagattctacaccgtgatcaacaaaaagagcggcgagatcgtgcccatggaggtgaacttcaacttcgacgaccccaacctgatcatcctgcctctggcctttggcaagagacagggcagagaattcatctggaacgacctgctgtccctggaaaccggcagcctgaagctggccaacggaagagtgatcgagaagacactgtacaacagaagaacccggcaggatgagcctgccctgttcgtggccctgaccttcgagcggcgggaggtcctggactcctccaatatcaaaccaatgaacctgatcggcgtggcaagaggcgaaaacatccccgccgtgatcgccctgaccgaccccgagggctgcccactgagccggtttaaggatagcctgggaaacccaacccacatcctgagaatcggcgagagctataaggagaagcagcggaccatccaggccaagaaggaggtggagcagcggagagccggcggctacagccggaagtacgccagcaaagccaagaatctggcagacgatatggtgagaaacaccgctagagatctgctgtactacgccgtgacccaggatgccatgctgatcttcgccaacctgagccggggcttcggccggcagggcaagcggaccttcatggccgagagacagtacacacggatggaggactggctgaccgccaagctggcctacgagggcctgagcaagacctacctgtccaagacactggcccagtacacctccaagacatgcagcaactgtgggtttaccatcaccagcgccgactacgacagggtgctggagaagctgaagaagacagcaacaggctggatgaccacaattaacggcaaggagctgaaggtggagggccagattacctactacaacagatacaagagacagaacgtagtcaaggacctgtccgtcgagctggatagactgagcgaagaatctgtgaacaacgacatctcctcctggacaaagggcagaagcggagaagctctgagcctcctgaagaaaagattctcccatagacccgtgcaggagaagttcgtgtgcctgaactgcggcttcgagacacacgcagccgagcaagccgccctgaacatcgccagatcctggctgttcctgcggagccaggagtacaagaaataccagacaaacaagacaaccggcaacaccgataagagagccttcgtcgagacctggcagtccttttaccggaagaagcttaaggaggtgtggaaacctgccgtgcggtctggcggatctggcggaggctccaccagccccaagaaaaagagaaaagtctaagctgccttctgcggggcttgccttctggccatgcccttcttctctcccttgcacctgtacctcttggtctttgaataaagcctgagtaggaaggctagcaaaaaaaaaaaaaaaaaaaaaaaaaaaaaaaaaaaaaaaaaaaaaaaaaaaaaaaaaaaaaaaaaaaaaaaaaaaaaaaagcccagccggctccccaacctctaccgaggagggcacctctgagtccgccacccccgagagcggccctggcacctccaccgagcccagcgagggcagcgcacccggcagccctgccggcagccccacctccacagaggagggaaccagcaccgagcccagcgaaggcagcgccccaggcaccagcaccgagcctagtgagcaggagattaaacggatcaacaagatcagaagaagacttgtgaaagacagcaacaccaagaaggccggcaagacaggccccatgaaaaccctgctggttagagtgatgacacccgatctgagagagcggctggaaaacctgagaaagaagcctgaaaatatcccccagcccatcagcaatacatctagagccaacctgaataagctgctgaccgattacaccgaaatgaagaaggcgatcctgcatgtgtactgggaagagttccagaaggaccctgtgggcctgatgagccgggtggcccagcctgccagcaagaagatcgatcagaacaagctgaaacctgagatggacgagaagggcaacctgaccaccgccggctttgcctgctctcagtgtggccagcccctgttcgtgtacaagctggagcaggtgtctgagaagggcaaggcttacaccaactacttcggacggtgcaatgtggccgagcacgaaaagctgatcctgctggcccagctgaagcccgagaaggatagcgacgaagccgtgacatatagcctgggaaagtttgggcagagggccctggatttctacagcattcatgtgaccaaggagtccacccaccccgtgaagcccctggcccagatcgccggaaacagatacgcctccggacctgtgggaaaggccctgagcgacgcatgtatgggcacaatcgcctccttcctgtctaagtaccaggacatcatcatcgaacaccagaaggtggtgaagggcaaccagaagagactggagagcctgcgggagctggccggcaaggaaaacctggaataccctagcgtgaccctgccacctcagcctcacaccaaggagggcgttgatgcctacaacgaagtgatcgcccgggtgcgaatgtgggtgaacctgaacctgtggcagaagctgaagctaagcagagatgatgccaagcctctgctgagactgaagggattcccttcctttcctctggtcgagagacaggccaacgaagtggactggtgggacatggtgtgtaacgtgaagaagctgatcaacgagaaaaaggaggatggcaaggtgttttggcagaatctggctggctacaagagacaggaagccctgagaccatacctgagcagcgaggaagatcggaagaagggaaagaaattcgctcggtaccagctgggcgacctgctgctgcacctggaaaagaagcacggcgaggactggggaaaggtgtacgacgaggcctgggagcggattgacaagaaagtggaaggcctgagcaagcacatcaagctggaagaggaacggagaagcgaggacgcccagagcaaggccgccctgaccgactggctgcgggctaaggccagcttcgtgatcgagggcctgaaggaggccgacaaggacgagttctgcagatgcgagctgaagctgcagaagtggtacggggacctgcggggaaagcccttcgccatcgaagccgagaacagcatcctggacatcagcggcttcagcaagcagtacaactgtgccttcatctggcagaaggacggcgtgaagaagctgaacctgtacctgatcatcaactacttcaagggcggcaagctgcggttcaagaagatcaaacctgaagccttcgaagccaacagattctacaccgtgatcaacaaaaagagcggcgagatcgtgcccatggaggtgaacttcaacttcgacgaccccaacctgatcatcctgcctctggcctttggcaagagacagggcagagaattcatctggaacgacctgctgtccctggaaaccggcagcctgaagctggccaacggaagagtgatcgagaagacactgtacaacagaagaacccggcaggatgagcctgccctgttcgtggccctgaccttcgagcggcgggaggtcctggactcctccaatatcaaaccaatgaacctgatcggcgtggcaagaggcgaaaacatccccgccgtgatcgccctgaccgaccccgagggctgcccactgagccggtttaaggatagcctgggaaacccaacccacatcctgagaatcggcgagagctataaggagaagcagcggaccatccaggccaagaaggaggtggagcagcggagagccggcggctacagccggaagtacgccagcaaagccaagaatctggcagacgatatggtgagaaacaccgctagagatctgctgtactacgccgtgacccaggatgccatgctgatcttcgccaacctgagccggggcttcggccggcagggcaagcggaccttcatggccgagagacagtacacacggatggaggactggctgaccgccaagctggcctacgagggcctgagcaagacctacctgtccaagacactggcccagtacacctccaagacatgcagcaactgtgggtttaccatcaccagcgccgactacgacagggtgctggagaagctgaagaagacagcaacaggctggatgaccacaattaacggcaaggagctgaaggtggagggccagattacctactacaacagatacaagagacagaacgtagtcaaggacctgtccgtcgagctggatagactgagcgaagaatctgtgaacaacgacatctcctcctggacaaagggcagaagcggagaagctctgagcctcctgaagaaaagattctcccatagacccgtgcaggagaagttcgtgtgcctgaactgcggcttcgagacacacgcagccgagcaagccgccctgaacatcgccagatcctggctgttcctgcggagccaggagtacaagaaataccagacaaacaagacaaccggcaacaccgataagagagccttcgtcgagacctggcagtccttttaccggaagaagcttaaggaggtgtggaaacctgccgtgcggtctggcggatctggcggaggctccaccagccccaagaaaaagagaaaagtctaagctgccttctgcggggcttgccttctggccatgcccttcttctctcccttgcacctgtacctcttggtctttgaataaagcctgagtaggaaggctagcaaaaaaaaaaaaaaaaaaaaaaaaaaaaaaaaaaaaaaaaaaaaaaaaaaaaaaaaaaaaaaaaaaaaaaaaaaaaaaaa

SEQ ID NO: 9428 - RNA, 8784 nt, synthetic construct
  source 1..8784: mol_type = other RNA
aggaaataagagagaaaagaagagtaagaagaaatataagagccaccatggcccctaagaagaagcgtaaagtgagccggatgaaccacgaccaggagttcgacccccctaaggtgtaccctcccgtccccgccgagaagagaaagcccatccgggtcctgagcctgttcgatggcatcgccaccggtctgctggtgctgaaggacctgggcatccaggtggataggtacattgcctccgaggtgtgcgaggactccatcaccgtgggaatggtgcgtcatcagggcaagatcatgtacgtgggcgacgtgcggagcgtgacacagaagcatatccaggagtggggccctttcgacctggtgatcggcggcagcccttgcaatgacctgagcatcgtgaacccagcccggaagggcctgtacgagggaaccggcagactgttcttcgagttttacagactgctgcacgacgcccggcctaaggaaggcgacgaccggcccttcttttggctgttcgagaatgtggtggccatgggagtcagcgacaagcgggatattagccggttcctggagagcaaccccgtgatgatcgatgccaaggaagtgagcgccgcccaccgggccagatacttctggggcaatctgcctggcatgaacagacccctggccagcaccgtgaacgacaagctggagctgcaggagtgcctggagcacggccggatcgccaagttcagcaaggtgagaaccatcaccacccgaagcaacagcatcaaacaaggcaaggaccagcactttcctgtgttcatgaacgagaaggaggacatcctgtggtgtaccgagatggagagagtgttcgggttcccagtccactacacagatgtcagcaacatgtctagactggccagacagagactgctgggaagaagctggtccgtccctgtgatcagacacctgttcgcccctctgaaggagtacttcgcctgcgtgagcagcggcaacagcaacgccaacagccggggccccagcttctctagcggcctggtgccactgtccctgagagggagccacatgggccccatggagatctacaaaaccgtgagcgcctggaagcggcagcctgtgcgcgtgctgagcctgtttcggaatatcgataaagtcctgaaaagcctgggattcctggagagcggctctggctccggcggtggcaccctgaagtacgtggaggatgtgacaaacgtggtcagacgggatgtggagaagtggggccccttcgatctggtgtacggcagcacccaacccctgggcagctcttgtgaccggtgccctggctggtacatgtttcagttccaccggatcctgcagtacgccctgccgagacaggagtcccagcggccattcttttggattttcatggacaacttgctgctgaccgaggatgaccaggaaactaccactcggttcctgcagaccgaagccgtgaccctgcaggacgtgagaggccgggactaccagaacgccatgcgggtgtggtccaacatccctggactgaaaagcaagcacgcacctctgacccctaaagaagaggagtacctgcaggcccaggtgcggagcagaagcaagctggacgcccctaaggtggatctgctggtgaagaattgcctcctgcccctgagagagtacttcaagtatttcagccagaatagtctgcccctgggaggcagcggcggcggcaacatggagggcctggtgatgttccaggacctgagcatcgacttcagccaggaggagtgggagtgcctggacgccgcccagaaggacctgtacagagacgtgatgatggagaactacagcagcctggtgagcctgggcctgagcatccccaagcccgacgtgatcagcctgctggagcagggcaaggagccctggatggtgagcagagacgtgctgggcggctggtgcagagacagcgagggcggcccaagcagcggcgcccctcctcccagcggcggcaggcggcccaagcagcggcgcccctcctcccagcggcggcagcccagccggctccccaacctctaccgaggagggcacctctgagtccgccacccccgagagcggccctggcacctccaccgagcccagcgagggcagcgcacccggcagccctgccggcagccccacctccacagaggagggaaccagcaccgagcccagcgaaggcagcgccccaggcaccagcaccgagcctagtgagcaggagattaaacggatcaacaagatcagaagaagacttgtgaaagacagcaacaccaagaaggccggcaagacaggccccatgaaaaccctgctggttagagtgatgacacccgatctgagagagcggctggaaaacctgagaaagaagcctgaaaatatcccccagcccatcagcaatacatctagagccaacctgaataagctgctgaccgattacaccgaaatgaagaaggcgatcctgcatgtgtactgggaagagttccagaaggaccctgtgggcctgatgagccgggtggcccagcctgccagcaagaagatcgatcagaacaagctgaaacctgagatggacgagaagggcaacctgaccaccgccggctttgcctgctctcagtgtggccagcccctgttcgtgtacaagctggagcaggtgtctgagaagggcaaggcttacaccaactacttcggacggtgcaatgtggccgagcacgaaaagctgatcctgctggcccagctgaagcccgagaaggatagcgacgaagccgtgacatatagcctgggaaagtttgggcagagggccctggatttctacagcattcatgtgaccaaggagtccacccaccccgtgaagcccctggcccagatcgccggaaacagatacgcctccggacctgtgggaaaggccctgagcgacgcatgtatgggcacaatcgcctccttcctgtctaagtaccaggacatcatcatcgaacaccagaaggtggtgaagggcaaccagaagagactggagagcctgcgggagctggccggcaaggaaaacctggaataccctagcgtgaccctgccacctcagcctcacaccaaggagggcgttgatgcctacaacgaagtgatcgcccgggtgcgaatgtgggtgaacctgaacctgtggcagaagctgaagctaagcagagatgatgccaagcctctgctgagactgaagggattcccttcctttcctctggtcgagagacaggccaacgaagtggactggtgggacatggtgtgtaacgtgaagaagctgatcaacgagaaaaaggaggatggcaaggtgttttggcagaatctggctggctacaagagacaggaagccctgagaccatacctgagcagcgaggaagatcggaagaagggaaagaaattcgctcggtaccagctgggcgacctgctgctgcacctggaaaagaagcacggcgaggactggggaaaggtgtacgacgaggcctgggagcggattgacaagaaagtggaaggcctgagcaagcacatcaagctggaagaggaacggagaagcgaggacgcccagagcaaggccgccctgaccgactggctgcgggctaaggccagcttcgtgatcgagggcctgaaggaggccgacaaggacgagttctgcagatgcgagctgaagctgcagaagtggtacggggacctgcggggaaagcccttcgccatcgaagccgagaacagcatcctggacatcagcggcttcagcaagcagtacaactgtgccttcatctggcagaaggacggcgtgaagaagctgaacctgtacctgatcatcaactacttcaagggcggcaagctgcggttcaagaagatcaaacctgaagccttcgaagccaacagattctacaccgtgatcaacaaaaagagcggcgagatcgtgcccatggaggtgaacttcaacttcgacgaccccaacctgatcatcctgcctctggcctttggcaagagacagggcagagaattcatctggaacgacctgctgtccctggaaaccggcagcctgaagctggccaacggaagagtgatcgagaagacactgtacaacagaagaacccggcaggatgagcctgccctgttcgtggccctgaccttcgagcggcgggaggtcctggactcctccaatatcaaaccaatgaacctgatcggcgtggcaagaggcgaaaacatccccgccgtgatcgccctgaccgaccccgagggctgcccactgagccggtttaaggatagcctgggaaacccaacccacatcctgagaatcggcgagagctataaggagaagcagcggaccatccaggccaagaaggaggtggagcagcggagagccggcggctacagccggaagtacgccagcaaagccaagaatctggcagacgatatggtgagaaacaccgctagagatctgctgtactacgccgtgacccaggatgccatgctgatcttcgccaacctgagccggggcttcggccggcagggcaagcggaccttcatggccgagagacagtacacacggatggaggactggctgaccgccaagctggcctacgagggcctgagcaagacctacctgtccaagacactggcccagtacacctccaagacatgcagcaactgtgggtttaccatcaccagcgccgactacgacagggtgctggagaagctgaagaagacagcaacaggctggatgaccacaattaacggcaaggagctgaaggtggagggccagattacctactacaacagatacaagagacagaacgtagtcaaggacctgtccgtcgagctggatagactgagcgaagaatctgtgaacaacgacatctcctcctggacaaagggcagaagcggagaagctctgagcctcctgaagaaaagattctcccatagacccgtgcaggagaagttcgtgtgcctgaactgcggcttcgagacacacgcagccgagcaagccgccctgaacatcgccagatcctggctgttcctgcggagccaggagtacaagaaataccagacaaacaagacaaccggcaacaccgataagagagccttcgtcgagacctggcagtccttttaccggaagaagcttaaggaggtgtggaaacctgccgtgcggtctggcggatctggcggaggctccaccagccccaagaaaaagagaaaagtctaagctgccttctgcggggcttgccttctggccatgcccttcttctctcccttgcacctgtacctcttggtctttgaataaagcctgagtaggaaggctagcaaaaaaaaaaaaaaaaaaaaaaaaaaaaaaaaaaaaaaaaaaaaaaaaaaaaaaaaaaaaaaaaaaaaaaaaaaaaaaaagcccagccggctccccaacctctaccgaggagggcacctctgagtccgccacccccgagagcggccctggcacctccaccgagcccagcgagggcagcgcacccggcagccctgccggcagccccacctccacagaggagggaaccagcaccgagcccagcgaaggcagcgccccaggcaccagcaccgagcctagtgagcaggagattaaacggatcaacaagatcagaagaagacttgtgaaagacagcaacaccaagaaggccggcaagacaggccccatgaaaaccctgctggttagagtgatgacacccgatctgagagagcggctggaaaacctgagaaagaagcctgaaaatatcccccagcccatcagcaatacatctagagccaacctgaataagctgctgaccgattacaccgaaatgaagaaggcgatcctgcatgtgtactgggaagagttccagaaggaccctgtgggcctgatgagccgggtggcccagcctgccagcaagaagatcgatcagaacaagctgaaacctgagatggacgagaagggcaacctgaccaccgccggctttgcctgctctcagtgtggccagcccctgttcgtgtacaagctggagcaggtgtctgagaagggcaaggcttacaccaactacttcggacggtgcaatgtggccgagcacgaaaagctgatcctgctggcccagctgaagcccgagaaggatagcgacgaagccgtgacatatagcctgggaaagtttgggcagagggccctggatttctacagcattcatgtgaccaaggagtccacccaccccgtgaagcccctggcccagatcgccggaaacagatacgcctccggacctgtgggaaaggccctgagcgacgcatgtatgggcacaatcgcctccttcctgtctaagtaccaggacatcatcatcgaacaccagaaggtggtgaagggcaaccagaagagactggagagcctgcgggagctggccggcaaggaaaacctggaataccctagcgtgaccctgccacctcagcctcacaccaaggagggcgttgatgcctacaacgaagtgatcgcccgggtgcgaatgtgggtgaacctgaacctgtggcagaagctgaagctaagcagagatgatgccaagcctctgctgagactgaagggattcccttcctttcctctggtcgagagacaggccaacgaagtggactggtgggacatggtgtgtaacgtgaagaagctgatcaacgagaaaaaggaggatggcaaggtgttttggcagaatctggctggctacaagagacaggaagccctgagaccatacctgagcagcgaggaagatcggaagaagggaaagaaattcgctcggtaccagctgggcgacctgctgctgcacctggaaaagaagcacggcgaggactggggaaaggtgtacgacgaggcctgggagcggattgacaagaaagtggaaggcctgagcaagcacatcaagctggaagaggaacggagaagcgaggacgcccagagcaaggccgccctgaccgactggctgcgggctaaggccagcttcgtgatcgagggcctgaaggaggccgacaaggacgagttctgcagatgcgagctgaagctgcagaagtggtacggggacctgcggggaaagcccttcgccatcgaagccgagaacagcatcctggacatcagcggcttcagcaagcagtacaactgtgccttcatctggcagaaggacggcgtgaagaagctgaacctgtacctgatcatcaactacttcaagggcggcaagctgcggttcaagaagatcaaacctgaagccttcgaagccaacagattctacaccgtgatcaacaaaaagagcggcgagatcgtgcccatggaggtgaacttcaacttcgacgaccccaacctgatcatcctgcctctggcctttggcaagagacagggcagagaattcatctggaacgacctgctgtccctggaaaccggcagcctgaagctggccaacggaagagtgatcgagaagacactgtacaacagaagaacccggcaggatgagcctgccctgttcgtggccctgaccttcgagcggcgggaggtcctggactcctccaatatcaaaccaatgaacctgatcggcgtggcaagaggcgaaaacatccccgccgtgatcgccctgaccgaccccgagggctgcccactgagccggtttaaggatagcctgggaaacccaacccacatcctgagaatcggcgagagctataaggagaagcagcggaccatccaggccaagaaggaggtggagcagcggagagccggcggctacagccggaagtacgccagcaaagccaagaatctggcagacgatatggtgagaaacaccgctagagatctgctgtactacgccgtgacccaggatgccatgctgatcttcgccaacctgagccggggcttcggccggcagggcaagcggaccttcatggccgagagacagtacacacggatggaggactggctgaccgccaagctggcctacgagggcctgagcaagacctacctgtccaagacactggcccagtacacctccaagacatgcagcaactgtgggtttaccatcaccagcgccgactacgacagggtgctggagaagctgaagaagacagcaacaggctggatgaccacaattaacggcaaggagctgaaggtggagggccagattacctactacaacagatacaagagacagaacgtagtcaaggacctgtccgtcgagctggatagactgagcgaagaatctgtgaacaacgacatctcctcctggacaaagggcagaagcggagaagctctgagcctcctgaagaaaagattctcccatagacccgtgcaggagaagttcgtgtgcctgaactgcggcttcgagacacacgcagccgagcaagccgccctgaacatcgccagatcctggctgttcctgcggagccaggagtacaagaaataccagacaaacaagacaaccggcaacaccgataagagagccttcgtcgagacctggcagtccttttaccggaagaagcttaaggaggtgtggaaacctgccgtgcggtctggcggatctggcggaggctccaccagccccaagaaaaagagaaaagtctaagctgccttctgcggggcttgccttctggccatgcccttcttctctcccttgcacctgtacctcttggtctttgaataaagcctgagtaggaaggctagcaaaaaaaaaaaaaaaaaaaaaaaaaaaaaaaaaaaaaaaaaaaaaaaaaaaaaaaaaaaaaaaaaaaaaaaaaaaaaaaa

SEQ ID NO: 9429 - RNA, 8787 nt, synthetic construct
  source 1..8787: mol_type = other RNA
aggaaataagagagaaaagaagagtaagaagaaatataagagccaccatggcccctaagaagaagcgtaaagtgagccggatgaaccacgaccaggagttcgacccccctaaggtgtaccctcccgtccccgccgagaagagaaagcccatccgggtcctgagcctgttcgatggcatcgccaccggtctgctggtgctgaaggacctgggcatccaggtggataggtacattgcctccgaggtgtgcgaggactccatcaccgtgggaatggtgcgtcatcagggcaagatcatgtacgtgggcgacgtgcggagcgtgacacagaagcatatccaggagtggggccctttcgacctggtgatcggcggcagcccttgcaatgacctgagcatcgtgaacccagcccggaagggcctgtacgagggaaccggcagactgttcttcgagttttacagactgctgcacgacgcccggcctaaggaaggcgacgaccggcccttcttttggctgttcgagaatgtggtggccatgggagtcagcgacaagcgggatattagccggttcctggagagcaaccccgtgatgatcgatgccaaggaagtgagcgccgcccaccgggccagatacttctggggcaatctgcctggcatgaacagacccctggccagcaccgtgaacgacaagctggagctgcaggagtgcctggagcacggccggatcgccaagttcagcaaggtgagaaccatcaccacccgaagcaacagcatcaaacaaggcaaggaccagcactttcctgtgttcatgaacgagaaggaggacatcctgtggtgtaccgagatggagagagtgttcgggttcccagtccactacacagatgtcagcaacatgtctagactggccagacagagactgctgggaagaagctggtccgtccctgtgatcagacacctgttcgcccctctgaaggagtacttcgcctgcgtgagcagcggcaacagcaacgccaacagccggggccccagcttctctagcggcctggtgccactgtccctgagagggagccacatgggccccatggagatctacaaaaccgtgagcgcctggaagcggcagcctgtgcgcgtgctgagcctgtttcggaatatcgataaagtcctgaaaagcctgggattcctggagagcggctctggctccggcggtggcaccctgaagtacgtggaggatgtgacaaacgtggtcagacgggatgtggagaagtggggccccttcgatctggtgtacggcagcacccaacccctgggcagctcttgtgaccggtgccctggctggtacatgtttcagttccaccggatcctgcagtacgccctgccgagacaggagtcccagcggccattcttttggattttcatggacaacttgctgctgaccgaggatgaccaggaaactaccactcggttcctgcagaccgaagccgtgaccctgcaggacgtgagaggccgggactaccagaacgccatgcgggtgtggtccaacatccctggactgaaaagcaagcacgcacctctgacccctaaagaagaggagtacctgcaggcccaggtgcggagcagaagcaagctggacgcccctaaggtggatctgctggtgaagaattgcctcctgcccctgagagagtacttcaagtatttcagccagaatagtctgcccctgggaggcagcggcggcggcgcccccctgctggcccccaggcccggcgagaccaggcccggctgcaggaagcccggcgccgtgagcttcgccgacgtggccgtgtacttcagccccgaggagtggggctgcctgaggcccgcccagagggccctgtacagggacgtgatgagggagacctacggccacctgggcgccctgggcttccccggccccaagcccgccctgatcagctggatggagcaggagagcgaggcctggagcggcggcccaagcagcggcgcccctcctcccagcggcggcaggcggcccaagcagcggcgcccctcctcccagcggcggcagcccagccggctccccaacctctaccgaggagggcacctctgagtccgccacccccgagagcggccctggcacctccaccgagcccagcgagggcagcgcacccggcagccctgccggcagccccacctccacagaggagggaaccagcaccgagcccagcgaaggcagcgccccaggcaccagcaccgagcctagtgagcaggagattaaacggatcaacaagatcagaagaagacttgtgaaagacagcaacaccaagaaggccggcaagacaggccccatgaaaaccctgctggttagagtgatgacacccgatctgagagagcggctggaaaacctgagaaagaagcctgaaaatatcccccagcccatcagcaatacatctagagccaacctgaataagctgctgaccgattacaccgaaatgaagaaggcgatcctgcatgtgtactgggaagagttccagaaggaccctgtgggcctgatgagccgggtggcccagcctgccagcaagaagatcgatcagaacaagctgaaacctgagatggacgagaagggcaacctgaccaccgccggctttgcctgctctcagtgtggccagcccctgttcgtgtacaagctggagcaggtgtctgagaagggcaaggcttacaccaactacttcggacggtgcaatgtggccgagcacgaaaagctgatcctgctggcccagctgaagcccgagaaggatagcgacgaagccgtgacatatagcctgggaaagtttgggcagagggccctggatttctacagcattcatgtgaccaaggagtccacccaccccgtgaagcccctggcccagatcgccggaaacagatacgcctccggacctgtgggaaaggccctgagcgacgcatgtatgggcacaatcgcctccttcctgtctaagtaccaggacatcatcatcgaacaccagaaggtggtgaagggcaaccagaagagactggagagcctgcgggagctggccggcaaggaaaacctggaataccctagcgtgaccctgccacctcagcctcacaccaaggagggcgttgatgcctacaacgaagtgatcgcccgggtgcgaatgtgggtgaacctgaacctgtggcagaagctgaagctaagcagagatgatgccaagcctctgctgagactgaagggattcccttcctttcctctggtcgagagacaggccaacgaagtggactggtgggacatggtgtgtaacgtgaagaagctgatcaacgagaaaaaggaggatggcaaggtgttttggcagaatctggctggctacaagagacaggaagccctgagaccatacctgagcagcgaggaagatcggaagaagggaaagaaattcgctcggtaccagctgggcgacctgctgctgcacctggaaaagaagcacggcgaggactggggaaaggtgtacgacgaggcctgggagcggattgacaagaaagtggaaggcctgagcaagcacatcaagctggaagaggaacggagaagcgaggacgcccagagcaaggccgccctgaccgactggctgcgggctaaggccagcttcgtgatcgagggcctgaaggaggccgacaaggacgagttctgcagatgcgagctgaagctgcagaagtggtacggggacctgcggggaaagcccttcgccatcgaagccgagaacagcatcctggacatcagcggcttcagcaagcagtacaactgtgccttcatctggcagaaggacggcgtgaagaagctgaacctgtacctgatcatcaactacttcaagggcggcaagctgcggttcaagaagatcaaacctgaagccttcgaagccaacagattctacaccgtgatcaacaaaaagagcggcgagatcgtgcccatggaggtgaacttcaacttcgacgaccccaacctgatcatcctgcctctggcctttggcaagagacagggcagagaattcatctggaacgacctgctgtccctggaaaccggcagcctgaagctggccaacggaagagtgatcgagaagacactgtacaacagaagaacccggcaggatgagcctgccctgttcgtggccctgaccttcgagcggcgggaggtcctggactcctccaatatcaaaccaatgaacctgatcggcgtggcaagaggcgaaaacatccccgccgtgatcgccctgaccgaccccgagggctgcccactgagccggtttaaggatagcctgggaaacccaacccacatcctgagaatcggcgagagctataaggagaagcagcggaccatccaggccaagaaggaggtggagcagcggagagccggcggctacagccggaagtacgccagcaaagccaagaatctggcagacgatatggtgagaaacaccgctagagatctgctgtactacgccgtgacccaggatgccatgctgatcttcgccaacctgagccggggcttcggccggcagggcaagcggaccttcatggccgagagacagtacacacggatggaggactggctgaccgccaagctggcctacgagggcctgagcaagacctacctgtccaagacactggcccagtacacctccaagacatgcagcaactgtgggtttaccatcaccagcgccgactacgacagggtgctggagaagctgaagaagacagcaacaggctggatgaccacaattaacggcaaggagctgaaggtggagggccagattacctactacaacagatacaagagacagaacgtagtcaaggacctgtccgtcgagctggatagactgagcgaagaatctgtgaacaacgacatctcctcctggacaaagggcagaagcggagaagctctgagcctcctgaagaaaagattctcccatagacccgtgcaggagaagttcgtgtgcctgaactgcggcttcgagacacacgcagccgagcaagccgccctgaacatcgccagatcctggctgttcctgcggagccaggagtacaagaaataccagacaaacaagacaaccggcaacaccgataagagagccttcgtcgagacctggcagtccttttaccggaagaagcttaaggaggtgtggaaacctgccgtgcggtctggcggatctggcggaggctccaccagccccaagaaaaagagaaaagtctaagctgccttctgcggggcttgccttctggccatgcccttcttctctcccttgcacctgtacctcttggtctttgaataaagcctgagtaggaaggctagcaaaaaaaaaaaaaaaaaaaaaaaaaaaaaaaaaaaaaaaaaaaaaaaaaaaaaaaaaaaaaaaaaaaaaaaaaaaaaaaagcccagccggctccccaacctctaccgaggagggcacctctgagtccgccacccccgagagcggccctggcacctccaccgagcccagcgagggcagcgcacccggcagccctgccggcagccccacctccacagaggagggaaccagcaccgagcccagcgaaggcagcgccccaggcaccagcaccgagcctagtgagcaggagattaaacggatcaacaagatcagaagaagacttgtgaaagacagcaacaccaagaaggccggcaagacaggccccatgaaaaccctgctggttagagtgatgacacccgatctgagagagcggctggaaaacctgagaaagaagcctgaaaatatcccccagcccatcagcaatacatctagagccaacctgaataagctgctgaccgattacaccgaaatgaagaaggcgatcctgcatgtgtactgggaagagttccagaaggaccctgtgggcctgatgagccgggtggcccagcctgccagcaagaagatcgatcagaacaagctgaaacctgagatggacgagaagggcaacctgaccaccgccggctttgcctgctctcagtgtggccagcccctgttcgtgtacaagctggagcaggtgtctgagaagggcaaggcttacaccaactacttcggacggtgcaatgtggccgagcacgaaaagctgatcctgctggcccagctgaagcccgagaaggatagcgacgaagccgtgacatatagcctgggaaagtttgggcagagggccctggatttctacagcattcatgtgaccaaggagtccacccaccccgtgaagcccctggcccagatcgccggaaacagatacgcctccggacctgtgggaaaggccctgagcgacgcatgtatgggcacaatcgcctccttcctgtctaagtaccaggacatcatcatcgaacaccagaaggtggtgaagggcaaccagaagagactggagagcctgcgggagctggccggcaaggaaaacctggaataccctagcgtgaccctgccacctcagcctcacaccaaggagggcgttgatgcctacaacgaagtgatcgcccgggtgcgaatgtgggtgaacctgaacctgtggcagaagctgaagctaagcagagatgatgccaagcctctgctgagactgaagggattcccttcctttcctctggtcgagagacaggccaacgaagtggactggtgggacatggtgtgtaacgtgaagaagctgatcaacgagaaaaaggaggatggcaaggtgttttggcagaatctggctggctacaagagacaggaagccctgagaccatacctgagcagcgaggaagatcggaagaagggaaagaaattcgctcggtaccagctgggcgacctgctgctgcacctggaaaagaagcacggcgaggactggggaaaggtgtacgacgaggcctgggagcggattgacaagaaagtggaaggcctgagcaagcacatcaagctggaagaggaacggagaagcgaggacgcccagagcaaggccgccctgaccgactggctgcgggctaaggccagcttcgtgatcgagggcctgaaggaggccgacaaggacgagttctgcagatgcgagctgaagctgcagaagtggtacggggacctgcggggaaagcccttcgccatcgaagccgagaacagcatcctggacatcagcggcttcagcaagcagtacaactgtgccttcatctggcagaaggacggcgtgaagaagctgaacctgtacctgatcatcaactacttcaagggcggcaagctgcggttcaagaagatcaaacctgaagccttcgaagccaacagattctacaccgtgatcaacaaaaagagcggcgagatcgtgcccatggaggtgaacttcaacttcgacgaccccaacctgatcatcctgcctctggcctttggcaagagacagggcagagaattcatctggaacgacctgctgtccctggaaaccggcagcctgaagctggccaacggaagagtgatcgagaagacactgtacaacagaagaacccggcaggatgagcctgccctgttcgtggccctgaccttcgagcggcgggaggtcctggactcctccaatatcaaaccaatgaacctgatcggcgtggcaagaggcgaaaacatccccgccgtgatcgccctgaccgaccccgagggctgcccactgagccggtttaaggatagcctgggaaacccaacccacatcctgagaatcggcgagagctataaggagaagcagcggaccatccaggccaagaaggaggtggagcagcggagagccggcggctacagccggaagtacgccagcaaagccaagaatctggcagacgatatggtgagaaacaccgctagagatctgctgtactacgccgtgacccaggatgccatgctgatcttcgccaacctgagccggggcttcggccggcagggcaagcggaccttcatggccgagagacagtacacacggatggaggactggctgaccgccaagctggcctacgagggcctgagcaagacctacctgtccaagacactggcccagtacacctccaagacatgcagcaactgtgggtttaccatcaccagcgccgactacgacagggtgctggagaagctgaagaagacagcaacaggctggatgaccacaattaacggcaaggagctgaaggtggagggccagattacctactacaacagatacaagagacagaacgtagtcaaggacctgtccgtcgagctggatagactgagcgaagaatctgtgaacaacgacatctcctcctggacaaagggcagaagcggagaagctctgagcctcctgaagaaaagattctcccatagacccgtgcaggagaagttcgtgtgcctgaactgcggcttcgagacacacgcagccgagcaagccgccctgaacatcgccagatcctggctgttcctgcggagccaggagtacaagaaataccagacaaacaagacaaccggcaacaccgataagagagccttcgtcgagacctggcagtccttttaccggaagaagcttaaggaggtgtggaaacctgccgtgcggtctggcggatctggcggaggctccaccagccccaagaaaaagagaaaagtctaagctgccttctgcggggcttgccttctggccatgcccttcttctctcccttgcacctgtacctcttggtctttgaataaagcctgagtaggaaggctagcaaaaaaaaaaaaaaaaaaaaaaaaaaaaaaaaaaaaaaaaaaaaaaaaaaaaaaaaaaaaaaaaaaaaaaaaaaaaaaaa

SEQ ID NO: 9430 - RNA, 8787 nt, synthetic construct
  source 1..8787: mol_type = other RNA
aggaaataagagagaaaagaagagtaagaagaaatataagagccaccatggcccctaagaagaagcgtaaagtgagccggatgaaccacgaccaggagttcgacccccctaaggtgtaccctcccgtccccgccgagaagagaaagcccatccgggtcctgagcctgttcgatggcatcgccaccggtctgctggtgctgaaggacctgggcatccaggtggataggtacattgcctccgaggtgtgcgaggactccatcaccgtgggaatggtgcgtcatcagggcaagatcatgtacgtgggcgacgtgcggagcgtgacacagaagcatatccaggagtggggccctttcgacctggtgatcggcggcagcccttgcaatgacctgagcatcgtgaacccagcccggaagggcctgtacgagggaaccggcagactgttcttcgagttttacagactgctgcacgacgcccggcctaaggaaggcgacgaccggcccttcttttggctgttcgagaatgtggtggccatgggagtcagcgacaagcgggatattagccggttcctggagagcaaccccgtgatgatcgatgccaaggaagtgagcgccgcccaccgggccagatacttctggggcaatctgcctggcatgaacagacccctggccagcaccgtgaacgacaagctggagctgcaggagtgcctggagcacggccggatcgccaagttcagcaaggtgagaaccatcaccacccgaagcaacagcatcaaacaaggcaaggaccagcactttcctgtgttcatgaacgagaaggaggacatcctgtggtgtaccgagatggagagagtgttcgggttcccagtccactacacagatgtcagcaacatgtctagactggccagacagagactgctgggaagaagctggtccgtccctgtgatcagacacctgttcgcccctctgaaggagtacttcgcctgcgtgagcagcggcaacagcaacgccaacagccggggccccagcttctctagcggcctggtgccactgtccctgagagggagccacatgggccccatggagatctacaaaaccgtgagcgcctggaagcggcagcctgtgcgcgtgctgagcctgtttcggaatatcgataaagtcctgaaaagcctgggattcctggagagcggctctggctccggcggtggcaccctgaagtacgtggaggatgtgacaaacgtggtcagacgggatgtggagaagtggggccccttcgatctggtgtacggcagcacccaacccctgggcagctcttgtgaccggtgccctggctggtacatgtttcagttccaccggatcctgcagtacgccctgccgagacaggagtcccagcggccattcttttggattttcatggacaacttgctgctgaccgaggatgaccaggaaactaccactcggttcctgcagaccgaagccgtgaccctgcaggacgtgagaggccgggactaccagaacgccatgcgggtgtggtccaacatccctggactgaaaagcaagcacgcacctctgacccctaaagaagaggagtacctgcaggcccaggtgcggagcagaagcaagctggacgcccctaaggtggatctgctggtgaagaattgcctcctgcccctgagagagtacttcaagtatttcagccagaatagtctgcccctgggaggcagcggcggcggcttccagggcctggtgaccttcgaggaggtggccgtgtacttcaccagggaggagggcgccctgctggaccccacccagagggccctgtacagggacgtgatgcaggagaactacgagaccgtggtgctgctgggcaaggagagcttcagcaagcccgacgtgatcagccagctggagaggggcgaggagccctgggtgcccgacctgcagggcagcgagaaggagaggcccgaggagaacttcggcggcccaagcagcggcgcccctcctcccagcggcggcaggcggcccaagcagcggcgcccctcctcccagcggcggcagcccagccggctccccaacctctaccgaggagggcacctctgagtccgccacccccgagagcggccctggcacctccaccgagcccagcgagggcagcgcacccggcagccctgccggcagccccacctccacagaggagggaaccagcaccgagcccagcgaaggcagcgccccaggcaccagcaccgagcctagtgagcaggagattaaacggatcaacaagatcagaagaagacttgtgaaagacagcaacaccaagaaggccggcaagacaggccccatgaaaaccctgctggttagagtgatgacacccgatctgagagagcggctggaaaacctgagaaagaagcctgaaaatatcccccagcccatcagcaatacatctagagccaacctgaataagctgctgaccgattacaccgaaatgaagaaggcgatcctgcatgtgtactgggaagagttccagaaggaccctgtgggcctgatgagccgggtggcccagcctgccagcaagaagatcgatcagaacaagctgaaacctgagatggacgagaagggcaacctgaccaccgccggctttgcctgctctcagtgtggccagcccctgttcgtgtacaagctggagcaggtgtctgagaagggcaaggcttacaccaactacttcggacggtgcaatgtggccgagcacgaaaagctgatcctgctggcccagctgaagcccgagaaggatagcgacgaagccgtgacatatagcctgggaaagtttgggcagagggccctggatttctacagcattcatgtgaccaaggagtccacccaccccgtgaagcccctggcccagatcgccggaaacagatacgcctccggacctgtgggaaaggccctgagcgacgcatgtatgggcacaatcgcctccttcctgtctaagtaccaggacatcatcatcgaacaccagaaggtggtgaagggcaaccagaagagactggagagcctgcgggagctggccggcaaggaaaacctggaataccctagcgtgaccctgccacctcagcctcacaccaaggagggcgttgatgcctacaacgaagtgatcgcccgggtgcgaatgtgggtgaacctgaacctgtggcagaagctgaagctaagcagagatgatgccaagcctctgctgagactgaagggattcccttcctttcctctggtcgagagacaggccaacgaagtggactggtgggacatggtgtgtaacgtgaagaagctgatcaacgagaaaaaggaggatggcaaggtgttttggcagaatctggctggctacaagagacaggaagccctgagaccatacctgagcagcgaggaagatcggaagaagggaaagaaattcgctcggtaccagctgggcgacctgctgctgcacctggaaaagaagcacggcgaggactggggaaaggtgtacgacgaggcctgggagcggattgacaagaaagtggaaggcctgagcaagcacatcaagctggaagaggaacggagaagcgaggacgcccagagcaaggccgccctgaccgactggctgcgggctaaggccagcttcgtgatcgagggcctgaaggaggccgacaaggacgagttctgcagatgcgagctgaagctgcagaagtggtacggggacctgcggggaaagcccttcgccatcgaagccgagaacagcatcctggacatcagcggcttcagcaagcagtacaactgtgccttcatctggcagaaggacggcgtgaagaagctgaacctgtacctgatcatcaactacttcaagggcggcaagctgcggttcaagaagatcaaacctgaagccttcgaagccaacagattctacaccgtgatcaacaaaaagagcggcgagatcgtgcccatggaggtgaacttcaacttcgacgaccccaacctgatcatcctgcctctggcctttggcaagagacagggcagagaattcatctggaacgacctgctgtccctggaaaccggcagcctgaagctggccaacggaagagtgatcgagaagacactgtacaacagaagaacccggcaggatgagcctgccctgttcgtggccctgaccttcgagcggcgggaggtcctggactcctccaatatcaaaccaatgaacctgatcggcgtggcaagaggcgaaaacatccccgccgtgatcgccctgaccgaccccgagggctgcccactgagccggtttaaggatagcctgggaaacccaacccacatcctgagaatcggcgagagctataaggagaagcagcggaccatccaggccaagaaggaggtggagcagcggagagccggcggctacagccggaagtacgccagcaaagccaagaatctggcagacgatatggtgagaaacaccgctagagatctgctgtactacgccgtgacccaggatgccatgctgatcttcgccaacctgagccggggcttcggccggcagggcaagcggaccttcatggccgagagacagtacacacggatggaggactggctgaccgccaagctggcctacgagggcctgagcaagacctacctgtccaagacactggcccagtacacctccaagacatgcagcaactgtgggtttaccatcaccagcgccgactacgacagggtgctggagaagctgaagaagacagcaacaggctggatgaccacaattaacggcaaggagctgaaggtggagggccagattacctactacaacagatacaagagacagaacgtagtcaaggacctgtccgtcgagctggatagactgagcgaagaatctgtgaacaacgacatctcctcctggacaaagggcagaagcggagaagctctgagcctcctgaagaaaagattctcccatagacccgtgcaggagaagttcgtgtgcctgaactgcggcttcgagacacacgcagccgagcaagccgccctgaacatcgccagatcctggctgttcctgcggagccaggagtacaagaaataccagacaaacaagacaaccggcaacaccgataagagagccttcgtcgagacctggcagtccttttaccggaagaagcttaaggaggtgtggaaacctgccgtgcggtctggcggatctggcggaggctccaccagccccaagaaaaagagaaaagtctaagctgccttctgcggggcttgccttctggccatgcccttcttctctcccttgcacctgtacctcttggtctttgaataaagcctgagtaggaaggctagcaaaaaaaaaaaaaaaaaaaaaaaaaaaaaaaaaaaaaaaaaaaaaaaaaaaaaaaaaaaaaaaaaaaaaaaaaaaaaaaagcccagccggctccccaacctctaccgaggagggcacctctgagtccgccacccccgagagcggccctggcacctccaccgagcccagcgagggcagcgcacccggcagccctgccggcagccccacctccacagaggagggaaccagcaccgagcccagcgaaggcagcgccccaggcaccagcaccgagcctagtgagcaggagattaaacggatcaacaagatcagaagaagacttgtgaaagacagcaacaccaagaaggccggcaagacaggccccatgaaaaccctgctggttagagtgatgacacccgatctgagagagcggctggaaaacctgagaaagaagcctgaaaatatcccccagcccatcagcaatacatctagagccaacctgaataagctgctgaccgattacaccgaaatgaagaaggcgatcctgcatgtgtactgggaagagttccagaaggaccctgtgggcctgatgagccgggtggcccagcctgccagcaagaagatcgatcagaacaagctgaaacctgagatggacgagaagggcaacctgaccaccgccggctttgcctgctctcagtgtggccagcccctgttcgtgtacaagctggagcaggtgtctgagaagggcaaggcttacaccaactacttcggacggtgcaatgtggccgagcacgaaaagctgatcctgctggcccagctgaagcccgagaaggatagcgacgaagccgtgacatatagcctgggaaagtttgggcagagggccctggatttctacagcattcatgtgaccaaggagtccacccaccccgtgaagcccctggcccagatcgccggaaacagatacgcctccggacctgtgggaaaggccctgagcgacgcatgtatgggcacaatcgcctccttcctgtctaagtaccaggacatcatcatcgaacaccagaaggtggtgaagggcaaccagaagagactggagagcctgcgggagctggccggcaaggaaaacctggaataccctagcgtgaccctgccacctcagcctcacaccaaggagggcgttgatgcctacaacgaagtgatcgcccgggtgcgaatgtgggtgaacctgaacctgtggcagaagctgaagctaagcagagatgatgccaagcctctgctgagactgaagggattcccttcctttcctctggtcgagagacaggccaacgaagtggactggtgggacatggtgtgtaacgtgaagaagctgatcaacgagaaaaaggaggatggcaaggtgttttggcagaatctggctggctacaagagacaggaagccctgagaccatacctgagcagcgaggaagatcggaagaagggaaagaaattcgctcggtaccagctgggcgacctgctgctgcacctggaaaagaagcacggcgaggactggggaaaggtgtacgacgaggcctgggagcggattgacaagaaagtggaaggcctgagcaagcacatcaagctggaagaggaacggagaagcgaggacgcccagagcaaggccgccctgaccgactggctgcgggctaaggccagcttcgtgatcgagggcctgaaggaggccgacaaggacgagttctgcagatgcgagctgaagctgcagaagtggtacggggacctgcggggaaagcccttcgccatcgaagccgagaacagcatcctggacatcagcggcttcagcaagcagtacaactgtgccttcatctggcagaaggacggcgtgaagaagctgaacctgtacctgatcatcaactacttcaagggcggcaagctgcggttcaagaagatcaaacctgaagccttcgaagccaacagattctacaccgtgatcaacaaaaagagcggcgagatcgtgcccatggaggtgaacttcaacttcgacgaccccaacctgatcatcctgcctctggcctttggcaagagacagggcagagaattcatctggaacgacctgctgtccctggaaaccggcagcctgaagctggccaacggaagagtgatcgagaagacactgtacaacagaagaacccggcaggatgagcctgccctgttcgtggccctgaccttcgagcggcgggaggtcctggactcctccaatatcaaaccaatgaacctgatcggcgtggcaagaggcgaaaacatccccgccgtgatcgccctgaccgaccccgagggctgcccactgagccggtttaaggatagcctgggaaacccaacccacatcctgagaatcggcgagagctataaggagaagcagcggaccatccaggccaagaaggaggtggagcagcggagagccggcggctacagccggaagtacgccagcaaagccaagaatctggcagacgatatggtgagaaacaccgctagagatctgctgtactacgccgtgacccaggatgccatgctgatcttcgccaacctgagccggggcttcggccggcagggcaagcggaccttcatggccgagagacagtacacacggatggaggactggctgaccgccaagctggcctacgagggcctgagcaagacctacctgtccaagacactggcccagtacacctccaagacatgcagcaactgtgggtttaccatcaccagcgccgactacgacagggtgctggagaagctgaagaagacagcaacaggctggatgaccacaattaacggcaaggagctgaaggtggagggccagattacctactacaacagatacaagagacagaacgtagtcaaggacctgtccgtcgagctggatagactgagcgaagaatctgtgaacaacgacatctcctcctggacaaagggcagaagcggagaagctctgagcctcctgaagaaaagattctcccatagacccgtgcaggagaagttcgtgtgcctgaactgcggcttcgagacacacgcagccgagcaagccgccctgaacatcgccagatcctggctgttcctgcggagccaggagtacaagaaataccagacaaacaagacaaccggcaacaccgataagagagccttcgtcgagacctggcagtccttttaccggaagaagcttaaggaggtgtggaaacctgccgtgcggtctggcggatctggcggaggctccaccagccccaagaaaaagagaaaagtctaagctgccttctgcggggcttgccttctggccatgcccttcttctctcccttgcacctgtacctcttggtctttgaataaagcctgagtaggaaggctagcaaaaaaaaaaaaaaaaaaaaaaaaaaaaaaaaaaaaaaaaaaaaaaaaaaaaaaaaaaaaaaaaaaaaaaaaaaaaaaaa

SEQ ID NO: 9431 - RNA, 8787 nt, synthetic construct
  source 1..8787: mol_type = other RNA
aggaaataagagagaaaagaagagtaagaagaaatataagagccaccatggcccctaagaagaagcgtaaagtgagccggatgaaccacgaccaggagttcgacccccctaaggtgtaccctcccgtccccgccgagaagagaaagcccatccgggtcctgagcctgttcgatggcatcgccaccggtctgctggtgctgaaggacctgggcatccaggtggataggtacattgcctccgaggtgtgcgaggactccatcaccgtgggaatggtgcgtcatcagggcaagatcatgtacgtgggcgacgtgcggagcgtgacacagaagcatatccaggagtggggccctttcgacctggtgatcggcggcagcccttgcaatgacctgagcatcgtgaacccagcccggaagggcctgtacgagggaaccggcagactgttcttcgagttttacagactgctgcacgacgcccggcctaaggaaggcgacgaccggcccttcttttggctgttcgagaatgtggtggccatgggagtcagcgacaagcgggatattagccggttcctggagagcaaccccgtgatgatcgatgccaaggaagtgagcgccgcccaccgggccagatacttctggggcaatctgcctggcatgaacagacccctggccagcaccgtgaacgacaagctggagctgcaggagtgcctggagcacggccggatcgccaagttcagcaaggtgagaaccatcaccacccgaagcaacagcatcaaacaaggcaaggaccagcactttcctgtgttcatgaacgagaaggaggacatcctgtggtgtaccgagatggagagagtgttcgggttcccagtccactacacagatgtcagcaacatgtctagactggccagacagagactgctgggaagaagctggtccgtccctgtgatcagacacctgttcgcccctctgaaggagtacttcgcctgcgtgagcagcggcaacagcaacgccaacagccggggccccagcttctctagcggcctggtgccactgtccctgagagggagccacatgggccccatggagatctacaaaaccgtgagcgcctggaagcggcagcctgtgcgcgtgctgagcctgtttcggaatatcgataaagtcctgaaaagcctgggattcctggagagcggctctggctccggcggtggcaccctgaagtacgtggaggatgtgacaaacgtggtcagacgggatgtggagaagtggggccccttcgatctggtgtacggcagcacccaacccctgggcagctcttgtgaccggtgccctggctggtacatgtttcagttccaccggatcctgcagtacgccctgccgagacaggagtcccagcggccattcttttggattttcatggacaacttgctgctgaccgaggatgaccaggaaactaccactcggttcctgcagaccgaagccgtgaccctgcaggacgtgagaggccgggactaccagaacgccatgcgggtgtggtccaacatccctggactgaaaagcaagcacgcacctctgacccctaaagaagaggagtacctgcaggcccaggtgcggagcagaagcaagctggacgcccctaaggtggatctgctggtgaagaattgcctcctgcccctgagagagtacttcaagtatttcagccagaatagtctgcccctgggaggcagcggcggcggccaggccgaggtgaccttcgaggacgtggccgtgctgctgagcagggaggagtggggcaggctgggccccgtgcagaagggcctgtacagggacgtgatgctggagacctacaggaacctggtgagcctgggcggcggccccgccggccccaagcccgaggtgatcacccagctggagaggggcgacgagccctgggtgcccgacgtgcagggcagggagaggctgaccatcgacggcagcgccggcggcccaagcagcggcgcccctcctcccagcggcggcaggcggcccaagcagcggcgcccctcctcccagcggcggcagcccagccggctccccaacctctaccgaggagggcacctctgagtccgccacccccgagagcggccctggcacctccaccgagcccagcgagggcagcgcacccggcagccctgccggcagccccacctccacagaggagggaaccagcaccgagcccagcgaaggcagcgccccaggcaccagcaccgagcctagtgagcaggagattaaacggatcaacaagatcagaagaagacttgtgaaagacagcaacaccaagaaggccggcaagacaggccccatgaaaaccctgctggttagagtgatgacacccgatctgagagagcggctggaaaacctgagaaagaagcctgaaaatatcccccagcccatcagcaatacatctagagccaacctgaataagctgctgaccgattacaccgaaatgaagaaggcgatcctgcatgtgtactgggaagagttccagaaggaccctgtgggcctgatgagccgggtggcccagcctgccagcaagaagatcgatcagaacaagctgaaacctgagatggacgagaagggcaacctgaccaccgccggctttgcctgctctcagtgtggccagcccctgttcgtgtacaagctggagcaggtgtctgagaagggcaaggcttacaccaactacttcggacggtgcaatgtggccgagcacgaaaagctgatcctgctggcccagctgaagcccgagaaggatagcgacgaagccgtgacatatagcctgggaaagtttgggcagagggccctggatttctacagcattcatgtgaccaaggagtccacccaccccgtgaagcccctggcccagatcgccggaaacagatacgcctccggacctgtgggaaaggccctgagcgacgcatgtatgggcacaatcgcctccttcctgtctaagtaccaggacatcatcatcgaacaccagaaggtggtgaagggcaaccagaagagactggagagcctgcgggagctggccggcaaggaaaacctggaataccctagcgtgaccctgccacctcagcctcacaccaaggagggcgttgatgcctacaacgaagtgatcgcccgggtgcgaatgtgggtgaacctgaacctgtggcagaagctgaagctaagcagagatgatgccaagcctctgctgagactgaagggattcccttcctttcctctggtcgagagacaggccaacgaagtggactggtgggacatggtgtgtaacgtgaagaagctgatcaacgagaaaaaggaggatggcaaggtgttttggcagaatctggctggctacaagagacaggaagccctgagaccatacctgagcagcgaggaagatcggaagaagggaaagaaattcgctcggtaccagctgggcgacctgctgctgcacctggaaaagaagcacggcgaggactggggaaaggtgtacgacgaggcctgggagcggattgacaagaaagtggaaggcctgagcaagcacatcaagctggaagaggaacggagaagcgaggacgcccagagcaaggccgccctgaccgactggctgcgggctaaggccagcttcgtgatcgagggcctgaaggaggccgacaaggacgagttctgcagatgcgagctgaagctgcagaagtggtacggggacctgcggggaaagcccttcgccatcgaagccgagaacagcatcctggacatcagcggcttcagcaagcagtacaactgtgccttcatctggcagaaggacggcgtgaagaagctgaacctgtacctgatcatcaactacttcaagggcggcaagctgcggttcaagaagatcaaacctgaagccttcgaagccaacagattctacaccgtgatcaacaaaaagagcggcgagatcgtgcccatggaggtgaacttcaacttcgacgaccccaacctgatcatcctgcctctggcctttggcaagagacagggcagagaattcatctggaacgacctgctgtccctggaaaccggcagcctgaagctggccaacggaagagtgatcgagaagacactgtacaacagaagaacccggcaggatgagcctgccctgttcgtggccctgaccttcgagcggcgggaggtcctggactcctccaatatcaaaccaatgaacctgatcggcgtggcaagaggcgaaaacatccccgccgtgatcgccctgaccgaccccgagggctgcccactgagccggtttaaggatagcctgggaaacccaacccacatcctgagaatcggcgagagctataaggagaagcagcggaccatccaggccaagaaggaggtggagcagcggagagccggcggctacagccggaagtacgccagcaaagccaagaatctggcagacgatatggtgagaaacaccgctagagatctgctgtactacgccgtgacccaggatgccatgctgatcttcgccaacctgagccggggcttcggccggcagggcaagcggaccttcatggccgagagacagtacacacggatggaggactggctgaccgccaagctggcctacgagggcctgagcaagacctacctgtccaagacactggcccagtacacctccaagacatgcagcaactgtgggtttaccatcaccagcgccgactacgacagggtgctggagaagctgaagaagacagcaacaggctggatgaccacaattaacggcaaggagctgaaggtggagggccagattacctactacaacagatacaagagacagaacgtagtcaaggacctgtccgtcgagctggatagactgagcgaagaatctgtgaacaacgacatctcctcctggacaaagggcagaagcggagaagctctgagcctcctgaagaaaagattctcccatagacccgtgcaggagaagttcgtgtgcctgaactgcggcttcgagacacacgcagccgagcaagccgccctgaacatcgccagatcctggctgttcctgcggagccaggagtacaagaaataccagacaaacaagacaaccggcaacaccgataagagagccttcgtcgagacctggcagtccttttaccggaagaagcttaaggaggtgtggaaacctgccgtgcggtctggcggatctggcggaggctccaccagccccaagaaaaagagaaaagtctaagctgccttctgcggggcttgccttctggccatgcccttcttctctcccttgcacctgtacctcttggtctttgaataaagcctgagtaggaaggctagcaaaaaaaaaaaaaaaaaaaaaaaaaaaaaaaaaaaaaaaaaaaaaaaaaaaaaaaaaaaaaaaaaaaaaaaaaaaaaaaagcccagccggctccccaacctctaccgaggagggcacctctgagtccgccacccccgagagcggccctggcacctccaccgagcccagcgagggcagcgcacccggcagccctgccggcagccccacctccacagaggagggaaccagcaccgagcccagcgaaggcagcgccccaggcaccagcaccgagcctagtgagcaggagattaaacggatcaacaagatcagaagaagacttgtgaaagacagcaacaccaagaaggccggcaagacaggccccatgaaaaccctgctggttagagtgatgacacccgatctgagagagcggctggaaaacctgagaaagaagcctgaaaatatcccccagcccatcagcaatacatctagagccaacctgaataagctgctgaccgattacaccgaaatgaagaaggcgatcctgcatgtgtactgggaagagttccagaaggaccctgtgggcctgatgagccgggtggcccagcctgccagcaagaagatcgatcagaacaagctgaaacctgagatggacgagaagggcaacctgaccaccgccggctttgcctgctctcagtgtggccagcccctgttcgtgtacaagctggagcaggtgtctgagaagggcaaggcttacaccaactacttcggacggtgcaatgtggccgagcacgaaaagctgatcctgctggcccagctgaagcccgagaaggatagcgacgaagccgtgacatatagcctgggaaagtttgggcagagggccctggatttctacagcattcatgtgaccaaggagtccacccaccccgtgaagcccctggcccagatcgccggaaacagatacgcctccggacctgtgggaaaggccctgagcgacgcatgtatgggcacaatcgcctccttcctgtctaagtaccaggacatcatcatcgaacaccagaaggtggtgaagggcaaccagaagagactggagagcctgcgggagctggccggcaaggaaaacctggaataccctagcgtgaccctgccacctcagcctcacaccaaggagggcgttgatgcctacaacgaagtgatcgcccgggtgcgaatgtgggtgaacctgaacctgtggcagaagctgaagctaagcagagatgatgccaagcctctgctgagactgaagggattcccttcctttcctctggtcgagagacaggccaacgaagtggactggtgggacatggtgtgtaacgtgaagaagctgatcaacgagaaaaaggaggatggcaaggtgttttggcagaatctggctggctacaagagacaggaagccctgagaccatacctgagcagcgaggaagatcggaagaagggaaagaaattcgctcggtaccagctgggcgacctgctgctgcacctggaaaagaagcacggcgaggactggggaaaggtgtacgacgaggcctgggagcggattgacaagaaagtggaaggcctgagcaagcacatcaagctggaagaggaacggagaagcgaggacgcccagagcaaggccgccctgaccgactggctgcgggctaaggccagcttcgtgatcgagggcctgaaggaggccgacaaggacgagttctgcagatgcgagctgaagctgcagaagtggtacggggacctgcggggaaagcccttcgccatcgaagccgagaacagcatcctggacatcagcggcttcagcaagcagtacaactgtgccttcatctggcagaaggacggcgtgaagaagctgaacctgtacctgatcatcaactacttcaagggcggcaagctgcggttcaagaagatcaaacctgaagccttcgaagccaacagattctacaccgtgatcaacaaaaagagcggcgagatcgtgcccatggaggtgaacttcaacttcgacgaccccaacctgatcatcctgcctctggcctttggcaagagacagggcagagaattcatctggaacgacctgctgtccctggaaaccggcagcctgaagctggccaacggaagagtgatcgagaagacactgtacaacagaagaacccggcaggatgagcctgccctgttcgtggccctgaccttcgagcggcgggaggtcctggactcctccaatatcaaaccaatgaacctgatcggcgtggcaagaggcgaaaacatccccgccgtgatcgccctgaccgaccccgagggctgcccactgagccggtttaaggatagcctgggaaacccaacccacatcctgagaatcggcgagagctataaggagaagcagcggaccatccaggccaagaaggaggtggagcagcggagagccggcggctacagccggaagtacgccagcaaagccaagaatctggcagacgatatggtgagaaacaccgctagagatctgctgtactacgccgtgacccaggatgccatgctgatcttcgccaacctgagccggggcttcggccggcagggcaagcggaccttcatggccgagagacagtacacacggatggaggactggctgaccgccaagctggcctacgagggcctgagcaagacctacctgtccaagacactggcccagtacacctccaagacatgcagcaactgtgggtttaccatcaccagcgccgactacgacagggtgctggagaagctgaagaagacagcaacaggctggatgaccacaattaacggcaaggagctgaaggtggagggccagattacctactacaacagatacaagagacagaacgtagtcaaggacctgtccgtcgagctggatagactgagcgaagaatctgtgaacaacgacatctcctcctggacaaagggcagaagcggagaagctctgagcctcctgaagaaaagattctcccatagacccgtgcaggagaagttcgtgtgcctgaactgcggcttcgagacacacgcagccgagcaagccgccctgaacatcgccagatcctggctgttcctgcggagccaggagtacaagaaataccagacaaacaagacaaccggcaacaccgataagagagccttcgtcgagacctggcagtccttttaccggaagaagcttaaggaggtgtggaaacctgccgtgcggtctggcggatctggcggaggctccaccagccccaagaaaaagagaaaagtctaagctgccttctgcggggcttgccttctggccatgcccttcttctctcccttgcacctgtacctcttggtctttgaataaagcctgagtaggaaggctagcaaaaaaaaaaaaaaaaaaaaaaaaaaaaaaaaaaaaaaaaaaaaaaaaaaaaaaaaaaaaaaaaaaaaaaaaaaaaaaaa

SEQ ID NO: 9432 - RNA, 8787 nt, synthetic construct
  source 1..8787: mol_type = other RNA
aggaaataagagagaaaagaagagtaagaagaaatataagagccaccatggcccctaagaagaagcgtaaagtgagccggatgaaccacgaccaggagttcgacccccctaaggtgtaccctcccgtccccgccgagaagagaaagcccatccgggtcctgagcctgttcgatggcatcgccaccggtctgctggtgctgaaggacctgggcatccaggtggataggtacattgcctccgaggtgtgcgaggactccatcaccgtgggaatggtgcgtcatcagggcaagatcatgtacgtgggcgacgtgcggagcgtgacacagaagcatatccaggagtggggccctttcgacctggtgatcggcggcagcccttgcaatgacctgagcatcgtgaacccagcccggaagggcctgtacgagggaaccggcagactgttcttcgagttttacagactgctgcacgacgcccggcctaaggaaggcgacgaccggcccttcttttggctgttcgagaatgtggtggccatgggagtcagcgacaagcgggatattagccggttcctggagagcaaccccgtgatgatcgatgccaaggaagtgagcgccgcccaccgggccagatacttctggggcaatctgcctggcatgaacagacccctggccagcaccgtgaacgacaagctggagctgcaggagtgcctggagcacggccggatcgccaagttcagcaaggtgagaaccatcaccacccgaagcaacagcatcaaacaaggcaaggaccagcactttcctgtgttcatgaacgagaaggaggacatcctgtggtgtaccgagatggagagagtgttcgggttcccagtccactacacagatgtcagcaacatgtctagactggccagacagagactgctgggaagaagctggtccgtccctgtgatcagacacctgttcgcccctctgaaggagtacttcgcctgcgtgagcagcggcaacagcaacgccaacagccggggccccagcttctctagcggcctggtgccactgtccctgagagggagccacatgggccccatggagatctacaaaaccgtgagcgcctggaagcggcagcctgtgcgcgtgctgagcctgtttcggaatatcgataaagtcctgaaaagcctgggattcctggagagcggctctggctccggcggtggcaccctgaagtacgtggaggatgtgacaaacgtggtcagacgggatgtggagaagtggggccccttcgatctggtgtacggcagcacccaacccctgggcagctcttgtgaccggtgccctggctggtacatgtttcagttccaccggatcctgcagtacgccctgccgagacaggagtcccagcggccattcttttggattttcatggacaacttgctgctgaccgaggatgaccaggaaactaccactcggttcctgcagaccgaagccgtgaccctgcaggacgtgagaggccgggactaccagaacgccatgcgggtgtggtccaacatccctggactgaaaagcaagcacgcacctctgacccctaaagaagaggagtacctgcaggcccaggtgcggagcagaagcaagctggacgcccctaaggtggatctgctggtgaagaattgcctcctgcccctgagagagtacttcaagtatttcagccagaatagtctgcccctgggaggcagcggcggcggcaaggagctgcccagcgtgttcgaggacgtggccgtgtacttcaccagggaggagtggggcatgctggacaagaggcagaaggagctgtacagggacgtgatgaggatgaactacgagctgctggccagcctgggccccgccgccgccaagcccgacctgatcagcaagctggagaggagggccgccccctggatcaaggaccccaacggccccaagtggggcgagggccacccccccggcaagggcggcccaagcagcggcgcccctcctcccagcggcggcaggcggcccaagcagcggcgcccctcctcccagcggcggcagcccagccggctccccaacctctaccgaggagggcacctctgagtccgccacccccgagagcggccctggcacctccaccgagcccagcgagggcagcgcacccggcagccctgccggcagccccacctccacagaggagggaaccagcaccgagcccagcgaaggcagcgccccaggcaccagcaccgagcctagtgagcaggagattaaacggatcaacaagatcagaagaagacttgtgaaagacagcaacaccaagaaggccggcaagacaggccccatgaaaaccctgctggttagagtgatgacacccgatctgagagagcggctggaaaacctgagaaagaagcctgaaaatatcccccagcccatcagcaatacatctagagccaacctgaataagctgctgaccgattacaccgaaatgaagaaggcgatcctgcatgtgtactgggaagagttccagaaggaccctgtgggcctgatgagccgggtggcccagcctgccagcaagaagatcgatcagaacaagctgaaacctgagatggacgagaagggcaacctgaccaccgccggctttgcctgctctcagtgtggccagcccctgttcgtgtacaagctggagcaggtgtctgagaagggcaaggcttacaccaactacttcggacggtgcaatgtggccgagcacgaaaagctgatcctgctggcccagctgaagcccgagaaggatagcgacgaagccgtgacatatagcctgggaaagtttgggcagagggccctggatttctacagcattcatgtgaccaaggagtccacccaccccgtgaagcccctggcccagatcgccggaaacagatacgcctccggacctgtgggaaaggccctgagcgacgcatgtatgggcacaatcgcctccttcctgtctaagtaccaggacatcatcatcgaacaccagaaggtggtgaagggcaaccagaagagactggagagcctgcgggagctggccggcaaggaaaacctggaataccctagcgtgaccctgccacctcagcctcacaccaaggagggcgttgatgcctacaacgaagtgatcgcccgggtgcgaatgtgggtgaacctgaacctgtggcagaagctgaagctaagcagagatgatgccaagcctctgctgagactgaagggattcccttcctttcctctggtcgagagacaggccaacgaagtggactggtgggacatggtgtgtaacgtgaagaagctgatcaacgagaaaaaggaggatggcaaggtgttttggcagaatctggctggctacaagagacaggaagccctgagaccatacctgagcagcgaggaagatcggaagaagggaaagaaattcgctcggtaccagctgggcgacctgctgctgcacctggaaaagaagcacggcgaggactggggaaaggtgtacgacgaggcctgggagcggattgacaagaaagtggaaggcctgagcaagcacatcaagctggaagaggaacggagaagcgaggacgcccagagcaaggccgccctgaccgactggctgcgggctaaggccagcttcgtgatcgagggcctgaaggaggccgacaaggacgagttctgcagatgcgagctgaagctgcagaagtggtacggggacctgcggggaaagcccttcgccatcgaagccgagaacagcatcctggacatcagcggcttcagcaagcagtacaactgtgccttcatctggcagaaggacggcgtgaagaagctgaacctgtacctgatcatcaactacttcaagggcggcaagctgcggttcaagaagatcaaacctgaagccttcgaagccaacagattctacaccgtgatcaacaaaaagagcggcgagatcgtgcccatggaggtgaacttcaacttcgacgaccccaacctgatcatcctgcctctggcctttggcaagagacagggcagagaattcatctggaacgacctgctgtccctggaaaccggcagcctgaagctggccaacggaagagtgatcgagaagacactgtacaacagaagaacccggcaggatgagcctgccctgttcgtggccctgaccttcgagcggcgggaggtcctggactcctccaatatcaaaccaatgaacctgatcggcgtggcaagaggcgaaaacatccccgccgtgatcgccctgaccgaccccgagggctgcccactgagccggtttaaggatagcctgggaaacccaacccacatcctgagaatcggcgagagctataaggagaagcagcggaccatccaggccaagaaggaggtggagcagcggagagccggcggctacagccggaagtacgccagcaaagccaagaatctggcagacgatatggtgagaaacaccgctagagatctgctgtactacgccgtgacccaggatgccatgctgatcttcgccaacctgagccggggcttcggccggcagggcaagcggaccttcatggccgagagacagtacacacggatggaggactggctgaccgccaagctggcctacgagggcctgagcaagacctacctgtccaagacactggcccagtacacctccaagacatgcagcaactgtgggtttaccatcaccagcgccgactacgacagggtgctggagaagctgaagaagacagcaacaggctggatgaccacaattaacggcaaggagctgaaggtggagggccagattacctactacaacagatacaagagacagaacgtagtcaaggacctgtccgtcgagctggatagactgagcgaagaatctgtgaacaacgacatctcctcctggacaaagggcagaagcggagaagctctgagcctcctgaagaaaagattctcccatagacccgtgcaggagaagttcgtgtgcctgaactgcggcttcgagacacacgcagccgagcaagccgccctgaacatcgccagatcctggctgttcctgcggagccaggagtacaagaaataccagacaaacaagacaaccggcaacaccgataagagagccttcgtcgagacctggcagtccttttaccggaagaagcttaaggaggtgtggaaacctgccgtgcggtctggcggatctggcggaggctccaccagccccaagaaaaagagaaaagtctaagctgccttctgcggggcttgccttctggccatgcccttcttctctcccttgcacctgtacctcttggtctttgaataaagcctgagtaggaaggctagcaaaaaaaaaaaaaaaaaaaaaaaaaaaaaaaaaaaaaaaaaaaaaaaaaaaaaaaaaaaaaaaaaaaaaaaaaaaaaaaagcccagccggctccccaacctctaccgaggagggcacctctgagtccgccacccccgagagcggccctggcacctccaccgagcccagcgagggcagcgcacccggcagccctgccggcagccccacctccacagaggagggaaccagcaccgagcccagcgaaggcagcgccccaggcaccagcaccgagcctagtgagcaggagattaaacggatcaacaagatcagaagaagacttgtgaaagacagcaacaccaagaaggccggcaagacaggccccatgaaaaccctgctggttagagtgatgacacccgatctgagagagcggctggaaaacctgagaaagaagcctgaaaatatcccccagcccatcagcaatacatctagagccaacctgaataagctgctgaccgattacaccgaaatgaagaaggcgatcctgcatgtgtactgggaagagttccagaaggaccctgtgggcctgatgagccgggtggcccagcctgccagcaagaagatcgatcagaacaagctgaaacctgagatggacgagaagggcaacctgaccaccgccggctttgcctgctctcagtgtggccagcccctgttcgtgtacaagctggagcaggtgtctgagaagggcaaggcttacaccaactacttcggacggtgcaatgtggccgagcacgaaaagctgatcctgctggcccagctgaagcccgagaaggatagcgacgaagccgtgacatatagcctgggaaagtttgggcagagggccctggatttctacagcattcatgtgaccaaggagtccacccaccccgtgaagcccctggcccagatcgccggaaacagatacgcctccggacctgtgggaaaggccctgagcgacgcatgtatgggcacaatcgcctccttcctgtctaagtaccaggacatcatcatcgaacaccagaaggtggtgaagggcaaccagaagagactggagagcctgcgggagctggccggcaaggaaaacctggaataccctagcgtgaccctgccacctcagcctcacaccaaggagggcgttgatgcctacaacgaagtgatcgcccgggtgcgaatgtgggtgaacctgaacctgtggcagaagctgaagctaagcagagatgatgccaagcctctgctgagactgaagggattcccttcctttcctctggtcgagagacaggccaacgaagtggactggtgggacatggtgtgtaacgtgaagaagctgatcaacgagaaaaaggaggatggcaaggtgttttggcagaatctggctggctacaagagacaggaagccctgagaccatacctgagcagcgaggaagatcggaagaagggaaagaaattcgctcggtaccagctgggcgacctgctgctgcacctggaaaagaagcacggcgaggactggggaaaggtgtacgacgaggcctgggagcggattgacaagaaagtggaaggcctgagcaagcacatcaagctggaagaggaacggagaagcgaggacgcccagagcaaggccgccctgaccgactggctgcgggctaaggccagcttcgtgatcgagggcctgaaggaggccgacaaggacgagttctgcagatgcgagctgaagctgcagaagtggtacggggacctgcggggaaagcccttcgccatcgaagccgagaacagcatcctggacatcagcggcttcagcaagcagtacaactgtgccttcatctggcagaaggacggcgtgaagaagctgaacctgtacctgatcatcaactacttcaagggcggcaagctgcggttcaagaagatcaaacctgaagccttcgaagccaacagattctacaccgtgatcaacaaaaagagcggcgagatcgtgcccatggaggtgaacttcaacttcgacgaccccaacctgatcatcctgcctctggcctttggcaagagacagggcagagaattcatctggaacgacctgctgtccctggaaaccggcagcctgaagctggccaacggaagagtgatcgagaagacactgtacaacagaagaacccggcaggatgagcctgccctgttcgtggccctgaccttcgagcggcgggaggtcctggactcctccaatatcaaaccaatgaacctgatcggcgtggcaagaggcgaaaacatccccgccgtgatcgccctgaccgaccccgagggctgcccactgagccggtttaaggatagcctgggaaacccaacccacatcctgagaatcggcgagagctataaggagaagcagcggaccatccaggccaagaaggaggtggagcagcggagagccggcggctacagccggaagtacgccagcaaagccaagaatctggcagacgatatggtgagaaacaccgctagagatctgctgtactacgccgtgacccaggatgccatgctgatcttcgccaacctgagccggggcttcggccggcagggcaagcggaccttcatggccgagagacagtacacacggatggaggactggctgaccgccaagctggcctacgagggcctgagcaagacctacctgtccaagacactggcccagtacacctccaagacatgcagcaactgtgggtttaccatcaccagcgccgactacgacagggtgctggagaagctgaagaagacagcaacaggctggatgaccacaattaacggcaaggagctgaaggtggagggccagattacctactacaacagatacaagagacagaacgtagtcaaggacctgtccgtcgagctggatagactgagcgaagaatctgtgaacaacgacatctcctcctggacaaagggcagaagcggagaagctctgagcctcctgaagaaaagattctcccatagacccgtgcaggagaagttcgtgtgcctgaactgcggcttcgagacacacgcagccgagcaagccgccctgaacatcgccagatcctggctgttcctgcggagccaggagtacaagaaataccagacaaacaagacaaccggcaacaccgataagagagccttcgtcgagacctggcagtccttttaccggaagaagcttaaggaggtgtggaaacctgccgtgcggtctggcggatctggcggaggctccaccagccccaagaaaaagagaaaagtctaagctgccttctgcggggcttgccttctggccatgcccttcttctctcccttgcacctgtacctcttggtctttgaataaagcctgagtaggaaggctagcaaaaaaaaaaaaaaaaaaaaaaaaaaaaaaaaaaaaaaaaaaaaaaaaaaaaaaaaaaaaaaaaaaaaaaaaaaaaaaaa

SEQ ID NO: 9433 - RNA, 8787 nt, synthetic construct
  source 1..8787: mol_type = other RNA
aggaaataagagagaaaagaagagtaagaagaaatataagagccaccatggcccctaagaagaagcgtaaagtgagccggatgaaccacgaccaggagttcgacccccctaaggtgtaccctcccgtccccgccgagaagagaaagcccatccgggtcctgagcctgttcgatggcatcgccaccggtctgctggtgctgaaggacctgggcatccaggtggataggtacattgcctccgaggtgtgcgaggactccatcaccgtgggaatggtgcgtcatcagggcaagatcatgtacgtgggcgacgtgcggagcgtgacacagaagcatatccaggagtggggccctttcgacctggtgatcggcggcagcccttgcaatgacctgagcatcgtgaacccagcccggaagggcctgtacgagggaaccggcagactgttcttcgagttttacagactgctgcacgacgcccggcctaaggaaggcgacgaccggcccttcttttggctgttcgagaatgtggtggccatgggagtcagcgacaagcgggatattagccggttcctggagagcaaccccgtgatgatcgatgccaaggaagtgagcgccgcccaccgggccagatacttctggggcaatctgcctggcatgaacagacccctggccagcaccgtgaacgacaagctggagctgcaggagtgcctggagcacggccggatcgccaagttcagcaaggtgagaaccatcaccacccgaagcaacagcatcaaacaaggcaaggaccagcactttcctgtgttcatgaacgagaaggaggacatcctgtggtgtaccgagatggagagagtgttcgggttcccagtccactacacagatgtcagcaacatgtctagactggccagacagagactgctgggaagaagctggtccgtccctgtgatcagacacctgttcgcccctctgaaggagtacttcgcctgcgtgagcagcggcaacagcaacgccaacagccggggccccagcttctctagcggcctggtgccactgtccctgagagggagccacatgggccccatggagatctacaaaaccgtgagcgcctggaagcggcagcctgtgcgcgtgctgagcctgtttcggaatatcgataaagtcctgaaaagcctgggattcctggagagcggctctggctccggcggtggcaccctgaagtacgtggaggatgtgacaaacgtggtcagacgggatgtggagaagtggggccccttcgatctggtgtacggcagcacccaacccctgggcagctcttgtgaccggtgccctggctggtacatgtttcagttccaccggatcctgcagtacgccctgccgagacaggagtcccagcggccattcttttggattttcatggacaacttgctgctgaccgaggatgaccaggaaactaccactcggttcctgcagaccgaagccgtgaccctgcaggacgtgagaggccgggactaccagaacgccatgcgggtgtggtccaacatccctggactgaaaagcaagcacgcacctctgacccctaaagaagaggagtacctgcaggcccaggtgcggagcagaagcaagctggacgcccctaaggtggatctgctggtgaagaattgcctcctgcccctgagagagtacttcaagtatttcagccagaatagtctgcccctgggaggcagcggcggcggcggcaaggagctgctgagcttcgaggacgtggccatgtacttcaccagggaggagtggggcaggctggactggggccagaaggacctgtacagggacgtgatgctggagaactacaggaacatggtgctgctgggcttccagttccccaagcccgaggtgatctgccagctggagaactgggacgagcagtggatcctggacctgcccagggccggcagcaggaaggccagcggcagcgcctgcggcggcccaagcagcggcgcccctcctcccagcggcggcaggcggcccaagcagcggcgcccctcctcccagcggcggcagcccagccggctccccaacctctaccgaggagggcacctctgagtccgccacccccgagagcggccctggcacctccaccgagcccagcgagggcagcgcacccggcagccctgccggcagccccacctccacagaggagggaaccagcaccgagcccagcgaaggcagcgccccaggcaccagcaccgagcctagtgagcaggagattaaacggatcaacaagatcagaagaagacttgtgaaagacagcaacaccaagaaggccggcaagacaggccccatgaaaaccctgctggttagagtgatgacacccgatctgagagagcggctggaaaacctgagaaagaagcctgaaaatatcccccagcccatcagcaatacatctagagccaacctgaataagctgctgaccgattacaccgaaatgaagaaggcgatcctgcatgtgtactgggaagagttccagaaggaccctgtgggcctgatgagccgggtggcccagcctgccagcaagaagatcgatcagaacaagctgaaacctgagatggacgagaagggcaacctgaccaccgccggctttgcctgctctcagtgtggccagcccctgttcgtgtacaagctggagcaggtgtctgagaagggcaaggcttacaccaactacttcggacggtgcaatgtggccgagcacgaaaagctgatcctgctggcccagctgaagcccgagaaggatagcgacgaagccgtgacatatagcctgggaaagtttgggcagagggccctggatttctacagcattcatgtgaccaaggagtccacccaccccgtgaagcccctggcccagatcgccggaaacagatacgcctccggacctgtgggaaaggccctgagcgacgcatgtatgggcacaatcgcctccttcctgtctaagtaccaggacatcatcatcgaacaccagaaggtggtgaagggcaaccagaagagactggagagcctgcgggagctggccggcaaggaaaacctggaataccctagcgtgaccctgccacctcagcctcacaccaaggagggcgttgatgcctacaacgaagtgatcgcccgggtgcgaatgtgggtgaacctgaacctgtggcagaagctgaagctaagcagagatgatgccaagcctctgctgagactgaagggattcccttcctttcctctggtcgagagacaggccaacgaagtggactggtgggacatggtgtgtaacgtgaagaagctgatcaacgagaaaaaggaggatggcaaggtgttttggcagaatctggctggctacaagagacaggaagccctgagaccatacctgagcagcgaggaagatcggaagaagggaaagaaattcgctcggtaccagctgggcgacctgctgctgcacctggaaaagaagcacggcgaggactggggaaaggtgtacgacgaggcctgggagcggattgacaagaaagtggaaggcctgagcaagcacatcaagctggaagaggaacggagaagcgaggacgcccagagcaaggccgccctgaccgactggctgcgggctaaggccagcttcgtgatcgagggcctgaaggaggccgacaaggacgagttctgcagatgcgagctgaagctgcagaagtggtacggggacctgcggggaaagcccttcgccatcgaagccgagaacagcatcctggacatcagcggcttcagcaagcagtacaactgtgccttcatctggcagaaggacggcgtgaagaagctgaacctgtacctgatcatcaactacttcaagggcggcaagctgcggttcaagaagatcaaacctgaagccttcgaagccaacagattctacaccgtgatcaacaaaaagagcggcgagatcgtgcccatggaggtgaacttcaacttcgacgaccccaacctgatcatcctgcctctggcctttggcaagagacagggcagagaattcatctggaacgacctgctgtccctggaaaccggcagcctgaagctggccaacggaagagtgatcgagaagacactgtacaacagaagaacccggcaggatgagcctgccctgttcgtggccctgaccttcgagcggcgggaggtcctggactcctccaatatcaaaccaatgaacctgatcggcgtggcaagaggcgaaaacatccccgccgtgatcgccctgaccgaccccgagggctgcccactgagccggtttaaggatagcctgggaaacccaacccacatcctgagaatcggcgagagctataaggagaagcagcggaccatccaggccaagaaggaggtggagcagcggagagccggcggctacagccggaagtacgccagcaaagccaagaatctggcagacgatatggtgagaaacaccgctagagatctgctgtactacgccgtgacccaggatgccatgctgatcttcgccaacctgagccggggcttcggccggcagggcaagcggaccttcatggccgagagacagtacacacggatggaggactggctgaccgccaagctggcctacgagggcctgagcaagacctacctgtccaagacactggcccagtacacctccaagacatgcagcaactgtgggtttaccatcaccagcgccgactacgacagggtgctggagaagctgaagaagacagcaacaggctggatgaccacaattaacggcaaggagctgaaggtggagggccagattacctactacaacagatacaagagacagaacgtagtcaaggacctgtccgtcgagctggatagactgagcgaagaatctgtgaacaacgacatctcctcctggacaaagggcagaagcggagaagctctgagcctcctgaagaaaagattctcccatagacccgtgcaggagaagttcgtgtgcctgaactgcggcttcgagacacacgcagccgagcaagccgccctgaacatcgccagatcctggctgttcctgcggagccaggagtacaagaaataccagacaaacaagacaaccggcaacaccgataagagagccttcgtcgagacctggcagtccttttaccggaagaagcttaaggaggtgtggaaacctgccgtgcggtctggcggatctggcggaggctccaccagccccaagaaaaagagaaaagtctaagctgccttctgcggggcttgccttctggccatgcccttcttctctcccttgcacctgtacctcttggtctttgaataaagcctgagtaggaaggctagcaaaaaaaaaaaaaaaaaaaaaaaaaaaaaaaaaaaaaaaaaaaaaaaaaaaaaaaaaaaaaaaaaaaaaaaaaaaaaaaagcccagccggctccccaacctctaccgaggagggcacctctgagtccgccacccccgagagcggccctggcacctccaccgagcccagcgagggcagcgcacccggcagccctgccggcagccccacctccacagaggagggaaccagcaccgagcccagcgaaggcagcgccccaggcaccagcaccgagcctagtgagcaggagattaaacggatcaacaagatcagaagaagacttgtgaaagacagcaacaccaagaaggccggcaagacaggccccatgaaaaccctgctggttagagtgatgacacccgatctgagagagcggctggaaaacctgagaaagaagcctgaaaatatcccccagcccatcagcaatacatctagagccaacctgaataagctgctgaccgattacaccgaaatgaagaaggcgatcctgcatgtgtactgggaagagttccagaaggaccctgtgggcctgatgagccgggtggcccagcctgccagcaagaagatcgatcagaacaagctgaaacctgagatggacgagaagggcaacctgaccaccgccggctttgcctgctctcagtgtggccagcccctgttcgtgtacaagctggagcaggtgtctgagaagggcaaggcttacaccaactacttcggacggtgcaatgtggccgagcacgaaaagctgatcctgctggcccagctgaagcccgagaaggatagcgacgaagccgtgacatatagcctgggaaagtttgggcagagggccctggatttctacagcattcatgtgaccaaggagtccacccaccccgtgaagcccctggcccagatcgccggaaacagatacgcctccggacctgtgggaaaggccctgagcgacgcatgtatgggcacaatcgcctccttcctgtctaagtaccaggacatcatcatcgaacaccagaaggtggtgaagggcaaccagaagagactggagagcctgcgggagctggccggcaaggaaaacctggaataccctagcgtgaccctgccacctcagcctcacaccaaggagggcgttgatgcctacaacgaagtgatcgcccgggtgcgaatgtgggtgaacctgaacctgtggcagaagctgaagctaagcagagatgatgccaagcctctgctgagactgaagggattcccttcctttcctctggtcgagagacaggccaacgaagtggactggtgggacatggtgtgtaacgtgaagaagctgatcaacgagaaaaaggaggatggcaaggtgttttggcagaatctggctggctacaagagacaggaagccctgagaccatacctgagcagcgaggaagatcggaagaagggaaagaaattcgctcggtaccagctgggcgacctgctgctgcacctggaaaagaagcacggcgaggactggggaaaggtgtacgacgaggcctgggagcggattgacaagaaagtggaaggcctgagcaagcacatcaagctggaagaggaacggagaagcgaggacgcccagagcaaggccgccctgaccgactggctgcgggctaaggccagcttcgtgatcgagggcctgaaggaggccgacaaggacgagttctgcagatgcgagctgaagctgcagaagtggtacggggacctgcggggaaagcccttcgccatcgaagccgagaacagcatcctggacatcagcggcttcagcaagcagtacaactgtgccttcatctggcagaaggacggcgtgaagaagctgaacctgtacctgatcatcaactacttcaagggcggcaagctgcggttcaagaagatcaaacctgaagccttcgaagccaacagattctacaccgtgatcaacaaaaagagcggcgagatcgtgcccatggaggtgaacttcaacttcgacgaccccaacctgatcatcctgcctctggcctttggcaagagacagggcagagaattcatctggaacgacctgctgtccctggaaaccggcagcctgaagctggccaacggaagagtgatcgagaagacactgtacaacagaagaacccggcaggatgagcctgccctgttcgtggccctgaccttcgagcggcgggaggtcctggactcctccaatatcaaaccaatgaacctgatcggcgtggcaagaggcgaaaacatccccgccgtgatcgccctgaccgaccccgagggctgcccactgagccggtttaaggatagcctgggaaacccaacccacatcctgagaatcggcgagagctataaggagaagcagcggaccatccaggccaagaaggaggtggagcagcggagagccggcggctacagccggaagtacgccagcaaagccaagaatctggcagacgatatggtgagaaacaccgctagagatctgctgtactacgccgtgacccaggatgccatgctgatcttcgccaacctgagccggggcttcggccggcagggcaagcggaccttcatggccgagagacagtacacacggatggaggactggctgaccgccaagctggcctacgagggcctgagcaagacctacctgtccaagacactggcccagtacacctccaagacatgcagcaactgtgggtttaccatcaccagcgccgactacgacagggtgctggagaagctgaagaagacagcaacaggctggatgaccacaattaacggcaaggagctgaaggtggagggccagattacctactacaacagatacaagagacagaacgtagtcaaggacctgtccgtcgagctggatagactgagcgaagaatctgtgaacaacgacatctcctcctggacaaagggcagaagcggagaagctctgagcctcctgaagaaaagattctcccatagacccgtgcaggagaagttcgtgtgcctgaactgcggcttcgagacacacgcagccgagcaagccgccctgaacatcgccagatcctggctgttcctgcggagccaggagtacaagaaataccagacaaacaagacaaccggcaacaccgataagagagccttcgtcgagacctggcagtccttttaccggaagaagcttaaggaggtgtggaaacctgccgtgcggtctggcggatctggcggaggctccaccagccccaagaaaaagagaaaagtctaagctgccttctgcggggcttgccttctggccatgcccttcttctctcccttgcacctgtacctcttggtctttgaataaagcctgagtaggaaggctagcaaaaaaaaaaaaaaaaaaaaaaaaaaaaaaaaaaaaaaaaaaaaaaaaaaaaaaaaaaaaaaaaaaaaaaaaaaaaaaaa

SEQ ID NO: 9434 - RNA, 8787 nt, synthetic construct
  source 1..8787: mol_type = other RNA
aggaaataagagagaaaagaagagtaagaagaaatataagagccaccatggcccctaagaagaagcgtaaagtgagccggatgaaccacgaccaggagttcgacccccctaaggtgtaccctcccgtccccgccgagaagagaaagcccatccgggtcctgagcctgttcgatggcatcgccaccggtctgctggtgctgaaggacctgggcatccaggtggataggtacattgcctccgaggtgtgcgaggactccatcaccgtgggaatggtgcgtcatcagggcaagatcatgtacgtgggcgacgtgcggagcgtgacacagaagcatatccaggagtggggccctttcgacctggtgatcggcggcagcccttgcaatgacctgagcatcgtgaacccagcccggaagggcctgtacgagggaaccggcagactgttcttcgagttttacagactgctgcacgacgcccggcctaaggaaggcgacgaccggcccttcttttggctgttcgagaatgtggtggccatgggagtcagcgacaagcgggatattagccggttcctggagagcaaccccgtgatgatcgatgccaaggaagtgagcgccgcccaccgggccagatacttctggggcaatctgcctggcatgaacagacccctggccagcaccgtgaacgacaagctggagctgcaggagtgcctggagcacggccggatcgccaagttcagcaaggtgagaaccatcaccacccgaagcaacagcatcaaacaaggcaaggaccagcactttcctgtgttcatgaacgagaaggaggacatcctgtggtgtaccgagatggagagagtgttcgggttcccagtccactacacagatgtcagcaacatgtctagactggccagacagagactgctgggaagaagctggtccgtccctgtgatcagacacctgttcgcccctctgaaggagtacttcgcctgcgtgagcagcggcaacagcaacgccaacagccggggccccagcttctctagcggcctggtgccactgtccctgagagggagccacatgggccccatggagatctacaaaaccgtgagcgcctggaagcggcagcctgtgcgcgtgctgagcctgtttcggaatatcgataaagtcctgaaaagcctgggattcctggagagcggctctggctccggcggtggcaccctgaagtacgtggaggatgtgacaaacgtggtcagacgggatgtggagaagtggggccccttcgatctggtgtacggcagcacccaacccctgggcagctcttgtgaccggtgccctggctggtacatgtttcagttccaccggatcctgcagtacgccctgccgagacaggagtcccagcggccattcttttggattttcatggacaacttgctgctgaccgaggatgaccaggaaactaccactcggttcctgcagaccgaagccgtgaccctgcaggacgtgagaggccgggactaccagaacgccatgcgggtgtggtccaacatccctggactgaaaagcaagcacgcacctctgacccctaaagaagaggagtacctgcaggcccaggtgcggagcagaagcaagctggacgcccctaaggtggatctgctggtgaagaattgcctcctgcccctgagagagtacttcaagtatttcagccagaatagtctgcccctgggaggcagcggcggcggcgtgtggggccccctgagcttcatggacgtgttcgtggacttcacctgggaggagtggcagctgctggaccccgcccagaagtgcctgtacaggagcgtgatgctggagaactacagcaacctggtgagcctgggctaccagcacaccaagcccgacatcatcttcaagctggagcagggcgaggagctgtgcatggtgcaggcccccatccccaaccagtgctgccccaacaaggtgtggaagggcggcccaagcagcggcgcccctcctcccagcggcggcaggcggcccaagcagcggcgcccctcctcccagcggcggcagcccagccggctccccaacctctaccgaggagggcacctctgagtccgccacccccgagagcggccctggcacctccaccgagcccagcgagggcagcgcacccggcagccctgccggcagccccacctccacagaggagggaaccagcaccgagcccagcgaaggcagcgccccaggcaccagcaccgagcctagtgagcaggagattaaacggatcaacaagatcagaagaagacttgtgaaagacagcaacaccaagaaggccggcaagacaggccccatgaaaaccctgctggttagagtgatgacacccgatctgagagagcggctggaaaacctgagaaagaagcctgaaaatatcccccagcccatcagcaatacatctagagccaacctgaataagctgctgaccgattacaccgaaatgaagaaggcgatcctgcatgtgtactgggaagagttccagaaggaccctgtgggcctgatgagccgggtggcccagcctgccagcaagaagatcgatcagaacaagctgaaacctgagatggacgagaagggcaacctgaccaccgccggctttgcctgctctcagtgtggccagcccctgttcgtgtacaagctggagcaggtgtctgagaagggcaaggcttacaccaactacttcggacggtgcaatgtggccgagcacgaaaagctgatcctgctggcccagctgaagcccgagaaggatagcgacgaagccgtgacatatagcctgggaaagtttgggcagagggccctggatttctacagcattcatgtgaccaaggagtccacccaccccgtgaagcccctggcccagatcgccggaaacagatacgcctccggacctgtgggaaaggccctgagcgacgcatgtatgggcacaatcgcctccttcctgtctaagtaccaggacatcatcatcgaacaccagaaggtggtgaagggcaaccagaagagactggagagcctgcgggagctggccggcaaggaaaacctggaataccctagcgtgaccctgccacctcagcctcacaccaaggagggcgttgatgcctacaacgaagtgatcgcccgggtgcgaatgtgggtgaacctgaacctgtggcagaagctgaagctaagcagagatgatgccaagcctctgctgagactgaagggattcccttcctttcctctggtcgagagacaggccaacgaagtggactggtgggacatggtgtgtaacgtgaagaagctgatcaacgagaaaaaggaggatggcaaggtgttttggcagaatctggctggctacaagagacaggaagccctgagaccatacctgagcagcgaggaagatcggaagaagggaaagaaattcgctcggtaccagctgggcgacctgctgctgcacctggaaaagaagcacggcgaggactggggaaaggtgtacgacgaggcctgggagcggattgacaagaaagtggaaggcctgagcaagcacatcaagctggaagaggaacggagaagcgaggacgcccagagcaaggccgccctgaccgactggctgcgggctaaggccagcttcgtgatcgagggcctgaaggaggccgacaaggacgagttctgcagatgcgagctgaagctgcagaagtggtacggggacctgcggggaaagcccttcgccatcgaagccgagaacagcatcctggacatcagcggcttcagcaagcagtacaactgtgccttcatctggcagaaggacggcgtgaagaagctgaacctgtacctgatcatcaactacttcaagggcggcaagctgcggttcaagaagatcaaacctgaagccttcgaagccaacagattctacaccgtgatcaacaaaaagagcggcgagatcgtgcccatggaggtgaacttcaacttcgacgaccccaacctgatcatcctgcctctggcctttggcaagagacagggcagagaattcatctggaacgacctgctgtccctggaaaccggcagcctgaagctggccaacggaagagtgatcgagaagacactgtacaacagaagaacccggcaggatgagcctgccctgttcgtggccctgaccttcgagcggcgggaggtcctggactcctccaatatcaaaccaatgaacctgatcggcgtggcaagaggcgaaaacatccccgccgtgatcgccctgaccgaccccgagggctgcccactgagccggtttaaggatagcctgggaaacccaacccacatcctgagaatcggcgagagctataaggagaagcagcggaccatccaggccaagaaggaggtggagcagcggagagccggcggctacagccggaagtacgccagcaaagccaagaatctggcagacgatatggtgagaaacaccgctagagatctgctgtactacgccgtgacccaggatgccatgctgatcttcgccaacctgagccggggcttcggccggcagggcaagcggaccttcatggccgagagacagtacacacggatggaggactggctgaccgccaagctggcctacgagggcctgagcaagacctacctgtccaagacactggcccagtacacctccaagacatgcagcaactgtgggtttaccatcaccagcgccgactacgacagggtgctggagaagctgaagaagacagcaacaggctggatgaccacaattaacggcaaggagctgaaggtggagggccagattacctactacaacagatacaagagacagaacgtagtcaaggacctgtccgtcgagctggatagactgagcgaagaatctgtgaacaacgacatctcctcctggacaaagggcagaagcggagaagctctgagcctcctgaagaaaagattctcccatagacccgtgcaggagaagttcgtgtgcctgaactgcggcttcgagacacacgcagccgagcaagccgccctgaacatcgccagatcctggctgttcctgcggagccaggagtacaagaaataccagacaaacaagacaaccggcaacaccgataagagagccttcgtcgagacctggcagtccttttaccggaagaagcttaaggaggtgtggaaacctgccgtgcggtctggcggatctggcggaggctccaccagccccaagaaaaagagaaaagtctaagctgccttctgcggggcttgccttctggccatgcccttcttctctcccttgcacctgtacctcttggtctttgaataaagcctgagtaggaaggctagcaaaaaaaaaaaaaaaaaaaaaaaaaaaaaaaaaaaaaaaaaaaaaaaaaaaaaaaaaaaaaaaaaaaaaaaaaaaaaaaagcccagccggctccccaacctctaccgaggagggcacctctgagtccgccacccccgagagcggccctggcacctccaccgagcccagcgagggcagcgcacccggcagccctgccggcagccccacctccacagaggagggaaccagcaccgagcccagcgaaggcagcgccccaggcaccagcaccgagcctagtgagcaggagattaaacggatcaacaagatcagaagaagacttgtgaaagacagcaacaccaagaaggccggcaagacaggccccatgaaaaccctgctggttagagtgatgacacccgatctgagagagcggctggaaaacctgagaaagaagcctgaaaatatcccccagcccatcagcaatacatctagagccaacctgaataagctgctgaccgattacaccgaaatgaagaaggcgatcctgcatgtgtactgggaagagttccagaaggaccctgtgggcctgatgagccgggtggcccagcctgccagcaagaagatcgatcagaacaagctgaaacctgagatggacgagaagggcaacctgaccaccgccggctttgcctgctctcagtgtggccagcccctgttcgtgtacaagctggagcaggtgtctgagaagggcaaggcttacaccaactacttcggacggtgcaatgtggccgagcacgaaaagctgatcctgctggcccagctgaagcccgagaaggatagcgacgaagccgtgacatatagcctgggaaagtttgggcagagggccctggatttctacagcattcatgtgaccaaggagtccacccaccccgtgaagcccctggcccagatcgccggaaacagatacgcctccggacctgtgggaaaggccctgagcgacgcatgtatgggcacaatcgcctccttcctgtctaagtaccaggacatcatcatcgaacaccagaaggtggtgaagggcaaccagaagagactggagagcctgcgggagctggccggcaaggaaaacctggaataccctagcgtgaccctgccacctcagcctcacaccaaggagggcgttgatgcctacaacgaagtgatcgcccgggtgcgaatgtgggtgaacctgaacctgtggcagaagctgaagctaagcagagatgatgccaagcctctgctgagactgaagggattcccttcctttcctctggtcgagagacaggccaacgaagtggactggtgggacatggtgtgtaacgtgaagaagctgatcaacgagaaaaaggaggatggcaaggtgttttggcagaatctggctggctacaagagacaggaagccctgagaccatacctgagcagcgaggaagatcggaagaagggaaagaaattcgctcggtaccagctgggcgacctgctgctgcacctggaaaagaagcacggcgaggactggggaaaggtgtacgacgaggcctgggagcggattgacaagaaagtggaaggcctgagcaagcacatcaagctggaagaggaacggagaagcgaggacgcccagagcaaggccgccctgaccgactggctgcgggctaaggccagcttcgtgatcgagggcctgaaggaggccgacaaggacgagttctgcagatgcgagctgaagctgcagaagtggtacggggacctgcggggaaagcccttcgccatcgaagccgagaacagcatcctggacatcagcggcttcagcaagcagtacaactgtgccttcatctggcagaaggacggcgtgaagaagctgaacctgtacctgatcatcaactacttcaagggcggcaagctgcggttcaagaagatcaaacctgaagccttcgaagccaacagattctacaccgtgatcaacaaaaagagcggcgagatcgtgcccatggaggtgaacttcaacttcgacgaccccaacctgatcatcctgcctctggcctttggcaagagacagggcagagaattcatctggaacgacctgctgtccctggaaaccggcagcctgaagctggccaacggaagagtgatcgagaagacactgtacaacagaagaacccggcaggatgagcctgccctgttcgtggccctgaccttcgagcggcgggaggtcctggactcctccaatatcaaaccaatgaacctgatcggcgtggcaagaggcgaaaacatccccgccgtgatcgccctgaccgaccccgagggctgcccactgagccggtttaaggatagcctgggaaacccaacccacatcctgagaatcggcgagagctataaggagaagcagcggaccatccaggccaagaaggaggtggagcagcggagagccggcggctacagccggaagtacgccagcaaagccaagaatctggcagacgatatggtgagaaacaccgctagagatctgctgtactacgccgtgacccaggatgccatgctgatcttcgccaacctgagccggggcttcggccggcagggcaagcggaccttcatggccgagagacagtacacacggatggaggactggctgaccgccaagctggcctacgagggcctgagcaagacctacctgtccaagacactggcccagtacacctccaagacatgcagcaactgtgggtttaccatcaccagcgccgactacgacagggtgctggagaagctgaagaagacagcaacaggctggatgaccacaattaacggcaaggagctgaaggtggagggccagattacctactacaacagatacaagagacagaacgtagtcaaggacctgtccgtcgagctggatagactgagcgaagaatctgtgaacaacgacatctcctcctggacaaagggcagaagcggagaagctctgagcctcctgaagaaaagattctcccatagacccgtgcaggagaagttcgtgtgcctgaactgcggcttcgagacacacgcagccgagcaagccgccctgaacatcgccagatcctggctgttcctgcggagccaggagtacaagaaataccagacaaacaagacaaccggcaacaccgataagagagccttcgtcgagacctggcagtccttttaccggaagaagcttaaggaggtgtggaaacctgccgtgcggtctggcggatctggcggaggctccaccagccccaagaaaaagagaaaagtctaagctgccttctgcggggcttgccttctggccatgcccttcttctctcccttgcacctgtacctcttggtctttgaataaagcctgagtaggaaggctagcaaaaaaaaaaaaaaaaaaaaaaaaaaaaaaaaaaaaaaaaaaaaaaaaaaaaaaaaaaaaaaaaaaaaaaaaaaaaaaaa

SEQ ID NO: 9435 - RNA, 8787 nt, synthetic construct
  source 1..8787: mol_type = other RNA
aggaaataagagagaaaagaagagtaagaagaaatataagagccaccatggcccctaagaagaagcgtaaagtgagccggatgaaccacgaccaggagttcgacccccctaaggtgtaccctcccgtccccgccgagaagagaaagcccatccgggtcctgagcctgttcgatggcatcgccaccggtctgctggtgctgaaggacctgggcatccaggtggataggtacattgcctccgaggtgtgcgaggactccatcaccgtgggaatggtgcgtcatcagggcaagatcatgtacgtgggcgacgtgcggagcgtgacacagaagcatatccaggagtggggccctttcgacctggtgatcggcggcagcccttgcaatgacctgagcatcgtgaacccagcccggaagggcctgtacgagggaaccggcagactgttcttcgagttttacagactgctgcacgacgcccggcctaaggaaggcgacgaccggcccttcttttggctgttcgagaatgtggtggccatgggagtcagcgacaagcgggatattagccggttcctggagagcaaccccgtgatgatcgatgccaaggaagtgagcgccgcccaccgggccagatacttctggggcaatctgcctggcatgaacagacccctggccagcaccgtgaacgacaagctggagctgcaggagtgcctggagcacggccggatcgccaagttcagcaaggtgagaaccatcaccacccgaagcaacagcatcaaacaaggcaaggaccagcactttcctgtgttcatgaacgagaaggaggacatcctgtggtgtaccgagatggagagagtgttcgggttcccagtccactacacagatgtcagcaacatgtctagactggccagacagagactgctgggaagaagctggtccgtccctgtgatcagacacctgttcgcccctctgaaggagtacttcgcctgcgtgagcagcggcaacagcaacgccaacagccggggccccagcttctctagcggcctggtgccactgtccctgagagggagccacatgggccccatggagatctacaaaaccgtgagcgcctggaagcggcagcctgtgcgcgtgctgagcctgtttcggaatatcgataaagtcctgaaaagcctgggattcctggagagcggctctggctccggcggtggcaccctgaagtacgtggaggatgtgacaaacgtggtcagacgggatgtggagaagtggggccccttcgatctggtgtacggcagcacccaacccctgggcagctcttgtgaccggtgccctggctggtacatgtttcagttccaccggatcctgcagtacgccctgccgagacaggagtcccagcggccattcttttggattttcatggacaacttgctgctgaccgaggatgaccaggaaactaccactcggttcctgcagaccgaagccgtgaccctgcaggacgtgagaggccgggactaccagaacgccatgcgggtgtggtccaacatccctggactgaaaagcaagcacgcacctctgacccctaaagaagaggagtacctgcaggcccaggtgcggagcagaagcaagctggacgcccctaaggtggatctgctggtgaagaattgcctcctgcccctgagagagtacttcaagtatttcagccagaatagtctgcccctgggaggcagcggcggcggcagctgcgagggcagcgtgagcttcagggacgtggccatcaacttcagcagggaggagtggcagcacctggaccccagccagaggaacctgtacagggacgtgatgctggagacctacagccacctgctgagcgtgggctaccaggtgcccgaggccgaggtggtgatgctggagcagggcaaggagccctgggccctgcagggcgagaggcccaggcagagctgccccggcgagaagctgtggggcggcccaagcagcggcgcccctcctcccagcggcggcaggcggcccaagcagcggcgcccctcctcccagcggcggcagcccagccggctccccaacctctaccgaggagggcacctctgagtccgccacccccgagagcggccctggcacctccaccgagcccagcgagggcagcgcacccggcagccctgccggcagccccacctccacagaggagggaaccagcaccgagcccagcgaaggcagcgccccaggcaccagcaccgagcctagtgagcaggagattaaacggatcaacaagatcagaagaagacttgtgaaagacagcaacaccaagaaggccggcaagacaggccccatgaaaaccctgctggttagagtgatgacacccgatctgagagagcggctggaaaacctgagaaagaagcctgaaaatatcccccagcccatcagcaatacatctagagccaacctgaataagctgctgaccgattacaccgaaatgaagaaggcgatcctgcatgtgtactgggaagagttccagaaggaccctgtgggcctgatgagccgggtggcccagcctgccagcaagaagatcgatcagaacaagctgaaacctgagatggacgagaagggcaacctgaccaccgccggctttgcctgctctcagtgtggccagcccctgttcgtgtacaagctggagcaggtgtctgagaagggcaaggcttacaccaactacttcggacggtgcaatgtggccgagcacgaaaagctgatcctgctggcccagctgaagcccgagaaggatagcgacgaagccgtgacatatagcctgggaaagtttgggcagagggccctggatttctacagcattcatgtgaccaaggagtccacccaccccgtgaagcccctggcccagatcgccggaaacagatacgcctccggacctgtgggaaaggccctgagcgacgcatgtatgggcacaatcgcctccttcctgtctaagtaccaggacatcatcatcgaacaccagaaggtggtgaagggcaaccagaagagactggagagcctgcgggagctggccggcaaggaaaacctggaataccctagcgtgaccctgccacctcagcctcacaccaaggagggcgttgatgcctacaacgaagtgatcgcccgggtgcgaatgtgggtgaacctgaacctgtggcagaagctgaagctaagcagagatgatgccaagcctctgctgagactgaagggattcccttcctttcctctggtcgagagacaggccaacgaagtggactggtgggacatggtgtgtaacgtgaagaagctgatcaacgagaaaaaggaggatggcaaggtgttttggcagaatctggctggctacaagagacaggaagccctgagaccatacctgagcagcgaggaagatcggaagaagggaaagaaattcgctcggtaccagctgggcgacctgctgctgcacctggaaaagaagcacggcgaggactggggaaaggtgtacgacgaggcctgggagcggattgacaagaaagtggaaggcctgagcaagcacatcaagctggaagaggaacggagaagcgaggacgcccagagcaaggccgccctgaccgactggctgcgggctaaggccagcttcgtgatcgagggcctgaaggaggccgacaaggacgagttctgcagatgcgagctgaagctgcagaagtggtacggggacctgcggggaaagcccttcgccatcgaagccgagaacagcatcctggacatcagcggcttcagcaagcagtacaactgtgccttcatctggcagaaggacggcgtgaagaagctgaacctgtacctgatcatcaactacttcaagggcggcaagctgcggttcaagaagatcaaacctgaagccttcgaagccaacagattctacaccgtgatcaacaaaaagagcggcgagatcgtgcccatggaggtgaacttcaacttcgacgaccccaacctgatcatcctgcctctggcctttggcaagagacagggcagagaattcatctggaacgacctgctgtccctggaaaccggcagcctgaagctggccaacggaagagtgatcgagaagacactgtacaacagaagaacccggcaggatgagcctgccctgttcgtggccctgaccttcgagcggcgggaggtcctggactcctccaatatcaaaccaatgaacctgatcggcgtggcaagaggcgaaaacatccccgccgtgatcgccctgaccgaccccgagggctgcccactgagccggtttaaggatagcctgggaaacccaacccacatcctgagaatcggcgagagctataaggagaagcagcggaccatccaggccaagaaggaggtggagcagcggagagccggcggctacagccggaagtacgccagcaaagccaagaatctggcagacgatatggtgagaaacaccgctagagatctgctgtactacgccgtgacccaggatgccatgctgatcttcgccaacctgagccggggcttcggccggcagggcaagcggaccttcatggccgagagacagtacacacggatggaggactggctgaccgccaagctggcctacgagggcctgagcaagacctacctgtccaagacactggcccagtacacctccaagacatgcagcaactgtgggtttaccatcaccagcgccgactacgacagggtgctggagaagctgaagaagacagcaacaggctggatgaccacaattaacggcaaggagctgaaggtggagggccagattacctactacaacagatacaagagacagaacgtagtcaaggacctgtccgtcgagctggatagactgagcgaagaatctgtgaacaacgacatctcctcctggacaaagggcagaagcggagaagctctgagcctcctgaagaaaagattctcccatagacccgtgcaggagaagttcgtgtgcctgaactgcggcttcgagacacacgcagccgagcaagccgccctgaacatcgccagatcctggctgttcctgcggagccaggagtacaagaaataccagacaaacaagacaaccggcaacaccgataagagagccttcgtcgagacctggcagtccttttaccggaagaagcttaaggaggtgtggaaacctgccgtgcggtctggcggatctggcggaggctccaccagccccaagaaaaagagaaaagtctaagctgccttctgcggggcttgccttctggccatgcccttcttctctcccttgcacctgtacctcttggtctttgaataaagcctgagtaggaaggctagcaaaaaaaaaaaaaaaaaaaaaaaaaaaaaaaaaaaaaaaaaaaaaaaaaaaaaaaaaaaaaaaaaaaaaaaaaaaaaaaagcccagccggctccccaacctctaccgaggagggcacctctgagtccgccacccccgagagcggccctggcacctccaccgagcccagcgagggcagcgcacccggcagccctgccggcagccccacctccacagaggagggaaccagcaccgagcccagcgaaggcagcgccccaggcaccagcaccgagcctagtgagcaggagattaaacggatcaacaagatcagaagaagacttgtgaaagacagcaacaccaagaaggccggcaagacaggccccatgaaaaccctgctggttagagtgatgacacccgatctgagagagcggctggaaaacctgagaaagaagcctgaaaatatcccccagcccatcagcaatacatctagagccaacctgaataagctgctgaccgattacaccgaaatgaagaaggcgatcctgcatgtgtactgggaagagttccagaaggaccctgtgggcctgatgagccgggtggcccagcctgccagcaagaagatcgatcagaacaagctgaaacctgagatggacgagaagggcaacctgaccaccgccggctttgcctgctctcagtgtggccagcccctgttcgtgtacaagctggagcaggtgtctgagaagggcaaggcttacaccaactacttcggacggtgcaatgtggccgagcacgaaaagctgatcctgctggcccagctgaagcccgagaaggatagcgacgaagccgtgacatatagcctgggaaagtttgggcagagggccctggatttctacagcattcatgtgaccaaggagtccacccaccccgtgaagcccctggcccagatcgccggaaacagatacgcctccggacctgtgggaaaggccctgagcgacgcatgtatgggcacaatcgcctccttcctgtctaagtaccaggacatcatcatcgaacaccagaaggtggtgaagggcaaccagaagagactggagagcctgcgggagctggccggcaaggaaaacctggaataccctagcgtgaccctgccacctcagcctcacaccaaggagggcgttgatgcctacaacgaagtgatcgcccgggtgcgaatgtgggtgaacctgaacctgtggcagaagctgaagctaagcagagatgatgccaagcctctgctgagactgaagggattcccttcctttcctctggtcgagagacaggccaacgaagtggactggtgggacatggtgtgtaacgtgaagaagctgatcaacgagaaaaaggaggatggcaaggtgttttggcagaatctggctggctacaagagacaggaagccctgagaccatacctgagcagcgaggaagatcggaagaagggaaagaaattcgctcggtaccagctgggcgacctgctgctgcacctggaaaagaagcacggcgaggactggggaaaggtgtacgacgaggcctgggagcggattgacaagaaagtggaaggcctgagcaagcacatcaagctggaagaggaacggagaagcgaggacgcccagagcaaggccgccctgaccgactggctgcgggctaaggccagcttcgtgatcgagggcctgaaggaggccgacaaggacgagttctgcagatgcgagctgaagctgcagaagtggtacggggacctgcggggaaagcccttcgccatcgaagccgagaacagcatcctggacatcagcggcttcagcaagcagtacaactgtgccttcatctggcagaaggacggcgtgaagaagctgaacctgtacctgatcatcaactacttcaagggcggcaagctgcggttcaagaagatcaaacctgaagccttcgaagccaacagattctacaccgtgatcaacaaaaagagcggcgagatcgtgcccatggaggtgaacttcaacttcgacgaccccaacctgatcatcctgcctctggcctttggcaagagacagggcagagaattcatctggaacgacctgctgtccctggaaaccggcagcctgaagctggccaacggaagagtgatcgagaagacactgtacaacagaagaacccggcaggatgagcctgccctgttcgtggccctgaccttcgagcggcgggaggtcctggactcctccaatatcaaaccaatgaacctgatcggcgtggcaagaggcgaaaacatccccgccgtgatcgccctgaccgaccccgagggctgcccactgagccggtttaaggatagcctgggaaacccaacccacatcctgagaatcggcgagagctataaggagaagcagcggaccatccaggccaagaaggaggtggagcagcggagagccggcggctacagccggaagtacgccagcaaagccaagaatctggcagacgatatggtgagaaacaccgctagagatctgctgtactacgccgtgacccaggatgccatgctgatcttcgccaacctgagccggggcttcggccggcagggcaagcggaccttcatggccgagagacagtacacacggatggaggactggctgaccgccaagctggcctacgagggcctgagcaagacctacctgtccaagacactggcccagtacacctccaagacatgcagcaactgtgggtttaccatcaccagcgccgactacgacagggtgctggagaagctgaagaagacagcaacaggctggatgaccacaattaacggcaaggagctgaaggtggagggccagattacctactacaacagatacaagagacagaacgtagtcaaggacctgtccgtcgagctggatagactgagcgaagaatctgtgaacaacgacatctcctcctggacaaagggcagaagcggagaagctctgagcctcctgaagaaaagattctcccatagacccgtgcaggagaagttcgtgtgcctgaactgcggcttcgagacacacgcagccgagcaagccgccctgaacatcgccagatcctggctgttcctgcggagccaggagtacaagaaataccagacaaacaagacaaccggcaacaccgataagagagccttcgtcgagacctggcagtccttttaccggaagaagcttaaggaggtgtggaaacctgccgtgcggtctggcggatctggcggaggctccaccagccccaagaaaaagagaaaagtctaagctgccttctgcggggcttgccttctggccatgcccttcttctctcccttgcacctgtacctcttggtctttgaataaagcctgagtaggaaggctagcaaaaaaaaaaaaaaaaaaaaaaaaaaaaaaaaaaaaaaaaaaaaaaaaaaaaaaaaaaaaaaaaaaaaaaaaaaaaaaaa

SEQ ID NO: 9436 - RNA, 8787 nt, synthetic construct
  source 1..8787: mol_type = other RNA
aggaaataagagagaaaagaagagtaagaagaaatataagagccaccatggcccctaagaagaagcgtaaagtgagccggatgaaccacgaccaggagttcgacccccctaaggtgtaccctcccgtccccgccgagaagagaaagcccatccgggtcctgagcctgttcgatggcatcgccaccggtctgctggtgctgaaggacctgggcatccaggtggataggtacattgcctccgaggtgtgcgaggactccatcaccgtgggaatggtgcgtcatcagggcaagatcatgtacgtgggcgacgtgcggagcgtgacacagaagcatatccaggagtggggccctttcgacctggtgatcggcggcagcccttgcaatgacctgagcatcgtgaacccagcccggaagggcctgtacgagggaaccggcagactgttcttcgagttttacagactgctgcacgacgcccggcctaaggaaggcgacgaccggcccttcttttggctgttcgagaatgtggtggccatgggagtcagcgacaagcgggatattagccggttcctggagagcaaccccgtgatgatcgatgccaaggaagtgagcgccgcccaccgggccagatacttctggggcaatctgcctggcatgaacagacccctggccagcaccgtgaacgacaagctggagctgcaggagtgcctggagcacggccggatcgccaagttcagcaaggtgagaaccatcaccacccgaagcaacagcatcaaacaaggcaaggaccagcactttcctgtgttcatgaacgagaaggaggacatcctgtggtgtaccgagatggagagagtgttcgggttcccagtccactacacagatgtcagcaacatgtctagactggccagacagagactgctgggaagaagctggtccgtccctgtgatcagacacctgttcgcccctctgaaggagtacttcgcctgcgtgagcagcggcaacagcaacgccaacagccggggccccagcttctctagcggcctggtgccactgtccctgagagggagccacatgggccccatggagatctacaaaaccgtgagcgcctggaagcggcagcctgtgcgcgtgctgagcctgtttcggaatatcgataaagtcctgaaaagcctgggattcctggagagcggctctggctccggcggtggcaccctgaagtacgtggaggatgtgacaaacgtggtcagacgggatgtggagaagtggggccccttcgatctggtgtacggcagcacccaacccctgggcagctcttgtgaccggtgccctggctggtacatgtttcagttccaccggatcctgcagtacgccctgccgagacaggagtcccagcggccattcttttggattttcatggacaacttgctgctgaccgaggatgaccaggaaactaccactcggttcctgcagaccgaagccgtgaccctgcaggacgtgagaggccgggactaccagaacgccatgcgggtgtggtccaacatccctggactgaaaagcaagcacgcacctctgacccctaaagaagaggagtacctgcaggcccaggtgcggagcagaagcaagctggacgcccctaaggtggatctgctggtgaagaattgcctcctgcccctgagagagtacttcaagtatttcagccagaatagtctgcccctgggaggcagcggcggcggctacaccctggagagcctgaccctggaggacgtggccgtggacttcacccaggaggagtggaggctgctggcccccgcccagaaggacctgtactgggacgtgatgctggagaacttcaggaacctggtgagcgtgggctacgtggccagcatgcccgccgccctgagcaggctggagaggggcggccagtggatgaccgaggacgagaccaggcactggatctgccccgagatcaagaaggacggcggcccaagcagcggcgcccctcctcccagcggcggcaggcggcccaagcagcggcgcccctcctcccagcggcggcagcccagccggctccccaacctctaccgaggagggcacctctgagtccgccacccccgagagcggccctggcacctccaccgagcccagcgagggcagcgcacccggcagccctgccggcagccccacctccacagaggagggaaccagcaccgagcccagcgaaggcagcgccccaggcaccagcaccgagcctagtgagcaggagattaaacggatcaacaagatcagaagaagacttgtgaaagacagcaacaccaagaaggccggcaagacaggccccatgaaaaccctgctggttagagtgatgacacccgatctgagagagcggctggaaaacctgagaaagaagcctgaaaatatcccccagcccatcagcaatacatctagagccaacctgaataagctgctgaccgattacaccgaaatgaagaaggcgatcctgcatgtgtactgggaagagttccagaaggaccctgtgggcctgatgagccgggtggcccagcctgccagcaagaagatcgatcagaacaagctgaaacctgagatggacgagaagggcaacctgaccaccgccggctttgcctgctctcagtgtggccagcccctgttcgtgtacaagctggagcaggtgtctgagaagggcaaggcttacaccaactacttcggacggtgcaatgtggccgagcacgaaaagctgatcctgctggcccagctgaagcccgagaaggatagcgacgaagccgtgacatatagcctgggaaagtttgggcagagggccctggatttctacagcattcatgtgaccaaggagtccacccaccccgtgaagcccctggcccagatcgccggaaacagatacgcctccggacctgtgggaaaggccctgagcgacgcatgtatgggcacaatcgcctccttcctgtctaagtaccaggacatcatcatcgaacaccagaaggtggtgaagggcaaccagaagagactggagagcctgcgggagctggccggcaaggaaaacctggaataccctagcgtgaccctgccacctcagcctcacaccaaggagggcgttgatgcctacaacgaagtgatcgcccgggtgcgaatgtgggtgaacctgaacctgtggcagaagctgaagctaagcagagatgatgccaagcctctgctgagactgaagggattcccttcctttcctctggtcgagagacaggccaacgaagtggactggtgggacatggtgtgtaacgtgaagaagctgatcaacgagaaaaaggaggatggcaaggtgttttggcagaatctggctggctacaagagacaggaagccctgagaccatacctgagcagcgaggaagatcggaagaagggaaagaaattcgctcggtaccagctgggcgacctgctgctgcacctggaaaagaagcacggcgaggactggggaaaggtgtacgacgaggcctgggagcggattgacaagaaagtggaaggcctgagcaagcacatcaagctggaagaggaacggagaagcgaggacgcccagagcaaggccgccctgaccgactggctgcgggctaaggccagcttcgtgatcgagggcctgaaggaggccgacaaggacgagttctgcagatgcgagctgaagctgcagaagtggtacggggacctgcggggaaagcccttcgccatcgaagccgagaacagcatcctggacatcagcggcttcagcaagcagtacaactgtgccttcatctggcagaaggacggcgtgaagaagctgaacctgtacctgatcatcaactacttcaagggcggcaagctgcggttcaagaagatcaaacctgaagccttcgaagccaacagattctacaccgtgatcaacaaaaagagcggcgagatcgtgcccatggaggtgaacttcaacttcgacgaccccaacctgatcatcctgcctctggcctttggcaagagacagggcagagaattcatctggaacgacctgctgtccctggaaaccggcagcctgaagctggccaacggaagagtgatcgagaagacactgtacaacagaagaacccggcaggatgagcctgccctgttcgtggccctgaccttcgagcggcgggaggtcctggactcctccaatatcaaaccaatgaacctgatcggcgtggcaagaggcgaaaacatccccgccgtgatcgccctgaccgaccccgagggctgcccactgagccggtttaaggatagcctgggaaacccaacccacatcctgagaatcggcgagagctataaggagaagcagcggaccatccaggccaagaaggaggtggagcagcggagagccggcggctacagccggaagtacgccagcaaagccaagaatctggcagacgatatggtgagaaacaccgctagagatctgctgtactacgccgtgacccaggatgccatgctgatcttcgccaacctgagccggggcttcggccggcagggcaagcggaccttcatggccgagagacagtacacacggatggaggactggctgaccgccaagctggcctacgagggcctgagcaagacctacctgtccaagacactggcccagtacacctccaagacatgcagcaactgtgggtttaccatcaccagcgccgactacgacagggtgctggagaagctgaagaagacagcaacaggctggatgaccacaattaacggcaaggagctgaaggtggagggccagattacctactacaacagatacaagagacagaacgtagtcaaggacctgtccgtcgagctggatagactgagcgaagaatctgtgaacaacgacatctcctcctggacaaagggcagaagcggagaagctctgagcctcctgaagaaaagattctcccatagacccgtgcaggagaagttcgtgtgcctgaactgcggcttcgagacacacgcagccgagcaagccgccctgaacatcgccagatcctggctgttcctgcggagccaggagtacaagaaataccagacaaacaagacaaccggcaacaccgataagagagccttcgtcgagacctggcagtccttttaccggaagaagcttaaggaggtgtggaaacctgccgtgcggtctggcggatctggcggaggctccaccagccccaagaaaaagagaaaagtctaagctgccttctgcggggcttgccttctggccatgcccttcttctctcccttgcacctgtacctcttggtctttgaataaagcctgagtaggaaggctagcaaaaaaaaaaaaaaaaaaaaaaaaaaaaaaaaaaaaaaaaaaaaaaaaaaaaaaaaaaaaaaaaaaaaaaaaaaaaaaaagcccagccggctccccaacctctaccgaggagggcacctctgagtccgccacccccgagagcggccctggcacctccaccgagcccagcgagggcagcgcacccggcagccctgccggcagccccacctccacagaggagggaaccagcaccgagcccagcgaaggcagcgccccaggcaccagcaccgagcctagtgagcaggagattaaacggatcaacaagatcagaagaagacttgtgaaagacagcaacaccaagaaggccggcaagacaggccccatgaaaaccctgctggttagagtgatgacacccgatctgagagagcggctggaaaacctgagaaagaagcctgaaaatatcccccagcccatcagcaatacatctagagccaacctgaataagctgctgaccgattacaccgaaatgaagaaggcgatcctgcatgtgtactgggaagagttccagaaggaccctgtgggcctgatgagccgggtggcccagcctgccagcaagaagatcgatcagaacaagctgaaacctgagatggacgagaagggcaacctgaccaccgccggctttgcctgctctcagtgtggccagcccctgttcgtgtacaagctggagcaggtgtctgagaagggcaaggcttacaccaactacttcggacggtgcaatgtggccgagcacgaaaagctgatcctgctggcccagctgaagcccgagaaggatagcgacgaagccgtgacatatagcctgggaaagtttgggcagagggccctggatttctacagcattcatgtgaccaaggagtccacccaccccgtgaagcccctggcccagatcgccggaaacagatacgcctccggacctgtgggaaaggccctgagcgacgcatgtatgggcacaatcgcctccttcctgtctaagtaccaggacatcatcatcgaacaccagaaggtggtgaagggcaaccagaagagactggagagcctgcgggagctggccggcaaggaaaacctggaataccctagcgtgaccctgccacctcagcctcacaccaaggagggcgttgatgcctacaacgaagtgatcgcccgggtgcgaatgtgggtgaacctgaacctgtggcagaagctgaagctaagcagagatgatgccaagcctctgctgagactgaagggattcccttcctttcctctggtcgagagacaggccaacgaagtggactggtgggacatggtgtgtaacgtgaagaagctgatcaacgagaaaaaggaggatggcaaggtgttttggcagaatctggctggctacaagagacaggaagccctgagaccatacctgagcagcgaggaagatcggaagaagggaaagaaattcgctcggtaccagctgggcgacctgctgctgcacctggaaaagaagcacggcgaggactggggaaaggtgtacgacgaggcctgggagcggattgacaagaaagtggaaggcctgagcaagcacatcaagctggaagaggaacggagaagcgaggacgcccagagcaaggccgccctgaccgactggctgcgggctaaggccagcttcgtgatcgagggcctgaaggaggccgacaaggacgagttctgcagatgcgagctgaagctgcagaagtggtacggggacctgcggggaaagcccttcgccatcgaagccgagaacagcatcctggacatcagcggcttcagcaagcagtacaactgtgccttcatctggcagaaggacggcgtgaagaagctgaacctgtacctgatcatcaactacttcaagggcggcaagctgcggttcaagaagatcaaacctgaagccttcgaagccaacagattctacaccgtgatcaacaaaaagagcggcgagatcgtgcccatggaggtgaacttcaacttcgacgaccccaacctgatcatcctgcctctggcctttggcaagagacagggcagagaattcatctggaacgacctgctgtccctggaaaccggcagcctgaagctggccaacggaagagtgatcgagaagacactgtacaacagaagaacccggcaggatgagcctgccctgttcgtggccctgaccttcgagcggcgggaggtcctggactcctccaatatcaaaccaatgaacctgatcggcgtggcaagaggcgaaaacatccccgccgtgatcgccctgaccgaccccgagggctgcccactgagccggtttaaggatagcctgggaaacccaacccacatcctgagaatcggcgagagctataaggagaagcagcggaccatccaggccaagaaggaggtggagcagcggagagccggcggctacagccggaagtacgccagcaaagccaagaatctggcagacgatatggtgagaaacaccgctagagatctgctgtactacgccgtgacccaggatgccatgctgatcttcgccaacctgagccggggcttcggccggcagggcaagcggaccttcatggccgagagacagtacacacggatggaggactggctgaccgccaagctggcctacgagggcctgagcaagacctacctgtccaagacactggcccagtacacctccaagacatgcagcaactgtgggtttaccatcaccagcgccgactacgacagggtgctggagaagctgaagaagacagcaacaggctggatgaccacaattaacggcaaggagctgaaggtggagggccagattacctactacaacagatacaagagacagaacgtagtcaaggacctgtccgtcgagctggatagactgagcgaagaatctgtgaacaacgacatctcctcctggacaaagggcagaagcggagaagctctgagcctcctgaagaaaagattctcccatagacccgtgcaggagaagttcgtgtgcctgaactgcggcttcgagacacacgcagccgagcaagccgccctgaacatcgccagatcctggctgttcctgcggagccaggagtacaagaaataccagacaaacaagacaaccggcaacaccgataagagagccttcgtcgagacctggcagtccttttaccggaagaagcttaaggaggtgtggaaacctgccgtgcggtctggcggatctggcggaggctccaccagccccaagaaaaagagaaaagtctaagctgccttctgcggggcttgccttctggccatgcccttcttctctcccttgcacctgtacctcttggtctttgaataaagcctgagtaggaaggctagcaaaaaaaaaaaaaaaaaaaaaaaaaaaaaaaaaaaaaaaaaaaaaaaaaaaaaaaaaaaaaaaaaaaaaaaaaaaaaaaa

SEQ ID NO: 9437 - RNA, 8787 nt, synthetic construct
  source 1..8787: mol_type = other RNA
aggaaataagagagaaaagaagagtaagaagaaatataagagccaccatggcccctaagaagaagcgtaaagtgagccggatgaaccacgaccaggagttcgacccccctaaggtgtaccctcccgtccccgccgagaagagaaagcccatccgggtcctgagcctgttcgatggcatcgccaccggtctgctggtgctgaaggacctgggcatccaggtggataggtacattgcctccgaggtgtgcgaggactccatcaccgtgggaatggtgcgtcatcagggcaagatcatgtacgtgggcgacgtgcggagcgtgacacagaagcatatccaggagtggggccctttcgacctggtgatcggcggcagcccttgcaatgacctgagcatcgtgaacccagcccggaagggcctgtacgagggaaccggcagactgttcttcgagttttacagactgctgcacgacgcccggcctaaggaaggcgacgaccggcccttcttttggctgttcgagaatgtggtggccatgggagtcagcgacaagcgggatattagccggttcctggagagcaaccccgtgatgatcgatgccaaggaagtgagcgccgcccaccgggccagatacttctggggcaatctgcctggcatgaacagacccctggccagcaccgtgaacgacaagctggagctgcaggagtgcctggagcacggccggatcgccaagttcagcaaggtgagaaccatcaccacccgaagcaacagcatcaaacaaggcaaggaccagcactttcctgtgttcatgaacgagaaggaggacatcctgtggtgtaccgagatggagagagtgttcgggttcccagtccactacacagatgtcagcaacatgtctagactggccagacagagactgctgggaagaagctggtccgtccctgtgatcagacacctgttcgcccctctgaaggagtacttcgcctgcgtgagcagcggcaacagcaacgccaacagccggggccccagcttctctagcggcctggtgccactgtccctgagagggagccacatgggccccatggagatctacaaaaccgtgagcgcctggaagcggcagcctgtgcgcgtgctgagcctgtttcggaatatcgataaagtcctgaaaagcctgggattcctggagagcggctctggctccggcggtggcaccctgaagtacgtggaggatgtgacaaacgtggtcagacgggatgtggagaagtggggccccttcgatctggtgtacggcagcacccaacccctgggcagctcttgtgaccggtgccctggctggtacatgtttcagttccaccggatcctgcagtacgccctgccgagacaggagtcccagcggccattcttttggattttcatggacaacttgctgctgaccgaggatgaccaggaaactaccactcggttcctgcagaccgaagccgtgaccctgcaggacgtgagaggccgggactaccagaacgccatgcgggtgtggtccaacatccctggactgaaaagcaagcacgcacctctgacccctaaagaagaggagtacctgcaggcccaggtgcggagcagaagcaagctggacgcccctaaggtggatctgctggtgaagaattgcctcctgcccctgagagagtacttcaagtatttcagccagaatagtctgcccctgggaggcagcggcggcggcctgcaggtgagcgtgagcttcgaggacgtgaccgtggacttcagcagggaggagtggcagcacctggaccccgcccagaggaggctgtacagggacgtgaccctggagaactacagccacctgtgcagcgtgggctaccaggtgcccaagcccgaggtgatcttcaagctggagcagggcgagggcccctggatgctggagggcgaggccccccaccagagctgcagcgacgacgacatcggcggcggcccaagcagcggcgcccctcctcccagcggcggcaggcggcccaagcagcggcgcccctcctcccagcggcggcagcccagccggctccccaacctctaccgaggagggcacctctgagtccgccacccccgagagcggccctggcacctccaccgagcccagcgagggcagcgcacccggcagccctgccggcagccccacctccacagaggagggaaccagcaccgagcccagcgaaggcagcgccccaggcaccagcaccgagcctagtgagcaggagattaaacggatcaacaagatcagaagaagacttgtgaaagacagcaacaccaagaaggccggcaagacaggccccatgaaaaccctgctggttagagtgatgacacccgatctgagagagcggctggaaaacctgagaaagaagcctgaaaatatcccccagcccatcagcaatacatctagagccaacctgaataagctgctgaccgattacaccgaaatgaagaaggcgatcctgcatgtgtactgggaagagttccagaaggaccctgtgggcctgatgagccgggtggcccagcctgccagcaagaagatcgatcagaacaagctgaaacctgagatggacgagaagggcaacctgaccaccgccggctttgcctgctctcagtgtggccagcccctgttcgtgtacaagctggagcaggtgtctgagaagggcaaggcttacaccaactacttcggacggtgcaatgtggccgagcacgaaaagctgatcctgctggcccagctgaagcccgagaaggatagcgacgaagccgtgacatatagcctgggaaagtttgggcagagggccctggatttctacagcattcatgtgaccaaggagtccacccaccccgtgaagcccctggcccagatcgccggaaacagatacgcctccggacctgtgggaaaggccctgagcgacgcatgtatgggcacaatcgcctccttcctgtctaagtaccaggacatcatcatcgaacaccagaaggtggtgaagggcaaccagaagagactggagagcctgcgggagctggccggcaaggaaaacctggaataccctagcgtgaccctgccacctcagcctcacaccaaggagggcgttgatgcctacaacgaagtgatcgcccgggtgcgaatgtgggtgaacctgaacctgtggcagaagctgaagctaagcagagatgatgccaagcctctgctgagactgaagggattcccttcctttcctctggtcgagagacaggccaacgaagtggactggtgggacatggtgtgtaacgtgaagaagctgatcaacgagaaaaaggaggatggcaaggtgttttggcagaatctggctggctacaagagacaggaagccctgagaccatacctgagcagcgaggaagatcggaagaagggaaagaaattcgctcggtaccagctgggcgacctgctgctgcacctggaaaagaagcacggcgaggactggggaaaggtgtacgacgaggcctgggagcggattgacaagaaagtggaaggcctgagcaagcacatcaagctggaagaggaacggagaagcgaggacgcccagagcaaggccgccctgaccgactggctgcgggctaaggccagcttcgtgatcgagggcctgaaggaggccgacaaggacgagttctgcagatgcgagctgaagctgcagaagtggtacggggacctgcggggaaagcccttcgccatcgaagccgagaacagcatcctggacatcagcggcttcagcaagcagtacaactgtgccttcatctggcagaaggacggcgtgaagaagctgaacctgtacctgatcatcaactacttcaagggcggcaagctgcggttcaagaagatcaaacctgaagccttcgaagccaacagattctacaccgtgatcaacaaaaagagcggcgagatcgtgcccatggaggtgaacttcaacttcgacgaccccaacctgatcatcctgcctctggcctttggcaagagacagggcagagaattcatctggaacgacctgctgtccctggaaaccggcagcctgaagctggccaacggaagagtgatcgagaagacactgtacaacagaagaacccggcaggatgagcctgccctgttcgtggccctgaccttcgagcggcgggaggtcctggactcctccaatatcaaaccaatgaacctgatcggcgtggcaagaggcgaaaacatccccgccgtgatcgccctgaccgaccccgagggctgcccactgagccggtttaaggatagcctgggaaacccaacccacatcctgagaatcggcgagagctataaggagaagcagcggaccatccaggccaagaaggaggtggagcagcggagagccggcggctacagccggaagtacgccagcaaagccaagaatctggcagacgatatggtgagaaacaccgctagagatctgctgtactacgccgtgacccaggatgccatgctgatcttcgccaacctgagccggggcttcggccggcagggcaagcggaccttcatggccgagagacagtacacacggatggaggactggctgaccgccaagctggcctacgagggcctgagcaagacctacctgtccaagacactggcccagtacacctccaagacatgcagcaactgtgggtttaccatcaccagcgccgactacgacagggtgctggagaagctgaagaagacagcaacaggctggatgaccacaattaacggcaaggagctgaaggtggagggccagattacctactacaacagatacaagagacagaacgtagtcaaggacctgtccgtcgagctggatagactgagcgaagaatctgtgaacaacgacatctcctcctggacaaagggcagaagcggagaagctctgagcctcctgaagaaaagattctcccatagacccgtgcaggagaagttcgtgtgcctgaactgcggcttcgagacacacgcagccgagcaagccgccctgaacatcgccagatcctggctgttcctgcggagccaggagtacaagaaataccagacaaacaagacaaccggcaacaccgataagagagccttcgtcgagacctggcagtccttttaccggaagaagcttaaggaggtgtggaaacctgccgtgcggtctggcggatctggcggaggctccaccagccccaagaaaaagagaaaagtctaagctgccttctgcggggcttgccttctggccatgcccttcttctctcccttgcacctgtacctcttggtctttgaataaagcctgagtaggaaggctagcaaaaaaaaaaaaaaaaaaaaaaaaaaaaaaaaaaaaaaaaaaaaaaaaaaaaaaaaaaaaaaaaaaaaaaaaaaaaaaaagcccagccggctccccaacctctaccgaggagggcacctctgagtccgccacccccgagagcggccctggcacctccaccgagcccagcgagggcagcgcacccggcagccctgccggcagccccacctccacagaggagggaaccagcaccgagcccagcgaaggcagcgccccaggcaccagcaccgagcctagtgagcaggagattaaacggatcaacaagatcagaagaagacttgtgaaagacagcaacaccaagaaggccggcaagacaggccccatgaaaaccctgctggttagagtgatgacacccgatctgagagagcggctggaaaacctgagaaagaagcctgaaaatatcccccagcccatcagcaatacatctagagccaacctgaataagctgctgaccgattacaccgaaatgaagaaggcgatcctgcatgtgtactgggaagagttccagaaggaccctgtgggcctgatgagccgggtggcccagcctgccagcaagaagatcgatcagaacaagctgaaacctgagatggacgagaagggcaacctgaccaccgccggctttgcctgctctcagtgtggccagcccctgttcgtgtacaagctggagcaggtgtctgagaagggcaaggcttacaccaactacttcggacggtgcaatgtggccgagcacgaaaagctgatcctgctggcccagctgaagcccgagaaggatagcgacgaagccgtgacatatagcctgggaaagtttgggcagagggccctggatttctacagcattcatgtgaccaaggagtccacccaccccgtgaagcccctggcccagatcgccggaaacagatacgcctccggacctgtgggaaaggccctgagcgacgcatgtatgggcacaatcgcctccttcctgtctaagtaccaggacatcatcatcgaacaccagaaggtggtgaagggcaaccagaagagactggagagcctgcgggagctggccggcaaggaaaacctggaataccctagcgtgaccctgccacctcagcctcacaccaaggagggcgttgatgcctacaacgaagtgatcgcccgggtgcgaatgtgggtgaacctgaacctgtggcagaagctgaagctaagcagagatgatgccaagcctctgctgagactgaagggattcccttcctttcctctggtcgagagacaggccaacgaagtggactggtgggacatggtgtgtaacgtgaagaagctgatcaacgagaaaaaggaggatggcaaggtgttttggcagaatctggctggctacaagagacaggaagccctgagaccatacctgagcagcgaggaagatcggaagaagggaaagaaattcgctcggtaccagctgggcgacctgctgctgcacctggaaaagaagcacggcgaggactggggaaaggtgtacgacgaggcctgggagcggattgacaagaaagtggaaggcctgagcaagcacatcaagctggaagaggaacggagaagcgaggacgcccagagcaaggccgccctgaccgactggctgcgggctaaggccagcttcgtgatcgagggcctgaaggaggccgacaaggacgagttctgcagatgcgagctgaagctgcagaagtggtacggggacctgcggggaaagcccttcgccatcgaagccgagaacagcatcctggacatcagcggcttcagcaagcagtacaactgtgccttcatctggcagaaggacggcgtgaagaagctgaacctgtacctgatcatcaactacttcaagggcggcaagctgcggttcaagaagatcaaacctgaagccttcgaagccaacagattctacaccgtgatcaacaaaaagagcggcgagatcgtgcccatggaggtgaacttcaacttcgacgaccccaacctgatcatcctgcctctggcctttggcaagagacagggcagagaattcatctggaacgacctgctgtccctggaaaccggcagcctgaagctggccaacggaagagtgatcgagaagacactgtacaacagaagaacccggcaggatgagcctgccctgttcgtggccctgaccttcgagcggcgggaggtcctggactcctccaatatcaaaccaatgaacctgatcggcgtggcaagaggcgaaaacatccccgccgtgatcgccctgaccgaccccgagggctgcccactgagccggtttaaggatagcctgggaaacccaacccacatcctgagaatcggcgagagctataaggagaagcagcggaccatccaggccaagaaggaggtggagcagcggagagccggcggctacagccggaagtacgccagcaaagccaagaatctggcagacgatatggtgagaaacaccgctagagatctgctgtactacgccgtgacccaggatgccatgctgatcttcgccaacctgagccggggcttcggccggcagggcaagcggaccttcatggccgagagacagtacacacggatggaggactggctgaccgccaagctggcctacgagggcctgagcaagacctacctgtccaagacactggcccagtacacctccaagacatgcagcaactgtgggtttaccatcaccagcgccgactacgacagggtgctggagaagctgaagaagacagcaacaggctggatgaccacaattaacggcaaggagctgaaggtggagggccagattacctactacaacagatacaagagacagaacgtagtcaaggacctgtccgtcgagctggatagactgagcgaagaatctgtgaacaacgacatctcctcctggacaaagggcagaagcggagaagctctgagcctcctgaagaaaagattctcccatagacccgtgcaggagaagttcgtgtgcctgaactgcggcttcgagacacacgcagccgagcaagccgccctgaacatcgccagatcctggctgttcctgcggagccaggagtacaagaaataccagacaaacaagacaaccggcaacaccgataagagagccttcgtcgagacctggcagtccttttaccggaagaagcttaaggaggtgtggaaacctgccgtgcggtctggcggatctggcggaggctccaccagccccaagaaaaagagaaaagtctaagctgccttctgcggggcttgccttctggccatgcccttcttctctcccttgcacctgtacctcttggtctttgaataaagcctgagtaggaaggctagcaaaaaaaaaaaaaaaaaaaaaaaaaaaaaaaaaaaaaaaaaaaaaaaaaaaaaaaaaaaaaaaaaaaaaaaaaaaaaaaa

SEQ ID NO: 9438 - RNA, 8787 nt, synthetic construct
  source 1..8787: mol_type = other RNA
aggaaataagagagaaaagaagagtaagaagaaatataagagccaccatggcccctaagaagaagcgtaaagtgagccggatgaaccacgaccaggagttcgacccccctaaggtgtaccctcccgtccccgccgagaagagaaagcccatccgggtcctgagcctgttcgatggcatcgccaccggtctgctggtgctgaaggacctgggcatccaggtggataggtacattgcctccgaggtgtgcgaggactccatcaccgtgggaatggtgcgtcatcagggcaagatcatgtacgtgggcgacgtgcggagcgtgacacagaagcatatccaggagtggggccctttcgacctggtgatcggcggcagcccttgcaatgacctgagcatcgtgaacccagcccggaagggcctgtacgagggaaccggcagactgttcttcgagttttacagactgctgcacgacgcccggcctaaggaaggcgacgaccggcccttcttttggctgttcgagaatgtggtggccatgggagtcagcgacaagcgggatattagccggttcctggagagcaaccccgtgatgatcgatgccaaggaagtgagcgccgcccaccgggccagatacttctggggcaatctgcctggcatgaacagacccctggccagcaccgtgaacgacaagctggagctgcaggagtgcctggagcacggccggatcgccaagttcagcaaggtgagaaccatcaccacccgaagcaacagcatcaaacaaggcaaggaccagcactttcctgtgttcatgaacgagaaggaggacatcctgtggtgtaccgagatggagagagtgttcgggttcccagtccactacacagatgtcagcaacatgtctagactggccagacagagactgctgggaagaagctggtccgtccctgtgatcagacacctgttcgcccctctgaaggagtacttcgcctgcgtgagcagcggcaacagcaacgccaacagccggggccccagcttctctagcggcctggtgccactgtccctgagagggagccacatgggccccatggagatctacaaaaccgtgagcgcctggaagcggcagcctgtgcgcgtgctgagcctgtttcggaatatcgataaagtcctgaaaagcctgggattcctggagagcggctctggctccggcggtggcaccctgaagtacgtggaggatgtgacaaacgtggtcagacgggatgtggagaagtggggccccttcgatctggtgtacggcagcacccaacccctgggcagctcttgtgaccggtgccctggctggtacatgtttcagttccaccggatcctgcagtacgccctgccgagacaggagtcccagcggccattcttttggattttcatggacaacttgctgctgaccgaggatgaccaggaaactaccactcggttcctgcagaccgaagccgtgaccctgcaggacgtgagaggccgggactaccagaacgccatgcgggtgtggtccaacatccctggactgaaaagcaagcacgcacctctgacccctaaagaagaggagtacctgcaggcccaggtgcggagcagaagcaagctggacgcccctaaggtggatctgctggtgaagaattgcctcctgcccctgagagagtacttcaagtatttcagccagaatagtctgcccctgggaggcagcggcggcggcggcagcctgaccttcagggacgtggccatcgagttcagcctggaggagtggcagtgcctggacaccgcccagcagaacctgtacaggaacgtgatgctggagaactacaggaacctggtgttcctgggcatcgccgcccccaagcccgacctgatcatcttcctggagcagggcaaggagccctggaacgtgaagaggcacgagatggtggaggagccccccgtgatctgcagccacttcgccggcggcccaagcagcggcgcccctcctcccagcggcggcaggcggcccaagcagcggcgcccctcctcccagcggcggcagcccagccggctccccaacctctaccgaggagggcacctctgagtccgccacccccgagagcggccctggcacctccaccgagcccagcgagggcagcgcacccggcagccctgccggcagccccacctccacagaggagggaaccagcaccgagcccagcgaaggcagcgccccaggcaccagcaccgagcctagtgagcaggagattaaacggatcaacaagatcagaagaagacttgtgaaagacagcaacaccaagaaggccggcaagacaggccccatgaaaaccctgctggttagagtgatgacacccgatctgagagagcggctggaaaacctgagaaagaagcctgaaaatatcccccagcccatcagcaatacatctagagccaacctgaataagctgctgaccgattacaccgaaatgaagaaggcgatcctgcatgtgtactgggaagagttccagaaggaccctgtgggcctgatgagccgggtggcccagcctgccagcaagaagatcgatcagaacaagctgaaacctgagatggacgagaagggcaacctgaccaccgccggctttgcctgctctcagtgtggccagcccctgttcgtgtacaagctggagcaggtgtctgagaagggcaaggcttacaccaactacttcggacggtgcaatgtggccgagcacgaaaagctgatcctgctggcccagctgaagcccgagaaggatagcgacgaagccgtgacatatagcctgggaaagtttgggcagagggccctggatttctacagcattcatgtgaccaaggagtccacccaccccgtgaagcccctggcccagatcgccggaaacagatacgcctccggacctgtgggaaaggccctgagcgacgcatgtatgggcacaatcgcctccttcctgtctaagtaccaggacatcatcatcgaacaccagaaggtggtgaagggcaaccagaagagactggagagcctgcgggagctggccggcaaggaaaacctggaataccctagcgtgaccctgccacctcagcctcacaccaaggagggcgttgatgcctacaacgaagtgatcgcccgggtgcgaatgtgggtgaacctgaacctgtggcagaagctgaagctaagcagagatgatgccaagcctctgctgagactgaagggattcccttcctttcctctggtcgagagacaggccaacgaagtggactggtgggacatggtgtgtaacgtgaagaagctgatcaacgagaaaaaggaggatggcaaggtgttttggcagaatctggctggctacaagagacaggaagccctgagaccatacctgagcagcgaggaagatcggaagaagggaaagaaattcgctcggtaccagctgggcgacctgctgctgcacctggaaaagaagcacggcgaggactggggaaaggtgtacgacgaggcctgggagcggattgacaagaaagtggaaggcctgagcaagcacatcaagctggaagaggaacggagaagcgaggacgcccagagcaaggccgccctgaccgactggctgcgggctaaggccagcttcgtgatcgagggcctgaaggaggccgacaaggacgagttctgcagatgcgagctgaagctgcagaagtggtacggggacctgcggggaaagcccttcgccatcgaagccgagaacagcatcctggacatcagcggcttcagcaagcagtacaactgtgccttcatctggcagaaggacggcgtgaagaagctgaacctgtacctgatcatcaactacttcaagggcggcaagctgcggttcaagaagatcaaacctgaagccttcgaagccaacagattctacaccgtgatcaacaaaaagagcggcgagatcgtgcccatggaggtgaacttcaacttcgacgaccccaacctgatcatcctgcctctggcctttggcaagagacagggcagagaattcatctggaacgacctgctgtccctggaaaccggcagcctgaagctggccaacggaagagtgatcgagaagacactgtacaacagaagaacccggcaggatgagcctgccctgttcgtggccctgaccttcgagcggcgggaggtcctggactcctccaatatcaaaccaatgaacctgatcggcgtggcaagaggcgaaaacatccccgccgtgatcgccctgaccgaccccgagggctgcccactgagccggtttaaggatagcctgggaaacccaacccacatcctgagaatcggcgagagctataaggagaagcagcggaccatccaggccaagaaggaggtggagcagcggagagccggcggctacagccggaagtacgccagcaaagccaagaatctggcagacgatatggtgagaaacaccgctagagatctgctgtactacgccgtgacccaggatgccatgctgatcttcgccaacctgagccggggcttcggccggcagggcaagcggaccttcatggccgagagacagtacacacggatggaggactggctgaccgccaagctggcctacgagggcctgagcaagacctacctgtccaagacactggcccagtacacctccaagacatgcagcaactgtgggtttaccatcaccagcgccgactacgacagggtgctggagaagctgaagaagacagcaacaggctggatgaccacaattaacggcaaggagctgaaggtggagggccagattacctactacaacagatacaagagacagaacgtagtcaaggacctgtccgtcgagctggatagactgagcgaagaatctgtgaacaacgacatctcctcctggacaaagggcagaagcggagaagctctgagcctcctgaagaaaagattctcccatagacccgtgcaggagaagttcgtgtgcctgaactgcggcttcgagacacacgcagccgagcaagccgccctgaacatcgccagatcctggctgttcctgcggagccaggagtacaagaaataccagacaaacaagacaaccggcaacaccgataagagagccttcgtcgagacctggcagtccttttaccggaagaagcttaaggaggtgtggaaacctgccgtgcggtctggcggatctggcggaggctccaccagccccaagaaaaagagaaaagtctaagctgccttctgcggggcttgccttctggccatgcccttcttctctcccttgcacctgtacctcttggtctttgaataaagcctgagtaggaaggctagcaaaaaaaaaaaaaaaaaaaaaaaaaaaaaaaaaaaaaaaaaaaaaaaaaaaaaaaaaaaaaaaaaaaaaaaaaaaaaaaagcccagccggctccccaacctctaccgaggagggcacctctgagtccgccacccccgagagcggccctggcacctccaccgagcccagcgagggcagcgcacccggcagccctgccggcagccccacctccacagaggagggaaccagcaccgagcccagcgaaggcagcgccccaggcaccagcaccgagcctagtgagcaggagattaaacggatcaacaagatcagaagaagacttgtgaaagacagcaacaccaagaaggccggcaagacaggccccatgaaaaccctgctggttagagtgatgacacccgatctgagagagcggctggaaaacctgagaaagaagcctgaaaatatcccccagcccatcagcaatacatctagagccaacctgaataagctgctgaccgattacaccgaaatgaagaaggcgatcctgcatgtgtactgggaagagttccagaaggaccctgtgggcctgatgagccgggtggcccagcctgccagcaagaagatcgatcagaacaagctgaaacctgagatggacgagaagggcaacctgaccaccgccggctttgcctgctctcagtgtggccagcccctgttcgtgtacaagctggagcaggtgtctgagaagggcaaggcttacaccaactacttcggacggtgcaatgtggccgagcacgaaaagctgatcctgctggcccagctgaagcccgagaaggatagcgacgaagccgtgacatatagcctgggaaagtttgggcagagggccctggatttctacagcattcatgtgaccaaggagtccacccaccccgtgaagcccctggcccagatcgccggaaacagatacgcctccggacctgtgggaaaggccctgagcgacgcatgtatgggcacaatcgcctccttcctgtctaagtaccaggacatcatcatcgaacaccagaaggtggtgaagggcaaccagaagagactggagagcctgcgggagctggccggcaaggaaaacctggaataccctagcgtgaccctgccacctcagcctcacaccaaggagggcgttgatgcctacaacgaagtgatcgcccgggtgcgaatgtgggtgaacctgaacctgtggcagaagctgaagctaagcagagatgatgccaagcctctgctgagactgaagggattcccttcctttcctctggtcgagagacaggccaacgaagtggactggtgggacatggtgtgtaacgtgaagaagctgatcaacgagaaaaaggaggatggcaaggtgttttggcagaatctggctggctacaagagacaggaagccctgagaccatacctgagcagcgaggaagatcggaagaagggaaagaaattcgctcggtaccagctgggcgacctgctgctgcacctggaaaagaagcacggcgaggactggggaaaggtgtacgacgaggcctgggagcggattgacaagaaagtggaaggcctgagcaagcacatcaagctggaagaggaacggagaagcgaggacgcccagagcaaggccgccctgaccgactggctgcgggctaaggccagcttcgtgatcgagggcctgaaggaggccgacaaggacgagttctgcagatgcgagctgaagctgcagaagtggtacggggacctgcggggaaagcccttcgccatcgaagccgagaacagcatcctggacatcagcggcttcagcaagcagtacaactgtgccttcatctggcagaaggacggcgtgaagaagctgaacctgtacctgatcatcaactacttcaagggcggcaagctgcggttcaagaagatcaaacctgaagccttcgaagccaacagattctacaccgtgatcaacaaaaagagcggcgagatcgtgcccatggaggtgaacttcaacttcgacgaccccaacctgatcatcctgcctctggcctttggcaagagacagggcagagaattcatctggaacgacctgctgtccctggaaaccggcagcctgaagctggccaacggaagagtgatcgagaagacactgtacaacagaagaacccggcaggatgagcctgccctgttcgtggccctgaccttcgagcggcgggaggtcctggactcctccaatatcaaaccaatgaacctgatcggcgtggcaagaggcgaaaacatccccgccgtgatcgccctgaccgaccccgagggctgcccactgagccggtttaaggatagcctgggaaacccaacccacatcctgagaatcggcgagagctataaggagaagcagcggaccatccaggccaagaaggaggtggagcagcggagagccggcggctacagccggaagtacgccagcaaagccaagaatctggcagacgatatggtgagaaacaccgctagagatctgctgtactacgccgtgacccaggatgccatgctgatcttcgccaacctgagccggggcttcggccggcagggcaagcggaccttcatggccgagagacagtacacacggatggaggactggctgaccgccaagctggcctacgagggcctgagcaagacctacctgtccaagacactggcccagtacacctccaagacatgcagcaactgtgggtttaccatcaccagcgccgactacgacagggtgctggagaagctgaagaagacagcaacaggctggatgaccacaattaacggcaaggagctgaaggtggagggccagattacctactacaacagatacaagagacagaacgtagtcaaggacctgtccgtcgagctggatagactgagcgaagaatctgtgaacaacgacatctcctcctggacaaagggcagaagcggagaagctctgagcctcctgaagaaaagattctcccatagacccgtgcaggagaagttcgtgtgcctgaactgcggcttcgagacacacgcagccgagcaagccgccctgaacatcgccagatcctggctgttcctgcggagccaggagtacaagaaataccagacaaacaagacaaccggcaacaccgataagagagccttcgtcgagacctggcagtccttttaccggaagaagcttaaggaggtgtggaaacctgccgtgcggtctggcggatctggcggaggctccaccagccccaagaaaaagagaaaagtctaagctgccttctgcggggcttgccttctggccatgcccttcttctctcccttgcacctgtacctcttggtctttgaataaagcctgagtaggaaggctagcaaaaaaaaaaaaaaaaaaaaaaaaaaaaaaaaaaaaaaaaaaaaaaaaaaaaaaaaaaaaaaaaaaaaaaaaaaaaaaaa

SEQ ID NO: 9439 - RNA, 8787 nt, synthetic construct
  source 1..8787: mol_type = other RNA
aggaaataagagagaaaagaagagtaagaagaaatataagagccaccatggcccctaagaagaagcgtaaagtgagccggatgaaccacgaccaggagttcgacccccctaaggtgtaccctcccgtccccgccgagaagagaaagcccatccgggtcctgagcctgttcgatggcatcgccaccggtctgctggtgctgaaggacctgggcatccaggtggataggtacattgcctccgaggtgtgcgaggactccatcaccgtgggaatggtgcgtcatcagggcaagatcatgtacgtgggcgacgtgcggagcgtgacacagaagcatatccaggagtggggccctttcgacctggtgatcggcggcagcccttgcaatgacctgagcatcgtgaacccagcccggaagggcctgtacgagggaaccggcagactgttcttcgagttttacagactgctgcacgacgcccggcctaaggaaggcgacgaccggcccttcttttggctgttcgagaatgtggtggccatgggagtcagcgacaagcgggatattagccggttcctggagagcaaccccgtgatgatcgatgccaaggaagtgagcgccgcccaccgggccagatacttctggggcaatctgcctggcatgaacagacccctggccagcaccgtgaacgacaagctggagctgcaggagtgcctggagcacggccggatcgccaagttcagcaaggtgagaaccatcaccacccgaagcaacagcatcaaacaaggcaaggaccagcactttcctgtgttcatgaacgagaaggaggacatcctgtggtgtaccgagatggagagagtgttcgggttcccagtccactacacagatgtcagcaacatgtctagactggccagacagagactgctgggaagaagctggtccgtccctgtgatcagacacctgttcgcccctctgaaggagtacttcgcctgcgtgagcagcggcaacagcaacgccaacagccggggccccagcttctctagcggcctggtgccactgtccctgagagggagccacatgggccccatggagatctacaaaaccgtgagcgcctggaagcggcagcctgtgcgcgtgctgagcctgtttcggaatatcgataaagtcctgaaaagcctgggattcctggagagcggctctggctccggcggtggcaccctgaagtacgtggaggatgtgacaaacgtggtcagacgggatgtggagaagtggggccccttcgatctggtgtacggcagcacccaacccctgggcagctcttgtgaccggtgccctggctggtacatgtttcagttccaccggatcctgcagtacgccctgccgagacaggagtcccagcggccattcttttggattttcatggacaacttgctgctgaccgaggatgaccaggaaactaccactcggttcctgcagaccgaagccgtgaccctgcaggacgtgagaggccgggactaccagaacgccatgcgggtgtggtccaacatccctggactgaaaagcaagcacgcacctctgacccctaaagaagaggagtacctgcaggcccaggtgcggagcagaagcaagctggacgcccctaaggtggatctgctggtgaagaattgcctcctgcccctgagagagtacttcaagtatttcagccagaatagtctgcccctgggaggcagcggcggcggcatggccgccgccgccctgagggaccccgcccagcagggctacgtgaccttcgaggacgtggccgtgtacttcagccaggaggagtggaggctgctggacgaggcccagaagctgctgtacaggaacgtgatgctggagaacttcagcctgctggccagcctgggcctggccagcagcaagacccacgagatcacccagctggagagctgggaggagcccttcatgcccgcctgggaggccgtgggcggcccaagcagcggcgcccctcctcccagcggcggcaggcggcccaagcagcggcgcccctcctcccagcggcggcagcccagccggctccccaacctctaccgaggagggcacctctgagtccgccacccccgagagcggccctggcacctccaccgagcccagcgagggcagcgcacccggcagccctgccggcagccccacctccacagaggagggaaccagcaccgagcccagcgaaggcagcgccccaggcaccagcaccgagcctagtgagcaggagattaaacggatcaacaagatcagaagaagacttgtgaaagacagcaacaccaagaaggccggcaagacaggccccatgaaaaccctgctggttagagtgatgacacccgatctgagagagcggctggaaaacctgagaaagaagcctgaaaatatcccccagcccatcagcaatacatctagagccaacctgaataagctgctgaccgattacaccgaaatgaagaaggcgatcctgcatgtgtactgggaagagttccagaaggaccctgtgggcctgatgagccgggtggcccagcctgccagcaagaagatcgatcagaacaagctgaaacctgagatggacgagaagggcaacctgaccaccgccggctttgcctgctctcagtgtggccagcccctgttcgtgtacaagctggagcaggtgtctgagaagggcaaggcttacaccaactacttcggacggtgcaatgtggccgagcacgaaaagctgatcctgctggcccagctgaagcccgagaaggatagcgacgaagccgtgacatatagcctgggaaagtttgggcagagggccctggatttctacagcattcatgtgaccaaggagtccacccaccccgtgaagcccctggcccagatcgccggaaacagatacgcctccggacctgtgggaaaggccctgagcgacgcatgtatgggcacaatcgcctccttcctgtctaagtaccaggacatcatcatcgaacaccagaaggtggtgaagggcaaccagaagagactggagagcctgcgggagctggccggcaaggaaaacctggaataccctagcgtgaccctgccacctcagcctcacaccaaggagggcgttgatgcctacaacgaagtgatcgcccgggtgcgaatgtgggtgaacctgaacctgtggcagaagctgaagctaagcagagatgatgccaagcctctgctgagactgaagggattcccttcctttcctctggtcgagagacaggccaacgaagtggactggtgggacatggtgtgtaacgtgaagaagctgatcaacgagaaaaaggaggatggcaaggtgttttggcagaatctggctggctacaagagacaggaagccctgagaccatacctgagcagcgaggaagatcggaagaagggaaagaaattcgctcggtaccagctgggcgacctgctgctgcacctggaaaagaagcacggcgaggactggggaaaggtgtacgacgaggcctgggagcggattgacaagaaagtggaaggcctgagcaagcacatcaagctggaagaggaacggagaagcgaggacgcccagagcaaggccgccctgaccgactggctgcgggctaaggccagcttcgtgatcgagggcctgaaggaggccgacaaggacgagttctgcagatgcgagctgaagctgcagaagtggtacggggacctgcggggaaagcccttcgccatcgaagccgagaacagcatcctggacatcagcggcttcagcaagcagtacaactgtgccttcatctggcagaaggacggcgtgaagaagctgaacctgtacctgatcatcaactacttcaagggcggcaagctgcggttcaagaagatcaaacctgaagccttcgaagccaacagattctacaccgtgatcaacaaaaagagcggcgagatcgtgcccatggaggtgaacttcaacttcgacgaccccaacctgatcatcctgcctctggcctttggcaagagacagggcagagaattcatctggaacgacctgctgtccctggaaaccggcagcctgaagctggccaacggaagagtgatcgagaagacactgtacaacagaagaacccggcaggatgagcctgccctgttcgtggccctgaccttcgagcggcgggaggtcctggactcctccaatatcaaaccaatgaacctgatcggcgtggcaagaggcgaaaacatccccgccgtgatcgccctgaccgaccccgagggctgcccactgagccggtttaaggatagcctgggaaacccaacccacatcctgagaatcggcgagagctataaggagaagcagcggaccatccaggccaagaaggaggtggagcagcggagagccggcggctacagccggaagtacgccagcaaagccaagaatctggcagacgatatggtgagaaacaccgctagagatctgctgtactacgccgtgacccaggatgccatgctgatcttcgccaacctgagccggggcttcggccggcagggcaagcggaccttcatggccgagagacagtacacacggatggaggactggctgaccgccaagctggcctacgagggcctgagcaagacctacctgtccaagacactggcccagtacacctccaagacatgcagcaactgtgggtttaccatcaccagcgccgactacgacagggtgctggagaagctgaagaagacagcaacaggctggatgaccacaattaacggcaaggagctgaaggtggagggccagattacctactacaacagatacaagagacagaacgtagtcaaggacctgtccgtcgagctggatagactgagcgaagaatctgtgaacaacgacatctcctcctggacaaagggcagaagcggagaagctctgagcctcctgaagaaaagattctcccatagacccgtgcaggagaagttcgtgtgcctgaactgcggcttcgagacacacgcagccgagcaagccgccctgaacatcgccagatcctggctgttcctgcggagccaggagtacaagaaataccagacaaacaagacaaccggcaacaccgataagagagccttcgtcgagacctggcagtccttttaccggaagaagcttaaggaggtgtggaaacctgccgtgcggtctggcggatctggcggaggctccaccagccccaagaaaaagagaaaagtctaagctgccttctgcggggcttgccttctggccatgcccttcttctctcccttgcacctgtacctcttggtctttgaataaagcctgagtaggaaggctagcaaaaaaaaaaaaaaaaaaaaaaaaaaaaaaaaaaaaaaaaaaaaaaaaaaaaaaaaaaaaaaaaaaaaaaaaaaaaaaaagcccagccggctccccaacctctaccgaggagggcacctctgagtccgccacccccgagagcggccctggcacctccaccgagcccagcgagggcagcgcacccggcagccctgccggcagccccacctccacagaggagggaaccagcaccgagcccagcgaaggcagcgccccaggcaccagcaccgagcctagtgagcaggagattaaacggatcaacaagatcagaagaagacttgtgaaagacagcaacaccaagaaggccggcaagacaggccccatgaaaaccctgctggttagagtgatgacacccgatctgagagagcggctggaaaacctgagaaagaagcctgaaaatatcccccagcccatcagcaatacatctagagccaacctgaataagctgctgaccgattacaccgaaatgaagaaggcgatcctgcatgtgtactgggaagagttccagaaggaccctgtgggcctgatgagccgggtggcccagcctgccagcaagaagatcgatcagaacaagctgaaacctgagatggacgagaagggcaacctgaccaccgccggctttgcctgctctcagtgtggccagcccctgttcgtgtacaagctggagcaggtgtctgagaagggcaaggcttacaccaactacttcggacggtgcaatgtggccgagcacgaaaagctgatcctgctggcccagctgaagcccgagaaggatagcgacgaagccgtgacatatagcctgggaaagtttgggcagagggccctggatttctacagcattcatgtgaccaaggagtccacccaccccgtgaagcccctggcccagatcgccggaaacagatacgcctccggacctgtgggaaaggccctgagcgacgcatgtatgggcacaatcgcctccttcctgtctaagtaccaggacatcatcatcgaacaccagaaggtggtgaagggcaaccagaagagactggagagcctgcgggagctggccggcaaggaaaacctggaataccctagcgtgaccctgccacctcagcctcacaccaaggagggcgttgatgcctacaacgaagtgatcgcccgggtgcgaatgtgggtgaacctgaacctgtggcagaagctgaagctaagcagagatgatgccaagcctctgctgagactgaagggattcccttcctttcctctggtcgagagacaggccaacgaagtggactggtgggacatggtgtgtaacgtgaagaagctgatcaacgagaaaaaggaggatggcaaggtgttttggcagaatctggctggctacaagagacaggaagccctgagaccatacctgagcagcgaggaagatcggaagaagggaaagaaattcgctcggtaccagctgggcgacctgctgctgcacctggaaaagaagcacggcgaggactggggaaaggtgtacgacgaggcctgggagcggattgacaagaaagtggaaggcctgagcaagcacatcaagctggaagaggaacggagaagcgaggacgcccagagcaaggccgccctgaccgactggctgcgggctaaggccagcttcgtgatcgagggcctgaaggaggccgacaaggacgagttctgcagatgcgagctgaagctgcagaagtggtacggggacctgcggggaaagcccttcgccatcgaagccgagaacagcatcctggacatcagcggcttcagcaagcagtacaactgtgccttcatctggcagaaggacggcgtgaagaagctgaacctgtacctgatcatcaactacttcaagggcggcaagctgcggttcaagaagatcaaacctgaagccttcgaagccaacagattctacaccgtgatcaacaaaaagagcggcgagatcgtgcccatggaggtgaacttcaacttcgacgaccccaacctgatcatcctgcctctggcctttggcaagagacagggcagagaattcatctggaacgacctgctgtccctggaaaccggcagcctgaagctggccaacggaagagtgatcgagaagacactgtacaacagaagaacccggcaggatgagcctgccctgttcgtggccctgaccttcgagcggcgggaggtcctggactcctccaatatcaaaccaatgaacctgatcggcgtggcaagaggcgaaaacatccccgccgtgatcgccctgaccgaccccgagggctgcccactgagccggtttaaggatagcctgggaaacccaacccacatcctgagaatcggcgagagctataaggagaagcagcggaccatccaggccaagaaggaggtggagcagcggagagccggcggctacagccggaagtacgccagcaaagccaagaatctggcagacgatatggtgagaaacaccgctagagatctgctgtactacgccgtgacccaggatgccatgctgatcttcgccaacctgagccggggcttcggccggcagggcaagcggaccttcatggccgagagacagtacacacggatggaggactggctgaccgccaagctggcctacgagggcctgagcaagacctacctgtccaagacactggcccagtacacctccaagacatgcagcaactgtgggtttaccatcaccagcgccgactacgacagggtgctggagaagctgaagaagacagcaacaggctggatgaccacaattaacggcaaggagctgaaggtggagggccagattacctactacaacagatacaagagacagaacgtagtcaaggacctgtccgtcgagctggatagactgagcgaagaatctgtgaacaacgacatctcctcctggacaaagggcagaagcggagaagctctgagcctcctgaagaaaagattctcccatagacccgtgcaggagaagttcgtgtgcctgaactgcggcttcgagacacacgcagccgagcaagccgccctgaacatcgccagatcctggctgttcctgcggagccaggagtacaagaaataccagacaaacaagacaaccggcaacaccgataagagagccttcgtcgagacctggcagtccttttaccggaagaagcttaaggaggtgtggaaacctgccgtgcggtctggcggatctggcggaggctccaccagccccaagaaaaagagaaaagtctaagctgccttctgcggggcttgccttctggccatgcccttcttctctcccttgcacctgtacctcttggtctttgaataaagcctgagtaggaaggctagcaaaaaaaaaaaaaaaaaaaaaaaaaaaaaaaaaaaaaaaaaaaaaaaaaaaaaaaaaaaaaaaaaaaaaaaaaaaaaaaa

SEQ ID NO: 9440 - RNA, 8787 nt, synthetic construct
  source 1..8787: mol_type = other RNA
aggaaataagagagaaaagaagagtaagaagaaatataagagccaccatggcccctaagaagaagcgtaaagtgagccggatgaaccacgaccaggagttcgacccccctaaggtgtaccctcccgtccccgccgagaagagaaagcccatccgggtcctgagcctgttcgatggcatcgccaccggtctgctggtgctgaaggacctgggcatccaggtggataggtacattgcctccgaggtgtgcgaggactccatcaccgtgggaatggtgcgtcatcagggcaagatcatgtacgtgggcgacgtgcggagcgtgacacagaagcatatccaggagtggggccctttcgacctggtgatcggcggcagcccttgcaatgacctgagcatcgtgaacccagcccggaagggcctgtacgagggaaccggcagactgttcttcgagttttacagactgctgcacgacgcccggcctaaggaaggcgacgaccggcccttcttttggctgttcgagaatgtggtggccatgggagtcagcgacaagcgggatattagccggttcctggagagcaaccccgtgatgatcgatgccaaggaagtgagcgccgcccaccgggccagatacttctggggcaatctgcctggcatgaacagacccctggccagcaccgtgaacgacaagctggagctgcaggagtgcctggagcacggccggatcgccaagttcagcaaggtgagaaccatcaccacccgaagcaacagcatcaaacaaggcaaggaccagcactttcctgtgttcatgaacgagaaggaggacatcctgtggtgtaccgagatggagagagtgttcgggttcccagtccactacacagatgtcagcaacatgtctagactggccagacagagactgctgggaagaagctggtccgtccctgtgatcagacacctgttcgcccctctgaaggagtacttcgcctgcgtgagcagcggcaacagcaacgccaacagccggggccccagcttctctagcggcctggtgccactgtccctgagagggagccacatgggccccatggagatctacaaaaccgtgagcgcctggaagcggcagcctgtgcgcgtgctgagcctgtttcggaatatcgataaagtcctgaaaagcctgggattcctggagagcggctctggctccggcggtggcaccctgaagtacgtggaggatgtgacaaacgtggtcagacgggatgtggagaagtggggccccttcgatctggtgtacggcagcacccaacccctgggcagctcttgtgaccggtgccctggctggtacatgtttcagttccaccggatcctgcagtacgccctgccgagacaggagtcccagcggccattcttttggattttcatggacaacttgctgctgaccgaggatgaccaggaaactaccactcggttcctgcagaccgaagccgtgaccctgcaggacgtgagaggccgggactaccagaacgccatgcgggtgtggtccaacatccctggactgaaaagcaagcacgcacctctgacccctaaagaagaggagtacctgcaggcccaggtgcggagcagaagcaagctggacgcccctaaggtggatctgctggtgaagaattgcctcctgcccctgagagagtacttcaagtatttcagccagaatagtctgcccctgggaggcagcggcggcggcttccaggagagcgtgaccttcgaggacgtggccgtgtacttcagcgagaacgagtggaccggcctggcccccgcccagagggtgctgtacagggacgtgatgctggagaactacggcgccgtggccagcctggccgccttccccttccccaagcccgccctgatcagccagctggagaggggcgaggccccctggtgcaaggccccccagggcgccctggacggcgagggccccaggggcgtgggcggcccaagcagcggcgcccctcctcccagcggcggcaggcggcccaagcagcggcgcccctcctcccagcggcggcagcccagccggctccccaacctctaccgaggagggcacctctgagtccgccacccccgagagcggccctggcacctccaccgagcccagcgagggcagcgcacccggcagccctgccggcagccccacctccacagaggagggaaccagcaccgagcccagcgaaggcagcgccccaggcaccagcaccgagcctagtgagcaggagattaaacggatcaacaagatcagaagaagacttgtgaaagacagcaacaccaagaaggccggcaagacaggccccatgaaaaccctgctggttagagtgatgacacccgatctgagagagcggctggaaaacctgagaaagaagcctgaaaatatcccccagcccatcagcaatacatctagagccaacctgaataagctgctgaccgattacaccgaaatgaagaaggcgatcctgcatgtgtactgggaagagttccagaaggaccctgtgggcctgatgagccgggtggcccagcctgccagcaagaagatcgatcagaacaagctgaaacctgagatggacgagaagggcaacctgaccaccgccggctttgcctgctctcagtgtggccagcccctgttcgtgtacaagctggagcaggtgtctgagaagggcaaggcttacaccaactacttcggacggtgcaatgtggccgagcacgaaaagctgatcctgctggcccagctgaagcccgagaaggatagcgacgaagccgtgacatatagcctgggaaagtttgggcagagggccctggatttctacagcattcatgtgaccaaggagtccacccaccccgtgaagcccctggcccagatcgccggaaacagatacgcctccggacctgtgggaaaggccctgagcgacgcatgtatgggcacaatcgcctccttcctgtctaagtaccaggacatcatcatcgaacaccagaaggtggtgaagggcaaccagaagagactggagagcctgcgggagctggccggcaaggaaaacctggaataccctagcgtgaccctgccacctcagcctcacaccaaggagggcgttgatgcctacaacgaagtgatcgcccgggtgcgaatgtgggtgaacctgaacctgtggcagaagctgaagctaagcagagatgatgccaagcctctgctgagactgaagggattcccttcctttcctctggtcgagagacaggccaacgaagtggactggtgggacatggtgtgtaacgtgaagaagctgatcaacgagaaaaaggaggatggcaaggtgttttggcagaatctggctggctacaagagacaggaagccctgagaccatacctgagcagcgaggaagatcggaagaagggaaagaaattcgctcggtaccagctgggcgacctgctgctgcacctggaaaagaagcacggcgaggactggggaaaggtgtacgacgaggcctgggagcggattgacaagaaagtggaaggcctgagcaagcacatcaagctggaagaggaacggagaagcgaggacgcccagagcaaggccgccctgaccgactggctgcgggctaaggccagcttcgtgatcgagggcctgaaggaggccgacaaggacgagttctgcagatgcgagctgaagctgcagaagtggtacggggacctgcggggaaagcccttcgccatcgaagccgagaacagcatcctggacatcagcggcttcagcaagcagtacaactgtgccttcatctggcagaaggacggcgtgaagaagctgaacctgtacctgatcatcaactacttcaagggcggcaagctgcggttcaagaagatcaaacctgaagccttcgaagccaacagattctacaccgtgatcaacaaaaagagcggcgagatcgtgcccatggaggtgaacttcaacttcgacgaccccaacctgatcatcctgcctctggcctttggcaagagacagggcagagaattcatctggaacgacctgctgtccctggaaaccggcagcctgaagctggccaacggaagagtgatcgagaagacactgtacaacagaagaacccggcaggatgagcctgccctgttcgtggccctgaccttcgagcggcgggaggtcctggactcctccaatatcaaaccaatgaacctgatcggcgtggcaagaggcgaaaacatccccgccgtgatcgccctgaccgaccccgagggctgcccactgagccggtttaaggatagcctgggaaacccaacccacatcctgagaatcggcgagagctataaggagaagcagcggaccatccaggccaagaaggaggtggagcagcggagagccggcggctacagccggaagtacgccagcaaagccaagaatctggcagacgatatggtgagaaacaccgctagagatctgctgtactacgccgtgacccaggatgccatgctgatcttcgccaacctgagccggggcttcggccggcagggcaagcggaccttcatggccgagagacagtacacacggatggaggactggctgaccgccaagctggcctacgagggcctgagcaagacctacctgtccaagacactggcccagtacacctccaagacatgcagcaactgtgggtttaccatcaccagcgccgactacgacagggtgctggagaagctgaagaagacagcaacaggctggatgaccacaattaacggcaaggagctgaaggtggagggccagattacctactacaacagatacaagagacagaacgtagtcaaggacctgtccgtcgagctggatagactgagcgaagaatctgtgaacaacgacatctcctcctggacaaagggcagaagcggagaagctctgagcctcctgaagaaaagattctcccatagacccgtgcaggagaagttcgtgtgcctgaactgcggcttcgagacacacgcagccgagcaagccgccctgaacatcgccagatcctggctgttcctgcggagccaggagtacaagaaataccagacaaacaagacaaccggcaacaccgataagagagccttcgtcgagacctggcagtccttttaccggaagaagcttaaggaggtgtggaaacctgccgtgcggtctggcggatctggcggaggctccaccagccccaagaaaaagagaaaagtctaagctgccttctgcggggcttgccttctggccatgcccttcttctctcccttgcacctgtacctcttggtctttgaataaagcctgagtaggaaggctagcaaaaaaaaaaaaaaaaaaaaaaaaaaaaaaaaaaaaaaaaaaaaaaaaaaaaaaaaaaaaaaaaaaaaaaaaaaaaaaaagcccagccggctccccaacctctaccgaggagggcacctctgagtccgccacccccgagagcggccctggcacctccaccgagcccagcgagggcagcgcacccggcagccctgccggcagccccacctccacagaggagggaaccagcaccgagcccagcgaaggcagcgccccaggcaccagcaccgagcctagtgagcaggagattaaacggatcaacaagatcagaagaagacttgtgaaagacagcaacaccaagaaggccggcaagacaggccccatgaaaaccctgctggttagagtgatgacacccgatctgagagagcggctggaaaacctgagaaagaagcctgaaaatatcccccagcccatcagcaatacatctagagccaacctgaataagctgctgaccgattacaccgaaatgaagaaggcgatcctgcatgtgtactgggaagagttccagaaggaccctgtgggcctgatgagccgggtggcccagcctgccagcaagaagatcgatcagaacaagctgaaacctgagatggacgagaagggcaacctgaccaccgccggctttgcctgctctcagtgtggccagcccctgttcgtgtacaagctggagcaggtgtctgagaagggcaaggcttacaccaactacttcggacggtgcaatgtggccgagcacgaaaagctgatcctgctggcccagctgaagcccgagaaggatagcgacgaagccgtgacatatagcctgggaaagtttgggcagagggccctggatttctacagcattcatgtgaccaaggagtccacccaccccgtgaagcccctggcccagatcgccggaaacagatacgcctccggacctgtgggaaaggccctgagcgacgcatgtatgggcacaatcgcctccttcctgtctaagtaccaggacatcatcatcgaacaccagaaggtggtgaagggcaaccagaagagactggagagcctgcgggagctggccggcaaggaaaacctggaataccctagcgtgaccctgccacctcagcctcacaccaaggagggcgttgatgcctacaacgaagtgatcgcccgggtgcgaatgtgggtgaacctgaacctgtggcagaagctgaagctaagcagagatgatgccaagcctctgctgagactgaagggattcccttcctttcctctggtcgagagacaggccaacgaagtggactggtgggacatggtgtgtaacgtgaagaagctgatcaacgagaaaaaggaggatggcaaggtgttttggcagaatctggctggctacaagagacaggaagccctgagaccatacctgagcagcgaggaagatcggaagaagggaaagaaattcgctcggtaccagctgggcgacctgctgctgcacctggaaaagaagcacggcgaggactggggaaaggtgtacgacgaggcctgggagcggattgacaagaaagtggaaggcctgagcaagcacatcaagctggaagaggaacggagaagcgaggacgcccagagcaaggccgccctgaccgactggctgcgggctaaggccagcttcgtgatcgagggcctgaaggaggccgacaaggacgagttctgcagatgcgagctgaagctgcagaagtggtacggggacctgcggggaaagcccttcgccatcgaagccgagaacagcatcctggacatcagcggcttcagcaagcagtacaactgtgccttcatctggcagaaggacggcgtgaagaagctgaacctgtacctgatcatcaactacttcaagggcggcaagctgcggttcaagaagatcaaacctgaagccttcgaagccaacagattctacaccgtgatcaacaaaaagagcggcgagatcgtgcccatggaggtgaacttcaacttcgacgaccccaacctgatcatcctgcctctggcctttggcaagagacagggcagagaattcatctggaacgacctgctgtccctggaaaccggcagcctgaagctggccaacggaagagtgatcgagaagacactgtacaacagaagaacccggcaggatgagcctgccctgttcgtggccctgaccttcgagcggcgggaggtcctggactcctccaatatcaaaccaatgaacctgatcggcgtggcaagaggcgaaaacatccccgccgtgatcgccctgaccgaccccgagggctgcccactgagccggtttaaggatagcctgggaaacccaacccacatcctgagaatcggcgagagctataaggagaagcagcggaccatccaggccaagaaggaggtggagcagcggagagccggcggctacagccggaagtacgccagcaaagccaagaatctggcagacgatatggtgagaaacaccgctagagatctgctgtactacgccgtgacccaggatgccatgctgatcttcgccaacctgagccggggcttcggccggcagggcaagcggaccttcatggccgagagacagtacacacggatggaggactggctgaccgccaagctggcctacgagggcctgagcaagacctacctgtccaagacactggcccagtacacctccaagacatgcagcaactgtgggtttaccatcaccagcgccgactacgacagggtgctggagaagctgaagaagacagcaacaggctggatgaccacaattaacggcaaggagctgaaggtggagggccagattacctactacaacagatacaagagacagaacgtagtcaaggacctgtccgtcgagctggatagactgagcgaagaatctgtgaacaacgacatctcctcctggacaaagggcagaagcggagaagctctgagcctcctgaagaaaagattctcccatagacccgtgcaggagaagttcgtgtgcctgaactgcggcttcgagacacacgcagccgagcaagccgccctgaacatcgccagatcctggctgttcctgcggagccaggagtacaagaaataccagacaaacaagacaaccggcaacaccgataagagagccttcgtcgagacctggcagtccttttaccggaagaagcttaaggaggtgtggaaacctgccgtgcggtctggcggatctggcggaggctccaccagccccaagaaaaagagaaaagtctaagctgccttctgcggggcttgccttctggccatgcccttcttctctcccttgcacctgtacctcttggtctttgaataaagcctgagtaggaaggctagcaaaaaaaaaaaaaaaaaaaaaaaaaaaaaaaaaaaaaaaaaaaaaaaaaaaaaaaaaaaaaaaaaaaaaaaaaaaaaaaa

SEQ ID NO: 9441 - RNA, 8787 nt, synthetic construct
  source 1..8787: mol_type = other RNA
aggaaataagagagaaaagaagagtaagaagaaatataagagccaccatggcccctaagaagaagcgtaaagtgagccggatgaaccacgaccaggagttcgacccccctaaggtgtaccctcccgtccccgccgagaagagaaagcccatccgggtcctgagcctgttcgatggcatcgccaccggtctgctggtgctgaaggacctgggcatccaggtggataggtacattgcctccgaggtgtgcgaggactccatcaccgtgggaatggtgcgtcatcagggcaagatcatgtacgtgggcgacgtgcggagcgtgacacagaagcatatccaggagtggggccctttcgacctggtgatcggcggcagcccttgcaatgacctgagcatcgtgaacccagcccggaagggcctgtacgagggaaccggcagactgttcttcgagttttacagactgctgcacgacgcccggcctaaggaaggcgacgaccggcccttcttttggctgttcgagaatgtggtggccatgggagtcagcgacaagcgggatattagccggttcctggagagcaaccccgtgatgatcgatgccaaggaagtgagcgccgcccaccgggccagatacttctggggcaatctgcctggcatgaacagacccctggccagcaccgtgaacgacaagctggagctgcaggagtgcctggagcacggccggatcgccaagttcagcaaggtgagaaccatcaccacccgaagcaacagcatcaaacaaggcaaggaccagcactttcctgtgttcatgaacgagaaggaggacatcctgtggtgtaccgagatggagagagtgttcgggttcccagtccactacacagatgtcagcaacatgtctagactggccagacagagactgctgggaagaagctggtccgtccctgtgatcagacacctgttcgcccctctgaaggagtacttcgcctgcgtgagcagcggcaacagcaacgccaacagccggggccccagcttctctagcggcctggtgccactgtccctgagagggagccacatgggccccatggagatctacaaaaccgtgagcgcctggaagcggcagcctgtgcgcgtgctgagcctgtttcggaatatcgataaagtcctgaaaagcctgggattcctggagagcggctctggctccggcggtggcaccctgaagtacgtggaggatgtgacaaacgtggtcagacgggatgtggagaagtggggccccttcgatctggtgtacggcagcacccaacccctgggcagctcttgtgaccggtgccctggctggtacatgtttcagttccaccggatcctgcagtacgccctgccgagacaggagtcccagcggccattcttttggattttcatggacaacttgctgctgaccgaggatgaccaggaaactaccactcggttcctgcagaccgaagccgtgaccctgcaggacgtgagaggccgggactaccagaacgccatgcgggtgtggtccaacatccctggactgaaaagcaagcacgcacctctgacccctaaagaagaggagtacctgcaggcccaggtgcggagcagaagcaagctggacgcccctaaggtggatctgctggtgaagaattgcctcctgcccctgagagagtacttcaagtatttcagccagaatagtctgcccctgggaggcagcggcggcggcagcaaggcccccgtgaccttcggcgacctggccatctacttcagccaggaggagtgggagtggctgagccccatccagaaggacctgtacgaggacgtgatgctggagaactaccagaacctggtgctgctgggcctggcctgcaggaggcccaacatcatcaccctgctggagaagggcaaggccccctgggtggtggagcccagcaggaggaggaggggccccgagagcggcagcaagtgcggcggcccaagcagcggcgcccctcctcccagcggcggcaggcggcccaagcagcggcgcccctcctcccagcggcggcagcccagccggctccccaacctctaccgaggagggcacctctgagtccgccacccccgagagcggccctggcacctccaccgagcccagcgagggcagcgcacccggcagccctgccggcagccccacctccacagaggagggaaccagcaccgagcccagcgaaggcagcgccccaggcaccagcaccgagcctagtgagcaggagattaaacggatcaacaagatcagaagaagacttgtgaaagacagcaacaccaagaaggccggcaagacaggccccatgaaaaccctgctggttagagtgatgacacccgatctgagagagcggctggaaaacctgagaaagaagcctgaaaatatcccccagcccatcagcaatacatctagagccaacctgaataagctgctgaccgattacaccgaaatgaagaaggcgatcctgcatgtgtactgggaagagttccagaaggaccctgtgggcctgatgagccgggtggcccagcctgccagcaagaagatcgatcagaacaagctgaaacctgagatggacgagaagggcaacctgaccaccgccggctttgcctgctctcagtgtggccagcccctgttcgtgtacaagctggagcaggtgtctgagaagggcaaggcttacaccaactacttcggacggtgcaatgtggccgagcacgaaaagctgatcctgctggcccagctgaagcccgagaaggatagcgacgaagccgtgacatatagcctgggaaagtttgggcagagggccctggatttctacagcattcatgtgaccaaggagtccacccaccccgtgaagcccctggcccagatcgccggaaacagatacgcctccggacctgtgggaaaggccctgagcgacgcatgtatgggcacaatcgcctccttcctgtctaagtaccaggacatcatcatcgaacaccagaaggtggtgaagggcaaccagaagagactggagagcctgcgggagctggccggcaaggaaaacctggaataccctagcgtgaccctgccacctcagcctcacaccaaggagggcgttgatgcctacaacgaagtgatcgcccgggtgcgaatgtgggtgaacctgaacctgtggcagaagctgaagctaagcagagatgatgccaagcctctgctgagactgaagggattcccttcctttcctctggtcgagagacaggccaacgaagtggactggtgggacatggtgtgtaacgtgaagaagctgatcaacgagaaaaaggaggatggcaaggtgttttggcagaatctggctggctacaagagacaggaagccctgagaccatacctgagcagcgaggaagatcggaagaagggaaagaaattcgctcggtaccagctgggcgacctgctgctgcacctggaaaagaagcacggcgaggactggggaaaggtgtacgacgaggcctgggagcggattgacaagaaagtggaaggcctgagcaagcacatcaagctggaagaggaacggagaagcgaggacgcccagagcaaggccgccctgaccgactggctgcgggctaaggccagcttcgtgatcgagggcctgaaggaggccgacaaggacgagttctgcagatgcgagctgaagctgcagaagtggtacggggacctgcggggaaagcccttcgccatcgaagccgagaacagcatcctggacatcagcggcttcagcaagcagtacaactgtgccttcatctggcagaaggacggcgtgaagaagctgaacctgtacctgatcatcaactacttcaagggcggcaagctgcggttcaagaagatcaaacctgaagccttcgaagccaacagattctacaccgtgatcaacaaaaagagcggcgagatcgtgcccatggaggtgaacttcaacttcgacgaccccaacctgatcatcctgcctctggcctttggcaagagacagggcagagaattcatctggaacgacctgctgtccctggaaaccggcagcctgaagctggccaacggaagagtgatcgagaagacactgtacaacagaagaacccggcaggatgagcctgccctgttcgtggccctgaccttcgagcggcgggaggtcctggactcctccaatatcaaaccaatgaacctgatcggcgtggcaagaggcgaaaacatccccgccgtgatcgccctgaccgaccccgagggctgcccactgagccggtttaaggatagcctgggaaacccaacccacatcctgagaatcggcgagagctataaggagaagcagcggaccatccaggccaagaaggaggtggagcagcggagagccggcggctacagccggaagtacgccagcaaagccaagaatctggcagacgatatggtgagaaacaccgctagagatctgctgtactacgccgtgacccaggatgccatgctgatcttcgccaacctgagccggggcttcggccggcagggcaagcggaccttcatggccgagagacagtacacacggatggaggactggctgaccgccaagctggcctacgagggcctgagcaagacctacctgtccaagacactggcccagtacacctccaagacatgcagcaactgtgggtttaccatcaccagcgccgactacgacagggtgctggagaagctgaagaagacagcaacaggctggatgaccacaattaacggcaaggagctgaaggtggagggccagattacctactacaacagatacaagagacagaacgtagtcaaggacctgtccgtcgagctggatagactgagcgaagaatctgtgaacaacgacatctcctcctggacaaagggcagaagcggagaagctctgagcctcctgaagaaaagattctcccatagacccgtgcaggagaagttcgtgtgcctgaactgcggcttcgagacacacgcagccgagcaagccgccctgaacatcgccagatcctggctgttcctgcggagccaggagtacaagaaataccagacaaacaagacaaccggcaacaccgataagagagccttcgtcgagacctggcagtccttttaccggaagaagcttaaggaggtgtggaaacctgccgtgcggtctggcggatctggcggaggctccaccagccccaagaaaaagagaaaagtctaagctgccttctgcggggcttgccttctggccatgcccttcttctctcccttgcacctgtacctcttggtctttgaataaagcctgagtaggaaggctagcaaaaaaaaaaaaaaaaaaaaaaaaaaaaaaaaaaaaaaaaaaaaaaaaaaaaaaaaaaaaaaaaaaaaaaaaaaaaaaaagcccagccggctccccaacctctaccgaggagggcacctctgagtccgccacccccgagagcggccctggcacctccaccgagcccagcgagggcagcgcacccggcagccctgccggcagccccacctccacagaggagggaaccagcaccgagcccagcgaaggcagcgccccaggcaccagcaccgagcctagtgagcaggagattaaacggatcaacaagatcagaagaagacttgtgaaagacagcaacaccaagaaggccggcaagacaggccccatgaaaaccctgctggttagagtgatgacacccgatctgagagagcggctggaaaacctgagaaagaagcctgaaaatatcccccagcccatcagcaatacatctagagccaacctgaataagctgctgaccgattacaccgaaatgaagaaggcgatcctgcatgtgtactgggaagagttccagaaggaccctgtgggcctgatgagccgggtggcccagcctgccagcaagaagatcgatcagaacaagctgaaacctgagatggacgagaagggcaacctgaccaccgccggctttgcctgctctcagtgtggccagcccctgttcgtgtacaagctggagcaggtgtctgagaagggcaaggcttacaccaactacttcggacggtgcaatgtggccgagcacgaaaagctgatcctgctggcccagctgaagcccgagaaggatagcgacgaagccgtgacatatagcctgggaaagtttgggcagagggccctggatttctacagcattcatgtgaccaaggagtccacccaccccgtgaagcccctggcccagatcgccggaaacagatacgcctccggacctgtgggaaaggccctgagcgacgcatgtatgggcacaatcgcctccttcctgtctaagtaccaggacatcatcatcgaacaccagaaggtggtgaagggcaaccagaagagactggagagcctgcgggagctggccggcaaggaaaacctggaataccctagcgtgaccctgccacctcagcctcacaccaaggagggcgttgatgcctacaacgaagtgatcgcccgggtgcgaatgtgggtgaacctgaacctgtggcagaagctgaagctaagcagagatgatgccaagcctctgctgagactgaagggattcccttcctttcctctggtcgagagacaggccaacgaagtggactggtgggacatggtgtgtaacgtgaagaagctgatcaacgagaaaaaggaggatggcaaggtgttttggcagaatctggctggctacaagagacaggaagccctgagaccatacctgagcagcgaggaagatcggaagaagggaaagaaattcgctcggtaccagctgggcgacctgctgctgcacctggaaaagaagcacggcgaggactggggaaaggtgtacgacgaggcctgggagcggattgacaagaaagtggaaggcctgagcaagcacatcaagctggaagaggaacggagaagcgaggacgcccagagcaaggccgccctgaccgactggctgcgggctaaggccagcttcgtgatcgagggcctgaaggaggccgacaaggacgagttctgcagatgcgagctgaagctgcagaagtggtacggggacctgcggggaaagcccttcgccatcgaagccgagaacagcatcctggacatcagcggcttcagcaagcagtacaactgtgccttcatctggcagaaggacggcgtgaagaagctgaacctgtacctgatcatcaactacttcaagggcggcaagctgcggttcaagaagatcaaacctgaagccttcgaagccaacagattctacaccgtgatcaacaaaaagagcggcgagatcgtgcccatggaggtgaacttcaacttcgacgaccccaacctgatcatcctgcctctggcctttggcaagagacagggcagagaattcatctggaacgacctgctgtccctggaaaccggcagcctgaagctggccaacggaagagtgatcgagaagacactgtacaacagaagaacccggcaggatgagcctgccctgttcgtggccctgaccttcgagcggcgggaggtcctggactcctccaatatcaaaccaatgaacctgatcggcgtggcaagaggcgaaaacatccccgccgtgatcgccctgaccgaccccgagggctgcccactgagccggtttaaggatagcctgggaaacccaacccacatcctgagaatcggcgagagctataaggagaagcagcggaccatccaggccaagaaggaggtggagcagcggagagccggcggctacagccggaagtacgccagcaaagccaagaatctggcagacgatatggtgagaaacaccgctagagatctgctgtactacgccgtgacccaggatgccatgctgatcttcgccaacctgagccggggcttcggccggcagggcaagcggaccttcatggccgagagacagtacacacggatggaggactggctgaccgccaagctggcctacgagggcctgagcaagacctacctgtccaagacactggcccagtacacctccaagacatgcagcaactgtgggtttaccatcaccagcgccgactacgacagggtgctggagaagctgaagaagacagcaacaggctggatgaccacaattaacggcaaggagctgaaggtggagggccagattacctactacaacagatacaagagacagaacgtagtcaaggacctgtccgtcgagctggatagactgagcgaagaatctgtgaacaacgacatctcctcctggacaaagggcagaagcggagaagctctgagcctcctgaagaaaagattctcccatagacccgtgcaggagaagttcgtgtgcctgaactgcggcttcgagacacacgcagccgagcaagccgccctgaacatcgccagatcctggctgttcctgcggagccaggagtacaagaaataccagacaaacaagacaaccggcaacaccgataagagagccttcgtcgagacctggcagtccttttaccggaagaagcttaaggaggtgtggaaacctgccgtgcggtctggcggatctggcggaggctccaccagccccaagaaaaagagaaaagtctaagctgccttctgcggggcttgccttctggccatgcccttcttctctcccttgcacctgtacctcttggtctttgaataaagcctgagtaggaaggctagcaaaaaaaaaaaaaaaaaaaaaaaaaaaaaaaaaaaaaaaaaaaaaaaaaaaaaaaaaaaaaaaaaaaaaaaaaaaaaaaa

SEQ ID NO: 9442 - RNA, 8787 nt, synthetic construct
  source 1..8787: mol_type = other RNA
aggaaataagagagaaaagaagagtaagaagaaatataagagccaccatggcccctaagaagaagcgtaaagtgagccggatgaaccacgaccaggagttcgacccccctaaggtgtaccctcccgtccccgccgagaagagaaagcccatccgggtcctgagcctgttcgatggcatcgccaccggtctgctggtgctgaaggacctgggcatccaggtggataggtacattgcctccgaggtgtgcgaggactccatcaccgtgggaatggtgcgtcatcagggcaagatcatgtacgtgggcgacgtgcggagcgtgacacagaagcatatccaggagtggggccctttcgacctggtgatcggcggcagcccttgcaatgacctgagcatcgtgaacccagcccggaagggcctgtacgagggaaccggcagactgttcttcgagttttacagactgctgcacgacgcccggcctaaggaaggcgacgaccggcccttcttttggctgttcgagaatgtggtggccatgggagtcagcgacaagcgggatattagccggttcctggagagcaaccccgtgatgatcgatgccaaggaagtgagcgccgcccaccgggccagatacttctggggcaatctgcctggcatgaacagacccctggccagcaccgtgaacgacaagctggagctgcaggagtgcctggagcacggccggatcgccaagttcagcaaggtgagaaccatcaccacccgaagcaacagcatcaaacaaggcaaggaccagcactttcctgtgttcatgaacgagaaggaggacatcctgtggtgtaccgagatggagagagtgttcgggttcccagtccactacacagatgtcagcaacatgtctagactggccagacagagactgctgggaagaagctggtccgtccctgtgatcagacacctgttcgcccctctgaaggagtacttcgcctgcgtgagcagcggcaacagcaacgccaacagccggggccccagcttctctagcggcctggtgccactgtccctgagagggagccacatgggccccatggagatctacaaaaccgtgagcgcctggaagcggcagcctgtgcgcgtgctgagcctgtttcggaatatcgataaagtcctgaaaagcctgggattcctggagagcggctctggctccggcggtggcaccctgaagtacgtggaggatgtgacaaacgtggtcagacgggatgtggagaagtggggccccttcgatctggtgtacggcagcacccaacccctgggcagctcttgtgaccggtgccctggctggtacatgtttcagttccaccggatcctgcagtacgccctgccgagacaggagtcccagcggccattcttttggattttcatggacaacttgctgctgaccgaggatgaccaggaaactaccactcggttcctgcagaccgaagccgtgaccctgcaggacgtgagaggccgggactaccagaacgccatgcgggtgtggtccaacatccctggactgaaaagcaagcacgcacctctgacccctaaagaagaggagtacctgcaggcccaggtgcggagcagaagcaagctggacgcccctaaggtggatctgctggtgaagaattgcctcctgcccctgagagagtacttcaagtatttcagccagaatagtctgcccctgggaggcagcggcggcggcagcaacaagctggtgagcttcgacgacgtggccgtggagttcagctgggaggagtggcaggagctggacatcagccagaggaccctgtacagggacgtgatgctggagacctacagcatgctggtgagcctgggccacaccggccccaagccccagctgatcgtgaagctggagcaggacgaggagagctacatgagggaggccagcgacaagaacttcagcgacgtgcagaagatgaagcacggcggcccaagcagcggcgcccctcctcccagcggcggcaggcggcccaagcagcggcgcccctcctcccagcggcggcagcccagccggctccccaacctctaccgaggagggcacctctgagtccgccacccccgagagcggccctggcacctccaccgagcccagcgagggcagcgcacccggcagccctgccggcagccccacctccacagaggagggaaccagcaccgagcccagcgaaggcagcgccccaggcaccagcaccgagcctagtgagcaggagattaaacggatcaacaagatcagaagaagacttgtgaaagacagcaacaccaagaaggccggcaagacaggccccatgaaaaccctgctggttagagtgatgacacccgatctgagagagcggctggaaaacctgagaaagaagcctgaaaatatcccccagcccatcagcaatacatctagagccaacctgaataagctgctgaccgattacaccgaaatgaagaaggcgatcctgcatgtgtactgggaagagttccagaaggaccctgtgggcctgatgagccgggtggcccagcctgccagcaagaagatcgatcagaacaagctgaaacctgagatggacgagaagggcaacctgaccaccgccggctttgcctgctctcagtgtggccagcccctgttcgtgtacaagctggagcaggtgtctgagaagggcaaggcttacaccaactacttcggacggtgcaatgtggccgagcacgaaaagctgatcctgctggcccagctgaagcccgagaaggatagcgacgaagccgtgacatatagcctgggaaagtttgggcagagggccctggatttctacagcattcatgtgaccaaggagtccacccaccccgtgaagcccctggcccagatcgccggaaacagatacgcctccggacctgtgggaaaggccctgagcgacgcatgtatgggcacaatcgcctccttcctgtctaagtaccaggacatcatcatcgaacaccagaaggtggtgaagggcaaccagaagagactggagagcctgcgggagctggccggcaaggaaaacctggaataccctagcgtgaccctgccacctcagcctcacaccaaggagggcgttgatgcctacaacgaagtgatcgcccgggtgcgaatgtgggtgaacctgaacctgtggcagaagctgaagctaagcagagatgatgccaagcctctgctgagactgaagggattcccttcctttcctctggtcgagagacaggccaacgaagtggactggtgggacatggtgtgtaacgtgaagaagctgatcaacgagaaaaaggaggatggcaaggtgttttggcagaatctggctggctacaagagacaggaagccctgagaccatacctgagcagcgaggaagatcggaagaagggaaagaaattcgctcggtaccagctgggcgacctgctgctgcacctggaaaagaagcacggcgaggactggggaaaggtgtacgacgaggcctgggagcggattgacaagaaagtggaaggcctgagcaagcacatcaagctggaagaggaacggagaagcgaggacgcccagagcaaggccgccctgaccgactggctgcgggctaaggccagcttcgtgatcgagggcctgaaggaggccgacaaggacgagttctgcagatgcgagctgaagctgcagaagtggtacggggacctgcggggaaagcccttcgccatcgaagccgagaacagcatcctggacatcagcggcttcagcaagcagtacaactgtgccttcatctggcagaaggacggcgtgaagaagctgaacctgtacctgatcatcaactacttcaagggcggcaagctgcggttcaagaagatcaaacctgaagccttcgaagccaacagattctacaccgtgatcaacaaaaagagcggcgagatcgtgcccatggaggtgaacttcaacttcgacgaccccaacctgatcatcctgcctctggcctttggcaagagacagggcagagaattcatctggaacgacctgctgtccctggaaaccggcagcctgaagctggccaacggaagagtgatcgagaagacactgtacaacagaagaacccggcaggatgagcctgccctgttcgtggccctgaccttcgagcggcgggaggtcctggactcctccaatatcaaaccaatgaacctgatcggcgtggcaagaggcgaaaacatccccgccgtgatcgccctgaccgaccccgagggctgcccactgagccggtttaaggatagcctgggaaacccaacccacatcctgagaatcggcgagagctataaggagaagcagcggaccatccaggccaagaaggaggtggagcagcggagagccggcggctacagccggaagtacgccagcaaagccaagaatctggcagacgatatggtgagaaacaccgctagagatctgctgtactacgccgtgacccaggatgccatgctgatcttcgccaacctgagccggggcttcggccggcagggcaagcggaccttcatggccgagagacagtacacacggatggaggactggctgaccgccaagctggcctacgagggcctgagcaagacctacctgtccaagacactggcccagtacacctccaagacatgcagcaactgtgggtttaccatcaccagcgccgactacgacagggtgctggagaagctgaagaagacagcaacaggctggatgaccacaattaacggcaaggagctgaaggtggagggccagattacctactacaacagatacaagagacagaacgtagtcaaggacctgtccgtcgagctggatagactgagcgaagaatctgtgaacaacgacatctcctcctggacaaagggcagaagcggagaagctctgagcctcctgaagaaaagattctcccatagacccgtgcaggagaagttcgtgtgcctgaactgcggcttcgagacacacgcagccgagcaagccgccctgaacatcgccagatcctggctgttcctgcggagccaggagtacaagaaataccagacaaacaagacaaccggcaacaccgataagagagccttcgtcgagacctggcagtccttttaccggaagaagcttaaggaggtgtggaaacctgccgtgcggtctggcggatctggcggaggctccaccagccccaagaaaaagagaaaagtctaagctgccttctgcggggcttgccttctggccatgcccttcttctctcccttgcacctgtacctcttggtctttgaataaagcctgagtaggaaggctagcaaaaaaaaaaaaaaaaaaaaaaaaaaaaaaaaaaaaaaaaaaaaaaaaaaaaaaaaaaaaaaaaaaaaaaaaaaaaaaaagcccagccggctccccaacctctaccgaggagggcacctctgagtccgccacccccgagagcggccctggcacctccaccgagcccagcgagggcagcgcacccggcagccctgccggcagccccacctccacagaggagggaaccagcaccgagcccagcgaaggcagcgccccaggcaccagcaccgagcctagtgagcaggagattaaacggatcaacaagatcagaagaagacttgtgaaagacagcaacaccaagaaggccggcaagacaggccccatgaaaaccctgctggttagagtgatgacacccgatctgagagagcggctggaaaacctgagaaagaagcctgaaaatatcccccagcccatcagcaatacatctagagccaacctgaataagctgctgaccgattacaccgaaatgaagaaggcgatcctgcatgtgtactgggaagagttccagaaggaccctgtgggcctgatgagccgggtggcccagcctgccagcaagaagatcgatcagaacaagctgaaacctgagatggacgagaagggcaacctgaccaccgccggctttgcctgctctcagtgtggccagcccctgttcgtgtacaagctggagcaggtgtctgagaagggcaaggcttacaccaactacttcggacggtgcaatgtggccgagcacgaaaagctgatcctgctggcccagctgaagcccgagaaggatagcgacgaagccgtgacatatagcctgggaaagtttgggcagagggccctggatttctacagcattcatgtgaccaaggagtccacccaccccgtgaagcccctggcccagatcgccggaaacagatacgcctccggacctgtgggaaaggccctgagcgacgcatgtatgggcacaatcgcctccttcctgtctaagtaccaggacatcatcatcgaacaccagaaggtggtgaagggcaaccagaagagactggagagcctgcgggagctggccggcaaggaaaacctggaataccctagcgtgaccctgccacctcagcctcacaccaaggagggcgttgatgcctacaacgaagtgatcgcccgggtgcgaatgtgggtgaacctgaacctgtggcagaagctgaagctaagcagagatgatgccaagcctctgctgagactgaagggattcccttcctttcctctggtcgagagacaggccaacgaagtggactggtgggacatggtgtgtaacgtgaagaagctgatcaacgagaaaaaggaggatggcaaggtgttttggcagaatctggctggctacaagagacaggaagccctgagaccatacctgagcagcgaggaagatcggaagaagggaaagaaattcgctcggtaccagctgggcgacctgctgctgcacctggaaaagaagcacggcgaggactggggaaaggtgtacgacgaggcctgggagcggattgacaagaaagtggaaggcctgagcaagcacatcaagctggaagaggaacggagaagcgaggacgcccagagcaaggccgccctgaccgactggctgcgggctaaggccagcttcgtgatcgagggcctgaaggaggccgacaaggacgagttctgcagatgcgagctgaagctgcagaagtggtacggggacctgcggggaaagcccttcgccatcgaagccgagaacagcatcctggacatcagcggcttcagcaagcagtacaactgtgccttcatctggcagaaggacggcgtgaagaagctgaacctgtacctgatcatcaactacttcaagggcggcaagctgcggttcaagaagatcaaacctgaagccttcgaagccaacagattctacaccgtgatcaacaaaaagagcggcgagatcgtgcccatggaggtgaacttcaacttcgacgaccccaacctgatcatcctgcctctggcctttggcaagagacagggcagagaattcatctggaacgacctgctgtccctggaaaccggcagcctgaagctggccaacggaagagtgatcgagaagacactgtacaacagaagaacccggcaggatgagcctgccctgttcgtggccctgaccttcgagcggcgggaggtcctggactcctccaatatcaaaccaatgaacctgatcggcgtggcaagaggcgaaaacatccccgccgtgatcgccctgaccgaccccgagggctgcccactgagccggtttaaggatagcctgggaaacccaacccacatcctgagaatcggcgagagctataaggagaagcagcggaccatccaggccaagaaggaggtggagcagcggagagccggcggctacagccggaagtacgccagcaaagccaagaatctggcagacgatatggtgagaaacaccgctagagatctgctgtactacgccgtgacccaggatgccatgctgatcttcgccaacctgagccggggcttcggccggcagggcaagcggaccttcatggccgagagacagtacacacggatggaggactggctgaccgccaagctggcctacgagggcctgagcaagacctacctgtccaagacactggcccagtacacctccaagacatgcagcaactgtgggtttaccatcaccagcgccgactacgacagggtgctggagaagctgaagaagacagcaacaggctggatgaccacaattaacggcaaggagctgaaggtggagggccagattacctactacaacagatacaagagacagaacgtagtcaaggacctgtccgtcgagctggatagactgagcgaagaatctgtgaacaacgacatctcctcctggacaaagggcagaagcggagaagctctgagcctcctgaagaaaagattctcccatagacccgtgcaggagaagttcgtgtgcctgaactgcggcttcgagacacacgcagccgagcaagccgccctgaacatcgccagatcctggctgttcctgcggagccaggagtacaagaaataccagacaaacaagacaaccggcaacaccgataagagagccttcgtcgagacctggcagtccttttaccggaagaagcttaaggaggtgtggaaacctgccgtgcggtctggcggatctggcggaggctccaccagccccaagaaaaagagaaaagtctaagctgccttctgcggggcttgccttctggccatgcccttcttctctcccttgcacctgtacctcttggtctttgaataaagcctgagtaggaaggctagcaaaaaaaaaaaaaaaaaaaaaaaaaaaaaaaaaaaaaaaaaaaaaaaaaaaaaaaaaaaaaaaaaaaaaaaaaaaaaaaa

SEQ ID NO: 9443 - RNA, 8787 nt, synthetic construct
  source 1..8787: mol_type = other RNA
aggaaataagagagaaaagaagagtaagaagaaatataagagccaccatggcccctaagaagaagcgtaaagtgagccggatgaaccacgaccaggagttcgacccccctaaggtgtaccctcccgtccccgccgagaagagaaagcccatccgggtcctgagcctgttcgatggcatcgccaccggtctgctggtgctgaaggacctgggcatccaggtggataggtacattgcctccgaggtgtgcgaggactccatcaccgtgggaatggtgcgtcatcagggcaagatcatgtacgtgggcgacgtgcggagcgtgacacagaagcatatccaggagtggggccctttcgacctggtgatcggcggcagcccttgcaatgacctgagcatcgtgaacccagcccggaagggcctgtacgagggaaccggcagactgttcttcgagttttacagactgctgcacgacgcccggcctaaggaaggcgacgaccggcccttcttttggctgttcgagaatgtggtggccatgggagtcagcgacaagcgggatattagccggttcctggagagcaaccccgtgatgatcgatgccaaggaagtgagcgccgcccaccgggccagatacttctggggcaatctgcctggcatgaacagacccctggccagcaccgtgaacgacaagctggagctgcaggagtgcctggagcacggccggatcgccaagttcagcaaggtgagaaccatcaccacccgaagcaacagcatcaaacaaggcaaggaccagcactttcctgtgttcatgaacgagaaggaggacatcctgtggtgtaccgagatggagagagtgttcgggttcccagtccactacacagatgtcagcaacatgtctagactggccagacagagactgctgggaagaagctggtccgtccctgtgatcagacacctgttcgcccctctgaaggagtacttcgcctgcgtgagcagcggcaacagcaacgccaacagccggggccccagcttctctagcggcctggtgccactgtccctgagagggagccacatgggccccatggagatctacaaaaccgtgagcgcctggaagcggcagcctgtgcgcgtgctgagcctgtttcggaatatcgataaagtcctgaaaagcctgggattcctggagagcggctctggctccggcggtggcaccctgaagtacgtggaggatgtgacaaacgtggtcagacgggatgtggagaagtggggccccttcgatctggtgtacggcagcacccaacccctgggcagctcttgtgaccggtgccctggctggtacatgtttcagttccaccggatcctgcagtacgccctgccgagacaggagtcccagcggccattcttttggattttcatggacaacttgctgctgaccgaggatgaccaggaaactaccactcggttcctgcagaccgaagccgtgaccctgcaggacgtgagaggccgggactaccagaacgccatgcgggtgtggtccaacatccctggactgaaaagcaagcacgcacctctgacccctaaagaagaggagtacctgcaggcccaggtgcggagcagaagcaagctggacgcccctaaggtggatctgctggtgaagaattgcctcctgcccctgagagagtacttcaagtatttcagccagaatagtctgcccctgggaggcagcggcggcggcatgaccaagttccaggaggccgtgaccttcaaggacgtggccgtggccttcaccgaggaggagctgggcctgctggacagcgcccagaggaagctgtacagggacgtgatgctggagaacttcaggaacctggtgagcgtgggccaccagagcttcaagcccgacatgatcagccagctggagagggaggagaagctgtggatgaaggagctgcagacccagaggggcaagcacagcggcttcggcggcccaagcagcggcgcccctcctcccagcggcggcaggcggcccaagcagcggcgcccctcctcccagcggcggcagcccagccggctccccaacctctaccgaggagggcacctctgagtccgccacccccgagagcggccctggcacctccaccgagcccagcgagggcagcgcacccggcagccctgccggcagccccacctccacagaggagggaaccagcaccgagcccagcgaaggcagcgccccaggcaccagcaccgagcctagtgagcaggagattaaacggatcaacaagatcagaagaagacttgtgaaagacagcaacaccaagaaggccggcaagacaggccccatgaaaaccctgctggttagagtgatgacacccgatctgagagagcggctggaaaacctgagaaagaagcctgaaaatatcccccagcccatcagcaatacatctagagccaacctgaataagctgctgaccgattacaccgaaatgaagaaggcgatcctgcatgtgtactgggaagagttccagaaggaccctgtgggcctgatgagccgggtggcccagcctgccagcaagaagatcgatcagaacaagctgaaacctgagatggacgagaagggcaacctgaccaccgccggctttgcctgctctcagtgtggccagcccctgttcgtgtacaagctggagcaggtgtctgagaagggcaaggcttacaccaactacttcggacggtgcaatgtggccgagcacgaaaagctgatcctgctggcccagctgaagcccgagaaggatagcgacgaagccgtgacatatagcctgggaaagtttgggcagagggccctggatttctacagcattcatgtgaccaaggagtccacccaccccgtgaagcccctggcccagatcgccggaaacagatacgcctccggacctgtgggaaaggccctgagcgacgcatgtatgggcacaatcgcctccttcctgtctaagtaccaggacatcatcatcgaacaccagaaggtggtgaagggcaaccagaagagactggagagcctgcgggagctggccggcaaggaaaacctggaataccctagcgtgaccctgccacctcagcctcacaccaaggagggcgttgatgcctacaacgaagtgatcgcccgggtgcgaatgtgggtgaacctgaacctgtggcagaagctgaagctaagcagagatgatgccaagcctctgctgagactgaagggattcccttcctttcctctggtcgagagacaggccaacgaagtggactggtgggacatggtgtgtaacgtgaagaagctgatcaacgagaaaaaggaggatggcaaggtgttttggcagaatctggctggctacaagagacaggaagccctgagaccatacctgagcagcgaggaagatcggaagaagggaaagaaattcgctcggtaccagctgggcgacctgctgctgcacctggaaaagaagcacggcgaggactggggaaaggtgtacgacgaggcctgggagcggattgacaagaaagtggaaggcctgagcaagcacatcaagctggaagaggaacggagaagcgaggacgcccagagcaaggccgccctgaccgactggctgcgggctaaggccagcttcgtgatcgagggcctgaaggaggccgacaaggacgagttctgcagatgcgagctgaagctgcagaagtggtacggggacctgcggggaaagcccttcgccatcgaagccgagaacagcatcctggacatcagcggcttcagcaagcagtacaactgtgccttcatctggcagaaggacggcgtgaagaagctgaacctgtacctgatcatcaactacttcaagggcggcaagctgcggttcaagaagatcaaacctgaagccttcgaagccaacagattctacaccgtgatcaacaaaaagagcggcgagatcgtgcccatggaggtgaacttcaacttcgacgaccccaacctgatcatcctgcctctggcctttggcaagagacagggcagagaattcatctggaacgacctgctgtccctggaaaccggcagcctgaagctggccaacggaagagtgatcgagaagacactgtacaacagaagaacccggcaggatgagcctgccctgttcgtggccctgaccttcgagcggcgggaggtcctggactcctccaatatcaaaccaatgaacctgatcggcgtggcaagaggcgaaaacatccccgccgtgatcgccctgaccgaccccgagggctgcccactgagccggtttaaggatagcctgggaaacccaacccacatcctgagaatcggcgagagctataaggagaagcagcggaccatccaggccaagaaggaggtggagcagcggagagccggcggctacagccggaagtacgccagcaaagccaagaatctggcagacgatatggtgagaaacaccgctagagatctgctgtactacgccgtgacccaggatgccatgctgatcttcgccaacctgagccggggcttcggccggcagggcaagcggaccttcatggccgagagacagtacacacggatggaggactggctgaccgccaagctggcctacgagggcctgagcaagacctacctgtccaagacactggcccagtacacctccaagacatgcagcaactgtgggtttaccatcaccagcgccgactacgacagggtgctggagaagctgaagaagacagcaacaggctggatgaccacaattaacggcaaggagctgaaggtggagggccagattacctactacaacagatacaagagacagaacgtagtcaaggacctgtccgtcgagctggatagactgagcgaagaatctgtgaacaacgacatctcctcctggacaaagggcagaagcggagaagctctgagcctcctgaagaaaagattctcccatagacccgtgcaggagaagttcgtgtgcctgaactgcggcttcgagacacacgcagccgagcaagccgccctgaacatcgccagatcctggctgttcctgcggagccaggagtacaagaaataccagacaaacaagacaaccggcaacaccgataagagagccttcgtcgagacctggcagtccttttaccggaagaagcttaaggaggtgtggaaacctgccgtgcggtctggcggatctggcggaggctccaccagccccaagaaaaagagaaaagtctaagctgccttctgcggggcttgccttctggccatgcccttcttctctcccttgcacctgtacctcttggtctttgaataaagcctgagtaggaaggctagcaaaaaaaaaaaaaaaaaaaaaaaaaaaaaaaaaaaaaaaaaaaaaaaaaaaaaaaaaaaaaaaaaaaaaaaaaaaaaaaagcccagccggctccccaacctctaccgaggagggcacctctgagtccgccacccccgagagcggccctggcacctccaccgagcccagcgagggcagcgcacccggcagccctgccggcagccccacctccacagaggagggaaccagcaccgagcccagcgaaggcagcgccccaggcaccagcaccgagcctagtgagcaggagattaaacggatcaacaagatcagaagaagacttgtgaaagacagcaacaccaagaaggccggcaagacaggccccatgaaaaccctgctggttagagtgatgacacccgatctgagagagcggctggaaaacctgagaaagaagcctgaaaatatcccccagcccatcagcaatacatctagagccaacctgaataagctgctgaccgattacaccgaaatgaagaaggcgatcctgcatgtgtactgggaagagttccagaaggaccctgtgggcctgatgagccgggtggcccagcctgccagcaagaagatcgatcagaacaagctgaaacctgagatggacgagaagggcaacctgaccaccgccggctttgcctgctctcagtgtggccagcccctgttcgtgtacaagctggagcaggtgtctgagaagggcaaggcttacaccaactacttcggacggtgcaatgtggccgagcacgaaaagctgatcctgctggcccagctgaagcccgagaaggatagcgacgaagccgtgacatatagcctgggaaagtttgggcagagggccctggatttctacagcattcatgtgaccaaggagtccacccaccccgtgaagcccctggcccagatcgccggaaacagatacgcctccggacctgtgggaaaggccctgagcgacgcatgtatgggcacaatcgcctccttcctgtctaagtaccaggacatcatcatcgaacaccagaaggtggtgaagggcaaccagaagagactggagagcctgcgggagctggccggcaaggaaaacctggaataccctagcgtgaccctgccacctcagcctcacaccaaggagggcgttgatgcctacaacgaagtgatcgcccgggtgcgaatgtgggtgaacctgaacctgtggcagaagctgaagctaagcagagatgatgccaagcctctgctgagactgaagggattcccttcctttcctctggtcgagagacaggccaacgaagtggactggtgggacatggtgtgtaacgtgaagaagctgatcaacgagaaaaaggaggatggcaaggtgttttggcagaatctggctggctacaagagacaggaagccctgagaccatacctgagcagcgaggaagatcggaagaagggaaagaaattcgctcggtaccagctgggcgacctgctgctgcacctggaaaagaagcacggcgaggactggggaaaggtgtacgacgaggcctgggagcggattgacaagaaagtggaaggcctgagcaagcacatcaagctggaagaggaacggagaagcgaggacgcccagagcaaggccgccctgaccgactggctgcgggctaaggccagcttcgtgatcgagggcctgaaggaggccgacaaggacgagttctgcagatgcgagctgaagctgcagaagtggtacggggacctgcggggaaagcccttcgccatcgaagccgagaacagcatcctggacatcagcggcttcagcaagcagtacaactgtgccttcatctggcagaaggacggcgtgaagaagctgaacctgtacctgatcatcaactacttcaagggcggcaagctgcggttcaagaagatcaaacctgaagccttcgaagccaacagattctacaccgtgatcaacaaaaagagcggcgagatcgtgcccatggaggtgaacttcaacttcgacgaccccaacctgatcatcctgcctctggcctttggcaagagacagggcagagaattcatctggaacgacctgctgtccctggaaaccggcagcctgaagctggccaacggaagagtgatcgagaagacactgtacaacagaagaacccggcaggatgagcctgccctgttcgtggccctgaccttcgagcggcgggaggtcctggactcctccaatatcaaaccaatgaacctgatcggcgtggcaagaggcgaaaacatccccgccgtgatcgccctgaccgaccccgagggctgcccactgagccggtttaaggatagcctgggaaacccaacccacatcctgagaatcggcgagagctataaggagaagcagcggaccatccaggccaagaaggaggtggagcagcggagagccggcggctacagccggaagtacgccagcaaagccaagaatctggcagacgatatggtgagaaacaccgctagagatctgctgtactacgccgtgacccaggatgccatgctgatcttcgccaacctgagccggggcttcggccggcagggcaagcggaccttcatggccgagagacagtacacacggatggaggactggctgaccgccaagctggcctacgagggcctgagcaagacctacctgtccaagacactggcccagtacacctccaagacatgcagcaactgtgggtttaccatcaccagcgccgactacgacagggtgctggagaagctgaagaagacagcaacaggctggatgaccacaattaacggcaaggagctgaaggtggagggccagattacctactacaacagatacaagagacagaacgtagtcaaggacctgtccgtcgagctggatagactgagcgaagaatctgtgaacaacgacatctcctcctggacaaagggcagaagcggagaagctctgagcctcctgaagaaaagattctcccatagacccgtgcaggagaagttcgtgtgcctgaactgcggcttcgagacacacgcagccgagcaagccgccctgaacatcgccagatcctggctgttcctgcggagccaggagtacaagaaataccagacaaacaagacaaccggcaacaccgataagagagccttcgtcgagacctggcagtccttttaccggaagaagcttaaggaggtgtggaaacctgccgtgcggtctggcggatctggcggaggctccaccagccccaagaaaaagagaaaagtctaagctgccttctgcggggcttgccttctggccatgcccttcttctctcccttgcacctgtacctcttggtctttgaataaagcctgagtaggaaggctagcaaaaaaaaaaaaaaaaaaaaaaaaaaaaaaaaaaaaaaaaaaaaaaaaaaaaaaaaaaaaaaaaaaaaaaaaaaaaaaaa

SEQ ID NO: 9444 - RNA, 8787 nt, synthetic construct
  source 1..8787: mol_type = other RNA
aggaaataagagagaaaagaagagtaagaagaaatataagagccaccatggcccctaagaagaagcgtaaagtgagccggatgaaccacgaccaggagttcgacccccctaaggtgtaccctcccgtccccgccgagaagagaaagcccatccgggtcctgagcctgttcgatggcatcgccaccggtctgctggtgctgaaggacctgggcatccaggtggataggtacattgcctccgaggtgtgcgaggactccatcaccgtgggaatggtgcgtcatcagggcaagatcatgtacgtgggcgacgtgcggagcgtgacacagaagcatatccaggagtggggccctttcgacctggtgatcggcggcagcccttgcaatgacctgagcatcgtgaacccagcccggaagggcctgtacgagggaaccggcagactgttcttcgagttttacagactgctgcacgacgcccggcctaaggaaggcgacgaccggcccttcttttggctgttcgagaatgtggtggccatgggagtcagcgacaagcgggatattagccggttcctggagagcaaccccgtgatgatcgatgccaaggaagtgagcgccgcccaccgggccagatacttctggggcaatctgcctggcatgaacagacccctggccagcaccgtgaacgacaagctggagctgcaggagtgcctggagcacggccggatcgccaagttcagcaaggtgagaaccatcaccacccgaagcaacagcatcaaacaaggcaaggaccagcactttcctgtgttcatgaacgagaaggaggacatcctgtggtgtaccgagatggagagagtgttcgggttcccagtccactacacagatgtcagcaacatgtctagactggccagacagagactgctgggaagaagctggtccgtccctgtgatcagacacctgttcgcccctctgaaggagtacttcgcctgcgtgagcagcggcaacagcaacgccaacagccggggccccagcttctctagcggcctggtgccactgtccctgagagggagccacatgggccccatggagatctacaaaaccgtgagcgcctggaagcggcagcctgtgcgcgtgctgagcctgtttcggaatatcgataaagtcctgaaaagcctgggattcctggagagcggctctggctccggcggtggcaccctgaagtacgtggaggatgtgacaaacgtggtcagacgggatgtggagaagtggggccccttcgatctggtgtacggcagcacccaacccctgggcagctcttgtgaccggtgccctggctggtacatgtttcagttccaccggatcctgcagtacgccctgccgagacaggagtcccagcggccattcttttggattttcatggacaacttgctgctgaccgaggatgaccaggaaactaccactcggttcctgcagaccgaagccgtgaccctgcaggacgtgagaggccgggactaccagaacgccatgcgggtgtggtccaacatccctggactgaaaagcaagcacgcacctctgacccctaaagaagaggagtacctgcaggcccaggtgcggagcagaagcaagctggacgcccctaaggtggatctgctggtgaagaattgcctcctgcccctgagagagtacttcaagtatttcagccagaatagtctgcccctgggaggcagcggcggcggcttccagggcagcctgagcatcgaggacgtgaccgtgggcttcacccaggaggagtggcagcacctggaccccgcccagaggaccctgtacagggacgtgatgctggagaactacagccacctggtgagcgtgggctactgcatccccaagcccgaggtgatcttcaagctggagaggggcgagcagctgtggatcctggaggaggagagcagcagccagagccaccccgaggtgtgcaaggtgggcggcccaagcagcggcgcccctcctcccagcggcggcaggcggcccaagcagcggcgcccctcctcccagcggcggcagcccagccggctccccaacctctaccgaggagggcacctctgagtccgccacccccgagagcggccctggcacctccaccgagcccagcgagggcagcgcacccggcagccctgccggcagccccacctccacagaggagggaaccagcaccgagcccagcgaaggcagcgccccaggcaccagcaccgagcctagtgagcaggagattaaacggatcaacaagatcagaagaagacttgtgaaagacagcaacaccaagaaggccggcaagacaggccccatgaaaaccctgctggttagagtgatgacacccgatctgagagagcggctggaaaacctgagaaagaagcctgaaaatatcccccagcccatcagcaatacatctagagccaacctgaataagctgctgaccgattacaccgaaatgaagaaggcgatcctgcatgtgtactgggaagagttccagaaggaccctgtgggcctgatgagccgggtggcccagcctgccagcaagaagatcgatcagaacaagctgaaacctgagatggacgagaagggcaacctgaccaccgccggctttgcctgctctcagtgtggccagcccctgttcgtgtacaagctggagcaggtgtctgagaagggcaaggcttacaccaactacttcggacggtgcaatgtggccgagcacgaaaagctgatcctgctggcccagctgaagcccgagaaggatagcgacgaagccgtgacatatagcctgggaaagtttgggcagagggccctggatttctacagcattcatgtgaccaaggagtccacccaccccgtgaagcccctggcccagatcgccggaaacagatacgcctccggacctgtgggaaaggccctgagcgacgcatgtatgggcacaatcgcctccttcctgtctaagtaccaggacatcatcatcgaacaccagaaggtggtgaagggcaaccagaagagactggagagcctgcgggagctggccggcaaggaaaacctggaataccctagcgtgaccctgccacctcagcctcacaccaaggagggcgttgatgcctacaacgaagtgatcgcccgggtgcgaatgtgggtgaacctgaacctgtggcagaagctgaagctaagcagagatgatgccaagcctctgctgagactgaagggattcccttcctttcctctggtcgagagacaggccaacgaagtggactggtgggacatggtgtgtaacgtgaagaagctgatcaacgagaaaaaggaggatggcaaggtgttttggcagaatctggctggctacaagagacaggaagccctgagaccatacctgagcagcgaggaagatcggaagaagggaaagaaattcgctcggtaccagctgggcgacctgctgctgcacctggaaaagaagcacggcgaggactggggaaaggtgtacgacgaggcctgggagcggattgacaagaaagtggaaggcctgagcaagcacatcaagctggaagaggaacggagaagcgaggacgcccagagcaaggccgccctgaccgactggctgcgggctaaggccagcttcgtgatcgagggcctgaaggaggccgacaaggacgagttctgcagatgcgagctgaagctgcagaagtggtacggggacctgcggggaaagcccttcgccatcgaagccgagaacagcatcctggacatcagcggcttcagcaagcagtacaactgtgccttcatctggcagaaggacggcgtgaagaagctgaacctgtacctgatcatcaactacttcaagggcggcaagctgcggttcaagaagatcaaacctgaagccttcgaagccaacagattctacaccgtgatcaacaaaaagagcggcgagatcgtgcccatggaggtgaacttcaacttcgacgaccccaacctgatcatcctgcctctggcctttggcaagagacagggcagagaattcatctggaacgacctgctgtccctggaaaccggcagcctgaagctggccaacggaagagtgatcgagaagacactgtacaacagaagaacccggcaggatgagcctgccctgttcgtggccctgaccttcgagcggcgggaggtcctggactcctccaatatcaaaccaatgaacctgatcggcgtggcaagaggcgaaaacatccccgccgtgatcgccctgaccgaccccgagggctgcccactgagccggtttaaggatagcctgggaaacccaacccacatcctgagaatcggcgagagctataaggagaagcagcggaccatccaggccaagaaggaggtggagcagcggagagccggcggctacagccggaagtacgccagcaaagccaagaatctggcagacgatatggtgagaaacaccgctagagatctgctgtactacgccgtgacccaggatgccatgctgatcttcgccaacctgagccggggcttcggccggcagggcaagcggaccttcatggccgagagacagtacacacggatggaggactggctgaccgccaagctggcctacgagggcctgagcaagacctacctgtccaagacactggcccagtacacctccaagacatgcagcaactgtgggtttaccatcaccagcgccgactacgacagggtgctggagaagctgaagaagacagcaacaggctggatgaccacaattaacggcaaggagctgaaggtggagggccagattacctactacaacagatacaagagacagaacgtagtcaaggacctgtccgtcgagctggatagactgagcgaagaatctgtgaacaacgacatctcctcctggacaaagggcagaagcggagaagctctgagcctcctgaagaaaagattctcccatagacccgtgcaggagaagttcgtgtgcctgaactgcggcttcgagacacacgcagccgagcaagccgccctgaacatcgccagatcctggctgttcctgcggagccaggagtacaagaaataccagacaaacaagacaaccggcaacaccgataagagagccttcgtcgagacctggcagtccttttaccggaagaagcttaaggaggtgtggaaacctgccgtgcggtctggcggatctggcggaggctccaccagccccaagaaaaagagaaaagtctaagctgccttctgcggggcttgccttctggccatgcccttcttctctcccttgcacctgtacctcttggtctttgaataaagcctgagtaggaaggctagcaaaaaaaaaaaaaaaaaaaaaaaaaaaaaaaaaaaaaaaaaaaaaaaaaaaaaaaaaaaaaaaaaaaaaaaaaaaaaaaagcccagccggctccccaacctctaccgaggagggcacctctgagtccgccacccccgagagcggccctggcacctccaccgagcccagcgagggcagcgcacccggcagccctgccggcagccccacctccacagaggagggaaccagcaccgagcccagcgaaggcagcgccccaggcaccagcaccgagcctagtgagcaggagattaaacggatcaacaagatcagaagaagacttgtgaaagacagcaacaccaagaaggccggcaagacaggccccatgaaaaccctgctggttagagtgatgacacccgatctgagagagcggctggaaaacctgagaaagaagcctgaaaatatcccccagcccatcagcaatacatctagagccaacctgaataagctgctgaccgattacaccgaaatgaagaaggcgatcctgcatgtgtactgggaagagttccagaaggaccctgtgggcctgatgagccgggtggcccagcctgccagcaagaagatcgatcagaacaagctgaaacctgagatggacgagaagggcaacctgaccaccgccggctttgcctgctctcagtgtggccagcccctgttcgtgtacaagctggagcaggtgtctgagaagggcaaggcttacaccaactacttcggacggtgcaatgtggccgagcacgaaaagctgatcctgctggcccagctgaagcccgagaaggatagcgacgaagccgtgacatatagcctgggaaagtttgggcagagggccctggatttctacagcattcatgtgaccaaggagtccacccaccccgtgaagcccctggcccagatcgccggaaacagatacgcctccggacctgtgggaaaggccctgagcgacgcatgtatgggcacaatcgcctccttcctgtctaagtaccaggacatcatcatcgaacaccagaaggtggtgaagggcaaccagaagagactggagagcctgcgggagctggccggcaaggaaaacctggaataccctagcgtgaccctgccacctcagcctcacaccaaggagggcgttgatgcctacaacgaagtgatcgcccgggtgcgaatgtgggtgaacctgaacctgtggcagaagctgaagctaagcagagatgatgccaagcctctgctgagactgaagggattcccttcctttcctctggtcgagagacaggccaacgaagtggactggtgggacatggtgtgtaacgtgaagaagctgatcaacgagaaaaaggaggatggcaaggtgttttggcagaatctggctggctacaagagacaggaagccctgagaccatacctgagcagcgaggaagatcggaagaagggaaagaaattcgctcggtaccagctgggcgacctgctgctgcacctggaaaagaagcacggcgaggactggggaaaggtgtacgacgaggcctgggagcggattgacaagaaagtggaaggcctgagcaagcacatcaagctggaagaggaacggagaagcgaggacgcccagagcaaggccgccctgaccgactggctgcgggctaaggccagcttcgtgatcgagggcctgaaggaggccgacaaggacgagttctgcagatgcgagctgaagctgcagaagtggtacggggacctgcggggaaagcccttcgccatcgaagccgagaacagcatcctggacatcagcggcttcagcaagcagtacaactgtgccttcatctggcagaaggacggcgtgaagaagctgaacctgtacctgatcatcaactacttcaagggcggcaagctgcggttcaagaagatcaaacctgaagccttcgaagccaacagattctacaccgtgatcaacaaaaagagcggcgagatcgtgcccatggaggtgaacttcaacttcgacgaccccaacctgatcatcctgcctctggcctttggcaagagacagggcagagaattcatctggaacgacctgctgtccctggaaaccggcagcctgaagctggccaacggaagagtgatcgagaagacactgtacaacagaagaacccggcaggatgagcctgccctgttcgtggccctgaccttcgagcggcgggaggtcctggactcctccaatatcaaaccaatgaacctgatcggcgtggcaagaggcgaaaacatccccgccgtgatcgccctgaccgaccccgagggctgcccactgagccggtttaaggatagcctgggaaacccaacccacatcctgagaatcggcgagagctataaggagaagcagcggaccatccaggccaagaaggaggtggagcagcggagagccggcggctacagccggaagtacgccagcaaagccaagaatctggcagacgatatggtgagaaacaccgctagagatctgctgtactacgccgtgacccaggatgccatgctgatcttcgccaacctgagccggggcttcggccggcagggcaagcggaccttcatggccgagagacagtacacacggatggaggactggctgaccgccaagctggcctacgagggcctgagcaagacctacctgtccaagacactggcccagtacacctccaagacatgcagcaactgtgggtttaccatcaccagcgccgactacgacagggtgctggagaagctgaagaagacagcaacaggctggatgaccacaattaacggcaaggagctgaaggtggagggccagattacctactacaacagatacaagagacagaacgtagtcaaggacctgtccgtcgagctggatagactgagcgaagaatctgtgaacaacgacatctcctcctggacaaagggcagaagcggagaagctctgagcctcctgaagaaaagattctcccatagacccgtgcaggagaagttcgtgtgcctgaactgcggcttcgagacacacgcagccgagcaagccgccctgaacatcgccagatcctggctgttcctgcggagccaggagtacaagaaataccagacaaacaagacaaccggcaacaccgataagagagccttcgtcgagacctggcagtccttttaccggaagaagcttaaggaggtgtggaaacctgccgtgcggtctggcggatctggcggaggctccaccagccccaagaaaaagagaaaagtctaagctgccttctgcggggcttgccttctggccatgcccttcttctctcccttgcacctgtacctcttggtctttgaataaagcctgagtaggaaggctagcaaaaaaaaaaaaaaaaaaaaaaaaaaaaaaaaaaaaaaaaaaaaaaaaaaaaaaaaaaaaaaaaaaaaaaaaaaaaaaaa

SEQ ID NO: 9445 - RNA, 8787 nt, synthetic construct
  source 1..8787: mol_type = other RNA
aggaaataagagagaaaagaagagtaagaagaaatataagagccaccatggcccctaagaagaagcgtaaagtgagccggatgaaccacgaccaggagttcgacccccctaaggtgtaccctcccgtccccgccgagaagagaaagcccatccgggtcctgagcctgttcgatggcatcgccaccggtctgctggtgctgaaggacctgggcatccaggtggataggtacattgcctccgaggtgtgcgaggactccatcaccgtgggaatggtgcgtcatcagggcaagatcatgtacgtgggcgacgtgcggagcgtgacacagaagcatatccaggagtggggccctttcgacctggtgatcggcggcagcccttgcaatgacctgagcatcgtgaacccagcccggaagggcctgtacgagggaaccggcagactgttcttcgagttttacagactgctgcacgacgcccggcctaaggaaggcgacgaccggcccttcttttggctgttcgagaatgtggtggccatgggagtcagcgacaagcgggatattagccggttcctggagagcaaccccgtgatgatcgatgccaaggaagtgagcgccgcccaccgggccagatacttctggggcaatctgcctggcatgaacagacccctggccagcaccgtgaacgacaagctggagctgcaggagtgcctggagcacggccggatcgccaagttcagcaaggtgagaaccatcaccacccgaagcaacagcatcaaacaaggcaaggaccagcactttcctgtgttcatgaacgagaaggaggacatcctgtggtgtaccgagatggagagagtgttcgggttcccagtccactacacagatgtcagcaacatgtctagactggccagacagagactgctgggaagaagctggtccgtccctgtgatcagacacctgttcgcccctctgaaggagtacttcgcctgcgtgagcagcggcaacagcaacgccaacagccggggccccagcttctctagcggcctggtgccactgtccctgagagggagccacatgggccccatggagatctacaaaaccgtgagcgcctggaagcggcagcctgtgcgcgtgctgagcctgtttcggaatatcgataaagtcctgaaaagcctgggattcctggagagcggctctggctccggcggtggcaccctgaagtacgtggaggatgtgacaaacgtggtcagacgggatgtggagaagtggggccccttcgatctggtgtacggcagcacccaacccctgggcagctcttgtgaccggtgccctggctggtacatgtttcagttccaccggatcctgcagtacgccctgccgagacaggagtcccagcggccattcttttggattttcatggacaacttgctgctgaccgaggatgaccaggaaactaccactcggttcctgcagaccgaagccgtgaccctgcaggacgtgagaggccgggactaccagaacgccatgcgggtgtggtccaacatccctggactgaaaagcaagcacgcacctctgacccctaaagaagaggagtacctgcaggcccaggtgcggagcagaagcaagctggacgcccctaaggtggatctgctggtgaagaattgcctcctgcccctgagagagtacttcaagtatttcagccagaatagtctgcccctgggaggcagcggcggcggcagccagggcagcatcaccttcaaggacgtggccgtggacttcacccaggaggagtggtgcctgctggaccacagccagaaggccctgcacctggaggtgatgctggagaacgtgcagaacctgctgagcgtgggcctgcccgtgcccagggagaacttcatcagctgcttccagcagggcaaggccccctacctgctgcagcagaacgaccccaagagcagcagccccgaggccgagaccaacggcggcccaagcagcggcgcccctcctcccagcggcggcaggcggcccaagcagcggcgcccctcctcccagcggcggcagcccagccggctccccaacctctaccgaggagggcacctctgagtccgccacccccgagagcggccctggcacctccaccgagcccagcgagggcagcgcacccggcagccctgccggcagccccacctccacagaggagggaaccagcaccgagcccagcgaaggcagcgccccaggcaccagcaccgagcctagtgagcaggagattaaacggatcaacaagatcagaagaagacttgtgaaagacagcaacaccaagaaggccggcaagacaggccccatgaaaaccctgctggttagagtgatgacacccgatctgagagagcggctggaaaacctgagaaagaagcctgaaaatatcccccagcccatcagcaatacatctagagccaacctgaataagctgctgaccgattacaccgaaatgaagaaggcgatcctgcatgtgtactgggaagagttccagaaggaccctgtgggcctgatgagccgggtggcccagcctgccagcaagaagatcgatcagaacaagctgaaacctgagatggacgagaagggcaacctgaccaccgccggctttgcctgctctcagtgtggccagcccctgttcgtgtacaagctggagcaggtgtctgagaagggcaaggcttacaccaactacttcggacggtgcaatgtggccgagcacgaaaagctgatcctgctggcccagctgaagcccgagaaggatagcgacgaagccgtgacatatagcctgggaaagtttgggcagagggccctggatttctacagcattcatgtgaccaaggagtccacccaccccgtgaagcccctggcccagatcgccggaaacagatacgcctccggacctgtgggaaaggccctgagcgacgcatgtatgggcacaatcgcctccttcctgtctaagtaccaggacatcatcatcgaacaccagaaggtggtgaagggcaaccagaagagactggagagcctgcgggagctggccggcaaggaaaacctggaataccctagcgtgaccctgccacctcagcctcacaccaaggagggcgttgatgcctacaacgaagtgatcgcccgggtgcgaatgtgggtgaacctgaacctgtggcagaagctgaagctaagcagagatgatgccaagcctctgctgagactgaagggattcccttcctttcctctggtcgagagacaggccaacgaagtggactggtgggacatggtgtgtaacgtgaagaagctgatcaacgagaaaaaggaggatggcaaggtgttttggcagaatctggctggctacaagagacaggaagccctgagaccatacctgagcagcgaggaagatcggaagaagggaaagaaattcgctcggtaccagctgggcgacctgctgctgcacctggaaaagaagcacggcgaggactggggaaaggtgtacgacgaggcctgggagcggattgacaagaaagtggaaggcctgagcaagcacatcaagctggaagaggaacggagaagcgaggacgcccagagcaaggccgccctgaccgactggctgcgggctaaggccagcttcgtgatcgagggcctgaaggaggccgacaaggacgagttctgcagatgcgagctgaagctgcagaagtggtacggggacctgcggggaaagcccttcgccatcgaagccgagaacagcatcctggacatcagcggcttcagcaagcagtacaactgtgccttcatctggcagaaggacggcgtgaagaagctgaacctgtacctgatcatcaactacttcaagggcggcaagctgcggttcaagaagatcaaacctgaagccttcgaagccaacagattctacaccgtgatcaacaaaaagagcggcgagatcgtgcccatggaggtgaacttcaacttcgacgaccccaacctgatcatcctgcctctggcctttggcaagagacagggcagagaattcatctggaacgacctgctgtccctggaaaccggcagcctgaagctggccaacggaagagtgatcgagaagacactgtacaacagaagaacccggcaggatgagcctgccctgttcgtggccctgaccttcgagcggcgggaggtcctggactcctccaatatcaaaccaatgaacctgatcggcgtggcaagaggcgaaaacatccccgccgtgatcgccctgaccgaccccgagggctgcccactgagccggtttaaggatagcctgggaaacccaacccacatcctgagaatcggcgagagctataaggagaagcagcggaccatccaggccaagaaggaggtggagcagcggagagccggcggctacagccggaagtacgccagcaaagccaagaatctggcagacgatatggtgagaaacaccgctagagatctgctgtactacgccgtgacccaggatgccatgctgatcttcgccaacctgagccggggcttcggccggcagggcaagcggaccttcatggccgagagacagtacacacggatggaggactggctgaccgccaagctggcctacgagggcctgagcaagacctacctgtccaagacactggcccagtacacctccaagacatgcagcaactgtgggtttaccatcaccagcgccgactacgacagggtgctggagaagctgaagaagacagcaacaggctggatgaccacaattaacggcaaggagctgaaggtggagggccagattacctactacaacagatacaagagacagaacgtagtcaaggacctgtccgtcgagctggatagactgagcgaagaatctgtgaacaacgacatctcctcctggacaaagggcagaagcggagaagctctgagcctcctgaagaaaagattctcccatagacccgtgcaggagaagttcgtgtgcctgaactgcggcttcgagacacacgcagccgagcaagccgccctgaacatcgccagatcctggctgttcctgcggagccaggagtacaagaaataccagacaaacaagacaaccggcaacaccgataagagagccttcgtcgagacctggcagtccttttaccggaagaagcttaaggaggtgtggaaacctgccgtgcggtctggcggatctggcggaggctccaccagccccaagaaaaagagaaaagtctaagctgccttctgcggggcttgccttctggccatgcccttcttctctcccttgcacctgtacctcttggtctttgaataaagcctgagtaggaaggctagcaaaaaaaaaaaaaaaaaaaaaaaaaaaaaaaaaaaaaaaaaaaaaaaaaaaaaaaaaaaaaaaaaaaaaaaaaaaaaaaagcccagccggctccccaacctctaccgaggagggcacctctgagtccgccacccccgagagcggccctggcacctccaccgagcccagcgagggcagcgcacccggcagccctgccggcagccccacctccacagaggagggaaccagcaccgagcccagcgaaggcagcgccccaggcaccagcaccgagcctagtgagcaggagattaaacggatcaacaagatcagaagaagacttgtgaaagacagcaacaccaagaaggccggcaagacaggccccatgaaaaccctgctggttagagtgatgacacccgatctgagagagcggctggaaaacctgagaaagaagcctgaaaatatcccccagcccatcagcaatacatctagagccaacctgaataagctgctgaccgattacaccgaaatgaagaaggcgatcctgcatgtgtactgggaagagttccagaaggaccctgtgggcctgatgagccgggtggcccagcctgccagcaagaagatcgatcagaacaagctgaaacctgagatggacgagaagggcaacctgaccaccgccggctttgcctgctctcagtgtggccagcccctgttcgtgtacaagctggagcaggtgtctgagaagggcaaggcttacaccaactacttcggacggtgcaatgtggccgagcacgaaaagctgatcctgctggcccagctgaagcccgagaaggatagcgacgaagccgtgacatatagcctgggaaagtttgggcagagggccctggatttctacagcattcatgtgaccaaggagtccacccaccccgtgaagcccctggcccagatcgccggaaacagatacgcctccggacctgtgggaaaggccctgagcgacgcatgtatgggcacaatcgcctccttcctgtctaagtaccaggacatcatcatcgaacaccagaaggtggtgaagggcaaccagaagagactggagagcctgcgggagctggccggcaaggaaaacctggaataccctagcgtgaccctgccacctcagcctcacaccaaggagggcgttgatgcctacaacgaagtgatcgcccgggtgcgaatgtgggtgaacctgaacctgtggcagaagctgaagctaagcagagatgatgccaagcctctgctgagactgaagggattcccttcctttcctctggtcgagagacaggccaacgaagtggactggtgggacatggtgtgtaacgtgaagaagctgatcaacgagaaaaaggaggatggcaaggtgttttggcagaatctggctggctacaagagacaggaagccctgagaccatacctgagcagcgaggaagatcggaagaagggaaagaaattcgctcggtaccagctgggcgacctgctgctgcacctggaaaagaagcacggcgaggactggggaaaggtgtacgacgaggcctgggagcggattgacaagaaagtggaaggcctgagcaagcacatcaagctggaagaggaacggagaagcgaggacgcccagagcaaggccgccctgaccgactggctgcgggctaaggccagcttcgtgatcgagggcctgaaggaggccgacaaggacgagttctgcagatgcgagctgaagctgcagaagtggtacggggacctgcggggaaagcccttcgccatcgaagccgagaacagcatcctggacatcagcggcttcagcaagcagtacaactgtgccttcatctggcagaaggacggcgtgaagaagctgaacctgtacctgatcatcaactacttcaagggcggcaagctgcggttcaagaagatcaaacctgaagccttcgaagccaacagattctacaccgtgatcaacaaaaagagcggcgagatcgtgcccatggaggtgaacttcaacttcgacgaccccaacctgatcatcctgcctctggcctttggcaagagacagggcagagaattcatctggaacgacctgctgtccctggaaaccggcagcctgaagctggccaacggaagagtgatcgagaagacactgtacaacagaagaacccggcaggatgagcctgccctgttcgtggccctgaccttcgagcggcgggaggtcctggactcctccaatatcaaaccaatgaacctgatcggcgtggcaagaggcgaaaacatccccgccgtgatcgccctgaccgaccccgagggctgcccactgagccggtttaaggatagcctgggaaacccaacccacatcctgagaatcggcgagagctataaggagaagcagcggaccatccaggccaagaaggaggtggagcagcggagagccggcggctacagccggaagtacgccagcaaagccaagaatctggcagacgatatggtgagaaacaccgctagagatctgctgtactacgccgtgacccaggatgccatgctgatcttcgccaacctgagccggggcttcggccggcagggcaagcggaccttcatggccgagagacagtacacacggatggaggactggctgaccgccaagctggcctacgagggcctgagcaagacctacctgtccaagacactggcccagtacacctccaagacatgcagcaactgtgggtttaccatcaccagcgccgactacgacagggtgctggagaagctgaagaagacagcaacaggctggatgaccacaattaacggcaaggagctgaaggtggagggccagattacctactacaacagatacaagagacagaacgtagtcaaggacctgtccgtcgagctggatagactgagcgaagaatctgtgaacaacgacatctcctcctggacaaagggcagaagcggagaagctctgagcctcctgaagaaaagattctcccatagacccgtgcaggagaagttcgtgtgcctgaactgcggcttcgagacacacgcagccgagcaagccgccctgaacatcgccagatcctggctgttcctgcggagccaggagtacaagaaataccagacaaacaagacaaccggcaacaccgataagagagccttcgtcgagacctggcagtccttttaccggaagaagcttaaggaggtgtggaaacctgccgtgcggtctggcggatctggcggaggctccaccagccccaagaaaaagagaaaagtctaagctgccttctgcggggcttgccttctggccatgcccttcttctctcccttgcacctgtacctcttggtctttgaataaagcctgagtaggaaggctagcaaaaaaaaaaaaaaaaaaaaaaaaaaaaaaaaaaaaaaaaaaaaaaaaaaaaaaaaaaaaaaaaaaaaaaaaaaaaaaaa

SEQ ID NO: 9446 - RNA, 8787 nt, synthetic construct
  source 1..8787: mol_type = other RNA
aggaaataagagagaaaagaagagtaagaagaaatataagagccaccatggcccctaagaagaagcgtaaagtgagccggatgaaccacgaccaggagttcgacccccctaaggtgtaccctcccgtccccgccgagaagagaaagcccatccgggtcctgagcctgttcgatggcatcgccaccggtctgctggtgctgaaggacctgggcatccaggtggataggtacattgcctccgaggtgtgcgaggactccatcaccgtgggaatggtgcgtcatcagggcaagatcatgtacgtgggcgacgtgcggagcgtgacacagaagcatatccaggagtggggccctttcgacctggtgatcggcggcagcccttgcaatgacctgagcatcgtgaacccagcccggaagggcctgtacgagggaaccggcagactgttcttcgagttttacagactgctgcacgacgcccggcctaaggaaggcgacgaccggcccttcttttggctgttcgagaatgtggtggccatgggagtcagcgacaagcgggatattagccggttcctggagagcaaccccgtgatgatcgatgccaaggaagtgagcgccgcccaccgggccagatacttctggggcaatctgcctggcatgaacagacccctggccagcaccgtgaacgacaagctggagctgcaggagtgcctggagcacggccggatcgccaagttcagcaaggtgagaaccatcaccacccgaagcaacagcatcaaacaaggcaaggaccagcactttcctgtgttcatgaacgagaaggaggacatcctgtggtgtaccgagatggagagagtgttcgggttcccagtccactacacagatgtcagcaacatgtctagactggccagacagagactgctgggaagaagctggtccgtccctgtgatcagacacctgttcgcccctctgaaggagtacttcgcctgcgtgagcagcggcaacagcaacgccaacagccggggccccagcttctctagcggcctggtgccactgtccctgagagggagccacatgggccccatggagatctacaaaaccgtgagcgcctggaagcggcagcctgtgcgcgtgctgagcctgtttcggaatatcgataaagtcctgaaaagcctgggattcctggagagcggctctggctccggcggtggcaccctgaagtacgtggaggatgtgacaaacgtggtcagacgggatgtggagaagtggggccccttcgatctggtgtacggcagcacccaacccctgggcagctcttgtgaccggtgccctggctggtacatgtttcagttccaccggatcctgcagtacgccctgccgagacaggagtcccagcggccattcttttggattttcatggacaacttgctgctgaccgaggatgaccaggaaactaccactcggttcctgcagaccgaagccgtgaccctgcaggacgtgagaggccgggactaccagaacgccatgcgggtgtggtccaacatccctggactgaaaagcaagcacgcacctctgacccctaaagaagaggagtacctgcaggcccaggtgcggagcagaagcaagctggacgcccctaaggtggatctgctggtgaagaattgcctcctgcccctgagagagtacttcaagtatttcagccagaatagtctgcccctgggaggcagcggcggcggcgcccaggagagcgtgaccttcagggacgtggccgtggtgttcagcagggacgagtggctgtgcctggaccccgcccagaggagcctgtacagggaggtgatgctggagaactacggcaccctggtgagcctgggcatcctgttcagcaagcccaaggtgatcttccagctgcagcagggcgaggacccctggatggtggagagcggcgtgagccagggcccctgcgtgggctgggagagcatgggcggcccaagcagcggcgcccctcctcccagcggcggcaggcggcccaagcagcggcgcccctcctcccagcggcggcagcccagccggctccccaacctctaccgaggagggcacctctgagtccgccacccccgagagcggccctggcacctccaccgagcccagcgagggcagcgcacccggcagccctgccggcagccccacctccacagaggagggaaccagcaccgagcccagcgaaggcagcgccccaggcaccagcaccgagcctagtgagcaggagattaaacggatcaacaagatcagaagaagacttgtgaaagacagcaacaccaagaaggccggcaagacaggccccatgaaaaccctgctggttagagtgatgacacccgatctgagagagcggctggaaaacctgagaaagaagcctgaaaatatcccccagcccatcagcaatacatctagagccaacctgaataagctgctgaccgattacaccgaaatgaagaaggcgatcctgcatgtgtactgggaagagttccagaaggaccctgtgggcctgatgagccgggtggcccagcctgccagcaagaagatcgatcagaacaagctgaaacctgagatggacgagaagggcaacctgaccaccgccggctttgcctgctctcagtgtggccagcccctgttcgtgtacaagctggagcaggtgtctgagaagggcaaggcttacaccaactacttcggacggtgcaatgtggccgagcacgaaaagctgatcctgctggcccagctgaagcccgagaaggatagcgacgaagccgtgacatatagcctgggaaagtttgggcagagggccctggatttctacagcattcatgtgaccaaggagtccacccaccccgtgaagcccctggcccagatcgccggaaacagatacgcctccggacctgtgggaaaggccctgagcgacgcatgtatgggcacaatcgcctccttcctgtctaagtaccaggacatcatcatcgaacaccagaaggtggtgaagggcaaccagaagagactggagagcctgcgggagctggccggcaaggaaaacctggaataccctagcgtgaccctgccacctcagcctcacaccaaggagggcgttgatgcctacaacgaagtgatcgcccgggtgcgaatgtgggtgaacctgaacctgtggcagaagctgaagctaagcagagatgatgccaagcctctgctgagactgaagggattcccttcctttcctctggtcgagagacaggccaacgaagtggactggtgggacatggtgtgtaacgtgaagaagctgatcaacgagaaaaaggaggatggcaaggtgttttggcagaatctggctggctacaagagacaggaagccctgagaccatacctgagcagcgaggaagatcggaagaagggaaagaaattcgctcggtaccagctgggcgacctgctgctgcacctggaaaagaagcacggcgaggactggggaaaggtgtacgacgaggcctgggagcggattgacaagaaagtggaaggcctgagcaagcacatcaagctggaagaggaacggagaagcgaggacgcccagagcaaggccgccctgaccgactggctgcgggctaaggccagcttcgtgatcgagggcctgaaggaggccgacaaggacgagttctgcagatgcgagctgaagctgcagaagtggtacggggacctgcggggaaagcccttcgccatcgaagccgagaacagcatcctggacatcagcggcttcagcaagcagtacaactgtgccttcatctggcagaaggacggcgtgaagaagctgaacctgtacctgatcatcaactacttcaagggcggcaagctgcggttcaagaagatcaaacctgaagccttcgaagccaacagattctacaccgtgatcaacaaaaagagcggcgagatcgtgcccatggaggtgaacttcaacttcgacgaccccaacctgatcatcctgcctctggcctttggcaagagacagggcagagaattcatctggaacgacctgctgtccctggaaaccggcagcctgaagctggccaacggaagagtgatcgagaagacactgtacaacagaagaacccggcaggatgagcctgccctgttcgtggccctgaccttcgagcggcgggaggtcctggactcctccaatatcaaaccaatgaacctgatcggcgtggcaagaggcgaaaacatccccgccgtgatcgccctgaccgaccccgagggctgcccactgagccggtttaaggatagcctgggaaacccaacccacatcctgagaatcggcgagagctataaggagaagcagcggaccatccaggccaagaaggaggtggagcagcggagagccggcggctacagccggaagtacgccagcaaagccaagaatctggcagacgatatggtgagaaacaccgctagagatctgctgtactacgccgtgacccaggatgccatgctgatcttcgccaacctgagccggggcttcggccggcagggcaagcggaccttcatggccgagagacagtacacacggatggaggactggctgaccgccaagctggcctacgagggcctgagcaagacctacctgtccaagacactggcccagtacacctccaagacatgcagcaactgtgggtttaccatcaccagcgccgactacgacagggtgctggagaagctgaagaagacagcaacaggctggatgaccacaattaacggcaaggagctgaaggtggagggccagattacctactacaacagatacaagagacagaacgtagtcaaggacctgtccgtcgagctggatagactgagcgaagaatctgtgaacaacgacatctcctcctggacaaagggcagaagcggagaagctctgagcctcctgaagaaaagattctcccatagacccgtgcaggagaagttcgtgtgcctgaactgcggcttcgagacacacgcagccgagcaagccgccctgaacatcgccagatcctggctgttcctgcggagccaggagtacaagaaataccagacaaacaagacaaccggcaacaccgataagagagccttcgtcgagacctggcagtccttttaccggaagaagcttaaggaggtgtggaaacctgccgtgcggtctggcggatctggcggaggctccaccagccccaagaaaaagagaaaagtctaagctgccttctgcggggcttgccttctggccatgcccttcttctctcccttgcacctgtacctcttggtctttgaataaagcctgagtaggaaggctagcaaaaaaaaaaaaaaaaaaaaaaaaaaaaaaaaaaaaaaaaaaaaaaaaaaaaaaaaaaaaaaaaaaaaaaaaaaaaaaaagcccagccggctccccaacctctaccgaggagggcacctctgagtccgccacccccgagagcggccctggcacctccaccgagcccagcgagggcagcgcacccggcagccctgccggcagccccacctccacagaggagggaaccagcaccgagcccagcgaaggcagcgccccaggcaccagcaccgagcctagtgagcaggagattaaacggatcaacaagatcagaagaagacttgtgaaagacagcaacaccaagaaggccggcaagacaggccccatgaaaaccctgctggttagagtgatgacacccgatctgagagagcggctggaaaacctgagaaagaagcctgaaaatatcccccagcccatcagcaatacatctagagccaacctgaataagctgctgaccgattacaccgaaatgaagaaggcgatcctgcatgtgtactgggaagagttccagaaggaccctgtgggcctgatgagccgggtggcccagcctgccagcaagaagatcgatcagaacaagctgaaacctgagatggacgagaagggcaacctgaccaccgccggctttgcctgctctcagtgtggccagcccctgttcgtgtacaagctggagcaggtgtctgagaagggcaaggcttacaccaactacttcggacggtgcaatgtggccgagcacgaaaagctgatcctgctggcccagctgaagcccgagaaggatagcgacgaagccgtgacatatagcctgggaaagtttgggcagagggccctggatttctacagcattcatgtgaccaaggagtccacccaccccgtgaagcccctggcccagatcgccggaaacagatacgcctccggacctgtgggaaaggccctgagcgacgcatgtatgggcacaatcgcctccttcctgtctaagtaccaggacatcatcatcgaacaccagaaggtggtgaagggcaaccagaagagactggagagcctgcgggagctggccggcaaggaaaacctggaataccctagcgtgaccctgccacctcagcctcacaccaaggagggcgttgatgcctacaacgaagtgatcgcccgggtgcgaatgtgggtgaacctgaacctgtggcagaagctgaagctaagcagagatgatgccaagcctctgctgagactgaagggattcccttcctttcctctggtcgagagacaggccaacgaagtggactggtgggacatggtgtgtaacgtgaagaagctgatcaacgagaaaaaggaggatggcaaggtgttttggcagaatctggctggctacaagagacaggaagccctgagaccatacctgagcagcgaggaagatcggaagaagggaaagaaattcgctcggtaccagctgggcgacctgctgctgcacctggaaaagaagcacggcgaggactggggaaaggtgtacgacgaggcctgggagcggattgacaagaaagtggaaggcctgagcaagcacatcaagctggaagaggaacggagaagcgaggacgcccagagcaaggccgccctgaccgactggctgcgggctaaggccagcttcgtgatcgagggcctgaaggaggccgacaaggacgagttctgcagatgcgagctgaagctgcagaagtggtacggggacctgcggggaaagcccttcgccatcgaagccgagaacagcatcctggacatcagcggcttcagcaagcagtacaactgtgccttcatctggcagaaggacggcgtgaagaagctgaacctgtacctgatcatcaactacttcaagggcggcaagctgcggttcaagaagatcaaacctgaagccttcgaagccaacagattctacaccgtgatcaacaaaaagagcggcgagatcgtgcccatggaggtgaacttcaacttcgacgaccccaacctgatcatcctgcctctggcctttggcaagagacagggcagagaattcatctggaacgacctgctgtccctggaaaccggcagcctgaagctggccaacggaagagtgatcgagaagacactgtacaacagaagaacccggcaggatgagcctgccctgttcgtggccctgaccttcgagcggcgggaggtcctggactcctccaatatcaaaccaatgaacctgatcggcgtggcaagaggcgaaaacatccccgccgtgatcgccctgaccgaccccgagggctgcccactgagccggtttaaggatagcctgggaaacccaacccacatcctgagaatcggcgagagctataaggagaagcagcggaccatccaggccaagaaggaggtggagcagcggagagccggcggctacagccggaagtacgccagcaaagccaagaatctggcagacgatatggtgagaaacaccgctagagatctgctgtactacgccgtgacccaggatgccatgctgatcttcgccaacctgagccggggcttcggccggcagggcaagcggaccttcatggccgagagacagtacacacggatggaggactggctgaccgccaagctggcctacgagggcctgagcaagacctacctgtccaagacactggcccagtacacctccaagacatgcagcaactgtgggtttaccatcaccagcgccgactacgacagggtgctggagaagctgaagaagacagcaacaggctggatgaccacaattaacggcaaggagctgaaggtggagggccagattacctactacaacagatacaagagacagaacgtagtcaaggacctgtccgtcgagctggatagactgagcgaagaatctgtgaacaacgacatctcctcctggacaaagggcagaagcggagaagctctgagcctcctgaagaaaagattctcccatagacccgtgcaggagaagttcgtgtgcctgaactgcggcttcgagacacacgcagccgagcaagccgccctgaacatcgccagatcctggctgttcctgcggagccaggagtacaagaaataccagacaaacaagacaaccggcaacaccgataagagagccttcgtcgagacctggcagtccttttaccggaagaagcttaaggaggtgtggaaacctgccgtgcggtctggcggatctggcggaggctccaccagccccaagaaaaagagaaaagtctaagctgccttctgcggggcttgccttctggccatgcccttcttctctcccttgcacctgtacctcttggtctttgaataaagcctgagtaggaaggctagcaaaaaaaaaaaaaaaaaaaaaaaaaaaaaaaaaaaaaaaaaaaaaaaaaaaaaaaaaaaaaaaaaaaaaaaaaaaaaaaa

SEQ ID NO: 9447 - RNA, 8787 nt, synthetic construct
  source 1..8787: mol_type = other RNA
aggaaataagagagaaaagaagagtaagaagaaatataagagccaccatggcccctaagaagaagcgtaaagtgagccggatgaaccacgaccaggagttcgacccccctaaggtgtaccctcccgtccccgccgagaagagaaagcccatccgggtcctgagcctgttcgatggcatcgccaccggtctgctggtgctgaaggacctgggcatccaggtggataggtacattgcctccgaggtgtgcgaggactccatcaccgtgggaatggtgcgtcatcagggcaagatcatgtacgtgggcgacgtgcggagcgtgacacagaagcatatccaggagtggggccctttcgacctggtgatcggcggcagcccttgcaatgacctgagcatcgtgaacccagcccggaagggcctgtacgagggaaccggcagactgttcttcgagttttacagactgctgcacgacgcccggcctaaggaaggcgacgaccggcccttcttttggctgttcgagaatgtggtggccatgggagtcagcgacaagcgggatattagccggttcctggagagcaaccccgtgatgatcgatgccaaggaagtgagcgccgcccaccgggccagatacttctggggcaatctgcctggcatgaacagacccctggccagcaccgtgaacgacaagctggagctgcaggagtgcctggagcacggccggatcgccaagttcagcaaggtgagaaccatcaccacccgaagcaacagcatcaaacaaggcaaggaccagcactttcctgtgttcatgaacgagaaggaggacatcctgtggtgtaccgagatggagagagtgttcgggttcccagtccactacacagatgtcagcaacatgtctagactggccagacagagactgctgggaagaagctggtccgtccctgtgatcagacacctgttcgcccctctgaaggagtacttcgcctgcgtgagcagcggcaacagcaacgccaacagccggggccccagcttctctagcggcctggtgccactgtccctgagagggagccacatgggccccatggagatctacaaaaccgtgagcgcctggaagcggcagcctgtgcgcgtgctgagcctgtttcggaatatcgataaagtcctgaaaagcctgggattcctggagagcggctctggctccggcggtggcaccctgaagtacgtggaggatgtgacaaacgtggtcagacgggatgtggagaagtggggccccttcgatctggtgtacggcagcacccaacccctgggcagctcttgtgaccggtgccctggctggtacatgtttcagttccaccggatcctgcagtacgccctgccgagacaggagtcccagcggccattcttttggattttcatggacaacttgctgctgaccgaggatgaccaggaaactaccactcggttcctgcagaccgaagccgtgaccctgcaggacgtgagaggccgggactaccagaacgccatgcgggtgtggtccaacatccctggactgaaaagcaagcacgcacctctgacccctaaagaagaggagtacctgcaggcccaggtgcggagcagaagcaagctggacgcccctaaggtggatctgctggtgaagaattgcctcctgcccctgagagagtacttcaagtatttcagccagaatagtctgcccctgggaggcagcggcggcggcatgagggtgctgaccttcagggacgtggccgtggagttcagccccgaggagtgggagtgcctggacagcgcccagcagcacctgtacagggacgtgatgctggagaactacggcaacctgttcagcctgggcctggccatcttcaagcccgacctgatcacctacctggagcagaggaaggagccctggaacgccaggaggcagaagaccgtggccaagcaccccgccggcagcctgcacttcggcggcccaagcagcggcgcccctcctcccagcggcggcaggcggcccaagcagcggcgcccctcctcccagcggcggcagcccagccggctccccaacctctaccgaggagggcacctctgagtccgccacccccgagagcggccctggcacctccaccgagcccagcgagggcagcgcacccggcagccctgccggcagccccacctccacagaggagggaaccagcaccgagcccagcgaaggcagcgccccaggcaccagcaccgagcctagtgagcaggagattaaacggatcaacaagatcagaagaagacttgtgaaagacagcaacaccaagaaggccggcaagacaggccccatgaaaaccctgctggttagagtgatgacacccgatctgagagagcggctggaaaacctgagaaagaagcctgaaaatatcccccagcccatcagcaatacatctagagccaacctgaataagctgctgaccgattacaccgaaatgaagaaggcgatcctgcatgtgtactgggaagagttccagaaggaccctgtgggcctgatgagccgggtggcccagcctgccagcaagaagatcgatcagaacaagctgaaacctgagatggacgagaagggcaacctgaccaccgccggctttgcctgctctcagtgtggccagcccctgttcgtgtacaagctggagcaggtgtctgagaagggcaaggcttacaccaactacttcggacggtgcaatgtggccgagcacgaaaagctgatcctgctggcccagctgaagcccgagaaggatagcgacgaagccgtgacatatagcctgggaaagtttgggcagagggccctggatttctacagcattcatgtgaccaaggagtccacccaccccgtgaagcccctggcccagatcgccggaaacagatacgcctccggacctgtgggaaaggccctgagcgacgcatgtatgggcacaatcgcctccttcctgtctaagtaccaggacatcatcatcgaacaccagaaggtggtgaagggcaaccagaagagactggagagcctgcgggagctggccggcaaggaaaacctggaataccctagcgtgaccctgccacctcagcctcacaccaaggagggcgttgatgcctacaacgaagtgatcgcccgggtgcgaatgtgggtgaacctgaacctgtggcagaagctgaagctaagcagagatgatgccaagcctctgctgagactgaagggattcccttcctttcctctggtcgagagacaggccaacgaagtggactggtgggacatggtgtgtaacgtgaagaagctgatcaacgagaaaaaggaggatggcaaggtgttttggcagaatctggctggctacaagagacaggaagccctgagaccatacctgagcagcgaggaagatcggaagaagggaaagaaattcgctcggtaccagctgggcgacctgctgctgcacctggaaaagaagcacggcgaggactggggaaaggtgtacgacgaggcctgggagcggattgacaagaaagtggaaggcctgagcaagcacatcaagctggaagaggaacggagaagcgaggacgcccagagcaaggccgccctgaccgactggctgcgggctaaggccagcttcgtgatcgagggcctgaaggaggccgacaaggacgagttctgcagatgcgagctgaagctgcagaagtggtacggggacctgcggggaaagcccttcgccatcgaagccgagaacagcatcctggacatcagcggcttcagcaagcagtacaactgtgccttcatctggcagaaggacggcgtgaagaagctgaacctgtacctgatcatcaactacttcaagggcggcaagctgcggttcaagaagatcaaacctgaagccttcgaagccaacagattctacaccgtgatcaacaaaaagagcggcgagatcgtgcccatggaggtgaacttcaacttcgacgaccccaacctgatcatcctgcctctggcctttggcaagagacagggcagagaattcatctggaacgacctgctgtccctggaaaccggcagcctgaagctggccaacggaagagtgatcgagaagacactgtacaacagaagaacccggcaggatgagcctgccctgttcgtggccctgaccttcgagcggcgggaggtcctggactcctccaatatcaaaccaatgaacctgatcggcgtggcaagaggcgaaaacatccccgccgtgatcgccctgaccgaccccgagggctgcccactgagccggtttaaggatagcctgggaaacccaacccacatcctgagaatcggcgagagctataaggagaagcagcggaccatccaggccaagaaggaggtggagcagcggagagccggcggctacagccggaagtacgccagcaaagccaagaatctggcagacgatatggtgagaaacaccgctagagatctgctgtactacgccgtgacccaggatgccatgctgatcttcgccaacctgagccggggcttcggccggcagggcaagcggaccttcatggccgagagacagtacacacggatggaggactggctgaccgccaagctggcctacgagggcctgagcaagacctacctgtccaagacactggcccagtacacctccaagacatgcagcaactgtgggtttaccatcaccagcgccgactacgacagggtgctggagaagctgaagaagacagcaacaggctggatgaccacaattaacggcaaggagctgaaggtggagggccagattacctactacaacagatacaagagacagaacgtagtcaaggacctgtccgtcgagctggatagactgagcgaagaatctgtgaacaacgacatctcctcctggacaaagggcagaagcggagaagctctgagcctcctgaagaaaagattctcccatagacccgtgcaggagaagttcgtgtgcctgaactgcggcttcgagacacacgcagccgagcaagccgccctgaacatcgccagatcctggctgttcctgcggagccaggagtacaagaaataccagacaaacaagacaaccggcaacaccgataagagagccttcgtcgagacctggcagtccttttaccggaagaagcttaaggaggtgtggaaacctgccgtgcggtctggcggatctggcggaggctccaccagccccaagaaaaagagaaaagtctaagctgccttctgcggggcttgccttctggccatgcccttcttctctcccttgcacctgtacctcttggtctttgaataaagcctgagtaggaaggctagcaaaaaaaaaaaaaaaaaaaaaaaaaaaaaaaaaaaaaaaaaaaaaaaaaaaaaaaaaaaaaaaaaaaaaaaaaaaaaaaagcccagccggctccccaacctctaccgaggagggcacctctgagtccgccacccccgagagcggccctggcacctccaccgagcccagcgagggcagcgcacccggcagccctgccggcagccccacctccacagaggagggaaccagcaccgagcccagcgaaggcagcgccccaggcaccagcaccgagcctagtgagcaggagattaaacggatcaacaagatcagaagaagacttgtgaaagacagcaacaccaagaaggccggcaagacaggccccatgaaaaccctgctggttagagtgatgacacccgatctgagagagcggctggaaaacctgagaaagaagcctgaaaatatcccccagcccatcagcaatacatctagagccaacctgaataagctgctgaccgattacaccgaaatgaagaaggcgatcctgcatgtgtactgggaagagttccagaaggaccctgtgggcctgatgagccgggtggcccagcctgccagcaagaagatcgatcagaacaagctgaaacctgagatggacgagaagggcaacctgaccaccgccggctttgcctgctctcagtgtggccagcccctgttcgtgtacaagctggagcaggtgtctgagaagggcaaggcttacaccaactacttcggacggtgcaatgtggccgagcacgaaaagctgatcctgctggcccagctgaagcccgagaaggatagcgacgaagccgtgacatatagcctgggaaagtttgggcagagggccctggatttctacagcattcatgtgaccaaggagtccacccaccccgtgaagcccctggcccagatcgccggaaacagatacgcctccggacctgtgggaaaggccctgagcgacgcatgtatgggcacaatcgcctccttcctgtctaagtaccaggacatcatcatcgaacaccagaaggtggtgaagggcaaccagaagagactggagagcctgcgggagctggccggcaaggaaaacctggaataccctagcgtgaccctgccacctcagcctcacaccaaggagggcgttgatgcctacaacgaagtgatcgcccgggtgcgaatgtgggtgaacctgaacctgtggcagaagctgaagctaagcagagatgatgccaagcctctgctgagactgaagggattcccttcctttcctctggtcgagagacaggccaacgaagtggactggtgggacatggtgtgtaacgtgaagaagctgatcaacgagaaaaaggaggatggcaaggtgttttggcagaatctggctggctacaagagacaggaagccctgagaccatacctgagcagcgaggaagatcggaagaagggaaagaaattcgctcggtaccagctgggcgacctgctgctgcacctggaaaagaagcacggcgaggactggggaaaggtgtacgacgaggcctgggagcggattgacaagaaagtggaaggcctgagcaagcacatcaagctggaagaggaacggagaagcgaggacgcccagagcaaggccgccctgaccgactggctgcgggctaaggccagcttcgtgatcgagggcctgaaggaggccgacaaggacgagttctgcagatgcgagctgaagctgcagaagtggtacggggacctgcggggaaagcccttcgccatcgaagccgagaacagcatcctggacatcagcggcttcagcaagcagtacaactgtgccttcatctggcagaaggacggcgtgaagaagctgaacctgtacctgatcatcaactacttcaagggcggcaagctgcggttcaagaagatcaaacctgaagccttcgaagccaacagattctacaccgtgatcaacaaaaagagcggcgagatcgtgcccatggaggtgaacttcaacttcgacgaccccaacctgatcatcctgcctctggcctttggcaagagacagggcagagaattcatctggaacgacctgctgtccctggaaaccggcagcctgaagctggccaacggaagagtgatcgagaagacactgtacaacagaagaacccggcaggatgagcctgccctgttcgtggccctgaccttcgagcggcgggaggtcctggactcctccaatatcaaaccaatgaacctgatcggcgtggcaagaggcgaaaacatccccgccgtgatcgccctgaccgaccccgagggctgcccactgagccggtttaaggatagcctgggaaacccaacccacatcctgagaatcggcgagagctataaggagaagcagcggaccatccaggccaagaaggaggtggagcagcggagagccggcggctacagccggaagtacgccagcaaagccaagaatctggcagacgatatggtgagaaacaccgctagagatctgctgtactacgccgtgacccaggatgccatgctgatcttcgccaacctgagccggggcttcggccggcagggcaagcggaccttcatggccgagagacagtacacacggatggaggactggctgaccgccaagctggcctacgagggcctgagcaagacctacctgtccaagacactggcccagtacacctccaagacatgcagcaactgtgggtttaccatcaccagcgccgactacgacagggtgctggagaagctgaagaagacagcaacaggctggatgaccacaattaacggcaaggagctgaaggtggagggccagattacctactacaacagatacaagagacagaacgtagtcaaggacctgtccgtcgagctggatagactgagcgaagaatctgtgaacaacgacatctcctcctggacaaagggcagaagcggagaagctctgagcctcctgaagaaaagattctcccatagacccgtgcaggagaagttcgtgtgcctgaactgcggcttcgagacacacgcagccgagcaagccgccctgaacatcgccagatcctggctgttcctgcggagccaggagtacaagaaataccagacaaacaagacaaccggcaacaccgataagagagccttcgtcgagacctggcagtccttttaccggaagaagcttaaggaggtgtggaaacctgccgtgcggtctggcggatctggcggaggctccaccagccccaagaaaaagagaaaagtctaagctgccttctgcggggcttgccttctggccatgcccttcttctctcccttgcacctgtacctcttggtctttgaataaagcctgagtaggaaggctagcaaaaaaaaaaaaaaaaaaaaaaaaaaaaaaaaaaaaaaaaaaaaaaaaaaaaaaaaaaaaaaaaaaaaaaaaaaaaaaaa

SEQ ID NO: 9448 - RNA, 8787 nt, synthetic construct
  source 1..8787: mol_type = other RNA
aggaaataagagagaaaagaagagtaagaagaaatataagagccaccatggcccctaagaagaagcgtaaagtgagccggatgaaccacgaccaggagttcgacccccctaaggtgtaccctcccgtccccgccgagaagagaaagcccatccgggtcctgagcctgttcgatggcatcgccaccggtctgctggtgctgaaggacctgggcatccaggtggataggtacattgcctccgaggtgtgcgaggactccatcaccgtgggaatggtgcgtcatcagggcaagatcatgtacgtgggcgacgtgcggagcgtgacacagaagcatatccaggagtggggccctttcgacctggtgatcggcggcagcccttgcaatgacctgagcatcgtgaacccagcccggaagggcctgtacgagggaaccggcagactgttcttcgagttttacagactgctgcacgacgcccggcctaaggaaggcgacgaccggcccttcttttggctgttcgagaatgtggtggccatgggagtcagcgacaagcgggatattagccggttcctggagagcaaccccgtgatgatcgatgccaaggaagtgagcgccgcccaccgggccagatacttctggggcaatctgcctggcatgaacagacccctggccagcaccgtgaacgacaagctggagctgcaggagtgcctggagcacggccggatcgccaagttcagcaaggtgagaaccatcaccacccgaagcaacagcatcaaacaaggcaaggaccagcactttcctgtgttcatgaacgagaaggaggacatcctgtggtgtaccgagatggagagagtgttcgggttcccagtccactacacagatgtcagcaacatgtctagactggccagacagagactgctgggaagaagctggtccgtccctgtgatcagacacctgttcgcccctctgaaggagtacttcgcctgcgtgagcagcggcaacagcaacgccaacagccggggccccagcttctctagcggcctggtgccactgtccctgagagggagccacatgggccccatggagatctacaaaaccgtgagcgcctggaagcggcagcctgtgcgcgtgctgagcctgtttcggaatatcgataaagtcctgaaaagcctgggattcctggagagcggctctggctccggcggtggcaccctgaagtacgtggaggatgtgacaaacgtggtcagacgggatgtggagaagtggggccccttcgatctggtgtacggcagcacccaacccctgggcagctcttgtgaccggtgccctggctggtacatgtttcagttccaccggatcctgcagtacgccctgccgagacaggagtcccagcggccattcttttggattttcatggacaacttgctgctgaccgaggatgaccaggaaactaccactcggttcctgcagaccgaagccgtgaccctgcaggacgtgagaggccgggactaccagaacgccatgcgggtgtggtccaacatccctggactgaaaagcaagcacgcacctctgacccctaaagaagaggagtacctgcaggcccaggtgcggagcagaagcaagctggacgcccctaaggtggatctgctggtgaagaattgcctcctgcccctgagagagtacttcaagtatttcagccagaatagtctgcccctgggaggcagcggcggcggcagccaggagagcctgaccttcaaggacgtggccgtggacttcacccccgaggagtggggccagctgtaccccgcccagagggacctgtacagggaggtgatgctggagaactacaggaacctggtgagcctgggccaccaggtgagcaagccccacctgatcagccagctggagcagaggaaggagccctggatgatggagaggaagatccccaggggcaacttccccgactgggagaccaggggcggcccaagcagcggcgcccctcctcccagcggcggcaggcggcccaagcagcggcgcccctcctcccagcggcggcagcccagccggctccccaacctctaccgaggagggcacctctgagtccgccacccccgagagcggccctggcacctccaccgagcccagcgagggcagcgcacccggcagccctgccggcagccccacctccacagaggagggaaccagcaccgagcccagcgaaggcagcgccccaggcaccagcaccgagcctagtgagcaggagattaaacggatcaacaagatcagaagaagacttgtgaaagacagcaacaccaagaaggccggcaagacaggccccatgaaaaccctgctggttagagtgatgacacccgatctgagagagcggctggaaaacctgagaaagaagcctgaaaatatcccccagcccatcagcaatacatctagagccaacctgaataagctgctgaccgattacaccgaaatgaagaaggcgatcctgcatgtgtactgggaagagttccagaaggaccctgtgggcctgatgagccgggtggcccagcctgccagcaagaagatcgatcagaacaagctgaaacctgagatggacgagaagggcaacctgaccaccgccggctttgcctgctctcagtgtggccagcccctgttcgtgtacaagctggagcaggtgtctgagaagggcaaggcttacaccaactacttcggacggtgcaatgtggccgagcacgaaaagctgatcctgctggcccagctgaagcccgagaaggatagcgacgaagccgtgacatatagcctgggaaagtttgggcagagggccctggatttctacagcattcatgtgaccaaggagtccacccaccccgtgaagcccctggcccagatcgccggaaacagatacgcctccggacctgtgggaaaggccctgagcgacgcatgtatgggcacaatcgcctccttcctgtctaagtaccaggacatcatcatcgaacaccagaaggtggtgaagggcaaccagaagagactggagagcctgcgggagctggccggcaaggaaaacctggaataccctagcgtgaccctgccacctcagcctcacaccaaggagggcgttgatgcctacaacgaagtgatcgcccgggtgcgaatgtgggtgaacctgaacctgtggcagaagctgaagctaagcagagatgatgccaagcctctgctgagactgaagggattcccttcctttcctctggtcgagagacaggccaacgaagtggactggtgggacatggtgtgtaacgtgaagaagctgatcaacgagaaaaaggaggatggcaaggtgttttggcagaatctggctggctacaagagacaggaagccctgagaccatacctgagcagcgaggaagatcggaagaagggaaagaaattcgctcggtaccagctgggcgacctgctgctgcacctggaaaagaagcacggcgaggactggggaaaggtgtacgacgaggcctgggagcggattgacaagaaagtggaaggcctgagcaagcacatcaagctggaagaggaacggagaagcgaggacgcccagagcaaggccgccctgaccgactggctgcgggctaaggccagcttcgtgatcgagggcctgaaggaggccgacaaggacgagttctgcagatgcgagctgaagctgcagaagtggtacggggacctgcggggaaagcccttcgccatcgaagccgagaacagcatcctggacatcagcggcttcagcaagcagtacaactgtgccttcatctggcagaaggacggcgtgaagaagctgaacctgtacctgatcatcaactacttcaagggcggcaagctgcggttcaagaagatcaaacctgaagccttcgaagccaacagattctacaccgtgatcaacaaaaagagcggcgagatcgtgcccatggaggtgaacttcaacttcgacgaccccaacctgatcatcctgcctctggcctttggcaagagacagggcagagaattcatctggaacgacctgctgtccctggaaaccggcagcctgaagctggccaacggaagagtgatcgagaagacactgtacaacagaagaacccggcaggatgagcctgccctgttcgtggccctgaccttcgagcggcgggaggtcctggactcctccaatatcaaaccaatgaacctgatcggcgtggcaagaggcgaaaacatccccgccgtgatcgccctgaccgaccccgagggctgcccactgagccggtttaaggatagcctgggaaacccaacccacatcctgagaatcggcgagagctataaggagaagcagcggaccatccaggccaagaaggaggtggagcagcggagagccggcggctacagccggaagtacgccagcaaagccaagaatctggcagacgatatggtgagaaacaccgctagagatctgctgtactacgccgtgacccaggatgccatgctgatcttcgccaacctgagccggggcttcggccggcagggcaagcggaccttcatggccgagagacagtacacacggatggaggactggctgaccgccaagctggcctacgagggcctgagcaagacctacctgtccaagacactggcccagtacacctccaagacatgcagcaactgtgggtttaccatcaccagcgccgactacgacagggtgctggagaagctgaagaagacagcaacaggctggatgaccacaattaacggcaaggagctgaaggtggagggccagattacctactacaacagatacaagagacagaacgtagtcaaggacctgtccgtcgagctggatagactgagcgaagaatctgtgaacaacgacatctcctcctggacaaagggcagaagcggagaagctctgagcctcctgaagaaaagattctcccatagacccgtgcaggagaagttcgtgtgcctgaactgcggcttcgagacacacgcagccgagcaagccgccctgaacatcgccagatcctggctgttcctgcggagccaggagtacaagaaataccagacaaacaagacaaccggcaacaccgataagagagccttcgtcgagacctggcagtccttttaccggaagaagcttaaggaggtgtggaaacctgccgtgcggtctggcggatctggcggaggctccaccagccccaagaaaaagagaaaagtctaagctgccttctgcggggcttgccttctggccatgcccttcttctctcccttgcacctgtacctcttggtctttgaataaagcctgagtaggaaggctagcaaaaaaaaaaaaaaaaaaaaaaaaaaaaaaaaaaaaaaaaaaaaaaaaaaaaaaaaaaaaaaaaaaaaaaaaaaaaaaaagcccagccggctccccaacctctaccgaggagggcacctctgagtccgccacccccgagagcggccctggcacctccaccgagcccagcgagggcagcgcacccggcagccctgccggcagccccacctccacagaggagggaaccagcaccgagcccagcgaaggcagcgccccaggcaccagcaccgagcctagtgagcaggagattaaacggatcaacaagatcagaagaagacttgtgaaagacagcaacaccaagaaggccggcaagacaggccccatgaaaaccctgctggttagagtgatgacacccgatctgagagagcggctggaaaacctgagaaagaagcctgaaaatatcccccagcccatcagcaatacatctagagccaacctgaataagctgctgaccgattacaccgaaatgaagaaggcgatcctgcatgtgtactgggaagagttccagaaggaccctgtgggcctgatgagccgggtggcccagcctgccagcaagaagatcgatcagaacaagctgaaacctgagatggacgagaagggcaacctgaccaccgccggctttgcctgctctcagtgtggccagcccctgttcgtgtacaagctggagcaggtgtctgagaagggcaaggcttacaccaactacttcggacggtgcaatgtggccgagcacgaaaagctgatcctgctggcccagctgaagcccgagaaggatagcgacgaagccgtgacatatagcctgggaaagtttgggcagagggccctggatttctacagcattcatgtgaccaaggagtccacccaccccgtgaagcccctggcccagatcgccggaaacagatacgcctccggacctgtgggaaaggccctgagcgacgcatgtatgggcacaatcgcctccttcctgtctaagtaccaggacatcatcatcgaacaccagaaggtggtgaagggcaaccagaagagactggagagcctgcgggagctggccggcaaggaaaacctggaataccctagcgtgaccctgccacctcagcctcacaccaaggagggcgttgatgcctacaacgaagtgatcgcccgggtgcgaatgtgggtgaacctgaacctgtggcagaagctgaagctaagcagagatgatgccaagcctctgctgagactgaagggattcccttcctttcctctggtcgagagacaggccaacgaagtggactggtgggacatggtgtgtaacgtgaagaagctgatcaacgagaaaaaggaggatggcaaggtgttttggcagaatctggctggctacaagagacaggaagccctgagaccatacctgagcagcgaggaagatcggaagaagggaaagaaattcgctcggtaccagctgggcgacctgctgctgcacctggaaaagaagcacggcgaggactggggaaaggtgtacgacgaggcctgggagcggattgacaagaaagtggaaggcctgagcaagcacatcaagctggaagaggaacggagaagcgaggacgcccagagcaaggccgccctgaccgactggctgcgggctaaggccagcttcgtgatcgagggcctgaaggaggccgacaaggacgagttctgcagatgcgagctgaagctgcagaagtggtacggggacctgcggggaaagcccttcgccatcgaagccgagaacagcatcctggacatcagcggcttcagcaagcagtacaactgtgccttcatctggcagaaggacggcgtgaagaagctgaacctgtacctgatcatcaactacttcaagggcggcaagctgcggttcaagaagatcaaacctgaagccttcgaagccaacagattctacaccgtgatcaacaaaaagagcggcgagatcgtgcccatggaggtgaacttcaacttcgacgaccccaacctgatcatcctgcctctggcctttggcaagagacagggcagagaattcatctggaacgacctgctgtccctggaaaccggcagcctgaagctggccaacggaagagtgatcgagaagacactgtacaacagaagaacccggcaggatgagcctgccctgttcgtggccctgaccttcgagcggcgggaggtcctggactcctccaatatcaaaccaatgaacctgatcggcgtggcaagaggcgaaaacatccccgccgtgatcgccctgaccgaccccgagggctgcccactgagccggtttaaggatagcctgggaaacccaacccacatcctgagaatcggcgagagctataaggagaagcagcggaccatccaggccaagaaggaggtggagcagcggagagccggcggctacagccggaagtacgccagcaaagccaagaatctggcagacgatatggtgagaaacaccgctagagatctgctgtactacgccgtgacccaggatgccatgctgatcttcgccaacctgagccggggcttcggccggcagggcaagcggaccttcatggccgagagacagtacacacggatggaggactggctgaccgccaagctggcctacgagggcctgagcaagacctacctgtccaagacactggcccagtacacctccaagacatgcagcaactgtgggtttaccatcaccagcgccgactacgacagggtgctggagaagctgaagaagacagcaacaggctggatgaccacaattaacggcaaggagctgaaggtggagggccagattacctactacaacagatacaagagacagaacgtagtcaaggacctgtccgtcgagctggatagactgagcgaagaatctgtgaacaacgacatctcctcctggacaaagggcagaagcggagaagctctgagcctcctgaagaaaagattctcccatagacccgtgcaggagaagttcgtgtgcctgaactgcggcttcgagacacacgcagccgagcaagccgccctgaacatcgccagatcctggctgttcctgcggagccaggagtacaagaaataccagacaaacaagacaaccggcaacaccgataagagagccttcgtcgagacctggcagtccttttaccggaagaagcttaaggaggtgtggaaacctgccgtgcggtctggcggatctggcggaggctccaccagccccaagaaaaagagaaaagtctaagctgccttctgcggggcttgccttctggccatgcccttcttctctcccttgcacctgtacctcttggtctttgaataaagcctgagtaggaaggctagcaaaaaaaaaaaaaaaaaaaaaaaaaaaaaaaaaaaaaaaaaaaaaaaaaaaaaaaaaaaaaaaaaaaaaaaaaaaaaaaa

SEQ ID NO: 9449 - RNA, 8787 nt, synthetic construct
  source 1..8787: mol_type = other RNA
aggaaataagagagaaaagaagagtaagaagaaatataagagccaccatggcccctaagaagaagcgtaaagtgagccggatgaaccacgaccaggagttcgacccccctaaggtgtaccctcccgtccccgccgagaagagaaagcccatccgggtcctgagcctgttcgatggcatcgccaccggtctgctggtgctgaaggacctgggcatccaggtggataggtacattgcctccgaggtgtgcgaggactccatcaccgtgggaatggtgcgtcatcagggcaagatcatgtacgtgggcgacgtgcggagcgtgacacagaagcatatccaggagtggggccctttcgacctggtgatcggcggcagcccttgcaatgacctgagcatcgtgaacccagcccggaagggcctgtacgagggaaccggcagactgttcttcgagttttacagactgctgcacgacgcccggcctaaggaaggcgacgaccggcccttcttttggctgttcgagaatgtggtggccatgggagtcagcgacaagcgggatattagccggttcctggagagcaaccccgtgatgatcgatgccaaggaagtgagcgccgcccaccgggccagatacttctggggcaatctgcctggcatgaacagacccctggccagcaccgtgaacgacaagctggagctgcaggagtgcctggagcacggccggatcgccaagttcagcaaggtgagaaccatcaccacccgaagcaacagcatcaaacaaggcaaggaccagcactttcctgtgttcatgaacgagaaggaggacatcctgtggtgtaccgagatggagagagtgttcgggttcccagtccactacacagatgtcagcaacatgtctagactggccagacagagactgctgggaagaagctggtccgtccctgtgatcagacacctgttcgcccctctgaaggagtacttcgcctgcgtgagcagcggcaacagcaacgccaacagccggggccccagcttctctagcggcctggtgccactgtccctgagagggagccacatgggccccatggagatctacaaaaccgtgagcgcctggaagcggcagcctgtgcgcgtgctgagcctgtttcggaatatcgataaagtcctgaaaagcctgggattcctggagagcggctctggctccggcggtggcaccctgaagtacgtggaggatgtgacaaacgtggtcagacgggatgtggagaagtggggccccttcgatctggtgtacggcagcacccaacccctgggcagctcttgtgaccggtgccctggctggtacatgtttcagttccaccggatcctgcagtacgccctgccgagacaggagtcccagcggccattcttttggattttcatggacaacttgctgctgaccgaggatgaccaggaaactaccactcggttcctgcagaccgaagccgtgaccctgcaggacgtgagaggccgggactaccagaacgccatgcgggtgtggtccaacatccctggactgaaaagcaagcacgcacctctgacccctaaagaagaggagtacctgcaggcccaggtgcggagcagaagcaagctggacgcccctaaggtggatctgctggtgaagaattgcctcctgcccctgagagagtacttcaagtatttcagccagaatagtctgcccctgggaggcagcggcggcggcccccagggcctggtgaccttcggcgacgtggccgtggacttcagccaggaggagtgggagtggctggactgcgcccagaggaccctgtacaggagcgtgatgctggagaactacaggagcctggtgagcctgggcctgtgcgtgagcaagcccgagatgatcagcagcctggagcagaggaaggagccctggaccgtgaagaggaagtgcaccaggggccagtgccccgacagcgaggccgtgggcggcccaagcagcggcgcccctcctcccagcggcggcaggcggcccaagcagcggcgcccctcctcccagcggcggcagcccagccggctccccaacctctaccgaggagggcacctctgagtccgccacccccgagagcggccctggcacctccaccgagcccagcgagggcagcgcacccggcagccctgccggcagccccacctccacagaggagggaaccagcaccgagcccagcgaaggcagcgccccaggcaccagcaccgagcctagtgagcaggagattaaacggatcaacaagatcagaagaagacttgtgaaagacagcaacaccaagaaggccggcaagacaggccccatgaaaaccctgctggttagagtgatgacacccgatctgagagagcggctggaaaacctgagaaagaagcctgaaaatatcccccagcccatcagcaatacatctagagccaacctgaataagctgctgaccgattacaccgaaatgaagaaggcgatcctgcatgtgtactgggaagagttccagaaggaccctgtgggcctgatgagccgggtggcccagcctgccagcaagaagatcgatcagaacaagctgaaacctgagatggacgagaagggcaacctgaccaccgccggctttgcctgctctcagtgtggccagcccctgttcgtgtacaagctggagcaggtgtctgagaagggcaaggcttacaccaactacttcggacggtgcaatgtggccgagcacgaaaagctgatcctgctggcccagctgaagcccgagaaggatagcgacgaagccgtgacatatagcctgggaaagtttgggcagagggccctggatttctacagcattcatgtgaccaaggagtccacccaccccgtgaagcccctggcccagatcgccggaaacagatacgcctccggacctgtgggaaaggccctgagcgacgcatgtatgggcacaatcgcctccttcctgtctaagtaccaggacatcatcatcgaacaccagaaggtggtgaagggcaaccagaagagactggagagcctgcgggagctggccggcaaggaaaacctggaataccctagcgtgaccctgccacctcagcctcacaccaaggagggcgttgatgcctacaacgaagtgatcgcccgggtgcgaatgtgggtgaacctgaacctgtggcagaagctgaagctaagcagagatgatgccaagcctctgctgagactgaagggattcccttcctttcctctggtcgagagacaggccaacgaagtggactggtgggacatggtgtgtaacgtgaagaagctgatcaacgagaaaaaggaggatggcaaggtgttttggcagaatctggctggctacaagagacaggaagccctgagaccatacctgagcagcgaggaagatcggaagaagggaaagaaattcgctcggtaccagctgggcgacctgctgctgcacctggaaaagaagcacggcgaggactggggaaaggtgtacgacgaggcctgggagcggattgacaagaaagtggaaggcctgagcaagcacatcaagctggaagaggaacggagaagcgaggacgcccagagcaaggccgccctgaccgactggctgcgggctaaggccagcttcgtgatcgagggcctgaaggaggccgacaaggacgagttctgcagatgcgagctgaagctgcagaagtggtacggggacctgcggggaaagcccttcgccatcgaagccgagaacagcatcctggacatcagcggcttcagcaagcagtacaactgtgccttcatctggcagaaggacggcgtgaagaagctgaacctgtacctgatcatcaactacttcaagggcggcaagctgcggttcaagaagatcaaacctgaagccttcgaagccaacagattctacaccgtgatcaacaaaaagagcggcgagatcgtgcccatggaggtgaacttcaacttcgacgaccccaacctgatcatcctgcctctggcctttggcaagagacagggcagagaattcatctggaacgacctgctgtccctggaaaccggcagcctgaagctggccaacggaagagtgatcgagaagacactgtacaacagaagaacccggcaggatgagcctgccctgttcgtggccctgaccttcgagcggcgggaggtcctggactcctccaatatcaaaccaatgaacctgatcggcgtggcaagaggcgaaaacatccccgccgtgatcgccctgaccgaccccgagggctgcccactgagccggtttaaggatagcctgggaaacccaacccacatcctgagaatcggcgagagctataaggagaagcagcggaccatccaggccaagaaggaggtggagcagcggagagccggcggctacagccggaagtacgccagcaaagccaagaatctggcagacgatatggtgagaaacaccgctagagatctgctgtactacgccgtgacccaggatgccatgctgatcttcgccaacctgagccggggcttcggccggcagggcaagcggaccttcatggccgagagacagtacacacggatggaggactggctgaccgccaagctggcctacgagggcctgagcaagacctacctgtccaagacactggcccagtacacctccaagacatgcagcaactgtgggtttaccatcaccagcgccgactacgacagggtgctggagaagctgaagaagacagcaacaggctggatgaccacaattaacggcaaggagctgaaggtggagggccagattacctactacaacagatacaagagacagaacgtagtcaaggacctgtccgtcgagctggatagactgagcgaagaatctgtgaacaacgacatctcctcctggacaaagggcagaagcggagaagctctgagcctcctgaagaaaagattctcccatagacccgtgcaggagaagttcgtgtgcctgaactgcggcttcgagacacacgcagccgagcaagccgccctgaacatcgccagatcctggctgttcctgcggagccaggagtacaagaaataccagacaaacaagacaaccggcaacaccgataagagagccttcgtcgagacctggcagtccttttaccggaagaagcttaaggaggtgtggaaacctgccgtgcggtctggcggatctggcggaggctccaccagccccaagaaaaagagaaaagtctaagctgccttctgcggggcttgccttctggccatgcccttcttctctcccttgcacctgtacctcttggtctttgaataaagcctgagtaggaaggctagcaaaaaaaaaaaaaaaaaaaaaaaaaaaaaaaaaaaaaaaaaaaaaaaaaaaaaaaaaaaaaaaaaaaaaaaaaaaaaaaagcccagccggctccccaacctctaccgaggagggcacctctgagtccgccacccccgagagcggccctggcacctccaccgagcccagcgagggcagcgcacccggcagccctgccggcagccccacctccacagaggagggaaccagcaccgagcccagcgaaggcagcgccccaggcaccagcaccgagcctagtgagcaggagattaaacggatcaacaagatcagaagaagacttgtgaaagacagcaacaccaagaaggccggcaagacaggccccatgaaaaccctgctggttagagtgatgacacccgatctgagagagcggctggaaaacctgagaaagaagcctgaaaatatcccccagcccatcagcaatacatctagagccaacctgaataagctgctgaccgattacaccgaaatgaagaaggcgatcctgcatgtgtactgggaagagttccagaaggaccctgtgggcctgatgagccgggtggcccagcctgccagcaagaagatcgatcagaacaagctgaaacctgagatggacgagaagggcaacctgaccaccgccggctttgcctgctctcagtgtggccagcccctgttcgtgtacaagctggagcaggtgtctgagaagggcaaggcttacaccaactacttcggacggtgcaatgtggccgagcacgaaaagctgatcctgctggcccagctgaagcccgagaaggatagcgacgaagccgtgacatatagcctgggaaagtttgggcagagggccctggatttctacagcattcatgtgaccaaggagtccacccaccccgtgaagcccctggcccagatcgccggaaacagatacgcctccggacctgtgggaaaggccctgagcgacgcatgtatgggcacaatcgcctccttcctgtctaagtaccaggacatcatcatcgaacaccagaaggtggtgaagggcaaccagaagagactggagagcctgcgggagctggccggcaaggaaaacctggaataccctagcgtgaccctgccacctcagcctcacaccaaggagggcgttgatgcctacaacgaagtgatcgcccgggtgcgaatgtgggtgaacctgaacctgtggcagaagctgaagctaagcagagatgatgccaagcctctgctgagactgaagggattcccttcctttcctctggtcgagagacaggccaacgaagtggactggtgggacatggtgtgtaacgtgaagaagctgatcaacgagaaaaaggaggatggcaaggtgttttggcagaatctggctggctacaagagacaggaagccctgagaccatacctgagcagcgaggaagatcggaagaagggaaagaaattcgctcggtaccagctgggcgacctgctgctgcacctggaaaagaagcacggcgaggactggggaaaggtgtacgacgaggcctgggagcggattgacaagaaagtggaaggcctgagcaagcacatcaagctggaagaggaacggagaagcgaggacgcccagagcaaggccgccctgaccgactggctgcgggctaaggccagcttcgtgatcgagggcctgaaggaggccgacaaggacgagttctgcagatgcgagctgaagctgcagaagtggtacggggacctgcggggaaagcccttcgccatcgaagccgagaacagcatcctggacatcagcggcttcagcaagcagtacaactgtgccttcatctggcagaaggacggcgtgaagaagctgaacctgtacctgatcatcaactacttcaagggcggcaagctgcggttcaagaagatcaaacctgaagccttcgaagccaacagattctacaccgtgatcaacaaaaagagcggcgagatcgtgcccatggaggtgaacttcaacttcgacgaccccaacctgatcatcctgcctctggcctttggcaagagacagggcagagaattcatctggaacgacctgctgtccctggaaaccggcagcctgaagctggccaacggaagagtgatcgagaagacactgtacaacagaagaacccggcaggatgagcctgccctgttcgtggccctgaccttcgagcggcgggaggtcctggactcctccaatatcaaaccaatgaacctgatcggcgtggcaagaggcgaaaacatccccgccgtgatcgccctgaccgaccccgagggctgcccactgagccggtttaaggatagcctgggaaacccaacccacatcctgagaatcggcgagagctataaggagaagcagcggaccatccaggccaagaaggaggtggagcagcggagagccggcggctacagccggaagtacgccagcaaagccaagaatctggcagacgatatggtgagaaacaccgctagagatctgctgtactacgccgtgacccaggatgccatgctgatcttcgccaacctgagccggggcttcggccggcagggcaagcggaccttcatggccgagagacagtacacacggatggaggactggctgaccgccaagctggcctacgagggcctgagcaagacctacctgtccaagacactggcccagtacacctccaagacatgcagcaactgtgggtttaccatcaccagcgccgactacgacagggtgctggagaagctgaagaagacagcaacaggctggatgaccacaattaacggcaaggagctgaaggtggagggccagattacctactacaacagatacaagagacagaacgtagtcaaggacctgtccgtcgagctggatagactgagcgaagaatctgtgaacaacgacatctcctcctggacaaagggcagaagcggagaagctctgagcctcctgaagaaaagattctcccatagacccgtgcaggagaagttcgtgtgcctgaactgcggcttcgagacacacgcagccgagcaagccgccctgaacatcgccagatcctggctgttcctgcggagccaggagtacaagaaataccagacaaacaagacaaccggcaacaccgataagagagccttcgtcgagacctggcagtccttttaccggaagaagcttaaggaggtgtggaaacctgccgtgcggtctggcggatctggcggaggctccaccagccccaagaaaaagagaaaagtctaagctgccttctgcggggcttgccttctggccatgcccttcttctctcccttgcacctgtacctcttggtctttgaataaagcctgagtaggaaggctagcaaaaaaaaaaaaaaaaaaaaaaaaaaaaaaaaaaaaaaaaaaaaaaaaaaaaaaaaaaaaaaaaaaaaaaaaaaaaaaaa

SEQ ID NO: 9450 - RNA, 8787 nt, synthetic construct
  source 1..8787: mol_type = other RNA
aggaaataagagagaaaagaagagtaagaagaaatataagagccaccatggcccctaagaagaagcgtaaagtgagccggatgaaccacgaccaggagttcgacccccctaaggtgtaccctcccgtccccgccgagaagagaaagcccatccgggtcctgagcctgttcgatggcatcgccaccggtctgctggtgctgaaggacctgggcatccaggtggataggtacattgcctccgaggtgtgcgaggactccatcaccgtgggaatggtgcgtcatcagggcaagatcatgtacgtgggcgacgtgcggagcgtgacacagaagcatatccaggagtggggccctttcgacctggtgatcggcggcagcccttgcaatgacctgagcatcgtgaacccagcccggaagggcctgtacgagggaaccggcagactgttcttcgagttttacagactgctgcacgacgcccggcctaaggaaggcgacgaccggcccttcttttggctgttcgagaatgtggtggccatgggagtcagcgacaagcgggatattagccggttcctggagagcaaccccgtgatgatcgatgccaaggaagtgagcgccgcccaccgggccagatacttctggggcaatctgcctggcatgaacagacccctggccagcaccgtgaacgacaagctggagctgcaggagtgcctggagcacggccggatcgccaagttcagcaaggtgagaaccatcaccacccgaagcaacagcatcaaacaaggcaaggaccagcactttcctgtgttcatgaacgagaaggaggacatcctgtggtgtaccgagatggagagagtgttcgggttcccagtccactacacagatgtcagcaacatgtctagactggccagacagagactgctgggaagaagctggtccgtccctgtgatcagacacctgttcgcccctctgaaggagtacttcgcctgcgtgagcagcggcaacagcaacgccaacagccggggccccagcttctctagcggcctggtgccactgtccctgagagggagccacatgggccccatggagatctacaaaaccgtgagcgcctggaagcggcagcctgtgcgcgtgctgagcctgtttcggaatatcgataaagtcctgaaaagcctgggattcctggagagcggctctggctccggcggtggcaccctgaagtacgtggaggatgtgacaaacgtggtcagacgggatgtggagaagtggggccccttcgatctggtgtacggcagcacccaacccctgggcagctcttgtgaccggtgccctggctggtacatgtttcagttccaccggatcctgcagtacgccctgccgagacaggagtcccagcggccattcttttggattttcatggacaacttgctgctgaccgaggatgaccaggaaactaccactcggttcctgcagaccgaagccgtgaccctgcaggacgtgagaggccgggactaccagaacgccatgcgggtgtggtccaacatccctggactgaaaagcaagcacgcacctctgacccctaaagaagaggagtacctgcaggcccaggtgcggagcagaagcaagctggacgcccctaaggtggatctgctggtgaagaattgcctcctgcccctgagagagtacttcaagtatttcagccagaatagtctgcccctgggaggcagcggcggcggctgcaacagctggatcagccccagcgacgtggccatcaacttcagcaaggaggagtgggagtgcctgcaccccagccagaaggacctgtacagggacgtgatgctggagaactacagcaacctggtgagcgtgggcctgagcgagagcaagcccgagctggtgacctgcctggaggagaacaaggagccctggatggtgaacatcgacgaggccgagggcctgggccagggcgtgttctgctacggcggcccaagcagcggcgcccctcctcccagcggcggcaggcggcccaagcagcggcgcccctcctcccagcggcggcagcccagccggctccccaacctctaccgaggagggcacctctgagtccgccacccccgagagcggccctggcacctccaccgagcccagcgagggcagcgcacccggcagccctgccggcagccccacctccacagaggagggaaccagcaccgagcccagcgaaggcagcgccccaggcaccagcaccgagcctagtgagcaggagattaaacggatcaacaagatcagaagaagacttgtgaaagacagcaacaccaagaaggccggcaagacaggccccatgaaaaccctgctggttagagtgatgacacccgatctgagagagcggctggaaaacctgagaaagaagcctgaaaatatcccccagcccatcagcaatacatctagagccaacctgaataagctgctgaccgattacaccgaaatgaagaaggcgatcctgcatgtgtactgggaagagttccagaaggaccctgtgggcctgatgagccgggtggcccagcctgccagcaagaagatcgatcagaacaagctgaaacctgagatggacgagaagggcaacctgaccaccgccggctttgcctgctctcagtgtggccagcccctgttcgtgtacaagctggagcaggtgtctgagaagggcaaggcttacaccaactacttcggacggtgcaatgtggccgagcacgaaaagctgatcctgctggcccagctgaagcccgagaaggatagcgacgaagccgtgacatatagcctgggaaagtttgggcagagggccctggatttctacagcattcatgtgaccaaggagtccacccaccccgtgaagcccctggcccagatcgccggaaacagatacgcctccggacctgtgggaaaggccctgagcgacgcatgtatgggcacaatcgcctccttcctgtctaagtaccaggacatcatcatcgaacaccagaaggtggtgaagggcaaccagaagagactggagagcctgcgggagctggccggcaaggaaaacctggaataccctagcgtgaccctgccacctcagcctcacaccaaggagggcgttgatgcctacaacgaagtgatcgcccgggtgcgaatgtgggtgaacctgaacctgtggcagaagctgaagctaagcagagatgatgccaagcctctgctgagactgaagggattcccttcctttcctctggtcgagagacaggccaacgaagtggactggtgggacatggtgtgtaacgtgaagaagctgatcaacgagaaaaaggaggatggcaaggtgttttggcagaatctggctggctacaagagacaggaagccctgagaccatacctgagcagcgaggaagatcggaagaagggaaagaaattcgctcggtaccagctgggcgacctgctgctgcacctggaaaagaagcacggcgaggactggggaaaggtgtacgacgaggcctgggagcggattgacaagaaagtggaaggcctgagcaagcacatcaagctggaagaggaacggagaagcgaggacgcccagagcaaggccgccctgaccgactggctgcgggctaaggccagcttcgtgatcgagggcctgaaggaggccgacaaggacgagttctgcagatgcgagctgaagctgcagaagtggtacggggacctgcggggaaagcccttcgccatcgaagccgagaacagcatcctggacatcagcggcttcagcaagcagtacaactgtgccttcatctggcagaaggacggcgtgaagaagctgaacctgtacctgatcatcaactacttcaagggcggcaagctgcggttcaagaagatcaaacctgaagccttcgaagccaacagattctacaccgtgatcaacaaaaagagcggcgagatcgtgcccatggaggtgaacttcaacttcgacgaccccaacctgatcatcctgcctctggcctttggcaagagacagggcagagaattcatctggaacgacctgctgtccctggaaaccggcagcctgaagctggccaacggaagagtgatcgagaagacactgtacaacagaagaacccggcaggatgagcctgccctgttcgtggccctgaccttcgagcggcgggaggtcctggactcctccaatatcaaaccaatgaacctgatcggcgtggcaagaggcgaaaacatccccgccgtgatcgccctgaccgaccccgagggctgcccactgagccggtttaaggatagcctgggaaacccaacccacatcctgagaatcggcgagagctataaggagaagcagcggaccatccaggccaagaaggaggtggagcagcggagagccggcggctacagccggaagtacgccagcaaagccaagaatctggcagacgatatggtgagaaacaccgctagagatctgctgtactacgccgtgacccaggatgccatgctgatcttcgccaacctgagccggggcttcggccggcagggcaagcggaccttcatggccgagagacagtacacacggatggaggactggctgaccgccaagctggcctacgagggcctgagcaagacctacctgtccaagacactggcccagtacacctccaagacatgcagcaactgtgggtttaccatcaccagcgccgactacgacagggtgctggagaagctgaagaagacagcaacaggctggatgaccacaattaacggcaaggagctgaaggtggagggccagattacctactacaacagatacaagagacagaacgtagtcaaggacctgtccgtcgagctggatagactgagcgaagaatctgtgaacaacgacatctcctcctggacaaagggcagaagcggagaagctctgagcctcctgaagaaaagattctcccatagacccgtgcaggagaagttcgtgtgcctgaactgcggcttcgagacacacgcagccgagcaagccgccctgaacatcgccagatcctggctgttcctgcggagccaggagtacaagaaataccagacaaacaagacaaccggcaacaccgataagagagccttcgtcgagacctggcagtccttttaccggaagaagcttaaggaggtgtggaaacctgccgtgcggtctggcggatctggcggaggctccaccagccccaagaaaaagagaaaagtctaagctgccttctgcggggcttgccttctggccatgcccttcttctctcccttgcacctgtacctcttggtctttgaataaagcctgagtaggaaggctagcaaaaaaaaaaaaaaaaaaaaaaaaaaaaaaaaaaaaaaaaaaaaaaaaaaaaaaaaaaaaaaaaaaaaaaaaaaaaaaaagcccagccggctccccaacctctaccgaggagggcacctctgagtccgccacccccgagagcggccctggcacctccaccgagcccagcgagggcagcgcacccggcagccctgccggcagccccacctccacagaggagggaaccagcaccgagcccagcgaaggcagcgccccaggcaccagcaccgagcctagtgagcaggagattaaacggatcaacaagatcagaagaagacttgtgaaagacagcaacaccaagaaggccggcaagacaggccccatgaaaaccctgctggttagagtgatgacacccgatctgagagagcggctggaaaacctgagaaagaagcctgaaaatatcccccagcccatcagcaatacatctagagccaacctgaataagctgctgaccgattacaccgaaatgaagaaggcgatcctgcatgtgtactgggaagagttccagaaggaccctgtgggcctgatgagccgggtggcccagcctgccagcaagaagatcgatcagaacaagctgaaacctgagatggacgagaagggcaacctgaccaccgccggctttgcctgctctcagtgtggccagcccctgttcgtgtacaagctggagcaggtgtctgagaagggcaaggcttacaccaactacttcggacggtgcaatgtggccgagcacgaaaagctgatcctgctggcccagctgaagcccgagaaggatagcgacgaagccgtgacatatagcctgggaaagtttgggcagagggccctggatttctacagcattcatgtgaccaaggagtccacccaccccgtgaagcccctggcccagatcgccggaaacagatacgcctccggacctgtgggaaaggccctgagcgacgcatgtatgggcacaatcgcctccttcctgtctaagtaccaggacatcatcatcgaacaccagaaggtggtgaagggcaaccagaagagactggagagcctgcgggagctggccggcaaggaaaacctggaataccctagcgtgaccctgccacctcagcctcacaccaaggagggcgttgatgcctacaacgaagtgatcgcccgggtgcgaatgtgggtgaacctgaacctgtggcagaagctgaagctaagcagagatgatgccaagcctctgctgagactgaagggattcccttcctttcctctggtcgagagacaggccaacgaagtggactggtgggacatggtgtgtaacgtgaagaagctgatcaacgagaaaaaggaggatggcaaggtgttttggcagaatctggctggctacaagagacaggaagccctgagaccatacctgagcagcgaggaagatcggaagaagggaaagaaattcgctcggtaccagctgggcgacctgctgctgcacctggaaaagaagcacggcgaggactggggaaaggtgtacgacgaggcctgggagcggattgacaagaaagtggaaggcctgagcaagcacatcaagctggaagaggaacggagaagcgaggacgcccagagcaaggccgccctgaccgactggctgcgggctaaggccagcttcgtgatcgagggcctgaaggaggccgacaaggacgagttctgcagatgcgagctgaagctgcagaagtggtacggggacctgcggggaaagcccttcgccatcgaagccgagaacagcatcctggacatcagcggcttcagcaagcagtacaactgtgccttcatctggcagaaggacggcgtgaagaagctgaacctgtacctgatcatcaactacttcaagggcggcaagctgcggttcaagaagatcaaacctgaagccttcgaagccaacagattctacaccgtgatcaacaaaaagagcggcgagatcgtgcccatggaggtgaacttcaacttcgacgaccccaacctgatcatcctgcctctggcctttggcaagagacagggcagagaattcatctggaacgacctgctgtccctggaaaccggcagcctgaagctggccaacggaagagtgatcgagaagacactgtacaacagaagaacccggcaggatgagcctgccctgttcgtggccctgaccttcgagcggcgggaggtcctggactcctccaatatcaaaccaatgaacctgatcggcgtggcaagaggcgaaaacatccccgccgtgatcgccctgaccgaccccgagggctgcccactgagccggtttaaggatagcctgggaaacccaacccacatcctgagaatcggcgagagctataaggagaagcagcggaccatccaggccaagaaggaggtggagcagcggagagccggcggctacagccggaagtacgccagcaaagccaagaatctggcagacgatatggtgagaaacaccgctagagatctgctgtactacgccgtgacccaggatgccatgctgatcttcgccaacctgagccggggcttcggccggcagggcaagcggaccttcatggccgagagacagtacacacggatggaggactggctgaccgccaagctggcctacgagggcctgagcaagacctacctgtccaagacactggcccagtacacctccaagacatgcagcaactgtgggtttaccatcaccagcgccgactacgacagggtgctggagaagctgaagaagacagcaacaggctggatgaccacaattaacggcaaggagctgaaggtggagggccagattacctactacaacagatacaagagacagaacgtagtcaaggacctgtccgtcgagctggatagactgagcgaagaatctgtgaacaacgacatctcctcctggacaaagggcagaagcggagaagctctgagcctcctgaagaaaagattctcccatagacccgtgcaggagaagttcgtgtgcctgaactgcggcttcgagacacacgcagccgagcaagccgccctgaacatcgccagatcctggctgttcctgcggagccaggagtacaagaaataccagacaaacaagacaaccggcaacaccgataagagagccttcgtcgagacctggcagtccttttaccggaagaagcttaaggaggtgtggaaacctgccgtgcggtctggcggatctggcggaggctccaccagccccaagaaaaagagaaaagtctaagctgccttctgcggggcttgccttctggccatgcccttcttctctcccttgcacctgtacctcttggtctttgaataaagcctgagtaggaaggctagcaaaaaaaaaaaaaaaaaaaaaaaaaaaaaaaaaaaaaaaaaaaaaaaaaaaaaaaaaaaaaaaaaaaaaaaaaaaaaaaa

SEQ ID NO: 9451 - RNA, 8787 nt, synthetic construct
  source 1..8787: mol_type = other RNA
aggaaataagagagaaaagaagagtaagaagaaatataagagccaccatggcccctaagaagaagcgtaaagtgagccggatgaaccacgaccaggagttcgacccccctaaggtgtaccctcccgtccccgccgagaagagaaagcccatccgggtcctgagcctgttcgatggcatcgccaccggtctgctggtgctgaaggacctgggcatccaggtggataggtacattgcctccgaggtgtgcgaggactccatcaccgtgggaatggtgcgtcatcagggcaagatcatgtacgtgggcgacgtgcggagcgtgacacagaagcatatccaggagtggggccctttcgacctggtgatcggcggcagcccttgcaatgacctgagcatcgtgaacccagcccggaagggcctgtacgagggaaccggcagactgttcttcgagttttacagactgctgcacgacgcccggcctaaggaaggcgacgaccggcccttcttttggctgttcgagaatgtggtggccatgggagtcagcgacaagcgggatattagccggttcctggagagcaaccccgtgatgatcgatgccaaggaagtgagcgccgcccaccgggccagatacttctggggcaatctgcctggcatgaacagacccctggccagcaccgtgaacgacaagctggagctgcaggagtgcctggagcacggccggatcgccaagttcagcaaggtgagaaccatcaccacccgaagcaacagcatcaaacaaggcaaggaccagcactttcctgtgttcatgaacgagaaggaggacatcctgtggtgtaccgagatggagagagtgttcgggttcccagtccactacacagatgtcagcaacatgtctagactggccagacagagactgctgggaagaagctggtccgtccctgtgatcagacacctgttcgcccctctgaaggagtacttcgcctgcgtgagcagcggcaacagcaacgccaacagccggggccccagcttctctagcggcctggtgccactgtccctgagagggagccacatgggccccatggagatctacaaaaccgtgagcgcctggaagcggcagcctgtgcgcgtgctgagcctgtttcggaatatcgataaagtcctgaaaagcctgggattcctggagagcggctctggctccggcggtggcaccctgaagtacgtggaggatgtgacaaacgtggtcagacgggatgtggagaagtggggccccttcgatctggtgtacggcagcacccaacccctgggcagctcttgtgaccggtgccctggctggtacatgtttcagttccaccggatcctgcagtacgccctgccgagacaggagtcccagcggccattcttttggattttcatggacaacttgctgctgaccgaggatgaccaggaaactaccactcggttcctgcagaccgaagccgtgaccctgcaggacgtgagaggccgggactaccagaacgccatgcgggtgtggtccaacatccctggactgaaaagcaagcacgcacctctgacccctaaagaagaggagtacctgcaggcccaggtgcggagcagaagcaagctggacgcccctaaggtggatctgctggtgaagaattgcctcctgcccctgagagagtacttcaagtatttcagccagaatagtctgcccctgggaggcagcggcggcggcgcccacgagagcctggccttcagggacgtggccatcgacctgagccaggaggagtgggagtgcctggacaccgcccagagggacctgtacagggaggtgatgctggagaactacagcaacctgatcagcctgggctgcatcatccccaagcccgacgtgatcgtgctgctggagcaggagaaggacccctggctggagaccagggaggagaccaggaggaggagcagcgacttcaccaagaagggcggcccaagcagcggcgcccctcctcccagcggcggcaggcggcccaagcagcggcgcccctcctcccagcggcggcagcccagccggctccccaacctctaccgaggagggcacctctgagtccgccacccccgagagcggccctggcacctccaccgagcccagcgagggcagcgcacccggcagccctgccggcagccccacctccacagaggagggaaccagcaccgagcccagcgaaggcagcgccccaggcaccagcaccgagcctagtgagcaggagattaaacggatcaacaagatcagaagaagacttgtgaaagacagcaacaccaagaaggccggcaagacaggccccatgaaaaccctgctggttagagtgatgacacccgatctgagagagcggctggaaaacctgagaaagaagcctgaaaatatcccccagcccatcagcaatacatctagagccaacctgaataagctgctgaccgattacaccgaaatgaagaaggcgatcctgcatgtgtactgggaagagttccagaaggaccctgtgggcctgatgagccgggtggcccagcctgccagcaagaagatcgatcagaacaagctgaaacctgagatggacgagaagggcaacctgaccaccgccggctttgcctgctctcagtgtggccagcccctgttcgtgtacaagctggagcaggtgtctgagaagggcaaggcttacaccaactacttcggacggtgcaatgtggccgagcacgaaaagctgatcctgctggcccagctgaagcccgagaaggatagcgacgaagccgtgacatatagcctgggaaagtttgggcagagggccctggatttctacagcattcatgtgaccaaggagtccacccaccccgtgaagcccctggcccagatcgccggaaacagatacgcctccggacctgtgggaaaggccctgagcgacgcatgtatgggcacaatcgcctccttcctgtctaagtaccaggacatcatcatcgaacaccagaaggtggtgaagggcaaccagaagagactggagagcctgcgggagctggccggcaaggaaaacctggaataccctagcgtgaccctgccacctcagcctcacaccaaggagggcgttgatgcctacaacgaagtgatcgcccgggtgcgaatgtgggtgaacctgaacctgtggcagaagctgaagctaagcagagatgatgccaagcctctgctgagactgaagggattcccttcctttcctctggtcgagagacaggccaacgaagtggactggtgggacatggtgtgtaacgtgaagaagctgatcaacgagaaaaaggaggatggcaaggtgttttggcagaatctggctggctacaagagacaggaagccctgagaccatacctgagcagcgaggaagatcggaagaagggaaagaaattcgctcggtaccagctgggcgacctgctgctgcacctggaaaagaagcacggcgaggactggggaaaggtgtacgacgaggcctgggagcggattgacaagaaagtggaaggcctgagcaagcacatcaagctggaagaggaacggagaagcgaggacgcccagagcaaggccgccctgaccgactggctgcgggctaaggccagcttcgtgatcgagggcctgaaggaggccgacaaggacgagttctgcagatgcgagctgaagctgcagaagtggtacggggacctgcggggaaagcccttcgccatcgaagccgagaacagcatcctggacatcagcggcttcagcaagcagtacaactgtgccttcatctggcagaaggacggcgtgaagaagctgaacctgtacctgatcatcaactacttcaagggcggcaagctgcggttcaagaagatcaaacctgaagccttcgaagccaacagattctacaccgtgatcaacaaaaagagcggcgagatcgtgcccatggaggtgaacttcaacttcgacgaccccaacctgatcatcctgcctctggcctttggcaagagacagggcagagaattcatctggaacgacctgctgtccctggaaaccggcagcctgaagctggccaacggaagagtgatcgagaagacactgtacaacagaagaacccggcaggatgagcctgccctgttcgtggccctgaccttcgagcggcgggaggtcctggactcctccaatatcaaaccaatgaacctgatcggcgtggcaagaggcgaaaacatccccgccgtgatcgccctgaccgaccccgagggctgcccactgagccggtttaaggatagcctgggaaacccaacccacatcctgagaatcggcgagagctataaggagaagcagcggaccatccaggccaagaaggaggtggagcagcggagagccggcggctacagccggaagtacgccagcaaagccaagaatctggcagacgatatggtgagaaacaccgctagagatctgctgtactacgccgtgacccaggatgccatgctgatcttcgccaacctgagccggggcttcggccggcagggcaagcggaccttcatggccgagagacagtacacacggatggaggactggctgaccgccaagctggcctacgagggcctgagcaagacctacctgtccaagacactggcccagtacacctccaagacatgcagcaactgtgggtttaccatcaccagcgccgactacgacagggtgctggagaagctgaagaagacagcaacaggctggatgaccacaattaacggcaaggagctgaaggtggagggccagattacctactacaacagatacaagagacagaacgtagtcaaggacctgtccgtcgagctggatagactgagcgaagaatctgtgaacaacgacatctcctcctggacaaagggcagaagcggagaagctctgagcctcctgaagaaaagattctcccatagacccgtgcaggagaagttcgtgtgcctgaactgcggcttcgagacacacgcagccgagcaagccgccctgaacatcgccagatcctggctgttcctgcggagccaggagtacaagaaataccagacaaacaagacaaccggcaacaccgataagagagccttcgtcgagacctggcagtccttttaccggaagaagcttaaggaggtgtggaaacctgccgtgcggtctggcggatctggcggaggctccaccagccccaagaaaaagagaaaagtctaagctgccttctgcggggcttgccttctggccatgcccttcttctctcccttgcacctgtacctcttggtctttgaataaagcctgagtaggaaggctagcaaaaaaaaaaaaaaaaaaaaaaaaaaaaaaaaaaaaaaaaaaaaaaaaaaaaaaaaaaaaaaaaaaaaaaaaaaaaaaaagcccagccggctccccaacctctaccgaggagggcacctctgagtccgccacccccgagagcggccctggcacctccaccgagcccagcgagggcagcgcacccggcagccctgccggcagccccacctccacagaggagggaaccagcaccgagcccagcgaaggcagcgccccaggcaccagcaccgagcctagtgagcaggagattaaacggatcaacaagatcagaagaagacttgtgaaagacagcaacaccaagaaggccggcaagacaggccccatgaaaaccctgctggttagagtgatgacacccgatctgagagagcggctggaaaacctgagaaagaagcctgaaaatatcccccagcccatcagcaatacatctagagccaacctgaataagctgctgaccgattacaccgaaatgaagaaggcgatcctgcatgtgtactgggaagagttccagaaggaccctgtgggcctgatgagccgggtggcccagcctgccagcaagaagatcgatcagaacaagctgaaacctgagatggacgagaagggcaacctgaccaccgccggctttgcctgctctcagtgtggccagcccctgttcgtgtacaagctggagcaggtgtctgagaagggcaaggcttacaccaactacttcggacggtgcaatgtggccgagcacgaaaagctgatcctgctggcccagctgaagcccgagaaggatagcgacgaagccgtgacatatagcctgggaaagtttgggcagagggccctggatttctacagcattcatgtgaccaaggagtccacccaccccgtgaagcccctggcccagatcgccggaaacagatacgcctccggacctgtgggaaaggccctgagcgacgcatgtatgggcacaatcgcctccttcctgtctaagtaccaggacatcatcatcgaacaccagaaggtggtgaagggcaaccagaagagactggagagcctgcgggagctggccggcaaggaaaacctggaataccctagcgtgaccctgccacctcagcctcacaccaaggagggcgttgatgcctacaacgaagtgatcgcccgggtgcgaatgtgggtgaacctgaacctgtggcagaagctgaagctaagcagagatgatgccaagcctctgctgagactgaagggattcccttcctttcctctggtcgagagacaggccaacgaagtggactggtgggacatggtgtgtaacgtgaagaagctgatcaacgagaaaaaggaggatggcaaggtgttttggcagaatctggctggctacaagagacaggaagccctgagaccatacctgagcagcgaggaagatcggaagaagggaaagaaattcgctcggtaccagctgggcgacctgctgctgcacctggaaaagaagcacggcgaggactggggaaaggtgtacgacgaggcctgggagcggattgacaagaaagtggaaggcctgagcaagcacatcaagctggaagaggaacggagaagcgaggacgcccagagcaaggccgccctgaccgactggctgcgggctaaggccagcttcgtgatcgagggcctgaaggaggccgacaaggacgagttctgcagatgcgagctgaagctgcagaagtggtacggggacctgcggggaaagcccttcgccatcgaagccgagaacagcatcctggacatcagcggcttcagcaagcagtacaactgtgccttcatctggcagaaggacggcgtgaagaagctgaacctgtacctgatcatcaactacttcaagggcggcaagctgcggttcaagaagatcaaacctgaagccttcgaagccaacagattctacaccgtgatcaacaaaaagagcggcgagatcgtgcccatggaggtgaacttcaacttcgacgaccccaacctgatcatcctgcctctggcctttggcaagagacagggcagagaattcatctggaacgacctgctgtccctggaaaccggcagcctgaagctggccaacggaagagtgatcgagaagacactgtacaacagaagaacccggcaggatgagcctgccctgttcgtggccctgaccttcgagcggcgggaggtcctggactcctccaatatcaaaccaatgaacctgatcggcgtggcaagaggcgaaaacatccccgccgtgatcgccctgaccgaccccgagggctgcccactgagccggtttaaggatagcctgggaaacccaacccacatcctgagaatcggcgagagctataaggagaagcagcggaccatccaggccaagaaggaggtggagcagcggagagccggcggctacagccggaagtacgccagcaaagccaagaatctggcagacgatatggtgagaaacaccgctagagatctgctgtactacgccgtgacccaggatgccatgctgatcttcgccaacctgagccggggcttcggccggcagggcaagcggaccttcatggccgagagacagtacacacggatggaggactggctgaccgccaagctggcctacgagggcctgagcaagacctacctgtccaagacactggcccagtacacctccaagacatgcagcaactgtgggtttaccatcaccagcgccgactacgacagggtgctggagaagctgaagaagacagcaacaggctggatgaccacaattaacggcaaggagctgaaggtggagggccagattacctactacaacagatacaagagacagaacgtagtcaaggacctgtccgtcgagctggatagactgagcgaagaatctgtgaacaacgacatctcctcctggacaaagggcagaagcggagaagctctgagcctcctgaagaaaagattctcccatagacccgtgcaggagaagttcgtgtgcctgaactgcggcttcgagacacacgcagccgagcaagccgccctgaacatcgccagatcctggctgttcctgcggagccaggagtacaagaaataccagacaaacaagacaaccggcaacaccgataagagagccttcgtcgagacctggcagtccttttaccggaagaagcttaaggaggtgtggaaacctgccgtgcggtctggcggatctggcggaggctccaccagccccaagaaaaagagaaaagtctaagctgccttctgcggggcttgccttctggccatgcccttcttctctcccttgcacctgtacctcttggtctttgaataaagcctgagtaggaaggctagcaaaaaaaaaaaaaaaaaaaaaaaaaaaaaaaaaaaaaaaaaaaaaaaaaaaaaaaaaaaaaaaaaaaaaaaaaaaaaaaa

SEQ ID NO: 9452 - RNA, 8787 nt, synthetic construct
  source 1..8787: mol_type = other RNA
aggaaataagagagaaaagaagagtaagaagaaatataagagccaccatggcccctaagaagaagcgtaaagtgagccggatgaaccacgaccaggagttcgacccccctaaggtgtaccctcccgtccccgccgagaagagaaagcccatccgggtcctgagcctgttcgatggcatcgccaccggtctgctggtgctgaaggacctgggcatccaggtggataggtacattgcctccgaggtgtgcgaggactccatcaccgtgggaatggtgcgtcatcagggcaagatcatgtacgtgggcgacgtgcggagcgtgacacagaagcatatccaggagtggggccctttcgacctggtgatcggcggcagcccttgcaatgacctgagcatcgtgaacccagcccggaagggcctgtacgagggaaccggcagactgttcttcgagttttacagactgctgcacgacgcccggcctaaggaaggcgacgaccggcccttcttttggctgttcgagaatgtggtggccatgggagtcagcgacaagcgggatattagccggttcctggagagcaaccccgtgatgatcgatgccaaggaagtgagcgccgcccaccgggccagatacttctggggcaatctgcctggcatgaacagacccctggccagcaccgtgaacgacaagctggagctgcaggagtgcctggagcacggccggatcgccaagttcagcaaggtgagaaccatcaccacccgaagcaacagcatcaaacaaggcaaggaccagcactttcctgtgttcatgaacgagaaggaggacatcctgtggtgtaccgagatggagagagtgttcgggttcccagtccactacacagatgtcagcaacatgtctagactggccagacagagactgctgggaagaagctggtccgtccctgtgatcagacacctgttcgcccctctgaaggagtacttcgcctgcgtgagcagcggcaacagcaacgccaacagccggggccccagcttctctagcggcctggtgccactgtccctgagagggagccacatgggccccatggagatctacaaaaccgtgagcgcctggaagcggcagcctgtgcgcgtgctgagcctgtttcggaatatcgataaagtcctgaaaagcctgggattcctggagagcggctctggctccggcggtggcaccctgaagtacgtggaggatgtgacaaacgtggtcagacgggatgtggagaagtggggccccttcgatctggtgtacggcagcacccaacccctgggcagctcttgtgaccggtgccctggctggtacatgtttcagttccaccggatcctgcagtacgccctgccgagacaggagtcccagcggccattcttttggattttcatggacaacttgctgctgaccgaggatgaccaggaaactaccactcggttcctgcagaccgaagccgtgaccctgcaggacgtgagaggccgggactaccagaacgccatgcgggtgtggtccaacatccctggactgaaaagcaagcacgcacctctgacccctaaagaagaggagtacctgcaggcccaggtgcggagcagaagcaagctggacgcccctaaggtggatctgctggtgaagaattgcctcctgcccctgagagagtacttcaagtatttcagccagaatagtctgcccctgggaggcagcggcggcggcaggcccggcgccgtgagcttcgccgacgtggccgtgtacttcagccccgaggagtggggctgcctgaggcccgcccagagggccctgtacagggaggtgatgagggagacctacggccacctgggcgccctgggcttccccggccccaagcccgccctgatcagctggatggagcaggagagcgaggcctggagccccgacgcccaggaccccgaggagggcgagagcctgggcggcgccctgggcggcccaagcagcggcgcccctcctcccagcggcggcaggcggcccaagcagcggcgcccctcctcccagcggcggcagcccagccggctccccaacctctaccgaggagggcacctctgagtccgccacccccgagagcggccctggcacctccaccgagcccagcgagggcagcgcacccggcagccctgccggcagccccacctccacagaggagggaaccagcaccgagcccagcgaaggcagcgccccaggcaccagcaccgagcctagtgagcaggagattaaacggatcaacaagatcagaagaagacttgtgaaagacagcaacaccaagaaggccggcaagacaggccccatgaaaaccctgctggttagagtgatgacacccgatctgagagagcggctggaaaacctgagaaagaagcctgaaaatatcccccagcccatcagcaatacatctagagccaacctgaataagctgctgaccgattacaccgaaatgaagaaggcgatcctgcatgtgtactgggaagagttccagaaggaccctgtgggcctgatgagccgggtggcccagcctgccagcaagaagatcgatcagaacaagctgaaacctgagatggacgagaagggcaacctgaccaccgccggctttgcctgctctcagtgtggccagcccctgttcgtgtacaagctggagcaggtgtctgagaagggcaaggcttacaccaactacttcggacggtgcaatgtggccgagcacgaaaagctgatcctgctggcccagctgaagcccgagaaggatagcgacgaagccgtgacatatagcctgggaaagtttgggcagagggccctggatttctacagcattcatgtgaccaaggagtccacccaccccgtgaagcccctggcccagatcgccggaaacagatacgcctccggacctgtgggaaaggccctgagcgacgcatgtatgggcacaatcgcctccttcctgtctaagtaccaggacatcatcatcgaacaccagaaggtggtgaagggcaaccagaagagactggagagcctgcgggagctggccggcaaggaaaacctggaataccctagcgtgaccctgccacctcagcctcacaccaaggagggcgttgatgcctacaacgaagtgatcgcccgggtgcgaatgtgggtgaacctgaacctgtggcagaagctgaagctaagcagagatgatgccaagcctctgctgagactgaagggattcccttcctttcctctggtcgagagacaggccaacgaagtggactggtgggacatggtgtgtaacgtgaagaagctgatcaacgagaaaaaggaggatggcaaggtgttttggcagaatctggctggctacaagagacaggaagccctgagaccatacctgagcagcgaggaagatcggaagaagggaaagaaattcgctcggtaccagctgggcgacctgctgctgcacctggaaaagaagcacggcgaggactggggaaaggtgtacgacgaggcctgggagcggattgacaagaaagtggaaggcctgagcaagcacatcaagctggaagaggaacggagaagcgaggacgcccagagcaaggccgccctgaccgactggctgcgggctaaggccagcttcgtgatcgagggcctgaaggaggccgacaaggacgagttctgcagatgcgagctgaagctgcagaagtggtacggggacctgcggggaaagcccttcgccatcgaagccgagaacagcatcctggacatcagcggcttcagcaagcagtacaactgtgccttcatctggcagaaggacggcgtgaagaagctgaacctgtacctgatcatcaactacttcaagggcggcaagctgcggttcaagaagatcaaacctgaagccttcgaagccaacagattctacaccgtgatcaacaaaaagagcggcgagatcgtgcccatggaggtgaacttcaacttcgacgaccccaacctgatcatcctgcctctggcctttggcaagagacagggcagagaattcatctggaacgacctgctgtccctggaaaccggcagcctgaagctggccaacggaagagtgatcgagaagacactgtacaacagaagaacccggcaggatgagcctgccctgttcgtggccctgaccttcgagcggcgggaggtcctggactcctccaatatcaaaccaatgaacctgatcggcgtggcaagaggcgaaaacatccccgccgtgatcgccctgaccgaccccgagggctgcccactgagccggtttaaggatagcctgggaaacccaacccacatcctgagaatcggcgagagctataaggagaagcagcggaccatccaggccaagaaggaggtggagcagcggagagccggcggctacagccggaagtacgccagcaaagccaagaatctggcagacgatatggtgagaaacaccgctagagatctgctgtactacgccgtgacccaggatgccatgctgatcttcgccaacctgagccggggcttcggccggcagggcaagcggaccttcatggccgagagacagtacacacggatggaggactggctgaccgccaagctggcctacgagggcctgagcaagacctacctgtccaagacactggcccagtacacctccaagacatgcagcaactgtgggtttaccatcaccagcgccgactacgacagggtgctggagaagctgaagaagacagcaacaggctggatgaccacaattaacggcaaggagctgaaggtggagggccagattacctactacaacagatacaagagacagaacgtagtcaaggacctgtccgtcgagctggatagactgagcgaagaatctgtgaacaacgacatctcctcctggacaaagggcagaagcggagaagctctgagcctcctgaagaaaagattctcccatagacccgtgcaggagaagttcgtgtgcctgaactgcggcttcgagacacacgcagccgagcaagccgccctgaacatcgccagatcctggctgttcctgcggagccaggagtacaagaaataccagacaaacaagacaaccggcaacaccgataagagagccttcgtcgagacctggcagtccttttaccggaagaagcttaaggaggtgtggaaacctgccgtgcggtctggcggatctggcggaggctccaccagccccaagaaaaagagaaaagtctaagctgccttctgcggggcttgccttctggccatgcccttcttctctcccttgcacctgtacctcttggtctttgaataaagcctgagtaggaaggctagcaaaaaaaaaaaaaaaaaaaaaaaaaaaaaaaaaaaaaaaaaaaaaaaaaaaaaaaaaaaaaaaaaaaaaaaaaaaaaaaagcccagccggctccccaacctctaccgaggagggcacctctgagtccgccacccccgagagcggccctggcacctccaccgagcccagcgagggcagcgcacccggcagccctgccggcagccccacctccacagaggagggaaccagcaccgagcccagcgaaggcagcgccccaggcaccagcaccgagcctagtgagcaggagattaaacggatcaacaagatcagaagaagacttgtgaaagacagcaacaccaagaaggccggcaagacaggccccatgaaaaccctgctggttagagtgatgacacccgatctgagagagcggctggaaaacctgagaaagaagcctgaaaatatcccccagcccatcagcaatacatctagagccaacctgaataagctgctgaccgattacaccgaaatgaagaaggcgatcctgcatgtgtactgggaagagttccagaaggaccctgtgggcctgatgagccgggtggcccagcctgccagcaagaagatcgatcagaacaagctgaaacctgagatggacgagaagggcaacctgaccaccgccggctttgcctgctctcagtgtggccagcccctgttcgtgtacaagctggagcaggtgtctgagaagggcaaggcttacaccaactacttcggacggtgcaatgtggccgagcacgaaaagctgatcctgctggcccagctgaagcccgagaaggatagcgacgaagccgtgacatatagcctgggaaagtttgggcagagggccctggatttctacagcattcatgtgaccaaggagtccacccaccccgtgaagcccctggcccagatcgccggaaacagatacgcctccggacctgtgggaaaggccctgagcgacgcatgtatgggcacaatcgcctccttcctgtctaagtaccaggacatcatcatcgaacaccagaaggtggtgaagggcaaccagaagagactggagagcctgcgggagctggccggcaaggaaaacctggaataccctagcgtgaccctgccacctcagcctcacaccaaggagggcgttgatgcctacaacgaagtgatcgcccgggtgcgaatgtgggtgaacctgaacctgtggcagaagctgaagctaagcagagatgatgccaagcctctgctgagactgaagggattcccttcctttcctctggtcgagagacaggccaacgaagtggactggtgggacatggtgtgtaacgtgaagaagctgatcaacgagaaaaaggaggatggcaaggtgttttggcagaatctggctggctacaagagacaggaagccctgagaccatacctgagcagcgaggaagatcggaagaagggaaagaaattcgctcggtaccagctgggcgacctgctgctgcacctggaaaagaagcacggcgaggactggggaaaggtgtacgacgaggcctgggagcggattgacaagaaagtggaaggcctgagcaagcacatcaagctggaagaggaacggagaagcgaggacgcccagagcaaggccgccctgaccgactggctgcgggctaaggccagcttcgtgatcgagggcctgaaggaggccgacaaggacgagttctgcagatgcgagctgaagctgcagaagtggtacggggacctgcggggaaagcccttcgccatcgaagccgagaacagcatcctggacatcagcggcttcagcaagcagtacaactgtgccttcatctggcagaaggacggcgtgaagaagctgaacctgtacctgatcatcaactacttcaagggcggcaagctgcggttcaagaagatcaaacctgaagccttcgaagccaacagattctacaccgtgatcaacaaaaagagcggcgagatcgtgcccatggaggtgaacttcaacttcgacgaccccaacctgatcatcctgcctctggcctttggcaagagacagggcagagaattcatctggaacgacctgctgtccctggaaaccggcagcctgaagctggccaacggaagagtgatcgagaagacactgtacaacagaagaacccggcaggatgagcctgccctgttcgtggccctgaccttcgagcggcgggaggtcctggactcctccaatatcaaaccaatgaacctgatcggcgtggcaagaggcgaaaacatccccgccgtgatcgccctgaccgaccccgagggctgcccactgagccggtttaaggatagcctgggaaacccaacccacatcctgagaatcggcgagagctataaggagaagcagcggaccatccaggccaagaaggaggtggagcagcggagagccggcggctacagccggaagtacgccagcaaagccaagaatctggcagacgatatggtgagaaacaccgctagagatctgctgtactacgccgtgacccaggatgccatgctgatcttcgccaacctgagccggggcttcggccggcagggcaagcggaccttcatggccgagagacagtacacacggatggaggactggctgaccgccaagctggcctacgagggcctgagcaagacctacctgtccaagacactggcccagtacacctccaagacatgcagcaactgtgggtttaccatcaccagcgccgactacgacagggtgctggagaagctgaagaagacagcaacaggctggatgaccacaattaacggcaaggagctgaaggtggagggccagattacctactacaacagatacaagagacagaacgtagtcaaggacctgtccgtcgagctggatagactgagcgaagaatctgtgaacaacgacatctcctcctggacaaagggcagaagcggagaagctctgagcctcctgaagaaaagattctcccatagacccgtgcaggagaagttcgtgtgcctgaactgcggcttcgagacacacgcagccgagcaagccgccctgaacatcgccagatcctggctgttcctgcggagccaggagtacaagaaataccagacaaacaagacaaccggcaacaccgataagagagccttcgtcgagacctggcagtccttttaccggaagaagcttaaggaggtgtggaaacctgccgtgcggtctggcggatctggcggaggctccaccagccccaagaaaaagagaaaagtctaagctgccttctgcggggcttgccttctggccatgcccttcttctctcccttgcacctgtacctcttggtctttgaataaagcctgagtaggaaggctagcaaaaaaaaaaaaaaaaaaaaaaaaaaaaaaaaaaaaaaaaaaaaaaaaaaaaaaaaaaaaaaaaaaaaaaaaaaaaaaaa

SEQ ID NO: 9453 - RNA, 8787 nt, synthetic construct
  source 1..8787: mol_type = other RNA
aggaaataagagagaaaagaagagtaagaagaaatataagagccaccatggcccctaagaagaagcgtaaagtgagccggatgaaccacgaccaggagttcgacccccctaaggtgtaccctcccgtccccgccgagaagagaaagcccatccgggtcctgagcctgttcgatggcatcgccaccggtctgctggtgctgaaggacctgggcatccaggtggataggtacattgcctccgaggtgtgcgaggactccatcaccgtgggaatggtgcgtcatcagggcaagatcatgtacgtgggcgacgtgcggagcgtgacacagaagcatatccaggagtggggccctttcgacctggtgatcggcggcagcccttgcaatgacctgagcatcgtgaacccagcccggaagggcctgtacgagggaaccggcagactgttcttcgagttttacagactgctgcacgacgcccggcctaaggaaggcgacgaccggcccttcttttggctgttcgagaatgtggtggccatgggagtcagcgacaagcgggatattagccggttcctggagagcaaccccgtgatgatcgatgccaaggaagtgagcgccgcccaccgggccagatacttctggggcaatctgcctggcatgaacagacccctggccagcaccgtgaacgacaagctggagctgcaggagtgcctggagcacggccggatcgccaagttcagcaaggtgagaaccatcaccacccgaagcaacagcatcaaacaaggcaaggaccagcactttcctgtgttcatgaacgagaaggaggacatcctgtggtgtaccgagatggagagagtgttcgggttcccagtccactacacagatgtcagcaacatgtctagactggccagacagagactgctgggaagaagctggtccgtccctgtgatcagacacctgttcgcccctctgaaggagtacttcgcctgcgtgagcagcggcaacagcaacgccaacagccggggccccagcttctctagcggcctggtgccactgtccctgagagggagccacatgggccccatggagatctacaaaaccgtgagcgcctggaagcggcagcctgtgcgcgtgctgagcctgtttcggaatatcgataaagtcctgaaaagcctgggattcctggagagcggctctggctccggcggtggcaccctgaagtacgtggaggatgtgacaaacgtggtcagacgggatgtggagaagtggggccccttcgatctggtgtacggcagcacccaacccctgggcagctcttgtgaccggtgccctggctggtacatgtttcagttccaccggatcctgcagtacgccctgccgagacaggagtcccagcggccattcttttggattttcatggacaacttgctgctgaccgaggatgaccaggaaactaccactcggttcctgcagaccgaagccgtgaccctgcaggacgtgagaggccgggactaccagaacgccatgcgggtgtggtccaacatccctggactgaaaagcaagcacgcacctctgacccctaaagaagaggagtacctgcaggcccaggtgcggagcagaagcaagctggacgcccctaaggtggatctgctggtgaagaattgcctcctgcccctgagagagtacttcaagtatttcagccagaatagtctgcccctgggaggcagcggcggcggcttccagggcagcgtgaccttccaggacgtggccgtggtgttcacccccgaggagtggggccacctggagcccagccagaaggagctgtacagggaggtgatgctggagaacttcaggaacctggtgtgcctgggcctggtggtgtacaagcccagcgtgatctaccagctggagaggggcggcgccccctggaagcccggcggcggcggcaggaggagcggcagcagcgactgggagaccctgggcggcccaagcagcggcgcccctcctcccagcggcggcaggcggcccaagcagcggcgcccctcctcccagcggcggcagcccagccggctccccaacctctaccgaggagggcacctctgagtccgccacccccgagagcggccctggcacctccaccgagcccagcgagggcagcgcacccggcagccctgccggcagccccacctccacagaggagggaaccagcaccgagcccagcgaaggcagcgccccaggcaccagcaccgagcctagtgagcaggagattaaacggatcaacaagatcagaagaagacttgtgaaagacagcaacaccaagaaggccggcaagacaggccccatgaaaaccctgctggttagagtgatgacacccgatctgagagagcggctggaaaacctgagaaagaagcctgaaaatatcccccagcccatcagcaatacatctagagccaacctgaataagctgctgaccgattacaccgaaatgaagaaggcgatcctgcatgtgtactgggaagagttccagaaggaccctgtgggcctgatgagccgggtggcccagcctgccagcaagaagatcgatcagaacaagctgaaacctgagatggacgagaagggcaacctgaccaccgccggctttgcctgctctcagtgtggccagcccctgttcgtgtacaagctggagcaggtgtctgagaagggcaaggcttacaccaactacttcggacggtgcaatgtggccgagcacgaaaagctgatcctgctggcccagctgaagcccgagaaggatagcgacgaagccgtgacatatagcctgggaaagtttgggcagagggccctggatttctacagcattcatgtgaccaaggagtccacccaccccgtgaagcccctggcccagatcgccggaaacagatacgcctccggacctgtgggaaaggccctgagcgacgcatgtatgggcacaatcgcctccttcctgtctaagtaccaggacatcatcatcgaacaccagaaggtggtgaagggcaaccagaagagactggagagcctgcgggagctggccggcaaggaaaacctggaataccctagcgtgaccctgccacctcagcctcacaccaaggagggcgttgatgcctacaacgaagtgatcgcccgggtgcgaatgtgggtgaacctgaacctgtggcagaagctgaagctaagcagagatgatgccaagcctctgctgagactgaagggattcccttcctttcctctggtcgagagacaggccaacgaagtggactggtgggacatggtgtgtaacgtgaagaagctgatcaacgagaaaaaggaggatggcaaggtgttttggcagaatctggctggctacaagagacaggaagccctgagaccatacctgagcagcgaggaagatcggaagaagggaaagaaattcgctcggtaccagctgggcgacctgctgctgcacctggaaaagaagcacggcgaggactggggaaaggtgtacgacgaggcctgggagcggattgacaagaaagtggaaggcctgagcaagcacatcaagctggaagaggaacggagaagcgaggacgcccagagcaaggccgccctgaccgactggctgcgggctaaggccagcttcgtgatcgagggcctgaaggaggccgacaaggacgagttctgcagatgcgagctgaagctgcagaagtggtacggggacctgcggggaaagcccttcgccatcgaagccgagaacagcatcctggacatcagcggcttcagcaagcagtacaactgtgccttcatctggcagaaggacggcgtgaagaagctgaacctgtacctgatcatcaactacttcaagggcggcaagctgcggttcaagaagatcaaacctgaagccttcgaagccaacagattctacaccgtgatcaacaaaaagagcggcgagatcgtgcccatggaggtgaacttcaacttcgacgaccccaacctgatcatcctgcctctggcctttggcaagagacagggcagagaattcatctggaacgacctgctgtccctggaaaccggcagcctgaagctggccaacggaagagtgatcgagaagacactgtacaacagaagaacccggcaggatgagcctgccctgttcgtggccctgaccttcgagcggcgggaggtcctggactcctccaatatcaaaccaatgaacctgatcggcgtggcaagaggcgaaaacatccccgccgtgatcgccctgaccgaccccgagggctgcccactgagccggtttaaggatagcctgggaaacccaacccacatcctgagaatcggcgagagctataaggagaagcagcggaccatccaggccaagaaggaggtggagcagcggagagccggcggctacagccggaagtacgccagcaaagccaagaatctggcagacgatatggtgagaaacaccgctagagatctgctgtactacgccgtgacccaggatgccatgctgatcttcgccaacctgagccggggcttcggccggcagggcaagcggaccttcatggccgagagacagtacacacggatggaggactggctgaccgccaagctggcctacgagggcctgagcaagacctacctgtccaagacactggcccagtacacctccaagacatgcagcaactgtgggtttaccatcaccagcgccgactacgacagggtgctggagaagctgaagaagacagcaacaggctggatgaccacaattaacggcaaggagctgaaggtggagggccagattacctactacaacagatacaagagacagaacgtagtcaaggacctgtccgtcgagctggatagactgagcgaagaatctgtgaacaacgacatctcctcctggacaaagggcagaagcggagaagctctgagcctcctgaagaaaagattctcccatagacccgtgcaggagaagttcgtgtgcctgaactgcggcttcgagacacacgcagccgagcaagccgccctgaacatcgccagatcctggctgttcctgcggagccaggagtacaagaaataccagacaaacaagacaaccggcaacaccgataagagagccttcgtcgagacctggcagtccttttaccggaagaagcttaaggaggtgtggaaacctgccgtgcggtctggcggatctggcggaggctccaccagccccaagaaaaagagaaaagtctaagctgccttctgcggggcttgccttctggccatgcccttcttctctcccttgcacctgtacctcttggtctttgaataaagcctgagtaggaaggctagcaaaaaaaaaaaaaaaaaaaaaaaaaaaaaaaaaaaaaaaaaaaaaaaaaaaaaaaaaaaaaaaaaaaaaaaaaaaaaaaagcccagccggctccccaacctctaccgaggagggcacctctgagtccgccacccccgagagcggccctggcacctccaccgagcccagcgagggcagcgcacccggcagccctgccggcagccccacctccacagaggagggaaccagcaccgagcccagcgaaggcagcgccccaggcaccagcaccgagcctagtgagcaggagattaaacggatcaacaagatcagaagaagacttgtgaaagacagcaacaccaagaaggccggcaagacaggccccatgaaaaccctgctggttagagtgatgacacccgatctgagagagcggctggaaaacctgagaaagaagcctgaaaatatcccccagcccatcagcaatacatctagagccaacctgaataagctgctgaccgattacaccgaaatgaagaaggcgatcctgcatgtgtactgggaagagttccagaaggaccctgtgggcctgatgagccgggtggcccagcctgccagcaagaagatcgatcagaacaagctgaaacctgagatggacgagaagggcaacctgaccaccgccggctttgcctgctctcagtgtggccagcccctgttcgtgtacaagctggagcaggtgtctgagaagggcaaggcttacaccaactacttcggacggtgcaatgtggccgagcacgaaaagctgatcctgctggcccagctgaagcccgagaaggatagcgacgaagccgtgacatatagcctgggaaagtttgggcagagggccctggatttctacagcattcatgtgaccaaggagtccacccaccccgtgaagcccctggcccagatcgccggaaacagatacgcctccggacctgtgggaaaggccctgagcgacgcatgtatgggcacaatcgcctccttcctgtctaagtaccaggacatcatcatcgaacaccagaaggtggtgaagggcaaccagaagagactggagagcctgcgggagctggccggcaaggaaaacctggaataccctagcgtgaccctgccacctcagcctcacaccaaggagggcgttgatgcctacaacgaagtgatcgcccgggtgcgaatgtgggtgaacctgaacctgtggcagaagctgaagctaagcagagatgatgccaagcctctgctgagactgaagggattcccttcctttcctctggtcgagagacaggccaacgaagtggactggtgggacatggtgtgtaacgtgaagaagctgatcaacgagaaaaaggaggatggcaaggtgttttggcagaatctggctggctacaagagacaggaagccctgagaccatacctgagcagcgaggaagatcggaagaagggaaagaaattcgctcggtaccagctgggcgacctgctgctgcacctggaaaagaagcacggcgaggactggggaaaggtgtacgacgaggcctgggagcggattgacaagaaagtggaaggcctgagcaagcacatcaagctggaagaggaacggagaagcgaggacgcccagagcaaggccgccctgaccgactggctgcgggctaaggccagcttcgtgatcgagggcctgaaggaggccgacaaggacgagttctgcagatgcgagctgaagctgcagaagtggtacggggacctgcggggaaagcccttcgccatcgaagccgagaacagcatcctggacatcagcggcttcagcaagcagtacaactgtgccttcatctggcagaaggacggcgtgaagaagctgaacctgtacctgatcatcaactacttcaagggcggcaagctgcggttcaagaagatcaaacctgaagccttcgaagccaacagattctacaccgtgatcaacaaaaagagcggcgagatcgtgcccatggaggtgaacttcaacttcgacgaccccaacctgatcatcctgcctctggcctttggcaagagacagggcagagaattcatctggaacgacctgctgtccctggaaaccggcagcctgaagctggccaacggaagagtgatcgagaagacactgtacaacagaagaacccggcaggatgagcctgccctgttcgtggccctgaccttcgagcggcgggaggtcctggactcctccaatatcaaaccaatgaacctgatcggcgtggcaagaggcgaaaacatccccgccgtgatcgccctgaccgaccccgagggctgcccactgagccggtttaaggatagcctgggaaacccaacccacatcctgagaatcggcgagagctataaggagaagcagcggaccatccaggccaagaaggaggtggagcagcggagagccggcggctacagccggaagtacgccagcaaagccaagaatctggcagacgatatggtgagaaacaccgctagagatctgctgtactacgccgtgacccaggatgccatgctgatcttcgccaacctgagccggggcttcggccggcagggcaagcggaccttcatggccgagagacagtacacacggatggaggactggctgaccgccaagctggcctacgagggcctgagcaagacctacctgtccaagacactggcccagtacacctccaagacatgcagcaactgtgggtttaccatcaccagcgccgactacgacagggtgctggagaagctgaagaagacagcaacaggctggatgaccacaattaacggcaaggagctgaaggtggagggccagattacctactacaacagatacaagagacagaacgtagtcaaggacctgtccgtcgagctggatagactgagcgaagaatctgtgaacaacgacatctcctcctggacaaagggcagaagcggagaagctctgagcctcctgaagaaaagattctcccatagacccgtgcaggagaagttcgtgtgcctgaactgcggcttcgagacacacgcagccgagcaagccgccctgaacatcgccagatcctggctgttcctgcggagccaggagtacaagaaataccagacaaacaagacaaccggcaacaccgataagagagccttcgtcgagacctggcagtccttttaccggaagaagcttaaggaggtgtggaaacctgccgtgcggtctggcggatctggcggaggctccaccagccccaagaaaaagagaaaagtctaagctgccttctgcggggcttgccttctggccatgcccttcttctctcccttgcacctgtacctcttggtctttgaataaagcctgagtaggaaggctagcaaaaaaaaaaaaaaaaaaaaaaaaaaaaaaaaaaaaaaaaaaaaaaaaaaaaaaaaaaaaaaaaaaaaaaaaaaaaaaaa

SEQ ID NO: 9454 - RNA, 8787 nt, synthetic construct
  source 1..8787: mol_type = other RNA
aggaaataagagagaaaagaagagtaagaagaaatataagagccaccatggcccctaagaagaagcgtaaagtgagccggatgaaccacgaccaggagttcgacccccctaaggtgtaccctcccgtccccgccgagaagagaaagcccatccgggtcctgagcctgttcgatggcatcgccaccggtctgctggtgctgaaggacctgggcatccaggtggataggtacattgcctccgaggtgtgcgaggactccatcaccgtgggaatggtgcgtcatcagggcaagatcatgtacgtgggcgacgtgcggagcgtgacacagaagcatatccaggagtggggccctttcgacctggtgatcggcggcagcccttgcaatgacctgagcatcgtgaacccagcccggaagggcctgtacgagggaaccggcagactgttcttcgagttttacagactgctgcacgacgcccggcctaaggaaggcgacgaccggcccttcttttggctgttcgagaatgtggtggccatgggagtcagcgacaagcgggatattagccggttcctggagagcaaccccgtgatgatcgatgccaaggaagtgagcgccgcccaccgggccagatacttctggggcaatctgcctggcatgaacagacccctggccagcaccgtgaacgacaagctggagctgcaggagtgcctggagcacggccggatcgccaagttcagcaaggtgagaaccatcaccacccgaagcaacagcatcaaacaaggcaaggaccagcactttcctgtgttcatgaacgagaaggaggacatcctgtggtgtaccgagatggagagagtgttcgggttcccagtccactacacagatgtcagcaacatgtctagactggccagacagagactgctgggaagaagctggtccgtccctgtgatcagacacctgttcgcccctctgaaggagtacttcgcctgcgtgagcagcggcaacagcaacgccaacagccggggccccagcttctctagcggcctggtgccactgtccctgagagggagccacatgggccccatggagatctacaaaaccgtgagcgcctggaagcggcagcctgtgcgcgtgctgagcctgtttcggaatatcgataaagtcctgaaaagcctgggattcctggagagcggctctggctccggcggtggcaccctgaagtacgtggaggatgtgacaaacgtggtcagacgggatgtggagaagtggggccccttcgatctggtgtacggcagcacccaacccctgggcagctcttgtgaccggtgccctggctggtacatgtttcagttccaccggatcctgcagtacgccctgccgagacaggagtcccagcggccattcttttggattttcatggacaacttgctgctgaccgaggatgaccaggaaactaccactcggttcctgcagaccgaagccgtgaccctgcaggacgtgagaggccgggactaccagaacgccatgcgggtgtggtccaacatccctggactgaaaagcaagcacgcacctctgacccctaaagaagaggagtacctgcaggcccaggtgcggagcagaagcaagctggacgcccctaaggtggatctgctggtgaagaattgcctcctgcccctgagagagtacttcaagtatttcagccagaatagtctgcccctgggaggcagcggcggcggcagcctgggcagcgacctgttcagggacgtggccgtggtgttcagccaggaggagtgggagcagctggcccccgcccagagggacctgtacagggacgtgatgctggagatctacagcaacctggtgagcctgggcttcgccatcagcaagcccgacgtgatcagcttcctggagcagggcagggagccctggatggtggagaaggtggtgaccggcggccagtgccccgtgctggagagcaggggcggcccaagcagcggcgcccctcctcccagcggcggcaggcggcccaagcagcggcgcccctcctcccagcggcggcagcccagccggctccccaacctctaccgaggagggcacctctgagtccgccacccccgagagcggccctggcacctccaccgagcccagcgagggcagcgcacccggcagccctgccggcagccccacctccacagaggagggaaccagcaccgagcccagcgaaggcagcgccccaggcaccagcaccgagcctagtgagcaggagattaaacggatcaacaagatcagaagaagacttgtgaaagacagcaacaccaagaaggccggcaagacaggccccatgaaaaccctgctggttagagtgatgacacccgatctgagagagcggctggaaaacctgagaaagaagcctgaaaatatcccccagcccatcagcaatacatctagagccaacctgaataagctgctgaccgattacaccgaaatgaagaaggcgatcctgcatgtgtactgggaagagttccagaaggaccctgtgggcctgatgagccgggtggcccagcctgccagcaagaagatcgatcagaacaagctgaaacctgagatggacgagaagggcaacctgaccaccgccggctttgcctgctctcagtgtggccagcccctgttcgtgtacaagctggagcaggtgtctgagaagggcaaggcttacaccaactacttcggacggtgcaatgtggccgagcacgaaaagctgatcctgctggcccagctgaagcccgagaaggatagcgacgaagccgtgacatatagcctgggaaagtttgggcagagggccctggatttctacagcattcatgtgaccaaggagtccacccaccccgtgaagcccctggcccagatcgccggaaacagatacgcctccggacctgtgggaaaggccctgagcgacgcatgtatgggcacaatcgcctccttcctgtctaagtaccaggacatcatcatcgaacaccagaaggtggtgaagggcaaccagaagagactggagagcctgcgggagctggccggcaaggaaaacctggaataccctagcgtgaccctgccacctcagcctcacaccaaggagggcgttgatgcctacaacgaagtgatcgcccgggtgcgaatgtgggtgaacctgaacctgtggcagaagctgaagctaagcagagatgatgccaagcctctgctgagactgaagggattcccttcctttcctctggtcgagagacaggccaacgaagtggactggtgggacatggtgtgtaacgtgaagaagctgatcaacgagaaaaaggaggatggcaaggtgttttggcagaatctggctggctacaagagacaggaagccctgagaccatacctgagcagcgaggaagatcggaagaagggaaagaaattcgctcggtaccagctgggcgacctgctgctgcacctggaaaagaagcacggcgaggactggggaaaggtgtacgacgaggcctgggagcggattgacaagaaagtggaaggcctgagcaagcacatcaagctggaagaggaacggagaagcgaggacgcccagagcaaggccgccctgaccgactggctgcgggctaaggccagcttcgtgatcgagggcctgaaggaggccgacaaggacgagttctgcagatgcgagctgaagctgcagaagtggtacggggacctgcggggaaagcccttcgccatcgaagccgagaacagcatcctggacatcagcggcttcagcaagcagtacaactgtgccttcatctggcagaaggacggcgtgaagaagctgaacctgtacctgatcatcaactacttcaagggcggcaagctgcggttcaagaagatcaaacctgaagccttcgaagccaacagattctacaccgtgatcaacaaaaagagcggcgagatcgtgcccatggaggtgaacttcaacttcgacgaccccaacctgatcatcctgcctctggcctttggcaagagacagggcagagaattcatctggaacgacctgctgtccctggaaaccggcagcctgaagctggccaacggaagagtgatcgagaagacactgtacaacagaagaacccggcaggatgagcctgccctgttcgtggccctgaccttcgagcggcgggaggtcctggactcctccaatatcaaaccaatgaacctgatcggcgtggcaagaggcgaaaacatccccgccgtgatcgccctgaccgaccccgagggctgcccactgagccggtttaaggatagcctgggaaacccaacccacatcctgagaatcggcgagagctataaggagaagcagcggaccatccaggccaagaaggaggtggagcagcggagagccggcggctacagccggaagtacgccagcaaagccaagaatctggcagacgatatggtgagaaacaccgctagagatctgctgtactacgccgtgacccaggatgccatgctgatcttcgccaacctgagccggggcttcggccggcagggcaagcggaccttcatggccgagagacagtacacacggatggaggactggctgaccgccaagctggcctacgagggcctgagcaagacctacctgtccaagacactggcccagtacacctccaagacatgcagcaactgtgggtttaccatcaccagcgccgactacgacagggtgctggagaagctgaagaagacagcaacaggctggatgaccacaattaacggcaaggagctgaaggtggagggccagattacctactacaacagatacaagagacagaacgtagtcaaggacctgtccgtcgagctggatagactgagcgaagaatctgtgaacaacgacatctcctcctggacaaagggcagaagcggagaagctctgagcctcctgaagaaaagattctcccatagacccgtgcaggagaagttcgtgtgcctgaactgcggcttcgagacacacgcagccgagcaagccgccctgaacatcgccagatcctggctgttcctgcggagccaggagtacaagaaataccagacaaacaagacaaccggcaacaccgataagagagccttcgtcgagacctggcagtccttttaccggaagaagcttaaggaggtgtggaaacctgccgtgcggtctggcggatctggcggaggctccaccagccccaagaaaaagagaaaagtctaagctgccttctgcggggcttgccttctggccatgcccttcttctctcccttgcacctgtacctcttggtctttgaataaagcctgagtaggaaggctagcaaaaaaaaaaaaaaaaaaaaaaaaaaaaaaaaaaaaaaaaaaaaaaaaaaaaaaaaaaaaaaaaaaaaaaaaaaaaaaaagcccagccggctccccaacctctaccgaggagggcacctctgagtccgccacccccgagagcggccctggcacctccaccgagcccagcgagggcagcgcacccggcagccctgccggcagccccacctccacagaggagggaaccagcaccgagcccagcgaaggcagcgccccaggcaccagcaccgagcctagtgagcaggagattaaacggatcaacaagatcagaagaagacttgtgaaagacagcaacaccaagaaggccggcaagacaggccccatgaaaaccctgctggttagagtgatgacacccgatctgagagagcggctggaaaacctgagaaagaagcctgaaaatatcccccagcccatcagcaatacatctagagccaacctgaataagctgctgaccgattacaccgaaatgaagaaggcgatcctgcatgtgtactgggaagagttccagaaggaccctgtgggcctgatgagccgggtggcccagcctgccagcaagaagatcgatcagaacaagctgaaacctgagatggacgagaagggcaacctgaccaccgccggctttgcctgctctcagtgtggccagcccctgttcgtgtacaagctggagcaggtgtctgagaagggcaaggcttacaccaactacttcggacggtgcaatgtggccgagcacgaaaagctgatcctgctggcccagctgaagcccgagaaggatagcgacgaagccgtgacatatagcctgggaaagtttgggcagagggccctggatttctacagcattcatgtgaccaaggagtccacccaccccgtgaagcccctggcccagatcgccggaaacagatacgcctccggacctgtgggaaaggccctgagcgacgcatgtatgggcacaatcgcctccttcctgtctaagtaccaggacatcatcatcgaacaccagaaggtggtgaagggcaaccagaagagactggagagcctgcgggagctggccggcaaggaaaacctggaataccctagcgtgaccctgccacctcagcctcacaccaaggagggcgttgatgcctacaacgaagtgatcgcccgggtgcgaatgtgggtgaacctgaacctgtggcagaagctgaagctaagcagagatgatgccaagcctctgctgagactgaagggattcccttcctttcctctggtcgagagacaggccaacgaagtggactggtgggacatggtgtgtaacgtgaagaagctgatcaacgagaaaaaggaggatggcaaggtgttttggcagaatctggctggctacaagagacaggaagccctgagaccatacctgagcagcgaggaagatcggaagaagggaaagaaattcgctcggtaccagctgggcgacctgctgctgcacctggaaaagaagcacggcgaggactggggaaaggtgtacgacgaggcctgggagcggattgacaagaaagtggaaggcctgagcaagcacatcaagctggaagaggaacggagaagcgaggacgcccagagcaaggccgccctgaccgactggctgcgggctaaggccagcttcgtgatcgagggcctgaaggaggccgacaaggacgagttctgcagatgcgagctgaagctgcagaagtggtacggggacctgcggggaaagcccttcgccatcgaagccgagaacagcatcctggacatcagcggcttcagcaagcagtacaactgtgccttcatctggcagaaggacggcgtgaagaagctgaacctgtacctgatcatcaactacttcaagggcggcaagctgcggttcaagaagatcaaacctgaagccttcgaagccaacagattctacaccgtgatcaacaaaaagagcggcgagatcgtgcccatggaggtgaacttcaacttcgacgaccccaacctgatcatcctgcctctggcctttggcaagagacagggcagagaattcatctggaacgacctgctgtccctggaaaccggcagcctgaagctggccaacggaagagtgatcgagaagacactgtacaacagaagaacccggcaggatgagcctgccctgttcgtggccctgaccttcgagcggcgggaggtcctggactcctccaatatcaaaccaatgaacctgatcggcgtggcaagaggcgaaaacatccccgccgtgatcgccctgaccgaccccgagggctgcccactgagccggtttaaggatagcctgggaaacccaacccacatcctgagaatcggcgagagctataaggagaagcagcggaccatccaggccaagaaggaggtggagcagcggagagccggcggctacagccggaagtacgccagcaaagccaagaatctggcagacgatatggtgagaaacaccgctagagatctgctgtactacgccgtgacccaggatgccatgctgatcttcgccaacctgagccggggcttcggccggcagggcaagcggaccttcatggccgagagacagtacacacggatggaggactggctgaccgccaagctggcctacgagggcctgagcaagacctacctgtccaagacactggcccagtacacctccaagacatgcagcaactgtgggtttaccatcaccagcgccgactacgacagggtgctggagaagctgaagaagacagcaacaggctggatgaccacaattaacggcaaggagctgaaggtggagggccagattacctactacaacagatacaagagacagaacgtagtcaaggacctgtccgtcgagctggatagactgagcgaagaatctgtgaacaacgacatctcctcctggacaaagggcagaagcggagaagctctgagcctcctgaagaaaagattctcccatagacccgtgcaggagaagttcgtgtgcctgaactgcggcttcgagacacacgcagccgagcaagccgccctgaacatcgccagatcctggctgttcctgcggagccaggagtacaagaaataccagacaaacaagacaaccggcaacaccgataagagagccttcgtcgagacctggcagtccttttaccggaagaagcttaaggaggtgtggaaacctgccgtgcggtctggcggatctggcggaggctccaccagccccaagaaaaagagaaaagtctaagctgccttctgcggggcttgccttctggccatgcccttcttctctcccttgcacctgtacctcttggtctttgaataaagcctgagtaggaaggctagcaaaaaaaaaaaaaaaaaaaaaaaaaaaaaaaaaaaaaaaaaaaaaaaaaaaaaaaaaaaaaaaaaaaaaaaaaaaaaaaa

SEQ ID NO: 9455 - RNA, 8787 nt, synthetic construct
  source 1..8787: mol_type = other RNA
aggaaataagagagaaaagaagagtaagaagaaatataagagccaccatggcccctaagaagaagcgtaaagtgagccggatgaaccacgaccaggagttcgacccccctaaggtgtaccctcccgtccccgccgagaagagaaagcccatccgggtcctgagcctgttcgatggcatcgccaccggtctgctggtgctgaaggacctgggcatccaggtggataggtacattgcctccgaggtgtgcgaggactccatcaccgtgggaatggtgcgtcatcagggcaagatcatgtacgtgggcgacgtgcggagcgtgacacagaagcatatccaggagtggggccctttcgacctggtgatcggcggcagcccttgcaatgacctgagcatcgtgaacccagcccggaagggcctgtacgagggaaccggcagactgttcttcgagttttacagactgctgcacgacgcccggcctaaggaaggcgacgaccggcccttcttttggctgttcgagaatgtggtggccatgggagtcagcgacaagcgggatattagccggttcctggagagcaaccccgtgatgatcgatgccaaggaagtgagcgccgcccaccgggccagatacttctggggcaatctgcctggcatgaacagacccctggccagcaccgtgaacgacaagctggagctgcaggagtgcctggagcacggccggatcgccaagttcagcaaggtgagaaccatcaccacccgaagcaacagcatcaaacaaggcaaggaccagcactttcctgtgttcatgaacgagaaggaggacatcctgtggtgtaccgagatggagagagtgttcgggttcccagtccactacacagatgtcagcaacatgtctagactggccagacagagactgctgggaagaagctggtccgtccctgtgatcagacacctgttcgcccctctgaaggagtacttcgcctgcgtgagcagcggcaacagcaacgccaacagccggggccccagcttctctagcggcctggtgccactgtccctgagagggagccacatgggccccatggagatctacaaaaccgtgagcgcctggaagcggcagcctgtgcgcgtgctgagcctgtttcggaatatcgataaagtcctgaaaagcctgggattcctggagagcggctctggctccggcggtggcaccctgaagtacgtggaggatgtgacaaacgtggtcagacgggatgtggagaagtggggccccttcgatctggtgtacggcagcacccaacccctgggcagctcttgtgaccggtgccctggctggtacatgtttcagttccaccggatcctgcagtacgccctgccgagacaggagtcccagcggccattcttttggattttcatggacaacttgctgctgaccgaggatgaccaggaaactaccactcggttcctgcagaccgaagccgtgaccctgcaggacgtgagaggccgggactaccagaacgccatgcgggtgtggtccaacatccctggactgaaaagcaagcacgcacctctgacccctaaagaagaggagtacctgcaggcccaggtgcggagcagaagcaagctggacgcccctaaggtggatctgctggtgaagaattgcctcctgcccctgagagagtacttcaagtatttcagccagaatagtctgcccctgggaggcagcggcggcggcctgctgcccgccgccggctgcggcaaggacagcggcacccccgccaccgaggccgtgaccttcgaggacgtggccgtgaacttcagcagggaggagtgggccctgctggaccccccccagaggaagctgtacagggacgtgatgtgggagaccctgaggcacctggccgccgtgggcatgaacagcgacgacaggcagatcgaggacgtgtacaagatctgcaggaagaacctgagcggcgccggcggcccaagcagcggcgcccctcctcccagcggcggcaggcggcccaagcagcggcgcccctcctcccagcggcggcagcccagccggctccccaacctctaccgaggagggcacctctgagtccgccacccccgagagcggccctggcacctccaccgagcccagcgagggcagcgcacccggcagccctgccggcagccccacctccacagaggagggaaccagcaccgagcccagcgaaggcagcgccccaggcaccagcaccgagcctagtgagcaggagattaaacggatcaacaagatcagaagaagacttgtgaaagacagcaacaccaagaaggccggcaagacaggccccatgaaaaccctgctggttagagtgatgacacccgatctgagagagcggctggaaaacctgagaaagaagcctgaaaatatcccccagcccatcagcaatacatctagagccaacctgaataagctgctgaccgattacaccgaaatgaagaaggcgatcctgcatgtgtactgggaagagttccagaaggaccctgtgggcctgatgagccgggtggcccagcctgccagcaagaagatcgatcagaacaagctgaaacctgagatggacgagaagggcaacctgaccaccgccggctttgcctgctctcagtgtggccagcccctgttcgtgtacaagctggagcaggtgtctgagaagggcaaggcttacaccaactacttcggacggtgcaatgtggccgagcacgaaaagctgatcctgctggcccagctgaagcccgagaaggatagcgacgaagccgtgacatatagcctgggaaagtttgggcagagggccctggatttctacagcattcatgtgaccaaggagtccacccaccccgtgaagcccctggcccagatcgccggaaacagatacgcctccggacctgtgggaaaggccctgagcgacgcatgtatgggcacaatcgcctccttcctgtctaagtaccaggacatcatcatcgaacaccagaaggtggtgaagggcaaccagaagagactggagagcctgcgggagctggccggcaaggaaaacctggaataccctagcgtgaccctgccacctcagcctcacaccaaggagggcgttgatgcctacaacgaagtgatcgcccgggtgcgaatgtgggtgaacctgaacctgtggcagaagctgaagctaagcagagatgatgccaagcctctgctgagactgaagggattcccttcctttcctctggtcgagagacaggccaacgaagtggactggtgggacatggtgtgtaacgtgaagaagctgatcaacgagaaaaaggaggatggcaaggtgttttggcagaatctggctggctacaagagacaggaagccctgagaccatacctgagcagcgaggaagatcggaagaagggaaagaaattcgctcggtaccagctgggcgacctgctgctgcacctggaaaagaagcacggcgaggactggggaaaggtgtacgacgaggcctgggagcggattgacaagaaagtggaaggcctgagcaagcacatcaagctggaagaggaacggagaagcgaggacgcccagagcaaggccgccctgaccgactggctgcgggctaaggccagcttcgtgatcgagggcctgaaggaggccgacaaggacgagttctgcagatgcgagctgaagctgcagaagtggtacggggacctgcggggaaagcccttcgccatcgaagccgagaacagcatcctggacatcagcggcttcagcaagcagtacaactgtgccttcatctggcagaaggacggcgtgaagaagctgaacctgtacctgatcatcaactacttcaagggcggcaagctgcggttcaagaagatcaaacctgaagccttcgaagccaacagattctacaccgtgatcaacaaaaagagcggcgagatcgtgcccatggaggtgaacttcaacttcgacgaccccaacctgatcatcctgcctctggcctttggcaagagacagggcagagaattcatctggaacgacctgctgtccctggaaaccggcagcctgaagctggccaacggaagagtgatcgagaagacactgtacaacagaagaacccggcaggatgagcctgccctgttcgtggccctgaccttcgagcggcgggaggtcctggactcctccaatatcaaaccaatgaacctgatcggcgtggcaagaggcgaaaacatccccgccgtgatcgccctgaccgaccccgagggctgcccactgagccggtttaaggatagcctgggaaacccaacccacatcctgagaatcggcgagagctataaggagaagcagcggaccatccaggccaagaaggaggtggagcagcggagagccggcggctacagccggaagtacgccagcaaagccaagaatctggcagacgatatggtgagaaacaccgctagagatctgctgtactacgccgtgacccaggatgccatgctgatcttcgccaacctgagccggggcttcggccggcagggcaagcggaccttcatggccgagagacagtacacacggatggaggactggctgaccgccaagctggcctacgagggcctgagcaagacctacctgtccaagacactggcccagtacacctccaagacatgcagcaactgtgggtttaccatcaccagcgccgactacgacagggtgctggagaagctgaagaagacagcaacaggctggatgaccacaattaacggcaaggagctgaaggtggagggccagattacctactacaacagatacaagagacagaacgtagtcaaggacctgtccgtcgagctggatagactgagcgaagaatctgtgaacaacgacatctcctcctggacaaagggcagaagcggagaagctctgagcctcctgaagaaaagattctcccatagacccgtgcaggagaagttcgtgtgcctgaactgcggcttcgagacacacgcagccgagcaagccgccctgaacatcgccagatcctggctgttcctgcggagccaggagtacaagaaataccagacaaacaagacaaccggcaacaccgataagagagccttcgtcgagacctggcagtccttttaccggaagaagcttaaggaggtgtggaaacctgccgtgcggtctggcggatctggcggaggctccaccagccccaagaaaaagagaaaagtctaagctgccttctgcggggcttgccttctggccatgcccttcttctctcccttgcacctgtacctcttggtctttgaataaagcctgagtaggaaggctagcaaaaaaaaaaaaaaaaaaaaaaaaaaaaaaaaaaaaaaaaaaaaaaaaaaaaaaaaaaaaaaaaaaaaaaaaaaaaaaaagcccagccggctccccaacctctaccgaggagggcacctctgagtccgccacccccgagagcggccctggcacctccaccgagcccagcgagggcagcgcacccggcagccctgccggcagccccacctccacagaggagggaaccagcaccgagcccagcgaaggcagcgccccaggcaccagcaccgagcctagtgagcaggagattaaacggatcaacaagatcagaagaagacttgtgaaagacagcaacaccaagaaggccggcaagacaggccccatgaaaaccctgctggttagagtgatgacacccgatctgagagagcggctggaaaacctgagaaagaagcctgaaaatatcccccagcccatcagcaatacatctagagccaacctgaataagctgctgaccgattacaccgaaatgaagaaggcgatcctgcatgtgtactgggaagagttccagaaggaccctgtgggcctgatgagccgggtggcccagcctgccagcaagaagatcgatcagaacaagctgaaacctgagatggacgagaagggcaacctgaccaccgccggctttgcctgctctcagtgtggccagcccctgttcgtgtacaagctggagcaggtgtctgagaagggcaaggcttacaccaactacttcggacggtgcaatgtggccgagcacgaaaagctgatcctgctggcccagctgaagcccgagaaggatagcgacgaagccgtgacatatagcctgggaaagtttgggcagagggccctggatttctacagcattcatgtgaccaaggagtccacccaccccgtgaagcccctggcccagatcgccggaaacagatacgcctccggacctgtgggaaaggccctgagcgacgcatgtatgggcacaatcgcctccttcctgtctaagtaccaggacatcatcatcgaacaccagaaggtggtgaagggcaaccagaagagactggagagcctgcgggagctggccggcaaggaaaacctggaataccctagcgtgaccctgccacctcagcctcacaccaaggagggcgttgatgcctacaacgaagtgatcgcccgggtgcgaatgtgggtgaacctgaacctgtggcagaagctgaagctaagcagagatgatgccaagcctctgctgagactgaagggattcccttcctttcctctggtcgagagacaggccaacgaagtggactggtgggacatggtgtgtaacgtgaagaagctgatcaacgagaaaaaggaggatggcaaggtgttttggcagaatctggctggctacaagagacaggaagccctgagaccatacctgagcagcgaggaagatcggaagaagggaaagaaattcgctcggtaccagctgggcgacctgctgctgcacctggaaaagaagcacggcgaggactggggaaaggtgtacgacgaggcctgggagcggattgacaagaaagtggaaggcctgagcaagcacatcaagctggaagaggaacggagaagcgaggacgcccagagcaaggccgccctgaccgactggctgcgggctaaggccagcttcgtgatcgagggcctgaaggaggccgacaaggacgagttctgcagatgcgagctgaagctgcagaagtggtacggggacctgcggggaaagcccttcgccatcgaagccgagaacagcatcctggacatcagcggcttcagcaagcagtacaactgtgccttcatctggcagaaggacggcgtgaagaagctgaacctgtacctgatcatcaactacttcaagggcggcaagctgcggttcaagaagatcaaacctgaagccttcgaagccaacagattctacaccgtgatcaacaaaaagagcggcgagatcgtgcccatggaggtgaacttcaacttcgacgaccccaacctgatcatcctgcctctggcctttggcaagagacagggcagagaattcatctggaacgacctgctgtccctggaaaccggcagcctgaagctggccaacggaagagtgatcgagaagacactgtacaacagaagaacccggcaggatgagcctgccctgttcgtggccctgaccttcgagcggcgggaggtcctggactcctccaatatcaaaccaatgaacctgatcggcgtggcaagaggcgaaaacatccccgccgtgatcgccctgaccgaccccgagggctgcccactgagccggtttaaggatagcctgggaaacccaacccacatcctgagaatcggcgagagctataaggagaagcagcggaccatccaggccaagaaggaggtggagcagcggagagccggcggctacagccggaagtacgccagcaaagccaagaatctggcagacgatatggtgagaaacaccgctagagatctgctgtactacgccgtgacccaggatgccatgctgatcttcgccaacctgagccggggcttcggccggcagggcaagcggaccttcatggccgagagacagtacacacggatggaggactggctgaccgccaagctggcctacgagggcctgagcaagacctacctgtccaagacactggcccagtacacctccaagacatgcagcaactgtgggtttaccatcaccagcgccgactacgacagggtgctggagaagctgaagaagacagcaacaggctggatgaccacaattaacggcaaggagctgaaggtggagggccagattacctactacaacagatacaagagacagaacgtagtcaaggacctgtccgtcgagctggatagactgagcgaagaatctgtgaacaacgacatctcctcctggacaaagggcagaagcggagaagctctgagcctcctgaagaaaagattctcccatagacccgtgcaggagaagttcgtgtgcctgaactgcggcttcgagacacacgcagccgagcaagccgccctgaacatcgccagatcctggctgttcctgcggagccaggagtacaagaaataccagacaaacaagacaaccggcaacaccgataagagagccttcgtcgagacctggcagtccttttaccggaagaagcttaaggaggtgtggaaacctgccgtgcggtctggcggatctggcggaggctccaccagccccaagaaaaagagaaaagtctaagctgccttctgcggggcttgccttctggccatgcccttcttctctcccttgcacctgtacctcttggtctttgaataaagcctgagtaggaaggctagcaaaaaaaaaaaaaaaaaaaaaaaaaaaaaaaaaaaaaaaaaaaaaaaaaaaaaaaaaaaaaaaaaaaaaaaaaaaaaaaa

SEQ ID NO: 9456 - RNA, 8787 nt, synthetic construct
  source 1..8787: mol_type = other RNA
aggaaataagagagaaaagaagagtaagaagaaatataagagccaccatggcccctaagaagaagcgtaaagtgagccggatgaaccacgaccaggagttcgacccccctaaggtgtaccctcccgtccccgccgagaagagaaagcccatccgggtcctgagcctgttcgatggcatcgccaccggtctgctggtgctgaaggacctgggcatccaggtggataggtacattgcctccgaggtgtgcgaggactccatcaccgtgggaatggtgcgtcatcagggcaagatcatgtacgtgggcgacgtgcggagcgtgacacagaagcatatccaggagtggggccctttcgacctggtgatcggcggcagcccttgcaatgacctgagcatcgtgaacccagcccggaagggcctgtacgagggaaccggcagactgttcttcgagttttacagactgctgcacgacgcccggcctaaggaaggcgacgaccggcccttcttttggctgttcgagaatgtggtggccatgggagtcagcgacaagcgggatattagccggttcctggagagcaaccccgtgatgatcgatgccaaggaagtgagcgccgcccaccgggccagatacttctggggcaatctgcctggcatgaacagacccctggccagcaccgtgaacgacaagctggagctgcaggagtgcctggagcacggccggatcgccaagttcagcaaggtgagaaccatcaccacccgaagcaacagcatcaaacaaggcaaggaccagcactttcctgtgttcatgaacgagaaggaggacatcctgtggtgtaccgagatggagagagtgttcgggttcccagtccactacacagatgtcagcaacatgtctagactggccagacagagactgctgggaagaagctggtccgtccctgtgatcagacacctgttcgcccctctgaaggagtacttcgcctgcgtgagcagcggcaacagcaacgccaacagccggggccccagcttctctagcggcctggtgccactgtccctgagagggagccacatgggccccatggagatctacaaaaccgtgagcgcctggaagcggcagcctgtgcgcgtgctgagcctgtttcggaatatcgataaagtcctgaaaagcctgggattcctggagagcggctctggctccggcggtggcaccctgaagtacgtggaggatgtgacaaacgtggtcagacgggatgtggagaagtggggccccttcgatctggtgtacggcagcacccaacccctgggcagctcttgtgaccggtgccctggctggtacatgtttcagttccaccggatcctgcagtacgccctgccgagacaggagtcccagcggccattcttttggattttcatggacaacttgctgctgaccgaggatgaccaggaaactaccactcggttcctgcagaccgaagccgtgaccctgcaggacgtgagaggccgggactaccagaacgccatgcgggtgtggtccaacatccctggactgaaaagcaagcacgcacctctgacccctaaagaagaggagtacctgcaggcccaggtgcggagcagaagcaagctggacgcccctaaggtggatctgctggtgaagaattgcctcctgcccctgagagagtacttcaagtatttcagccagaatagtctgcccctgggaggcagcggcggcggcgaggagctgcccgtggtgttcgaggacgtggccgtgtacttcaccagggaggagtggggcatgctggacaagaggcagaaggagctgtacagggacgtgatgaggatgaactacgagctgctggccagcctgggccccgccgccgccaagcccgacctgatcagcaagctggagaggagggccgccccctggatcaagcaccccaacggccccaagtggggcaagggcaggccccccggcaacggcggcccaagcagcggcgcccctcctcccagcggcggcaggcggcccaagcagcggcgcccctcctcccagcggcggcagcccagccggctccccaacctctaccgaggagggcacctctgagtccgccacccccgagagcggccctggcacctccaccgagcccagcgagggcagcgcacccggcagccctgccggcagccccacctccacagaggagggaaccagcaccgagcccagcgaaggcagcgccccaggcaccagcaccgagcctagtgagcaggagattaaacggatcaacaagatcagaagaagacttgtgaaagacagcaacaccaagaaggccggcaagacaggccccatgaaaaccctgctggttagagtgatgacacccgatctgagagagcggctggaaaacctgagaaagaagcctgaaaatatcccccagcccatcagcaatacatctagagccaacctgaataagctgctgaccgattacaccgaaatgaagaaggcgatcctgcatgtgtactgggaagagttccagaaggaccctgtgggcctgatgagccgggtggcccagcctgccagcaagaagatcgatcagaacaagctgaaacctgagatggacgagaagggcaacctgaccaccgccggctttgcctgctctcagtgtggccagcccctgttcgtgtacaagctggagcaggtgtctgagaagggcaaggcttacaccaactacttcggacggtgcaatgtggccgagcacgaaaagctgatcctgctggcccagctgaagcccgagaaggatagcgacgaagccgtgacatatagcctgggaaagtttgggcagagggccctggatttctacagcattcatgtgaccaaggagtccacccaccccgtgaagcccctggcccagatcgccggaaacagatacgcctccggacctgtgggaaaggccctgagcgacgcatgtatgggcacaatcgcctccttcctgtctaagtaccaggacatcatcatcgaacaccagaaggtggtgaagggcaaccagaagagactggagagcctgcgggagctggccggcaaggaaaacctggaataccctagcgtgaccctgccacctcagcctcacaccaaggagggcgttgatgcctacaacgaagtgatcgcccgggtgcgaatgtgggtgaacctgaacctgtggcagaagctgaagctaagcagagatgatgccaagcctctgctgagactgaagggattcccttcctttcctctggtcgagagacaggccaacgaagtggactggtgggacatggtgtgtaacgtgaagaagctgatcaacgagaaaaaggaggatggcaaggtgttttggcagaatctggctggctacaagagacaggaagccctgagaccatacctgagcagcgaggaagatcggaagaagggaaagaaattcgctcggtaccagctgggcgacctgctgctgcacctggaaaagaagcacggcgaggactggggaaaggtgtacgacgaggcctgggagcggattgacaagaaagtggaaggcctgagcaagcacatcaagctggaagaggaacggagaagcgaggacgcccagagcaaggccgccctgaccgactggctgcgggctaaggccagcttcgtgatcgagggcctgaaggaggccgacaaggacgagttctgcagatgcgagctgaagctgcagaagtggtacggggacctgcggggaaagcccttcgccatcgaagccgagaacagcatcctggacatcagcggcttcagcaagcagtacaactgtgccttcatctggcagaaggacggcgtgaagaagctgaacctgtacctgatcatcaactacttcaagggcggcaagctgcggttcaagaagatcaaacctgaagccttcgaagccaacagattctacaccgtgatcaacaaaaagagcggcgagatcgtgcccatggaggtgaacttcaacttcgacgaccccaacctgatcatcctgcctctggcctttggcaagagacagggcagagaattcatctggaacgacctgctgtccctggaaaccggcagcctgaagctggccaacggaagagtgatcgagaagacactgtacaacagaagaacccggcaggatgagcctgccctgttcgtggccctgaccttcgagcggcgggaggtcctggactcctccaatatcaaaccaatgaacctgatcggcgtggcaagaggcgaaaacatccccgccgtgatcgccctgaccgaccccgagggctgcccactgagccggtttaaggatagcctgggaaacccaacccacatcctgagaatcggcgagagctataaggagaagcagcggaccatccaggccaagaaggaggtggagcagcggagagccggcggctacagccggaagtacgccagcaaagccaagaatctggcagacgatatggtgagaaacaccgctagagatctgctgtactacgccgtgacccaggatgccatgctgatcttcgccaacctgagccggggcttcggccggcagggcaagcggaccttcatggccgagagacagtacacacggatggaggactggctgaccgccaagctggcctacgagggcctgagcaagacctacctgtccaagacactggcccagtacacctccaagacatgcagcaactgtgggtttaccatcaccagcgccgactacgacagggtgctggagaagctgaagaagacagcaacaggctggatgaccacaattaacggcaaggagctgaaggtggagggccagattacctactacaacagatacaagagacagaacgtagtcaaggacctgtccgtcgagctggatagactgagcgaagaatctgtgaacaacgacatctcctcctggacaaagggcagaagcggagaagctctgagcctcctgaagaaaagattctcccatagacccgtgcaggagaagttcgtgtgcctgaactgcggcttcgagacacacgcagccgagcaagccgccctgaacatcgccagatcctggctgttcctgcggagccaggagtacaagaaataccagacaaacaagacaaccggcaacaccgataagagagccttcgtcgagacctggcagtccttttaccggaagaagcttaaggaggtgtggaaacctgccgtgcggtctggcggatctggcggaggctccaccagccccaagaaaaagagaaaagtctaagctgccttctgcggggcttgccttctggccatgcccttcttctctcccttgcacctgtacctcttggtctttgaataaagcctgagtaggaaggctagcaaaaaaaaaaaaaaaaaaaaaaaaaaaaaaaaaaaaaaaaaaaaaaaaaaaaaaaaaaaaaaaaaaaaaaaaaaaaaaaagcccagccggctccccaacctctaccgaggagggcacctctgagtccgccacccccgagagcggccctggcacctccaccgagcccagcgagggcagcgcacccggcagccctgccggcagccccacctccacagaggagggaaccagcaccgagcccagcgaaggcagcgccccaggcaccagcaccgagcctagtgagcaggagattaaacggatcaacaagatcagaagaagacttgtgaaagacagcaacaccaagaaggccggcaagacaggccccatgaaaaccctgctggttagagtgatgacacccgatctgagagagcggctggaaaacctgagaaagaagcctgaaaatatcccccagcccatcagcaatacatctagagccaacctgaataagctgctgaccgattacaccgaaatgaagaaggcgatcctgcatgtgtactgggaagagttccagaaggaccctgtgggcctgatgagccgggtggcccagcctgccagcaagaagatcgatcagaacaagctgaaacctgagatggacgagaagggcaacctgaccaccgccggctttgcctgctctcagtgtggccagcccctgttcgtgtacaagctggagcaggtgtctgagaagggcaaggcttacaccaactacttcggacggtgcaatgtggccgagcacgaaaagctgatcctgctggcccagctgaagcccgagaaggatagcgacgaagccgtgacatatagcctgggaaagtttgggcagagggccctggatttctacagcattcatgtgaccaaggagtccacccaccccgtgaagcccctggcccagatcgccggaaacagatacgcctccggacctgtgggaaaggccctgagcgacgcatgtatgggcacaatcgcctccttcctgtctaagtaccaggacatcatcatcgaacaccagaaggtggtgaagggcaaccagaagagactggagagcctgcgggagctggccggcaaggaaaacctggaataccctagcgtgaccctgccacctcagcctcacaccaaggagggcgttgatgcctacaacgaagtgatcgcccgggtgcgaatgtgggtgaacctgaacctgtggcagaagctgaagctaagcagagatgatgccaagcctctgctgagactgaagggattcccttcctttcctctggtcgagagacaggccaacgaagtggactggtgggacatggtgtgtaacgtgaagaagctgatcaacgagaaaaaggaggatggcaaggtgttttggcagaatctggctggctacaagagacaggaagccctgagaccatacctgagcagcgaggaagatcggaagaagggaaagaaattcgctcggtaccagctgggcgacctgctgctgcacctggaaaagaagcacggcgaggactggggaaaggtgtacgacgaggcctgggagcggattgacaagaaagtggaaggcctgagcaagcacatcaagctggaagaggaacggagaagcgaggacgcccagagcaaggccgccctgaccgactggctgcgggctaaggccagcttcgtgatcgagggcctgaaggaggccgacaaggacgagttctgcagatgcgagctgaagctgcagaagtggtacggggacctgcggggaaagcccttcgccatcgaagccgagaacagcatcctggacatcagcggcttcagcaagcagtacaactgtgccttcatctggcagaaggacggcgtgaagaagctgaacctgtacctgatcatcaactacttcaagggcggcaagctgcggttcaagaagatcaaacctgaagccttcgaagccaacagattctacaccgtgatcaacaaaaagagcggcgagatcgtgcccatggaggtgaacttcaacttcgacgaccccaacctgatcatcctgcctctggcctttggcaagagacagggcagagaattcatctggaacgacctgctgtccctggaaaccggcagcctgaagctggccaacggaagagtgatcgagaagacactgtacaacagaagaacccggcaggatgagcctgccctgttcgtggccctgaccttcgagcggcgggaggtcctggactcctccaatatcaaaccaatgaacctgatcggcgtggcaagaggcgaaaacatccccgccgtgatcgccctgaccgaccccgagggctgcccactgagccggtttaaggatagcctgggaaacccaacccacatcctgagaatcggcgagagctataaggagaagcagcggaccatccaggccaagaaggaggtggagcagcggagagccggcggctacagccggaagtacgccagcaaagccaagaatctggcagacgatatggtgagaaacaccgctagagatctgctgtactacgccgtgacccaggatgccatgctgatcttcgccaacctgagccggggcttcggccggcagggcaagcggaccttcatggccgagagacagtacacacggatggaggactggctgaccgccaagctggcctacgagggcctgagcaagacctacctgtccaagacactggcccagtacacctccaagacatgcagcaactgtgggtttaccatcaccagcgccgactacgacagggtgctggagaagctgaagaagacagcaacaggctggatgaccacaattaacggcaaggagctgaaggtggagggccagattacctactacaacagatacaagagacagaacgtagtcaaggacctgtccgtcgagctggatagactgagcgaagaatctgtgaacaacgacatctcctcctggacaaagggcagaagcggagaagctctgagcctcctgaagaaaagattctcccatagacccgtgcaggagaagttcgtgtgcctgaactgcggcttcgagacacacgcagccgagcaagccgccctgaacatcgccagatcctggctgttcctgcggagccaggagtacaagaaataccagacaaacaagacaaccggcaacaccgataagagagccttcgtcgagacctggcagtccttttaccggaagaagcttaaggaggtgtggaaacctgccgtgcggtctggcggatctggcggaggctccaccagccccaagaaaaagagaaaagtctaagctgccttctgcggggcttgccttctggccatgcccttcttctctcccttgcacctgtacctcttggtctttgaataaagcctgagtaggaaggctagcaaaaaaaaaaaaaaaaaaaaaaaaaaaaaaaaaaaaaaaaaaaaaaaaaaaaaaaaaaaaaaaaaaaaaaaaaaaaaaaa

SEQ ID NO: 9457 - RNA, 8787 nt, synthetic construct
  source 1..8787: mol_type = other RNA
aggaaataagagagaaaagaagagtaagaagaaatataagagccaccatggcccctaagaagaagcgtaaagtgagccggatgaaccacgaccaggagttcgacccccctaaggtgtaccctcccgtccccgccgagaagagaaagcccatccgggtcctgagcctgttcgatggcatcgccaccggtctgctggtgctgaaggacctgggcatccaggtggataggtacattgcctccgaggtgtgcgaggactccatcaccgtgggaatggtgcgtcatcagggcaagatcatgtacgtgggcgacgtgcggagcgtgacacagaagcatatccaggagtggggccctttcgacctggtgatcggcggcagcccttgcaatgacctgagcatcgtgaacccagcccggaagggcctgtacgagggaaccggcagactgttcttcgagttttacagactgctgcacgacgcccggcctaaggaaggcgacgaccggcccttcttttggctgttcgagaatgtggtggccatgggagtcagcgacaagcgggatattagccggttcctggagagcaaccccgtgatgatcgatgccaaggaagtgagcgccgcccaccgggccagatacttctggggcaatctgcctggcatgaacagacccctggccagcaccgtgaacgacaagctggagctgcaggagtgcctggagcacggccggatcgccaagttcagcaaggtgagaaccatcaccacccgaagcaacagcatcaaacaaggcaaggaccagcactttcctgtgttcatgaacgagaaggaggacatcctgtggtgtaccgagatggagagagtgttcgggttcccagtccactacacagatgtcagcaacatgtctagactggccagacagagactgctgggaagaagctggtccgtccctgtgatcagacacctgttcgcccctctgaaggagtacttcgcctgcgtgagcagcggcaacagcaacgccaacagccggggccccagcttctctagcggcctggtgccactgtccctgagagggagccacatgggccccatggagatctacaaaaccgtgagcgcctggaagcggcagcctgtgcgcgtgctgagcctgtttcggaatatcgataaagtcctgaaaagcctgggattcctggagagcggctctggctccggcggtggcaccctgaagtacgtggaggatgtgacaaacgtggtcagacgggatgtggagaagtggggccccttcgatctggtgtacggcagcacccaacccctgggcagctcttgtgaccggtgccctggctggtacatgtttcagttccaccggatcctgcagtacgccctgccgagacaggagtcccagcggccattcttttggattttcatggacaacttgctgctgaccgaggatgaccaggaaactaccactcggttcctgcagaccgaagccgtgaccctgcaggacgtgagaggccgggactaccagaacgccatgcgggtgtggtccaacatccctggactgaaaagcaagcacgcacctctgacccctaaagaagaggagtacctgcaggcccaggtgcggagcagaagcaagctggacgcccctaaggtggatctgctggtgaagaattgcctcctgcccctgagagagtacttcaagtatttcagccagaatagtctgcccctgggaggcagcggcggcggcacccaggtgagcgtgaccttcgacgacgtggccgtgaccttcaccagggaggagtggaggcagctggaccccgcccagaggaccctgtaccaggaggtgatgctggagaactgcaggctgctggtgagcctgggctgccccgtgcccaggcccgagctgatcttccagctggagcagggccagaagctgtggaccgtgaaggaggacctgagcaggagcacctgccccggcaagaggtacaggggcggcccaagcagcggcgcccctcctcccagcggcggcaggcggcccaagcagcggcgcccctcctcccagcggcggcagcccagccggctccccaacctctaccgaggagggcacctctgagtccgccacccccgagagcggccctggcacctccaccgagcccagcgagggcagcgcacccggcagccctgccggcagccccacctccacagaggagggaaccagcaccgagcccagcgaaggcagcgccccaggcaccagcaccgagcctagtgagcaggagattaaacggatcaacaagatcagaagaagacttgtgaaagacagcaacaccaagaaggccggcaagacaggccccatgaaaaccctgctggttagagtgatgacacccgatctgagagagcggctggaaaacctgagaaagaagcctgaaaatatcccccagcccatcagcaatacatctagagccaacctgaataagctgctgaccgattacaccgaaatgaagaaggcgatcctgcatgtgtactgggaagagttccagaaggaccctgtgggcctgatgagccgggtggcccagcctgccagcaagaagatcgatcagaacaagctgaaacctgagatggacgagaagggcaacctgaccaccgccggctttgcctgctctcagtgtggccagcccctgttcgtgtacaagctggagcaggtgtctgagaagggcaaggcttacaccaactacttcggacggtgcaatgtggccgagcacgaaaagctgatcctgctggcccagctgaagcccgagaaggatagcgacgaagccgtgacatatagcctgggaaagtttgggcagagggccctggatttctacagcattcatgtgaccaaggagtccacccaccccgtgaagcccctggcccagatcgccggaaacagatacgcctccggacctgtgggaaaggccctgagcgacgcatgtatgggcacaatcgcctccttcctgtctaagtaccaggacatcatcatcgaacaccagaaggtggtgaagggcaaccagaagagactggagagcctgcgggagctggccggcaaggaaaacctggaataccctagcgtgaccctgccacctcagcctcacaccaaggagggcgttgatgcctacaacgaagtgatcgcccgggtgcgaatgtgggtgaacctgaacctgtggcagaagctgaagctaagcagagatgatgccaagcctctgctgagactgaagggattcccttcctttcctctggtcgagagacaggccaacgaagtggactggtgggacatggtgtgtaacgtgaagaagctgatcaacgagaaaaaggaggatggcaaggtgttttggcagaatctggctggctacaagagacaggaagccctgagaccatacctgagcagcgaggaagatcggaagaagggaaagaaattcgctcggtaccagctgggcgacctgctgctgcacctggaaaagaagcacggcgaggactggggaaaggtgtacgacgaggcctgggagcggattgacaagaaagtggaaggcctgagcaagcacatcaagctggaagaggaacggagaagcgaggacgcccagagcaaggccgccctgaccgactggctgcgggctaaggccagcttcgtgatcgagggcctgaaggaggccgacaaggacgagttctgcagatgcgagctgaagctgcagaagtggtacggggacctgcggggaaagcccttcgccatcgaagccgagaacagcatcctggacatcagcggcttcagcaagcagtacaactgtgccttcatctggcagaaggacggcgtgaagaagctgaacctgtacctgatcatcaactacttcaagggcggcaagctgcggttcaagaagatcaaacctgaagccttcgaagccaacagattctacaccgtgatcaacaaaaagagcggcgagatcgtgcccatggaggtgaacttcaacttcgacgaccccaacctgatcatcctgcctctggcctttggcaagagacagggcagagaattcatctggaacgacctgctgtccctggaaaccggcagcctgaagctggccaacggaagagtgatcgagaagacactgtacaacagaagaacccggcaggatgagcctgccctgttcgtggccctgaccttcgagcggcgggaggtcctggactcctccaatatcaaaccaatgaacctgatcggcgtggcaagaggcgaaaacatccccgccgtgatcgccctgaccgaccccgagggctgcccactgagccggtttaaggatagcctgggaaacccaacccacatcctgagaatcggcgagagctataaggagaagcagcggaccatccaggccaagaaggaggtggagcagcggagagccggcggctacagccggaagtacgccagcaaagccaagaatctggcagacgatatggtgagaaacaccgctagagatctgctgtactacgccgtgacccaggatgccatgctgatcttcgccaacctgagccggggcttcggccggcagggcaagcggaccttcatggccgagagacagtacacacggatggaggactggctgaccgccaagctggcctacgagggcctgagcaagacctacctgtccaagacactggcccagtacacctccaagacatgcagcaactgtgggtttaccatcaccagcgccgactacgacagggtgctggagaagctgaagaagacagcaacaggctggatgaccacaattaacggcaaggagctgaaggtggagggccagattacctactacaacagatacaagagacagaacgtagtcaaggacctgtccgtcgagctggatagactgagcgaagaatctgtgaacaacgacatctcctcctggacaaagggcagaagcggagaagctctgagcctcctgaagaaaagattctcccatagacccgtgcaggagaagttcgtgtgcctgaactgcggcttcgagacacacgcagccgagcaagccgccctgaacatcgccagatcctggctgttcctgcggagccaggagtacaagaaataccagacaaacaagacaaccggcaacaccgataagagagccttcgtcgagacctggcagtccttttaccggaagaagcttaaggaggtgtggaaacctgccgtgcggtctggcggatctggcggaggctccaccagccccaagaaaaagagaaaagtctaagctgccttctgcggggcttgccttctggccatgcccttcttctctcccttgcacctgtacctcttggtctttgaataaagcctgagtaggaaggctagcaaaaaaaaaaaaaaaaaaaaaaaaaaaaaaaaaaaaaaaaaaaaaaaaaaaaaaaaaaaaaaaaaaaaaaaaaaaaaaaagcccagccggctccccaacctctaccgaggagggcacctctgagtccgccacccccgagagcggccctggcacctccaccgagcccagcgagggcagcgcacccggcagccctgccggcagccccacctccacagaggagggaaccagcaccgagcccagcgaaggcagcgccccaggcaccagcaccgagcctagtgagcaggagattaaacggatcaacaagatcagaagaagacttgtgaaagacagcaacaccaagaaggccggcaagacaggccccatgaaaaccctgctggttagagtgatgacacccgatctgagagagcggctggaaaacctgagaaagaagcctgaaaatatcccccagcccatcagcaatacatctagagccaacctgaataagctgctgaccgattacaccgaaatgaagaaggcgatcctgcatgtgtactgggaagagttccagaaggaccctgtgggcctgatgagccgggtggcccagcctgccagcaagaagatcgatcagaacaagctgaaacctgagatggacgagaagggcaacctgaccaccgccggctttgcctgctctcagtgtggccagcccctgttcgtgtacaagctggagcaggtgtctgagaagggcaaggcttacaccaactacttcggacggtgcaatgtggccgagcacgaaaagctgatcctgctggcccagctgaagcccgagaaggatagcgacgaagccgtgacatatagcctgggaaagtttgggcagagggccctggatttctacagcattcatgtgaccaaggagtccacccaccccgtgaagcccctggcccagatcgccggaaacagatacgcctccggacctgtgggaaaggccctgagcgacgcatgtatgggcacaatcgcctccttcctgtctaagtaccaggacatcatcatcgaacaccagaaggtggtgaagggcaaccagaagagactggagagcctgcgggagctggccggcaaggaaaacctggaataccctagcgtgaccctgccacctcagcctcacaccaaggagggcgttgatgcctacaacgaagtgatcgcccgggtgcgaatgtgggtgaacctgaacctgtggcagaagctgaagctaagcagagatgatgccaagcctctgctgagactgaagggattcccttcctttcctctggtcgagagacaggccaacgaagtggactggtgggacatggtgtgtaacgtgaagaagctgatcaacgagaaaaaggaggatggcaaggtgttttggcagaatctggctggctacaagagacaggaagccctgagaccatacctgagcagcgaggaagatcggaagaagggaaagaaattcgctcggtaccagctgggcgacctgctgctgcacctggaaaagaagcacggcgaggactggggaaaggtgtacgacgaggcctgggagcggattgacaagaaagtggaaggcctgagcaagcacatcaagctggaagaggaacggagaagcgaggacgcccagagcaaggccgccctgaccgactggctgcgggctaaggccagcttcgtgatcgagggcctgaaggaggccgacaaggacgagttctgcagatgcgagctgaagctgcagaagtggtacggggacctgcggggaaagcccttcgccatcgaagccgagaacagcatcctggacatcagcggcttcagcaagcagtacaactgtgccttcatctggcagaaggacggcgtgaagaagctgaacctgtacctgatcatcaactacttcaagggcggcaagctgcggttcaagaagatcaaacctgaagccttcgaagccaacagattctacaccgtgatcaacaaaaagagcggcgagatcgtgcccatggaggtgaacttcaacttcgacgaccccaacctgatcatcctgcctctggcctttggcaagagacagggcagagaattcatctggaacgacctgctgtccctggaaaccggcagcctgaagctggccaacggaagagtgatcgagaagacactgtacaacagaagaacccggcaggatgagcctgccctgttcgtggccctgaccttcgagcggcgggaggtcctggactcctccaatatcaaaccaatgaacctgatcggcgtggcaagaggcgaaaacatccccgccgtgatcgccctgaccgaccccgagggctgcccactgagccggtttaaggatagcctgggaaacccaacccacatcctgagaatcggcgagagctataaggagaagcagcggaccatccaggccaagaaggaggtggagcagcggagagccggcggctacagccggaagtacgccagcaaagccaagaatctggcagacgatatggtgagaaacaccgctagagatctgctgtactacgccgtgacccaggatgccatgctgatcttcgccaacctgagccggggcttcggccggcagggcaagcggaccttcatggccgagagacagtacacacggatggaggactggctgaccgccaagctggcctacgagggcctgagcaagacctacctgtccaagacactggcccagtacacctccaagacatgcagcaactgtgggtttaccatcaccagcgccgactacgacagggtgctggagaagctgaagaagacagcaacaggctggatgaccacaattaacggcaaggagctgaaggtggagggccagattacctactacaacagatacaagagacagaacgtagtcaaggacctgtccgtcgagctggatagactgagcgaagaatctgtgaacaacgacatctcctcctggacaaagggcagaagcggagaagctctgagcctcctgaagaaaagattctcccatagacccgtgcaggagaagttcgtgtgcctgaactgcggcttcgagacacacgcagccgagcaagccgccctgaacatcgccagatcctggctgttcctgcggagccaggagtacaagaaataccagacaaacaagacaaccggcaacaccgataagagagccttcgtcgagacctggcagtccttttaccggaagaagcttaaggaggtgtggaaacctgccgtgcggtctggcggatctggcggaggctccaccagccccaagaaaaagagaaaagtctaagctgccttctgcggggcttgccttctggccatgcccttcttctctcccttgcacctgtacctcttggtctttgaataaagcctgagtaggaaggctagcaaaaaaaaaaaaaaaaaaaaaaaaaaaaaaaaaaaaaaaaaaaaaaaaaaaaaaaaaaaaaaaaaaaaaaaaaaaaaaaa

SEQ ID NO: 9458 - RNA, 8787 nt, synthetic construct
  source 1..8787: mol_type = other RNA
aggaaataagagagaaaagaagagtaagaagaaatataagagccaccatggcccctaagaagaagcgtaaagtgagccggatgaaccacgaccaggagttcgacccccctaaggtgtaccctcccgtccccgccgagaagagaaagcccatccgggtcctgagcctgttcgatggcatcgccaccggtctgctggtgctgaaggacctgggcatccaggtggataggtacattgcctccgaggtgtgcgaggactccatcaccgtgggaatggtgcgtcatcagggcaagatcatgtacgtgggcgacgtgcggagcgtgacacagaagcatatccaggagtggggccctttcgacctggtgatcggcggcagcccttgcaatgacctgagcatcgtgaacccagcccggaagggcctgtacgagggaaccggcagactgttcttcgagttttacagactgctgcacgacgcccggcctaaggaaggcgacgaccggcccttcttttggctgttcgagaatgtggtggccatgggagtcagcgacaagcgggatattagccggttcctggagagcaaccccgtgatgatcgatgccaaggaagtgagcgccgcccaccgggccagatacttctggggcaatctgcctggcatgaacagacccctggccagcaccgtgaacgacaagctggagctgcaggagtgcctggagcacggccggatcgccaagttcagcaaggtgagaaccatcaccacccgaagcaacagcatcaaacaaggcaaggaccagcactttcctgtgttcatgaacgagaaggaggacatcctgtggtgtaccgagatggagagagtgttcgggttcccagtccactacacagatgtcagcaacatgtctagactggccagacagagactgctgggaagaagctggtccgtccctgtgatcagacacctgttcgcccctctgaaggagtacttcgcctgcgtgagcagcggcaacagcaacgccaacagccggggccccagcttctctagcggcctggtgccactgtccctgagagggagccacatgggccccatggagatctacaaaaccgtgagcgcctggaagcggcagcctgtgcgcgtgctgagcctgtttcggaatatcgataaagtcctgaaaagcctgggattcctggagagcggctctggctccggcggtggcaccctgaagtacgtggaggatgtgacaaacgtggtcagacgggatgtggagaagtggggccccttcgatctggtgtacggcagcacccaacccctgggcagctcttgtgaccggtgccctggctggtacatgtttcagttccaccggatcctgcagtacgccctgccgagacaggagtcccagcggccattcttttggattttcatggacaacttgctgctgaccgaggatgaccaggaaactaccactcggttcctgcagaccgaagccgtgaccctgcaggacgtgagaggccgggactaccagaacgccatgcgggtgtggtccaacatccctggactgaaaagcaagcacgcacctctgacccctaaagaagaggagtacctgcaggcccaggtgcggagcagaagcaagctggacgcccctaaggtggatctgctggtgaagaattgcctcctgcccctgagagagtacttcaagtatttcagccagaatagtctgcccctgggaggcagcggcggcggcagccagggcctggtggccttcgaggacgtggccgtgtacttcagcctggaggagtgggagaggctggacgccgaccagagggagctgtaccaggaggtgatgcaggagaactacggcatcctggtgagcctgggctaccccatccccaagcccgacctgatcttcaggctggagcagggcgaggagccctgggtgcccgacagccccaggcccgaggagggcgacatcgtgaccggcgtgtacggcggcccaagcagcggcgcccctcctcccagcggcggcaggcggcccaagcagcggcgcccctcctcccagcggcggcagcccagccggctccccaacctctaccgaggagggcacctctgagtccgccacccccgagagcggccctggcacctccaccgagcccagcgagggcagcgcacccggcagccctgccggcagccccacctccacagaggagggaaccagcaccgagcccagcgaaggcagcgccccaggcaccagcaccgagcctagtgagcaggagattaaacggatcaacaagatcagaagaagacttgtgaaagacagcaacaccaagaaggccggcaagacaggccccatgaaaaccctgctggttagagtgatgacacccgatctgagagagcggctggaaaacctgagaaagaagcctgaaaatatcccccagcccatcagcaatacatctagagccaacctgaataagctgctgaccgattacaccgaaatgaagaaggcgatcctgcatgtgtactgggaagagttccagaaggaccctgtgggcctgatgagccgggtggcccagcctgccagcaagaagatcgatcagaacaagctgaaacctgagatggacgagaagggcaacctgaccaccgccggctttgcctgctctcagtgtggccagcccctgttcgtgtacaagctggagcaggtgtctgagaagggcaaggcttacaccaactacttcggacggtgcaatgtggccgagcacgaaaagctgatcctgctggcccagctgaagcccgagaaggatagcgacgaagccgtgacatatagcctgggaaagtttgggcagagggccctggatttctacagcattcatgtgaccaaggagtccacccaccccgtgaagcccctggcccagatcgccggaaacagatacgcctccggacctgtgggaaaggccctgagcgacgcatgtatgggcacaatcgcctccttcctgtctaagtaccaggacatcatcatcgaacaccagaaggtggtgaagggcaaccagaagagactggagagcctgcgggagctggccggcaaggaaaacctggaataccctagcgtgaccctgccacctcagcctcacaccaaggagggcgttgatgcctacaacgaagtgatcgcccgggtgcgaatgtgggtgaacctgaacctgtggcagaagctgaagctaagcagagatgatgccaagcctctgctgagactgaagggattcccttcctttcctctggtcgagagacaggccaacgaagtggactggtgggacatggtgtgtaacgtgaagaagctgatcaacgagaaaaaggaggatggcaaggtgttttggcagaatctggctggctacaagagacaggaagccctgagaccatacctgagcagcgaggaagatcggaagaagggaaagaaattcgctcggtaccagctgggcgacctgctgctgcacctggaaaagaagcacggcgaggactggggaaaggtgtacgacgaggcctgggagcggattgacaagaaagtggaaggcctgagcaagcacatcaagctggaagaggaacggagaagcgaggacgcccagagcaaggccgccctgaccgactggctgcgggctaaggccagcttcgtgatcgagggcctgaaggaggccgacaaggacgagttctgcagatgcgagctgaagctgcagaagtggtacggggacctgcggggaaagcccttcgccatcgaagccgagaacagcatcctggacatcagcggcttcagcaagcagtacaactgtgccttcatctggcagaaggacggcgtgaagaagctgaacctgtacctgatcatcaactacttcaagggcggcaagctgcggttcaagaagatcaaacctgaagccttcgaagccaacagattctacaccgtgatcaacaaaaagagcggcgagatcgtgcccatggaggtgaacttcaacttcgacgaccccaacctgatcatcctgcctctggcctttggcaagagacagggcagagaattcatctggaacgacctgctgtccctggaaaccggcagcctgaagctggccaacggaagagtgatcgagaagacactgtacaacagaagaacccggcaggatgagcctgccctgttcgtggccctgaccttcgagcggcgggaggtcctggactcctccaatatcaaaccaatgaacctgatcggcgtggcaagaggcgaaaacatccccgccgtgatcgccctgaccgaccccgagggctgcccactgagccggtttaaggatagcctgggaaacccaacccacatcctgagaatcggcgagagctataaggagaagcagcggaccatccaggccaagaaggaggtggagcagcggagagccggcggctacagccggaagtacgccagcaaagccaagaatctggcagacgatatggtgagaaacaccgctagagatctgctgtactacgccgtgacccaggatgccatgctgatcttcgccaacctgagccggggcttcggccggcagggcaagcggaccttcatggccgagagacagtacacacggatggaggactggctgaccgccaagctggcctacgagggcctgagcaagacctacctgtccaagacactggcccagtacacctccaagacatgcagcaactgtgggtttaccatcaccagcgccgactacgacagggtgctggagaagctgaagaagacagcaacaggctggatgaccacaattaacggcaaggagctgaaggtggagggccagattacctactacaacagatacaagagacagaacgtagtcaaggacctgtccgtcgagctggatagactgagcgaagaatctgtgaacaacgacatctcctcctggacaaagggcagaagcggagaagctctgagcctcctgaagaaaagattctcccatagacccgtgcaggagaagttcgtgtgcctgaactgcggcttcgagacacacgcagccgagcaagccgccctgaacatcgccagatcctggctgttcctgcggagccaggagtacaagaaataccagacaaacaagacaaccggcaacaccgataagagagccttcgtcgagacctggcagtccttttaccggaagaagcttaaggaggtgtggaaacctgccgtgcggtctggcggatctggcggaggctccaccagccccaagaaaaagagaaaagtctaagctgccttctgcggggcttgccttctggccatgcccttcttctctcccttgcacctgtacctcttggtctttgaataaagcctgagtaggaaggctagcaaaaaaaaaaaaaaaaaaaaaaaaaaaaaaaaaaaaaaaaaaaaaaaaaaaaaaaaaaaaaaaaaaaaaaaaaaaaaaaagcccagccggctccccaacctctaccgaggagggcacctctgagtccgccacccccgagagcggccctggcacctccaccgagcccagcgagggcagcgcacccggcagccctgccggcagccccacctccacagaggagggaaccagcaccgagcccagcgaaggcagcgccccaggcaccagcaccgagcctagtgagcaggagattaaacggatcaacaagatcagaagaagacttgtgaaagacagcaacaccaagaaggccggcaagacaggccccatgaaaaccctgctggttagagtgatgacacccgatctgagagagcggctggaaaacctgagaaagaagcctgaaaatatcccccagcccatcagcaatacatctagagccaacctgaataagctgctgaccgattacaccgaaatgaagaaggcgatcctgcatgtgtactgggaagagttccagaaggaccctgtgggcctgatgagccgggtggcccagcctgccagcaagaagatcgatcagaacaagctgaaacctgagatggacgagaagggcaacctgaccaccgccggctttgcctgctctcagtgtggccagcccctgttcgtgtacaagctggagcaggtgtctgagaagggcaaggcttacaccaactacttcggacggtgcaatgtggccgagcacgaaaagctgatcctgctggcccagctgaagcccgagaaggatagcgacgaagccgtgacatatagcctgggaaagtttgggcagagggccctggatttctacagcattcatgtgaccaaggagtccacccaccccgtgaagcccctggcccagatcgccggaaacagatacgcctccggacctgtgggaaaggccctgagcgacgcatgtatgggcacaatcgcctccttcctgtctaagtaccaggacatcatcatcgaacaccagaaggtggtgaagggcaaccagaagagactggagagcctgcgggagctggccggcaaggaaaacctggaataccctagcgtgaccctgccacctcagcctcacaccaaggagggcgttgatgcctacaacgaagtgatcgcccgggtgcgaatgtgggtgaacctgaacctgtggcagaagctgaagctaagcagagatgatgccaagcctctgctgagactgaagggattcccttcctttcctctggtcgagagacaggccaacgaagtggactggtgggacatggtgtgtaacgtgaagaagctgatcaacgagaaaaaggaggatggcaaggtgttttggcagaatctggctggctacaagagacaggaagccctgagaccatacctgagcagcgaggaagatcggaagaagggaaagaaattcgctcggtaccagctgggcgacctgctgctgcacctggaaaagaagcacggcgaggactggggaaaggtgtacgacgaggcctgggagcggattgacaagaaagtggaaggcctgagcaagcacatcaagctggaagaggaacggagaagcgaggacgcccagagcaaggccgccctgaccgactggctgcgggctaaggccagcttcgtgatcgagggcctgaaggaggccgacaaggacgagttctgcagatgcgagctgaagctgcagaagtggtacggggacctgcggggaaagcccttcgccatcgaagccgagaacagcatcctggacatcagcggcttcagcaagcagtacaactgtgccttcatctggcagaaggacggcgtgaagaagctgaacctgtacctgatcatcaactacttcaagggcggcaagctgcggttcaagaagatcaaacctgaagccttcgaagccaacagattctacaccgtgatcaacaaaaagagcggcgagatcgtgcccatggaggtgaacttcaacttcgacgaccccaacctgatcatcctgcctctggcctttggcaagagacagggcagagaattcatctggaacgacctgctgtccctggaaaccggcagcctgaagctggccaacggaagagtgatcgagaagacactgtacaacagaagaacccggcaggatgagcctgccctgttcgtggccctgaccttcgagcggcgggaggtcctggactcctccaatatcaaaccaatgaacctgatcggcgtggcaagaggcgaaaacatccccgccgtgatcgccctgaccgaccccgagggctgcccactgagccggtttaaggatagcctgggaaacccaacccacatcctgagaatcggcgagagctataaggagaagcagcggaccatccaggccaagaaggaggtggagcagcggagagccggcggctacagccggaagtacgccagcaaagccaagaatctggcagacgatatggtgagaaacaccgctagagatctgctgtactacgccgtgacccaggatgccatgctgatcttcgccaacctgagccggggcttcggccggcagggcaagcggaccttcatggccgagagacagtacacacggatggaggactggctgaccgccaagctggcctacgagggcctgagcaagacctacctgtccaagacactggcccagtacacctccaagacatgcagcaactgtgggtttaccatcaccagcgccgactacgacagggtgctggagaagctgaagaagacagcaacaggctggatgaccacaattaacggcaaggagctgaaggtggagggccagattacctactacaacagatacaagagacagaacgtagtcaaggacctgtccgtcgagctggatagactgagcgaagaatctgtgaacaacgacatctcctcctggacaaagggcagaagcggagaagctctgagcctcctgaagaaaagattctcccatagacccgtgcaggagaagttcgtgtgcctgaactgcggcttcgagacacacgcagccgagcaagccgccctgaacatcgccagatcctggctgttcctgcggagccaggagtacaagaaataccagacaaacaagacaaccggcaacaccgataagagagccttcgtcgagacctggcagtccttttaccggaagaagcttaaggaggtgtggaaacctgccgtgcggtctggcggatctggcggaggctccaccagccccaagaaaaagagaaaagtctaagctgccttctgcggggcttgccttctggccatgcccttcttctctcccttgcacctgtacctcttggtctttgaataaagcctgagtaggaaggctagcaaaaaaaaaaaaaaaaaaaaaaaaaaaaaaaaaaaaaaaaaaaaaaaaaaaaaaaaaaaaaaaaaaaaaaaaaaaaaaaa

SEQ ID NO: 9459 - RNA, 8787 nt, synthetic construct
  source 1..8787: mol_type = other RNA
aggaaataagagagaaaagaagagtaagaagaaatataagagccaccatggcccctaagaagaagcgtaaagtgagccggatgaaccacgaccaggagttcgacccccctaaggtgtaccctcccgtccccgccgagaagagaaagcccatccgggtcctgagcctgttcgatggcatcgccaccggtctgctggtgctgaaggacctgggcatccaggtggataggtacattgcctccgaggtgtgcgaggactccatcaccgtgggaatggtgcgtcatcagggcaagatcatgtacgtgggcgacgtgcggagcgtgacacagaagcatatccaggagtggggccctttcgacctggtgatcggcggcagcccttgcaatgacctgagcatcgtgaacccagcccggaagggcctgtacgagggaaccggcagactgttcttcgagttttacagactgctgcacgacgcccggcctaaggaaggcgacgaccggcccttcttttggctgttcgagaatgtggtggccatgggagtcagcgacaagcgggatattagccggttcctggagagcaaccccgtgatgatcgatgccaaggaagtgagcgccgcccaccgggccagatacttctggggcaatctgcctggcatgaacagacccctggccagcaccgtgaacgacaagctggagctgcaggagtgcctggagcacggccggatcgccaagttcagcaaggtgagaaccatcaccacccgaagcaacagcatcaaacaaggcaaggaccagcactttcctgtgttcatgaacgagaaggaggacatcctgtggtgtaccgagatggagagagtgttcgggttcccagtccactacacagatgtcagcaacatgtctagactggccagacagagactgctgggaagaagctggtccgtccctgtgatcagacacctgttcgcccctctgaaggagtacttcgcctgcgtgagcagcggcaacagcaacgccaacagccggggccccagcttctctagcggcctggtgccactgtccctgagagggagccacatgggccccatggagatctacaaaaccgtgagcgcctggaagcggcagcctgtgcgcgtgctgagcctgtttcggaatatcgataaagtcctgaaaagcctgggattcctggagagcggctctggctccggcggtggcaccctgaagtacgtggaggatgtgacaaacgtggtcagacgggatgtggagaagtggggccccttcgatctggtgtacggcagcacccaacccctgggcagctcttgtgaccggtgccctggctggtacatgtttcagttccaccggatcctgcagtacgccctgccgagacaggagtcccagcggccattcttttggattttcatggacaacttgctgctgaccgaggatgaccaggaaactaccactcggttcctgcagaccgaagccgtgaccctgcaggacgtgagaggccgggactaccagaacgccatgcgggtgtggtccaacatccctggactgaaaagcaagcacgcacctctgacccctaaagaagaggagtacctgcaggcccaggtgcggagcagaagcaagctggacgcccctaaggtggatctgctggtgaagaattgcctcctgcccctgagagagtacttcaagtatttcagccagaatagtctgcccctgggaggcagcggcggcggcttccaggagcccgtgaccttcgaggacgtggccgtgtacttcacccagaaccagtgggccagcctggacagcgcccagagggccctgtacagggaggtgatgctggagaactacgccaacgtggccagcctggtgagccccttccccaggcccgacctgatcagccagctggagaggggcgaggccccctgggaccccgacccctgggaggccgaggacctgaggggcatctgccccggcggcggcggcccaagcagcggcgcccctcctcccagcggcggcaggcggcccaagcagcggcgcccctcctcccagcggcggcagcccagccggctccccaacctctaccgaggagggcacctctgagtccgccacccccgagagcggccctggcacctccaccgagcccagcgagggcagcgcacccggcagccctgccggcagccccacctccacagaggagggaaccagcaccgagcccagcgaaggcagcgccccaggcaccagcaccgagcctagtgagcaggagattaaacggatcaacaagatcagaagaagacttgtgaaagacagcaacaccaagaaggccggcaagacaggccccatgaaaaccctgctggttagagtgatgacacccgatctgagagagcggctggaaaacctgagaaagaagcctgaaaatatcccccagcccatcagcaatacatctagagccaacctgaataagctgctgaccgattacaccgaaatgaagaaggcgatcctgcatgtgtactgggaagagttccagaaggaccctgtgggcctgatgagccgggtggcccagcctgccagcaagaagatcgatcagaacaagctgaaacctgagatggacgagaagggcaacctgaccaccgccggctttgcctgctctcagtgtggccagcccctgttcgtgtacaagctggagcaggtgtctgagaagggcaaggcttacaccaactacttcggacggtgcaatgtggccgagcacgaaaagctgatcctgctggcccagctgaagcccgagaaggatagcgacgaagccgtgacatatagcctgggaaagtttgggcagagggccctggatttctacagcattcatgtgaccaaggagtccacccaccccgtgaagcccctggcccagatcgccggaaacagatacgcctccggacctgtgggaaaggccctgagcgacgcatgtatgggcacaatcgcctccttcctgtctaagtaccaggacatcatcatcgaacaccagaaggtggtgaagggcaaccagaagagactggagagcctgcgggagctggccggcaaggaaaacctggaataccctagcgtgaccctgccacctcagcctcacaccaaggagggcgttgatgcctacaacgaagtgatcgcccgggtgcgaatgtgggtgaacctgaacctgtggcagaagctgaagctaagcagagatgatgccaagcctctgctgagactgaagggattcccttcctttcctctggtcgagagacaggccaacgaagtggactggtgggacatggtgtgtaacgtgaagaagctgatcaacgagaaaaaggaggatggcaaggtgttttggcagaatctggctggctacaagagacaggaagccctgagaccatacctgagcagcgaggaagatcggaagaagggaaagaaattcgctcggtaccagctgggcgacctgctgctgcacctggaaaagaagcacggcgaggactggggaaaggtgtacgacgaggcctgggagcggattgacaagaaagtggaaggcctgagcaagcacatcaagctggaagaggaacggagaagcgaggacgcccagagcaaggccgccctgaccgactggctgcgggctaaggccagcttcgtgatcgagggcctgaaggaggccgacaaggacgagttctgcagatgcgagctgaagctgcagaagtggtacggggacctgcggggaaagcccttcgccatcgaagccgagaacagcatcctggacatcagcggcttcagcaagcagtacaactgtgccttcatctggcagaaggacggcgtgaagaagctgaacctgtacctgatcatcaactacttcaagggcggcaagctgcggttcaagaagatcaaacctgaagccttcgaagccaacagattctacaccgtgatcaacaaaaagagcggcgagatcgtgcccatggaggtgaacttcaacttcgacgaccccaacctgatcatcctgcctctggcctttggcaagagacagggcagagaattcatctggaacgacctgctgtccctggaaaccggcagcctgaagctggccaacggaagagtgatcgagaagacactgtacaacagaagaacccggcaggatgagcctgccctgttcgtggccctgaccttcgagcggcgggaggtcctggactcctccaatatcaaaccaatgaacctgatcggcgtggcaagaggcgaaaacatccccgccgtgatcgccctgaccgaccccgagggctgcccactgagccggtttaaggatagcctgggaaacccaacccacatcctgagaatcggcgagagctataaggagaagcagcggaccatccaggccaagaaggaggtggagcagcggagagccggcggctacagccggaagtacgccagcaaagccaagaatctggcagacgatatggtgagaaacaccgctagagatctgctgtactacgccgtgacccaggatgccatgctgatcttcgccaacctgagccggggcttcggccggcagggcaagcggaccttcatggccgagagacagtacacacggatggaggactggctgaccgccaagctggcctacgagggcctgagcaagacctacctgtccaagacactggcccagtacacctccaagacatgcagcaactgtgggtttaccatcaccagcgccgactacgacagggtgctggagaagctgaagaagacagcaacaggctggatgaccacaattaacggcaaggagctgaaggtggagggccagattacctactacaacagatacaagagacagaacgtagtcaaggacctgtccgtcgagctggatagactgagcgaagaatctgtgaacaacgacatctcctcctggacaaagggcagaagcggagaagctctgagcctcctgaagaaaagattctcccatagacccgtgcaggagaagttcgtgtgcctgaactgcggcttcgagacacacgcagccgagcaagccgccctgaacatcgccagatcctggctgttcctgcggagccaggagtacaagaaataccagacaaacaagacaaccggcaacaccgataagagagccttcgtcgagacctggcagtccttttaccggaagaagcttaaggaggtgtggaaacctgccgtgcggtctggcggatctggcggaggctccaccagccccaagaaaaagagaaaagtctaagctgccttctgcggggcttgccttctggccatgcccttcttctctcccttgcacctgtacctcttggtctttgaataaagcctgagtaggaaggctagcaaaaaaaaaaaaaaaaaaaaaaaaaaaaaaaaaaaaaaaaaaaaaaaaaaaaaaaaaaaaaaaaaaaaaaaaaaaaaaaagcccagccggctccccaacctctaccgaggagggcacctctgagtccgccacccccgagagcggccctggcacctccaccgagcccagcgagggcagcgcacccggcagccctgccggcagccccacctccacagaggagggaaccagcaccgagcccagcgaaggcagcgccccaggcaccagcaccgagcctagtgagcaggagattaaacggatcaacaagatcagaagaagacttgtgaaagacagcaacaccaagaaggccggcaagacaggccccatgaaaaccctgctggttagagtgatgacacccgatctgagagagcggctggaaaacctgagaaagaagcctgaaaatatcccccagcccatcagcaatacatctagagccaacctgaataagctgctgaccgattacaccgaaatgaagaaggcgatcctgcatgtgtactgggaagagttccagaaggaccctgtgggcctgatgagccgggtggcccagcctgccagcaagaagatcgatcagaacaagctgaaacctgagatggacgagaagggcaacctgaccaccgccggctttgcctgctctcagtgtggccagcccctgttcgtgtacaagctggagcaggtgtctgagaagggcaaggcttacaccaactacttcggacggtgcaatgtggccgagcacgaaaagctgatcctgctggcccagctgaagcccgagaaggatagcgacgaagccgtgacatatagcctgggaaagtttgggcagagggccctggatttctacagcattcatgtgaccaaggagtccacccaccccgtgaagcccctggcccagatcgccggaaacagatacgcctccggacctgtgggaaaggccctgagcgacgcatgtatgggcacaatcgcctccttcctgtctaagtaccaggacatcatcatcgaacaccagaaggtggtgaagggcaaccagaagagactggagagcctgcgggagctggccggcaaggaaaacctggaataccctagcgtgaccctgccacctcagcctcacaccaaggagggcgttgatgcctacaacgaagtgatcgcccgggtgcgaatgtgggtgaacctgaacctgtggcagaagctgaagctaagcagagatgatgccaagcctctgctgagactgaagggattcccttcctttcctctggtcgagagacaggccaacgaagtggactggtgggacatggtgtgtaacgtgaagaagctgatcaacgagaaaaaggaggatggcaaggtgttttggcagaatctggctggctacaagagacaggaagccctgagaccatacctgagcagcgaggaagatcggaagaagggaaagaaattcgctcggtaccagctgggcgacctgctgctgcacctggaaaagaagcacggcgaggactggggaaaggtgtacgacgaggcctgggagcggattgacaagaaagtggaaggcctgagcaagcacatcaagctggaagaggaacggagaagcgaggacgcccagagcaaggccgccctgaccgactggctgcgggctaaggccagcttcgtgatcgagggcctgaaggaggccgacaaggacgagttctgcagatgcgagctgaagctgcagaagtggtacggggacctgcggggaaagcccttcgccatcgaagccgagaacagcatcctggacatcagcggcttcagcaagcagtacaactgtgccttcatctggcagaaggacggcgtgaagaagctgaacctgtacctgatcatcaactacttcaagggcggcaagctgcggttcaagaagatcaaacctgaagccttcgaagccaacagattctacaccgtgatcaacaaaaagagcggcgagatcgtgcccatggaggtgaacttcaacttcgacgaccccaacctgatcatcctgcctctggcctttggcaagagacagggcagagaattcatctggaacgacctgctgtccctggaaaccggcagcctgaagctggccaacggaagagtgatcgagaagacactgtacaacagaagaacccggcaggatgagcctgccctgttcgtggccctgaccttcgagcggcgggaggtcctggactcctccaatatcaaaccaatgaacctgatcggcgtggcaagaggcgaaaacatccccgccgtgatcgccctgaccgaccccgagggctgcccactgagccggtttaaggatagcctgggaaacccaacccacatcctgagaatcggcgagagctataaggagaagcagcggaccatccaggccaagaaggaggtggagcagcggagagccggcggctacagccggaagtacgccagcaaagccaagaatctggcagacgatatggtgagaaacaccgctagagatctgctgtactacgccgtgacccaggatgccatgctgatcttcgccaacctgagccggggcttcggccggcagggcaagcggaccttcatggccgagagacagtacacacggatggaggactggctgaccgccaagctggcctacgagggcctgagcaagacctacctgtccaagacactggcccagtacacctccaagacatgcagcaactgtgggtttaccatcaccagcgccgactacgacagggtgctggagaagctgaagaagacagcaacaggctggatgaccacaattaacggcaaggagctgaaggtggagggccagattacctactacaacagatacaagagacagaacgtagtcaaggacctgtccgtcgagctggatagactgagcgaagaatctgtgaacaacgacatctcctcctggacaaagggcagaagcggagaagctctgagcctcctgaagaaaagattctcccatagacccgtgcaggagaagttcgtgtgcctgaactgcggcttcgagacacacgcagccgagcaagccgccctgaacatcgccagatcctggctgttcctgcggagccaggagtacaagaaataccagacaaacaagacaaccggcaacaccgataagagagccttcgtcgagacctggcagtccttttaccggaagaagcttaaggaggtgtggaaacctgccgtgcggtctggcggatctggcggaggctccaccagccccaagaaaaagagaaaagtctaagctgccttctgcggggcttgccttctggccatgcccttcttctctcccttgcacctgtacctcttggtctttgaataaagcctgagtaggaaggctagcaaaaaaaaaaaaaaaaaaaaaaaaaaaaaaaaaaaaaaaaaaaaaaaaaaaaaaaaaaaaaaaaaaaaaaaaaaaaaaaa

SEQ ID NO: 9460 - RNA, 8787 nt, synthetic construct
  source 1..8787: mol_type = other RNA
aggaaataagagagaaaagaagagtaagaagaaatataagagccaccatggcccctaagaagaagcgtaaagtgagccggatgaaccacgaccaggagttcgacccccctaaggtgtaccctcccgtccccgccgagaagagaaagcccatccgggtcctgagcctgttcgatggcatcgccaccggtctgctggtgctgaaggacctgggcatccaggtggataggtacattgcctccgaggtgtgcgaggactccatcaccgtgggaatggtgcgtcatcagggcaagatcatgtacgtgggcgacgtgcggagcgtgacacagaagcatatccaggagtggggccctttcgacctggtgatcggcggcagcccttgcaatgacctgagcatcgtgaacccagcccggaagggcctgtacgagggaaccggcagactgttcttcgagttttacagactgctgcacgacgcccggcctaaggaaggcgacgaccggcccttcttttggctgttcgagaatgtggtggccatgggagtcagcgacaagcgggatattagccggttcctggagagcaaccccgtgatgatcgatgccaaggaagtgagcgccgcccaccgggccagatacttctggggcaatctgcctggcatgaacagacccctggccagcaccgtgaacgacaagctggagctgcaggagtgcctggagcacggccggatcgccaagttcagcaaggtgagaaccatcaccacccgaagcaacagcatcaaacaaggcaaggaccagcactttcctgtgttcatgaacgagaaggaggacatcctgtggtgtaccgagatggagagagtgttcgggttcccagtccactacacagatgtcagcaacatgtctagactggccagacagagactgctgggaagaagctggtccgtccctgtgatcagacacctgttcgcccctctgaaggagtacttcgcctgcgtgagcagcggcaacagcaacgccaacagccggggccccagcttctctagcggcctggtgccactgtccctgagagggagccacatgggccccatggagatctacaaaaccgtgagcgcctggaagcggcagcctgtgcgcgtgctgagcctgtttcggaatatcgataaagtcctgaaaagcctgggattcctggagagcggctctggctccggcggtggcaccctgaagtacgtggaggatgtgacaaacgtggtcagacgggatgtggagaagtggggccccttcgatctggtgtacggcagcacccaacccctgggcagctcttgtgaccggtgccctggctggtacatgtttcagttccaccggatcctgcagtacgccctgccgagacaggagtcccagcggccattcttttggattttcatggacaacttgctgctgaccgaggatgaccaggaaactaccactcggttcctgcagaccgaagccgtgaccctgcaggacgtgagaggccgggactaccagaacgccatgcgggtgtggtccaacatccctggactgaaaagcaagcacgcacctctgacccctaaagaagaggagtacctgcaggcccaggtgcggagcagaagcaagctggacgcccctaaggtggatctgctggtgaagaattgcctcctgcccctgagagagtacttcaagtatttcagccagaatagtctgcccctgggaggcagcggcggcggcgtgaccttcgacgacgtggccgtgaacttcaccatggaggagtgggccctgctggaccccagccagaagaagctgtacagggacgtgatgtgggagaacttcaggaacgtgaccgccatcggcaggaactgggacaaccagcagatcgaggaccagtacaagaactacaggaacaacctgaggaagaccagcgccgacttccagagcctgcagaagcacgccatgaccaaccccgaggagaagggcggcccaagcagcggcgcccctcctcccagcggcggcaggcggcccaagcagcggcgcccctcctcccagcggcggcagcccagccggctccccaacctctaccgaggagggcacctctgagtccgccacccccgagagcggccctggcacctccaccgagcccagcgagggcagcgcacccggcagccctgccggcagccccacctccacagaggagggaaccagcaccgagcccagcgaaggcagcgccccaggcaccagcaccgagcctagtgagcaggagattaaacggatcaacaagatcagaagaagacttgtgaaagacagcaacaccaagaaggccggcaagacaggccccatgaaaaccctgctggttagagtgatgacacccgatctgagagagcggctggaaaacctgagaaagaagcctgaaaatatcccccagcccatcagcaatacatctagagccaacctgaataagctgctgaccgattacaccgaaatgaagaaggcgatcctgcatgtgtactgggaagagttccagaaggaccctgtgggcctgatgagccgggtggcccagcctgccagcaagaagatcgatcagaacaagctgaaacctgagatggacgagaagggcaacctgaccaccgccggctttgcctgctctcagtgtggccagcccctgttcgtgtacaagctggagcaggtgtctgagaagggcaaggcttacaccaactacttcggacggtgcaatgtggccgagcacgaaaagctgatcctgctggcccagctgaagcccgagaaggatagcgacgaagccgtgacatatagcctgggaaagtttgggcagagggccctggatttctacagcattcatgtgaccaaggagtccacccaccccgtgaagcccctggcccagatcgccggaaacagatacgcctccggacctgtgggaaaggccctgagcgacgcatgtatgggcacaatcgcctccttcctgtctaagtaccaggacatcatcatcgaacaccagaaggtggtgaagggcaaccagaagagactggagagcctgcgggagctggccggcaaggaaaacctggaataccctagcgtgaccctgccacctcagcctcacaccaaggagggcgttgatgcctacaacgaagtgatcgcccgggtgcgaatgtgggtgaacctgaacctgtggcagaagctgaagctaagcagagatgatgccaagcctctgctgagactgaagggattcccttcctttcctctggtcgagagacaggccaacgaagtggactggtgggacatggtgtgtaacgtgaagaagctgatcaacgagaaaaaggaggatggcaaggtgttttggcagaatctggctggctacaagagacaggaagccctgagaccatacctgagcagcgaggaagatcggaagaagggaaagaaattcgctcggtaccagctgggcgacctgctgctgcacctggaaaagaagcacggcgaggactggggaaaggtgtacgacgaggcctgggagcggattgacaagaaagtggaaggcctgagcaagcacatcaagctggaagaggaacggagaagcgaggacgcccagagcaaggccgccctgaccgactggctgcgggctaaggccagcttcgtgatcgagggcctgaaggaggccgacaaggacgagttctgcagatgcgagctgaagctgcagaagtggtacggggacctgcggggaaagcccttcgccatcgaagccgagaacagcatcctggacatcagcggcttcagcaagcagtacaactgtgccttcatctggcagaaggacggcgtgaagaagctgaacctgtacctgatcatcaactacttcaagggcggcaagctgcggttcaagaagatcaaacctgaagccttcgaagccaacagattctacaccgtgatcaacaaaaagagcggcgagatcgtgcccatggaggtgaacttcaacttcgacgaccccaacctgatcatcctgcctctggcctttggcaagagacagggcagagaattcatctggaacgacctgctgtccctggaaaccggcagcctgaagctggccaacggaagagtgatcgagaagacactgtacaacagaagaacccggcaggatgagcctgccctgttcgtggccctgaccttcgagcggcgggaggtcctggactcctccaatatcaaaccaatgaacctgatcggcgtggcaagaggcgaaaacatccccgccgtgatcgccctgaccgaccccgagggctgcccactgagccggtttaaggatagcctgggaaacccaacccacatcctgagaatcggcgagagctataaggagaagcagcggaccatccaggccaagaaggaggtggagcagcggagagccggcggctacagccggaagtacgccagcaaagccaagaatctggcagacgatatggtgagaaacaccgctagagatctgctgtactacgccgtgacccaggatgccatgctgatcttcgccaacctgagccggggcttcggccggcagggcaagcggaccttcatggccgagagacagtacacacggatggaggactggctgaccgccaagctggcctacgagggcctgagcaagacctacctgtccaagacactggcccagtacacctccaagacatgcagcaactgtgggtttaccatcaccagcgccgactacgacagggtgctggagaagctgaagaagacagcaacaggctggatgaccacaattaacggcaaggagctgaaggtggagggccagattacctactacaacagatacaagagacagaacgtagtcaaggacctgtccgtcgagctggatagactgagcgaagaatctgtgaacaacgacatctcctcctggacaaagggcagaagcggagaagctctgagcctcctgaagaaaagattctcccatagacccgtgcaggagaagttcgtgtgcctgaactgcggcttcgagacacacgcagccgagcaagccgccctgaacatcgccagatcctggctgttcctgcggagccaggagtacaagaaataccagacaaacaagacaaccggcaacaccgataagagagccttcgtcgagacctggcagtccttttaccggaagaagcttaaggaggtgtggaaacctgccgtgcggtctggcggatctggcggaggctccaccagccccaagaaaaagagaaaagtctaagctgccttctgcggggcttgccttctggccatgcccttcttctctcccttgcacctgtacctcttggtctttgaataaagcctgagtaggaaggctagcaaaaaaaaaaaaaaaaaaaaaaaaaaaaaaaaaaaaaaaaaaaaaaaaaaaaaaaaaaaaaaaaaaaaaaaaaaaaaaaagcccagccggctccccaacctctaccgaggagggcacctctgagtccgccacccccgagagcggccctggcacctccaccgagcccagcgagggcagcgcacccggcagccctgccggcagccccacctccacagaggagggaaccagcaccgagcccagcgaaggcagcgccccaggcaccagcaccgagcctagtgagcaggagattaaacggatcaacaagatcagaagaagacttgtgaaagacagcaacaccaagaaggccggcaagacaggccccatgaaaaccctgctggttagagtgatgacacccgatctgagagagcggctggaaaacctgagaaagaagcctgaaaatatcccccagcccatcagcaatacatctagagccaacctgaataagctgctgaccgattacaccgaaatgaagaaggcgatcctgcatgtgtactgggaagagttccagaaggaccctgtgggcctgatgagccgggtggcccagcctgccagcaagaagatcgatcagaacaagctgaaacctgagatggacgagaagggcaacctgaccaccgccggctttgcctgctctcagtgtggccagcccctgttcgtgtacaagctggagcaggtgtctgagaagggcaaggcttacaccaactacttcggacggtgcaatgtggccgagcacgaaaagctgatcctgctggcccagctgaagcccgagaaggatagcgacgaagccgtgacatatagcctgggaaagtttgggcagagggccctggatttctacagcattcatgtgaccaaggagtccacccaccccgtgaagcccctggcccagatcgccggaaacagatacgcctccggacctgtgggaaaggccctgagcgacgcatgtatgggcacaatcgcctccttcctgtctaagtaccaggacatcatcatcgaacaccagaaggtggtgaagggcaaccagaagagactggagagcctgcgggagctggccggcaaggaaaacctggaataccctagcgtgaccctgccacctcagcctcacaccaaggagggcgttgatgcctacaacgaagtgatcgcccgggtgcgaatgtgggtgaacctgaacctgtggcagaagctgaagctaagcagagatgatgccaagcctctgctgagactgaagggattcccttcctttcctctggtcgagagacaggccaacgaagtggactggtgggacatggtgtgtaacgtgaagaagctgatcaacgagaaaaaggaggatggcaaggtgttttggcagaatctggctggctacaagagacaggaagccctgagaccatacctgagcagcgaggaagatcggaagaagggaaagaaattcgctcggtaccagctgggcgacctgctgctgcacctggaaaagaagcacggcgaggactggggaaaggtgtacgacgaggcctgggagcggattgacaagaaagtggaaggcctgagcaagcacatcaagctggaagaggaacggagaagcgaggacgcccagagcaaggccgccctgaccgactggctgcgggctaaggccagcttcgtgatcgagggcctgaaggaggccgacaaggacgagttctgcagatgcgagctgaagctgcagaagtggtacggggacctgcggggaaagcccttcgccatcgaagccgagaacagcatcctggacatcagcggcttcagcaagcagtacaactgtgccttcatctggcagaaggacggcgtgaagaagctgaacctgtacctgatcatcaactacttcaagggcggcaagctgcggttcaagaagatcaaacctgaagccttcgaagccaacagattctacaccgtgatcaacaaaaagagcggcgagatcgtgcccatggaggtgaacttcaacttcgacgaccccaacctgatcatcctgcctctggcctttggcaagagacagggcagagaattcatctggaacgacctgctgtccctggaaaccggcagcctgaagctggccaacggaagagtgatcgagaagacactgtacaacagaagaacccggcaggatgagcctgccctgttcgtggccctgaccttcgagcggcgggaggtcctggactcctccaatatcaaaccaatgaacctgatcggcgtggcaagaggcgaaaacatccccgccgtgatcgccctgaccgaccccgagggctgcccactgagccggtttaaggatagcctgggaaacccaacccacatcctgagaatcggcgagagctataaggagaagcagcggaccatccaggccaagaaggaggtggagcagcggagagccggcggctacagccggaagtacgccagcaaagccaagaatctggcagacgatatggtgagaaacaccgctagagatctgctgtactacgccgtgacccaggatgccatgctgatcttcgccaacctgagccggggcttcggccggcagggcaagcggaccttcatggccgagagacagtacacacggatggaggactggctgaccgccaagctggcctacgagggcctgagcaagacctacctgtccaagacactggcccagtacacctccaagacatgcagcaactgtgggtttaccatcaccagcgccgactacgacagggtgctggagaagctgaagaagacagcaacaggctggatgaccacaattaacggcaaggagctgaaggtggagggccagattacctactacaacagatacaagagacagaacgtagtcaaggacctgtccgtcgagctggatagactgagcgaagaatctgtgaacaacgacatctcctcctggacaaagggcagaagcggagaagctctgagcctcctgaagaaaagattctcccatagacccgtgcaggagaagttcgtgtgcctgaactgcggcttcgagacacacgcagccgagcaagccgccctgaacatcgccagatcctggctgttcctgcggagccaggagtacaagaaataccagacaaacaagacaaccggcaacaccgataagagagccttcgtcgagacctggcagtccttttaccggaagaagcttaaggaggtgtggaaacctgccgtgcggtctggcggatctggcggaggctccaccagccccaagaaaaagagaaaagtctaagctgccttctgcggggcttgccttctggccatgcccttcttctctcccttgcacctgtacctcttggtctttgaataaagcctgagtaggaaggctagcaaaaaaaaaaaaaaaaaaaaaaaaaaaaaaaaaaaaaaaaaaaaaaaaaaaaaaaaaaaaaaaaaaaaaaaaaaaaaaaa

SEQ ID NO: 9461 - RNA, 8787 nt, synthetic construct
  source 1..8787: mol_type = other RNA
aggaaataagagagaaaagaagagtaagaagaaatataagagccaccatggcccctaagaagaagcgtaaagtgagccggatgaaccacgaccaggagttcgacccccctaaggtgtaccctcccgtccccgccgagaagagaaagcccatccgggtcctgagcctgttcgatggcatcgccaccggtctgctggtgctgaaggacctgggcatccaggtggataggtacattgcctccgaggtgtgcgaggactccatcaccgtgggaatggtgcgtcatcagggcaagatcatgtacgtgggcgacgtgcggagcgtgacacagaagcatatccaggagtggggccctttcgacctggtgatcggcggcagcccttgcaatgacctgagcatcgtgaacccagcccggaagggcctgtacgagggaaccggcagactgttcttcgagttttacagactgctgcacgacgcccggcctaaggaaggcgacgaccggcccttcttttggctgttcgagaatgtggtggccatgggagtcagcgacaagcgggatattagccggttcctggagagcaaccccgtgatgatcgatgccaaggaagtgagcgccgcccaccgggccagatacttctggggcaatctgcctggcatgaacagacccctggccagcaccgtgaacgacaagctggagctgcaggagtgcctggagcacggccggatcgccaagttcagcaaggtgagaaccatcaccacccgaagcaacagcatcaaacaaggcaaggaccagcactttcctgtgttcatgaacgagaaggaggacatcctgtggtgtaccgagatggagagagtgttcgggttcccagtccactacacagatgtcagcaacatgtctagactggccagacagagactgctgggaagaagctggtccgtccctgtgatcagacacctgttcgcccctctgaaggagtacttcgcctgcgtgagcagcggcaacagcaacgccaacagccggggccccagcttctctagcggcctggtgccactgtccctgagagggagccacatgggccccatggagatctacaaaaccgtgagcgcctggaagcggcagcctgtgcgcgtgctgagcctgtttcggaatatcgataaagtcctgaaaagcctgggattcctggagagcggctctggctccggcggtggcaccctgaagtacgtggaggatgtgacaaacgtggtcagacgggatgtggagaagtggggccccttcgatctggtgtacggcagcacccaacccctgggcagctcttgtgaccggtgccctggctggtacatgtttcagttccaccggatcctgcagtacgccctgccgagacaggagtcccagcggccattcttttggattttcatggacaacttgctgctgaccgaggatgaccaggaaactaccactcggttcctgcagaccgaagccgtgaccctgcaggacgtgagaggccgggactaccagaacgccatgcgggtgtggtccaacatccctggactgaaaagcaagcacgcacctctgacccctaaagaagaggagtacctgcaggcccaggtgcggagcagaagcaagctggacgcccctaaggtggatctgctggtgaagaattgcctcctgcccctgagagagtacttcaagtatttcagccagaatagtctgcccctgggaggcagcggcggcggccccaaggtgcccgtgagcttcgaggacgtggccatgtacttcaccaagaccgagtggaagctgctggaccacaggcagaggaagctgtacaagcaggtgatgctggagaactaccaccacctggtgagcctgggcttcagcttcgccaagccccagctggtgatccagctggagcagggccagaagccctgggtggccgacgtgcacaggatgaggatcaccaccggcatgcaggccggcgacggcggcccaagcagcggcgcccctcctcccagcggcggcaggcggcccaagcagcggcgcccctcctcccagcggcggcagcccagccggctccccaacctctaccgaggagggcacctctgagtccgccacccccgagagcggccctggcacctccaccgagcccagcgagggcagcgcacccggcagccctgccggcagccccacctccacagaggagggaaccagcaccgagcccagcgaaggcagcgccccaggcaccagcaccgagcctagtgagcaggagattaaacggatcaacaagatcagaagaagacttgtgaaagacagcaacaccaagaaggccggcaagacaggccccatgaaaaccctgctggttagagtgatgacacccgatctgagagagcggctggaaaacctgagaaagaagcctgaaaatatcccccagcccatcagcaatacatctagagccaacctgaataagctgctgaccgattacaccgaaatgaagaaggcgatcctgcatgtgtactgggaagagttccagaaggaccctgtgggcctgatgagccgggtggcccagcctgccagcaagaagatcgatcagaacaagctgaaacctgagatggacgagaagggcaacctgaccaccgccggctttgcctgctctcagtgtggccagcccctgttcgtgtacaagctggagcaggtgtctgagaagggcaaggcttacaccaactacttcggacggtgcaatgtggccgagcacgaaaagctgatcctgctggcccagctgaagcccgagaaggatagcgacgaagccgtgacatatagcctgggaaagtttgggcagagggccctggatttctacagcattcatgtgaccaaggagtccacccaccccgtgaagcccctggcccagatcgccggaaacagatacgcctccggacctgtgggaaaggccctgagcgacgcatgtatgggcacaatcgcctccttcctgtctaagtaccaggacatcatcatcgaacaccagaaggtggtgaagggcaaccagaagagactggagagcctgcgggagctggccggcaaggaaaacctggaataccctagcgtgaccctgccacctcagcctcacaccaaggagggcgttgatgcctacaacgaagtgatcgcccgggtgcgaatgtgggtgaacctgaacctgtggcagaagctgaagctaagcagagatgatgccaagcctctgctgagactgaagggattcccttcctttcctctggtcgagagacaggccaacgaagtggactggtgggacatggtgtgtaacgtgaagaagctgatcaacgagaaaaaggaggatggcaaggtgttttggcagaatctggctggctacaagagacaggaagccctgagaccatacctgagcagcgaggaagatcggaagaagggaaagaaattcgctcggtaccagctgggcgacctgctgctgcacctggaaaagaagcacggcgaggactggggaaaggtgtacgacgaggcctgggagcggattgacaagaaagtggaaggcctgagcaagcacatcaagctggaagaggaacggagaagcgaggacgcccagagcaaggccgccctgaccgactggctgcgggctaaggccagcttcgtgatcgagggcctgaaggaggccgacaaggacgagttctgcagatgcgagctgaagctgcagaagtggtacggggacctgcggggaaagcccttcgccatcgaagccgagaacagcatcctggacatcagcggcttcagcaagcagtacaactgtgccttcatctggcagaaggacggcgtgaagaagctgaacctgtacctgatcatcaactacttcaagggcggcaagctgcggttcaagaagatcaaacctgaagccttcgaagccaacagattctacaccgtgatcaacaaaaagagcggcgagatcgtgcccatggaggtgaacttcaacttcgacgaccccaacctgatcatcctgcctctggcctttggcaagagacagggcagagaattcatctggaacgacctgctgtccctggaaaccggcagcctgaagctggccaacggaagagtgatcgagaagacactgtacaacagaagaacccggcaggatgagcctgccctgttcgtggccctgaccttcgagcggcgggaggtcctggactcctccaatatcaaaccaatgaacctgatcggcgtggcaagaggcgaaaacatccccgccgtgatcgccctgaccgaccccgagggctgcccactgagccggtttaaggatagcctgggaaacccaacccacatcctgagaatcggcgagagctataaggagaagcagcggaccatccaggccaagaaggaggtggagcagcggagagccggcggctacagccggaagtacgccagcaaagccaagaatctggcagacgatatggtgagaaacaccgctagagatctgctgtactacgccgtgacccaggatgccatgctgatcttcgccaacctgagccggggcttcggccggcagggcaagcggaccttcatggccgagagacagtacacacggatggaggactggctgaccgccaagctggcctacgagggcctgagcaagacctacctgtccaagacactggcccagtacacctccaagacatgcagcaactgtgggtttaccatcaccagcgccgactacgacagggtgctggagaagctgaagaagacagcaacaggctggatgaccacaattaacggcaaggagctgaaggtggagggccagattacctactacaacagatacaagagacagaacgtagtcaaggacctgtccgtcgagctggatagactgagcgaagaatctgtgaacaacgacatctcctcctggacaaagggcagaagcggagaagctctgagcctcctgaagaaaagattctcccatagacccgtgcaggagaagttcgtgtgcctgaactgcggcttcgagacacacgcagccgagcaagccgccctgaacatcgccagatcctggctgttcctgcggagccaggagtacaagaaataccagacaaacaagacaaccggcaacaccgataagagagccttcgtcgagacctggcagtccttttaccggaagaagcttaaggaggtgtggaaacctgccgtgcggtctggcggatctggcggaggctccaccagccccaagaaaaagagaaaagtctaagctgccttctgcggggcttgccttctggccatgcccttcttctctcccttgcacctgtacctcttggtctttgaataaagcctgagtaggaaggctagcaaaaaaaaaaaaaaaaaaaaaaaaaaaaaaaaaaaaaaaaaaaaaaaaaaaaaaaaaaaaaaaaaaaaaaaaaaaaaaaagcccagccggctccccaacctctaccgaggagggcacctctgagtccgccacccccgagagcggccctggcacctccaccgagcccagcgagggcagcgcacccggcagccctgccggcagccccacctccacagaggagggaaccagcaccgagcccagcgaaggcagcgccccaggcaccagcaccgagcctagtgagcaggagattaaacggatcaacaagatcagaagaagacttgtgaaagacagcaacaccaagaaggccggcaagacaggccccatgaaaaccctgctggttagagtgatgacacccgatctgagagagcggctggaaaacctgagaaagaagcctgaaaatatcccccagcccatcagcaatacatctagagccaacctgaataagctgctgaccgattacaccgaaatgaagaaggcgatcctgcatgtgtactgggaagagttccagaaggaccctgtgggcctgatgagccgggtggcccagcctgccagcaagaagatcgatcagaacaagctgaaacctgagatggacgagaagggcaacctgaccaccgccggctttgcctgctctcagtgtggccagcccctgttcgtgtacaagctggagcaggtgtctgagaagggcaaggcttacaccaactacttcggacggtgcaatgtggccgagcacgaaaagctgatcctgctggcccagctgaagcccgagaaggatagcgacgaagccgtgacatatagcctgggaaagtttgggcagagggccctggatttctacagcattcatgtgaccaaggagtccacccaccccgtgaagcccctggcccagatcgccggaaacagatacgcctccggacctgtgggaaaggccctgagcgacgcatgtatgggcacaatcgcctccttcctgtctaagtaccaggacatcatcatcgaacaccagaaggtggtgaagggcaaccagaagagactggagagcctgcgggagctggccggcaaggaaaacctggaataccctagcgtgaccctgccacctcagcctcacaccaaggagggcgttgatgcctacaacgaagtgatcgcccgggtgcgaatgtgggtgaacctgaacctgtggcagaagctgaagctaagcagagatgatgccaagcctctgctgagactgaagggattcccttcctttcctctggtcgagagacaggccaacgaagtggactggtgggacatggtgtgtaacgtgaagaagctgatcaacgagaaaaaggaggatggcaaggtgttttggcagaatctggctggctacaagagacaggaagccctgagaccatacctgagcagcgaggaagatcggaagaagggaaagaaattcgctcggtaccagctgggcgacctgctgctgcacctggaaaagaagcacggcgaggactggggaaaggtgtacgacgaggcctgggagcggattgacaagaaagtggaaggcctgagcaagcacatcaagctggaagaggaacggagaagcgaggacgcccagagcaaggccgccctgaccgactggctgcgggctaaggccagcttcgtgatcgagggcctgaaggaggccgacaaggacgagttctgcagatgcgagctgaagctgcagaagtggtacggggacctgcggggaaagcccttcgccatcgaagccgagaacagcatcctggacatcagcggcttcagcaagcagtacaactgtgccttcatctggcagaaggacggcgtgaagaagctgaacctgtacctgatcatcaactacttcaagggcggcaagctgcggttcaagaagatcaaacctgaagccttcgaagccaacagattctacaccgtgatcaacaaaaagagcggcgagatcgtgcccatggaggtgaacttcaacttcgacgaccccaacctgatcatcctgcctctggcctttggcaagagacagggcagagaattcatctggaacgacctgctgtccctggaaaccggcagcctgaagctggccaacggaagagtgatcgagaagacactgtacaacagaagaacccggcaggatgagcctgccctgttcgtggccctgaccttcgagcggcgggaggtcctggactcctccaatatcaaaccaatgaacctgatcggcgtggcaagaggcgaaaacatccccgccgtgatcgccctgaccgaccccgagggctgcccactgagccggtttaaggatagcctgggaaacccaacccacatcctgagaatcggcgagagctataaggagaagcagcggaccatccaggccaagaaggaggtggagcagcggagagccggcggctacagccggaagtacgccagcaaagccaagaatctggcagacgatatggtgagaaacaccgctagagatctgctgtactacgccgtgacccaggatgccatgctgatcttcgccaacctgagccggggcttcggccggcagggcaagcggaccttcatggccgagagacagtacacacggatggaggactggctgaccgccaagctggcctacgagggcctgagcaagacctacctgtccaagacactggcccagtacacctccaagacatgcagcaactgtgggtttaccatcaccagcgccgactacgacagggtgctggagaagctgaagaagacagcaacaggctggatgaccacaattaacggcaaggagctgaaggtggagggccagattacctactacaacagatacaagagacagaacgtagtcaaggacctgtccgtcgagctggatagactgagcgaagaatctgtgaacaacgacatctcctcctggacaaagggcagaagcggagaagctctgagcctcctgaagaaaagattctcccatagacccgtgcaggagaagttcgtgtgcctgaactgcggcttcgagacacacgcagccgagcaagccgccctgaacatcgccagatcctggctgttcctgcggagccaggagtacaagaaataccagacaaacaagacaaccggcaacaccgataagagagccttcgtcgagacctggcagtccttttaccggaagaagcttaaggaggtgtggaaacctgccgtgcggtctggcggatctggcggaggctccaccagccccaagaaaaagagaaaagtctaagctgccttctgcggggcttgccttctggccatgcccttcttctctcccttgcacctgtacctcttggtctttgaataaagcctgagtaggaaggctagcaaaaaaaaaaaaaaaaaaaaaaaaaaaaaaaaaaaaaaaaaaaaaaaaaaaaaaaaaaaaaaaaaaaaaaaaaaaaaaaa

SEQ ID NO: 9462 - RNA, 8787 nt, synthetic construct
  source 1..8787: mol_type = other RNA
aggaaataagagagaaaagaagagtaagaagaaatataagagccaccatggcccctaagaagaagcgtaaagtgagccggatgaaccacgaccaggagttcgacccccctaaggtgtaccctcccgtccccgccgagaagagaaagcccatccgggtcctgagcctgttcgatggcatcgccaccggtctgctggtgctgaaggacctgggcatccaggtggataggtacattgcctccgaggtgtgcgaggactccatcaccgtgggaatggtgcgtcatcagggcaagatcatgtacgtgggcgacgtgcggagcgtgacacagaagcatatccaggagtggggccctttcgacctggtgatcggcggcagcccttgcaatgacctgagcatcgtgaacccagcccggaagggcctgtacgagggaaccggcagactgttcttcgagttttacagactgctgcacgacgcccggcctaaggaaggcgacgaccggcccttcttttggctgttcgagaatgtggtggccatgggagtcagcgacaagcgggatattagccggttcctggagagcaaccccgtgatgatcgatgccaaggaagtgagcgccgcccaccgggccagatacttctggggcaatctgcctggcatgaacagacccctggccagcaccgtgaacgacaagctggagctgcaggagtgcctggagcacggccggatcgccaagttcagcaaggtgagaaccatcaccacccgaagcaacagcatcaaacaaggcaaggaccagcactttcctgtgttcatgaacgagaaggaggacatcctgtggtgtaccgagatggagagagtgttcgggttcccagtccactacacagatgtcagcaacatgtctagactggccagacagagactgctgggaagaagctggtccgtccctgtgatcagacacctgttcgcccctctgaaggagtacttcgcctgcgtgagcagcggcaacagcaacgccaacagccggggccccagcttctctagcggcctggtgccactgtccctgagagggagccacatgggccccatggagatctacaaaaccgtgagcgcctggaagcggcagcctgtgcgcgtgctgagcctgtttcggaatatcgataaagtcctgaaaagcctgggattcctggagagcggctctggctccggcggtggcaccctgaagtacgtggaggatgtgacaaacgtggtcagacgggatgtggagaagtggggccccttcgatctggtgtacggcagcacccaacccctgggcagctcttgtgaccggtgccctggctggtacatgtttcagttccaccggatcctgcagtacgccctgccgagacaggagtcccagcggccattcttttggattttcatggacaacttgctgctgaccgaggatgaccaggaaactaccactcggttcctgcagaccgaagccgtgaccctgcaggacgtgagaggccgggactaccagaacgccatgcgggtgtggtccaacatccctggactgaaaagcaagcacgcacctctgacccctaaagaagaggagtacctgcaggcccaggtgcggagcagaagcaagctggacgcccctaaggtggatctgctggtgaagaattgcctcctgcccctgagagagtacttcaagtatttcagccagaatagtctgcccctgggaggcagcggcggcggcagccagggcagcatcaccttcaaggacgtggccgtggacttcacccaggaggagtggtgcctgctggaccacagccagaaggagctgtacctggaggtgatgctggagaacgtgcagaacctgctgagcgtgggcctgcccgtgcccagggagaacttcatcagctgcctgcagcagggcaaggccccctggctgctggcccagaaggacagcaggaacagctgcctggaggccaagaccaacggcggcccaagcagcggcgcccctcctcccagcggcggcaggcggcccaagcagcggcgcccctcctcccagcggcggcagcccagccggctccccaacctctaccgaggagggcacctctgagtccgccacccccgagagcggccctggcacctccaccgagcccagcgagggcagcgcacccggcagccctgccggcagccccacctccacagaggagggaaccagcaccgagcccagcgaaggcagcgccccaggcaccagcaccgagcctagtgagcaggagattaaacggatcaacaagatcagaagaagacttgtgaaagacagcaacaccaagaaggccggcaagacaggccccatgaaaaccctgctggttagagtgatgacacccgatctgagagagcggctggaaaacctgagaaagaagcctgaaaatatcccccagcccatcagcaatacatctagagccaacctgaataagctgctgaccgattacaccgaaatgaagaaggcgatcctgcatgtgtactgggaagagttccagaaggaccctgtgggcctgatgagccgggtggcccagcctgccagcaagaagatcgatcagaacaagctgaaacctgagatggacgagaagggcaacctgaccaccgccggctttgcctgctctcagtgtggccagcccctgttcgtgtacaagctggagcaggtgtctgagaagggcaaggcttacaccaactacttcggacggtgcaatgtggccgagcacgaaaagctgatcctgctggcccagctgaagcccgagaaggatagcgacgaagccgtgacatatagcctgggaaagtttgggcagagggccctggatttctacagcattcatgtgaccaaggagtccacccaccccgtgaagcccctggcccagatcgccggaaacagatacgcctccggacctgtgggaaaggccctgagcgacgcatgtatgggcacaatcgcctccttcctgtctaagtaccaggacatcatcatcgaacaccagaaggtggtgaagggcaaccagaagagactggagagcctgcgggagctggccggcaaggaaaacctggaataccctagcgtgaccctgccacctcagcctcacaccaaggagggcgttgatgcctacaacgaagtgatcgcccgggtgcgaatgtgggtgaacctgaacctgtggcagaagctgaagctaagcagagatgatgccaagcctctgctgagactgaagggattcccttcctttcctctggtcgagagacaggccaacgaagtggactggtgggacatggtgtgtaacgtgaagaagctgatcaacgagaaaaaggaggatggcaaggtgttttggcagaatctggctggctacaagagacaggaagccctgagaccatacctgagcagcgaggaagatcggaagaagggaaagaaattcgctcggtaccagctgggcgacctgctgctgcacctggaaaagaagcacggcgaggactggggaaaggtgtacgacgaggcctgggagcggattgacaagaaagtggaaggcctgagcaagcacatcaagctggaagaggaacggagaagcgaggacgcccagagcaaggccgccctgaccgactggctgcgggctaaggccagcttcgtgatcgagggcctgaaggaggccgacaaggacgagttctgcagatgcgagctgaagctgcagaagtggtacggggacctgcggggaaagcccttcgccatcgaagccgagaacagcatcctggacatcagcggcttcagcaagcagtacaactgtgccttcatctggcagaaggacggcgtgaagaagctgaacctgtacctgatcatcaactacttcaagggcggcaagctgcggttcaagaagatcaaacctgaagccttcgaagccaacagattctacaccgtgatcaacaaaaagagcggcgagatcgtgcccatggaggtgaacttcaacttcgacgaccccaacctgatcatcctgcctctggcctttggcaagagacagggcagagaattcatctggaacgacctgctgtccctggaaaccggcagcctgaagctggccaacggaagagtgatcgagaagacactgtacaacagaagaacccggcaggatgagcctgccctgttcgtggccctgaccttcgagcggcgggaggtcctggactcctccaatatcaaaccaatgaacctgatcggcgtggcaagaggcgaaaacatccccgccgtgatcgccctgaccgaccccgagggctgcccactgagccggtttaaggatagcctgggaaacccaacccacatcctgagaatcggcgagagctataaggagaagcagcggaccatccaggccaagaaggaggtggagcagcggagagccggcggctacagccggaagtacgccagcaaagccaagaatctggcagacgatatggtgagaaacaccgctagagatctgctgtactacgccgtgacccaggatgccatgctgatcttcgccaacctgagccggggcttcggccggcagggcaagcggaccttcatggccgagagacagtacacacggatggaggactggctgaccgccaagctggcctacgagggcctgagcaagacctacctgtccaagacactggcccagtacacctccaagacatgcagcaactgtgggtttaccatcaccagcgccgactacgacagggtgctggagaagctgaagaagacagcaacaggctggatgaccacaattaacggcaaggagctgaaggtggagggccagattacctactacaacagatacaagagacagaacgtagtcaaggacctgtccgtcgagctggatagactgagcgaagaatctgtgaacaacgacatctcctcctggacaaagggcagaagcggagaagctctgagcctcctgaagaaaagattctcccatagacccgtgcaggagaagttcgtgtgcctgaactgcggcttcgagacacacgcagccgagcaagccgccctgaacatcgccagatcctggctgttcctgcggagccaggagtacaagaaataccagacaaacaagacaaccggcaacaccgataagagagccttcgtcgagacctggcagtccttttaccggaagaagcttaaggaggtgtggaaacctgccgtgcggtctggcggatctggcggaggctccaccagccccaagaaaaagagaaaagtctaagctgccttctgcggggcttgccttctggccatgcccttcttctctcccttgcacctgtacctcttggtctttgaataaagcctgagtaggaaggctagcaaaaaaaaaaaaaaaaaaaaaaaaaaaaaaaaaaaaaaaaaaaaaaaaaaaaaaaaaaaaaaaaaaaaaaaaaaaaaaaagcccagccggctccccaacctctaccgaggagggcacctctgagtccgccacccccgagagcggccctggcacctccaccgagcccagcgagggcagcgcacccggcagccctgccggcagccccacctccacagaggagggaaccagcaccgagcccagcgaaggcagcgccccaggcaccagcaccgagcctagtgagcaggagattaaacggatcaacaagatcagaagaagacttgtgaaagacagcaacaccaagaaggccggcaagacaggccccatgaaaaccctgctggttagagtgatgacacccgatctgagagagcggctggaaaacctgagaaagaagcctgaaaatatcccccagcccatcagcaatacatctagagccaacctgaataagctgctgaccgattacaccgaaatgaagaaggcgatcctgcatgtgtactgggaagagttccagaaggaccctgtgggcctgatgagccgggtggcccagcctgccagcaagaagatcgatcagaacaagctgaaacctgagatggacgagaagggcaacctgaccaccgccggctttgcctgctctcagtgtggccagcccctgttcgtgtacaagctggagcaggtgtctgagaagggcaaggcttacaccaactacttcggacggtgcaatgtggccgagcacgaaaagctgatcctgctggcccagctgaagcccgagaaggatagcgacgaagccgtgacatatagcctgggaaagtttgggcagagggccctggatttctacagcattcatgtgaccaaggagtccacccaccccgtgaagcccctggcccagatcgccggaaacagatacgcctccggacctgtgggaaaggccctgagcgacgcatgtatgggcacaatcgcctccttcctgtctaagtaccaggacatcatcatcgaacaccagaaggtggtgaagggcaaccagaagagactggagagcctgcgggagctggccggcaaggaaaacctggaataccctagcgtgaccctgccacctcagcctcacaccaaggagggcgttgatgcctacaacgaagtgatcgcccgggtgcgaatgtgggtgaacctgaacctgtggcagaagctgaagctaagcagagatgatgccaagcctctgctgagactgaagggattcccttcctttcctctggtcgagagacaggccaacgaagtggactggtgggacatggtgtgtaacgtgaagaagctgatcaacgagaaaaaggaggatggcaaggtgttttggcagaatctggctggctacaagagacaggaagccctgagaccatacctgagcagcgaggaagatcggaagaagggaaagaaattcgctcggtaccagctgggcgacctgctgctgcacctggaaaagaagcacggcgaggactggggaaaggtgtacgacgaggcctgggagcggattgacaagaaagtggaaggcctgagcaagcacatcaagctggaagaggaacggagaagcgaggacgcccagagcaaggccgccctgaccgactggctgcgggctaaggccagcttcgtgatcgagggcctgaaggaggccgacaaggacgagttctgcagatgcgagctgaagctgcagaagtggtacggggacctgcggggaaagcccttcgccatcgaagccgagaacagcatcctggacatcagcggcttcagcaagcagtacaactgtgccttcatctggcagaaggacggcgtgaagaagctgaacctgtacctgatcatcaactacttcaagggcggcaagctgcggttcaagaagatcaaacctgaagccttcgaagccaacagattctacaccgtgatcaacaaaaagagcggcgagatcgtgcccatggaggtgaacttcaacttcgacgaccccaacctgatcatcctgcctctggcctttggcaagagacagggcagagaattcatctggaacgacctgctgtccctggaaaccggcagcctgaagctggccaacggaagagtgatcgagaagacactgtacaacagaagaacccggcaggatgagcctgccctgttcgtggccctgaccttcgagcggcgggaggtcctggactcctccaatatcaaaccaatgaacctgatcggcgtggcaagaggcgaaaacatccccgccgtgatcgccctgaccgaccccgagggctgcccactgagccggtttaaggatagcctgggaaacccaacccacatcctgagaatcggcgagagctataaggagaagcagcggaccatccaggccaagaaggaggtggagcagcggagagccggcggctacagccggaagtacgccagcaaagccaagaatctggcagacgatatggtgagaaacaccgctagagatctgctgtactacgccgtgacccaggatgccatgctgatcttcgccaacctgagccggggcttcggccggcagggcaagcggaccttcatggccgagagacagtacacacggatggaggactggctgaccgccaagctggcctacgagggcctgagcaagacctacctgtccaagacactggcccagtacacctccaagacatgcagcaactgtgggtttaccatcaccagcgccgactacgacagggtgctggagaagctgaagaagacagcaacaggctggatgaccacaattaacggcaaggagctgaaggtggagggccagattacctactacaacagatacaagagacagaacgtagtcaaggacctgtccgtcgagctggatagactgagcgaagaatctgtgaacaacgacatctcctcctggacaaagggcagaagcggagaagctctgagcctcctgaagaaaagattctcccatagacccgtgcaggagaagttcgtgtgcctgaactgcggcttcgagacacacgcagccgagcaagccgccctgaacatcgccagatcctggctgttcctgcggagccaggagtacaagaaataccagacaaacaagacaaccggcaacaccgataagagagccttcgtcgagacctggcagtccttttaccggaagaagcttaaggaggtgtggaaacctgccgtgcggtctggcggatctggcggaggctccaccagccccaagaaaaagagaaaagtctaagctgccttctgcggggcttgccttctggccatgcccttcttctctcccttgcacctgtacctcttggtctttgaataaagcctgagtaggaaggctagcaaaaaaaaaaaaaaaaaaaaaaaaaaaaaaaaaaaaaaaaaaaaaaaaaaaaaaaaaaaaaaaaaaaaaaaaaaaaaaaa

SEQ ID NO: 9463 - RNA, 8787 nt, synthetic construct
  source 1..8787: mol_type = other RNA
aggaaataagagagaaaagaagagtaagaagaaatataagagccaccatggcccctaagaagaagcgtaaagtgagccggatgaaccacgaccaggagttcgacccccctaaggtgtaccctcccgtccccgccgagaagagaaagcccatccgggtcctgagcctgttcgatggcatcgccaccggtctgctggtgctgaaggacctgggcatccaggtggataggtacattgcctccgaggtgtgcgaggactccatcaccgtgggaatggtgcgtcatcagggcaagatcatgtacgtgggcgacgtgcggagcgtgacacagaagcatatccaggagtggggccctttcgacctggtgatcggcggcagcccttgcaatgacctgagcatcgtgaacccagcccggaagggcctgtacgagggaaccggcagactgttcttcgagttttacagactgctgcacgacgcccggcctaaggaaggcgacgaccggcccttcttttggctgttcgagaatgtggtggccatgggagtcagcgacaagcgggatattagccggttcctggagagcaaccccgtgatgatcgatgccaaggaagtgagcgccgcccaccgggccagatacttctggggcaatctgcctggcatgaacagacccctggccagcaccgtgaacgacaagctggagctgcaggagtgcctggagcacggccggatcgccaagttcagcaaggtgagaaccatcaccacccgaagcaacagcatcaaacaaggcaaggaccagcactttcctgtgttcatgaacgagaaggaggacatcctgtggtgtaccgagatggagagagtgttcgggttcccagtccactacacagatgtcagcaacatgtctagactggccagacagagactgctgggaagaagctggtccgtccctgtgatcagacacctgttcgcccctctgaaggagtacttcgcctgcgtgagcagcggcaacagcaacgccaacagccggggccccagcttctctagcggcctggtgccactgtccctgagagggagccacatgggccccatggagatctacaaaaccgtgagcgcctggaagcggcagcctgtgcgcgtgctgagcctgtttcggaatatcgataaagtcctgaaaagcctgggattcctggagagcggctctggctccggcggtggcaccctgaagtacgtggaggatgtgacaaacgtggtcagacgggatgtggagaagtggggccccttcgatctggtgtacggcagcacccaacccctgggcagctcttgtgaccggtgccctggctggtacatgtttcagttccaccggatcctgcagtacgccctgccgagacaggagtcccagcggccattcttttggattttcatggacaacttgctgctgaccgaggatgaccaggaaactaccactcggttcctgcagaccgaagccgtgaccctgcaggacgtgagaggccgggactaccagaacgccatgcgggtgtggtccaacatccctggactgaaaagcaagcacgcacctctgacccctaaagaagaggagtacctgcaggcccaggtgcggagcagaagcaagctggacgcccctaaggtggatctgctggtgaagaattgcctcctgcccctgagagagtacttcaagtatttcagccagaatagtctgcccctgggaggcagcggcggcggcccccagaagagcgtgaccttcgaggacgtggccgtgtacttcacccaggccgagtgggacggcctgagccccgcccagaggaccctgtacagggacgtgatgctggagaactacggcaacgtggccagcctgggcttccccctgctgaagcccgccgtgatcagccagctggagggcggcagcgagctgggcggcagcagccccctggccgccggcaccggcctgcagggcctgcagaccgtgggcggcccaagcagcggcgcccctcctcccagcggcggcaggcggcccaagcagcggcgcccctcctcccagcggcggcagcccagccggctccccaacctctaccgaggagggcacctctgagtccgccacccccgagagcggccctggcacctccaccgagcccagcgagggcagcgcacccggcagccctgccggcagccccacctccacagaggagggaaccagcaccgagcccagcgaaggcagcgccccaggcaccagcaccgagcctagtgagcaggagattaaacggatcaacaagatcagaagaagacttgtgaaagacagcaacaccaagaaggccggcaagacaggccccatgaaaaccctgctggttagagtgatgacacccgatctgagagagcggctggaaaacctgagaaagaagcctgaaaatatcccccagcccatcagcaatacatctagagccaacctgaataagctgctgaccgattacaccgaaatgaagaaggcgatcctgcatgtgtactgggaagagttccagaaggaccctgtgggcctgatgagccgggtggcccagcctgccagcaagaagatcgatcagaacaagctgaaacctgagatggacgagaagggcaacctgaccaccgccggctttgcctgctctcagtgtggccagcccctgttcgtgtacaagctggagcaggtgtctgagaagggcaaggcttacaccaactacttcggacggtgcaatgtggccgagcacgaaaagctgatcctgctggcccagctgaagcccgagaaggatagcgacgaagccgtgacatatagcctgggaaagtttgggcagagggccctggatttctacagcattcatgtgaccaaggagtccacccaccccgtgaagcccctggcccagatcgccggaaacagatacgcctccggacctgtgggaaaggccctgagcgacgcatgtatgggcacaatcgcctccttcctgtctaagtaccaggacatcatcatcgaacaccagaaggtggtgaagggcaaccagaagagactggagagcctgcgggagctggccggcaaggaaaacctggaataccctagcgtgaccctgccacctcagcctcacaccaaggagggcgttgatgcctacaacgaagtgatcgcccgggtgcgaatgtgggtgaacctgaacctgtggcagaagctgaagctaagcagagatgatgccaagcctctgctgagactgaagggattcccttcctttcctctggtcgagagacaggccaacgaagtggactggtgggacatggtgtgtaacgtgaagaagctgatcaacgagaaaaaggaggatggcaaggtgttttggcagaatctggctggctacaagagacaggaagccctgagaccatacctgagcagcgaggaagatcggaagaagggaaagaaattcgctcggtaccagctgggcgacctgctgctgcacctggaaaagaagcacggcgaggactggggaaaggtgtacgacgaggcctgggagcggattgacaagaaagtggaaggcctgagcaagcacatcaagctggaagaggaacggagaagcgaggacgcccagagcaaggccgccctgaccgactggctgcgggctaaggccagcttcgtgatcgagggcctgaaggaggccgacaaggacgagttctgcagatgcgagctgaagctgcagaagtggtacggggacctgcggggaaagcccttcgccatcgaagccgagaacagcatcctggacatcagcggcttcagcaagcagtacaactgtgccttcatctggcagaaggacggcgtgaagaagctgaacctgtacctgatcatcaactacttcaagggcggcaagctgcggttcaagaagatcaaacctgaagccttcgaagccaacagattctacaccgtgatcaacaaaaagagcggcgagatcgtgcccatggaggtgaacttcaacttcgacgaccccaacctgatcatcctgcctctggcctttggcaagagacagggcagagaattcatctggaacgacctgctgtccctggaaaccggcagcctgaagctggccaacggaagagtgatcgagaagacactgtacaacagaagaacccggcaggatgagcctgccctgttcgtggccctgaccttcgagcggcgggaggtcctggactcctccaatatcaaaccaatgaacctgatcggcgtggcaagaggcgaaaacatccccgccgtgatcgccctgaccgaccccgagggctgcccactgagccggtttaaggatagcctgggaaacccaacccacatcctgagaatcggcgagagctataaggagaagcagcggaccatccaggccaagaaggaggtggagcagcggagagccggcggctacagccggaagtacgccagcaaagccaagaatctggcagacgatatggtgagaaacaccgctagagatctgctgtactacgccgtgacccaggatgccatgctgatcttcgccaacctgagccggggcttcggccggcagggcaagcggaccttcatggccgagagacagtacacacggatggaggactggctgaccgccaagctggcctacgagggcctgagcaagacctacctgtccaagacactggcccagtacacctccaagacatgcagcaactgtgggtttaccatcaccagcgccgactacgacagggtgctggagaagctgaagaagacagcaacaggctggatgaccacaattaacggcaaggagctgaaggtggagggccagattacctactacaacagatacaagagacagaacgtagtcaaggacctgtccgtcgagctggatagactgagcgaagaatctgtgaacaacgacatctcctcctggacaaagggcagaagcggagaagctctgagcctcctgaagaaaagattctcccatagacccgtgcaggagaagttcgtgtgcctgaactgcggcttcgagacacacgcagccgagcaagccgccctgaacatcgccagatcctggctgttcctgcggagccaggagtacaagaaataccagacaaacaagacaaccggcaacaccgataagagagccttcgtcgagacctggcagtccttttaccggaagaagcttaaggaggtgtggaaacctgccgtgcggtctggcggatctggcggaggctccaccagccccaagaaaaagagaaaagtctaagctgccttctgcggggcttgccttctggccatgcccttcttctctcccttgcacctgtacctcttggtctttgaataaagcctgagtaggaaggctagcaaaaaaaaaaaaaaaaaaaaaaaaaaaaaaaaaaaaaaaaaaaaaaaaaaaaaaaaaaaaaaaaaaaaaaaaaaaaaaaagcccagccggctccccaacctctaccgaggagggcacctctgagtccgccacccccgagagcggccctggcacctccaccgagcccagcgagggcagcgcacccggcagccctgccggcagccccacctccacagaggagggaaccagcaccgagcccagcgaaggcagcgccccaggcaccagcaccgagcctagtgagcaggagattaaacggatcaacaagatcagaagaagacttgtgaaagacagcaacaccaagaaggccggcaagacaggccccatgaaaaccctgctggttagagtgatgacacccgatctgagagagcggctggaaaacctgagaaagaagcctgaaaatatcccccagcccatcagcaatacatctagagccaacctgaataagctgctgaccgattacaccgaaatgaagaaggcgatcctgcatgtgtactgggaagagttccagaaggaccctgtgggcctgatgagccgggtggcccagcctgccagcaagaagatcgatcagaacaagctgaaacctgagatggacgagaagggcaacctgaccaccgccggctttgcctgctctcagtgtggccagcccctgttcgtgtacaagctggagcaggtgtctgagaagggcaaggcttacaccaactacttcggacggtgcaatgtggccgagcacgaaaagctgatcctgctggcccagctgaagcccgagaaggatagcgacgaagccgtgacatatagcctgggaaagtttgggcagagggccctggatttctacagcattcatgtgaccaaggagtccacccaccccgtgaagcccctggcccagatcgccggaaacagatacgcctccggacctgtgggaaaggccctgagcgacgcatgtatgggcacaatcgcctccttcctgtctaagtaccaggacatcatcatcgaacaccagaaggtggtgaagggcaaccagaagagactggagagcctgcgggagctggccggcaaggaaaacctggaataccctagcgtgaccctgccacctcagcctcacaccaaggagggcgttgatgcctacaacgaagtgatcgcccgggtgcgaatgtgggtgaacctgaacctgtggcagaagctgaagctaagcagagatgatgccaagcctctgctgagactgaagggattcccttcctttcctctggtcgagagacaggccaacgaagtggactggtgggacatggtgtgtaacgtgaagaagctgatcaacgagaaaaaggaggatggcaaggtgttttggcagaatctggctggctacaagagacaggaagccctgagaccatacctgagcagcgaggaagatcggaagaagggaaagaaattcgctcggtaccagctgggcgacctgctgctgcacctggaaaagaagcacggcgaggactggggaaaggtgtacgacgaggcctgggagcggattgacaagaaagtggaaggcctgagcaagcacatcaagctggaagaggaacggagaagcgaggacgcccagagcaaggccgccctgaccgactggctgcgggctaaggccagcttcgtgatcgagggcctgaaggaggccgacaaggacgagttctgcagatgcgagctgaagctgcagaagtggtacggggacctgcggggaaagcccttcgccatcgaagccgagaacagcatcctggacatcagcggcttcagcaagcagtacaactgtgccttcatctggcagaaggacggcgtgaagaagctgaacctgtacctgatcatcaactacttcaagggcggcaagctgcggttcaagaagatcaaacctgaagccttcgaagccaacagattctacaccgtgatcaacaaaaagagcggcgagatcgtgcccatggaggtgaacttcaacttcgacgaccccaacctgatcatcctgcctctggcctttggcaagagacagggcagagaattcatctggaacgacctgctgtccctggaaaccggcagcctgaagctggccaacggaagagtgatcgagaagacactgtacaacagaagaacccggcaggatgagcctgccctgttcgtggccctgaccttcgagcggcgggaggtcctggactcctccaatatcaaaccaatgaacctgatcggcgtggcaagaggcgaaaacatccccgccgtgatcgccctgaccgaccccgagggctgcccactgagccggtttaaggatagcctgggaaacccaacccacatcctgagaatcggcgagagctataaggagaagcagcggaccatccaggccaagaaggaggtggagcagcggagagccggcggctacagccggaagtacgccagcaaagccaagaatctggcagacgatatggtgagaaacaccgctagagatctgctgtactacgccgtgacccaggatgccatgctgatcttcgccaacctgagccggggcttcggccggcagggcaagcggaccttcatggccgagagacagtacacacggatggaggactggctgaccgccaagctggcctacgagggcctgagcaagacctacctgtccaagacactggcccagtacacctccaagacatgcagcaactgtgggtttaccatcaccagcgccgactacgacagggtgctggagaagctgaagaagacagcaacaggctggatgaccacaattaacggcaaggagctgaaggtggagggccagattacctactacaacagatacaagagacagaacgtagtcaaggacctgtccgtcgagctggatagactgagcgaagaatctgtgaacaacgacatctcctcctggacaaagggcagaagcggagaagctctgagcctcctgaagaaaagattctcccatagacccgtgcaggagaagttcgtgtgcctgaactgcggcttcgagacacacgcagccgagcaagccgccctgaacatcgccagatcctggctgttcctgcggagccaggagtacaagaaataccagacaaacaagacaaccggcaacaccgataagagagccttcgtcgagacctggcagtccttttaccggaagaagcttaaggaggtgtggaaacctgccgtgcggtctggcggatctggcggaggctccaccagccccaagaaaaagagaaaagtctaagctgccttctgcggggcttgccttctggccatgcccttcttctctcccttgcacctgtacctcttggtctttgaataaagcctgagtaggaaggctagcaaaaaaaaaaaaaaaaaaaaaaaaaaaaaaaaaaaaaaaaaaaaaaaaaaaaaaaaaaaaaaaaaaaaaaaaaaaaaaaa

SEQ ID NO: 9464 - RNA, 8787 nt, synthetic construct
  source 1..8787: mol_type = other RNA
aggaaataagagagaaaagaagagtaagaagaaatataagagccaccatggcccctaagaagaagcgtaaagtgagccggatgaaccacgaccaggagttcgacccccctaaggtgtaccctcccgtccccgccgagaagagaaagcccatccgggtcctgagcctgttcgatggcatcgccaccggtctgctggtgctgaaggacctgggcatccaggtggataggtacattgcctccgaggtgtgcgaggactccatcaccgtgggaatggtgcgtcatcagggcaagatcatgtacgtgggcgacgtgcggagcgtgacacagaagcatatccaggagtggggccctttcgacctggtgatcggcggcagcccttgcaatgacctgagcatcgtgaacccagcccggaagggcctgtacgagggaaccggcagactgttcttcgagttttacagactgctgcacgacgcccggcctaaggaaggcgacgaccggcccttcttttggctgttcgagaatgtggtggccatgggagtcagcgacaagcgggatattagccggttcctggagagcaaccccgtgatgatcgatgccaaggaagtgagcgccgcccaccgggccagatacttctggggcaatctgcctggcatgaacagacccctggccagcaccgtgaacgacaagctggagctgcaggagtgcctggagcacggccggatcgccaagttcagcaaggtgagaaccatcaccacccgaagcaacagcatcaaacaaggcaaggaccagcactttcctgtgttcatgaacgagaaggaggacatcctgtggtgtaccgagatggagagagtgttcgggttcccagtccactacacagatgtcagcaacatgtctagactggccagacagagactgctgggaagaagctggtccgtccctgtgatcagacacctgttcgcccctctgaaggagtacttcgcctgcgtgagcagcggcaacagcaacgccaacagccggggccccagcttctctagcggcctggtgccactgtccctgagagggagccacatgggccccatggagatctacaaaaccgtgagcgcctggaagcggcagcctgtgcgcgtgctgagcctgtttcggaatatcgataaagtcctgaaaagcctgggattcctggagagcggctctggctccggcggtggcaccctgaagtacgtggaggatgtgacaaacgtggtcagacgggatgtggagaagtggggccccttcgatctggtgtacggcagcacccaacccctgggcagctcttgtgaccggtgccctggctggtacatgtttcagttccaccggatcctgcagtacgccctgccgagacaggagtcccagcggccattcttttggattttcatggacaacttgctgctgaccgaggatgaccaggaaactaccactcggttcctgcagaccgaagccgtgaccctgcaggacgtgagaggccgggactaccagaacgccatgcgggtgtggtccaacatccctggactgaaaagcaagcacgcacctctgacccctaaagaagaggagtacctgcaggcccaggtgcggagcagaagcaagctggacgcccctaaggtggatctgctggtgaagaattgcctcctgcccctgagagagtacttcaagtatttcagccagaatagtctgcccctgggaggcagcggcggcggcgcccaggtgctggtgaccttccaggacgtggccgtggacttcacccaggaggagtggaggctgctggaccccggccagaaggagctgtacaaggaggtgatgctggagaacgtgcagaacgtgctgagcctgggcctgcccgtgcccagggaggactggttcttccacttccacgagggcggcgacccctggatgctggagggcaagggccccagcatcagcaggctggacgaggagaggcacggcggcccaagcagcggcgcccctcctcccagcggcggcaggcggcccaagcagcggcgcccctcctcccagcggcggcagcccagccggctccccaacctctaccgaggagggcacctctgagtccgccacccccgagagcggccctggcacctccaccgagcccagcgagggcagcgcacccggcagccctgccggcagccccacctccacagaggagggaaccagcaccgagcccagcgaaggcagcgccccaggcaccagcaccgagcctagtgagcaggagattaaacggatcaacaagatcagaagaagacttgtgaaagacagcaacaccaagaaggccggcaagacaggccccatgaaaaccctgctggttagagtgatgacacccgatctgagagagcggctggaaaacctgagaaagaagcctgaaaatatcccccagcccatcagcaatacatctagagccaacctgaataagctgctgaccgattacaccgaaatgaagaaggcgatcctgcatgtgtactgggaagagttccagaaggaccctgtgggcctgatgagccgggtggcccagcctgccagcaagaagatcgatcagaacaagctgaaacctgagatggacgagaagggcaacctgaccaccgccggctttgcctgctctcagtgtggccagcccctgttcgtgtacaagctggagcaggtgtctgagaagggcaaggcttacaccaactacttcggacggtgcaatgtggccgagcacgaaaagctgatcctgctggcccagctgaagcccgagaaggatagcgacgaagccgtgacatatagcctgggaaagtttgggcagagggccctggatttctacagcattcatgtgaccaaggagtccacccaccccgtgaagcccctggcccagatcgccggaaacagatacgcctccggacctgtgggaaaggccctgagcgacgcatgtatgggcacaatcgcctccttcctgtctaagtaccaggacatcatcatcgaacaccagaaggtggtgaagggcaaccagaagagactggagagcctgcgggagctggccggcaaggaaaacctggaataccctagcgtgaccctgccacctcagcctcacaccaaggagggcgttgatgcctacaacgaagtgatcgcccgggtgcgaatgtgggtgaacctgaacctgtggcagaagctgaagctaagcagagatgatgccaagcctctgctgagactgaagggattcccttcctttcctctggtcgagagacaggccaacgaagtggactggtgggacatggtgtgtaacgtgaagaagctgatcaacgagaaaaaggaggatggcaaggtgttttggcagaatctggctggctacaagagacaggaagccctgagaccatacctgagcagcgaggaagatcggaagaagggaaagaaattcgctcggtaccagctgggcgacctgctgctgcacctggaaaagaagcacggcgaggactggggaaaggtgtacgacgaggcctgggagcggattgacaagaaagtggaaggcctgagcaagcacatcaagctggaagaggaacggagaagcgaggacgcccagagcaaggccgccctgaccgactggctgcgggctaaggccagcttcgtgatcgagggcctgaaggaggccgacaaggacgagttctgcagatgcgagctgaagctgcagaagtggtacggggacctgcggggaaagcccttcgccatcgaagccgagaacagcatcctggacatcagcggcttcagcaagcagtacaactgtgccttcatctggcagaaggacggcgtgaagaagctgaacctgtacctgatcatcaactacttcaagggcggcaagctgcggttcaagaagatcaaacctgaagccttcgaagccaacagattctacaccgtgatcaacaaaaagagcggcgagatcgtgcccatggaggtgaacttcaacttcgacgaccccaacctgatcatcctgcctctggcctttggcaagagacagggcagagaattcatctggaacgacctgctgtccctggaaaccggcagcctgaagctggccaacggaagagtgatcgagaagacactgtacaacagaagaacccggcaggatgagcctgccctgttcgtggccctgaccttcgagcggcgggaggtcctggactcctccaatatcaaaccaatgaacctgatcggcgtggcaagaggcgaaaacatccccgccgtgatcgccctgaccgaccccgagggctgcccactgagccggtttaaggatagcctgggaaacccaacccacatcctgagaatcggcgagagctataaggagaagcagcggaccatccaggccaagaaggaggtggagcagcggagagccggcggctacagccggaagtacgccagcaaagccaagaatctggcagacgatatggtgagaaacaccgctagagatctgctgtactacgccgtgacccaggatgccatgctgatcttcgccaacctgagccggggcttcggccggcagggcaagcggaccttcatggccgagagacagtacacacggatggaggactggctgaccgccaagctggcctacgagggcctgagcaagacctacctgtccaagacactggcccagtacacctccaagacatgcagcaactgtgggtttaccatcaccagcgccgactacgacagggtgctggagaagctgaagaagacagcaacaggctggatgaccacaattaacggcaaggagctgaaggtggagggccagattacctactacaacagatacaagagacagaacgtagtcaaggacctgtccgtcgagctggatagactgagcgaagaatctgtgaacaacgacatctcctcctggacaaagggcagaagcggagaagctctgagcctcctgaagaaaagattctcccatagacccgtgcaggagaagttcgtgtgcctgaactgcggcttcgagacacacgcagccgagcaagccgccctgaacatcgccagatcctggctgttcctgcggagccaggagtacaagaaataccagacaaacaagacaaccggcaacaccgataagagagccttcgtcgagacctggcagtccttttaccggaagaagcttaaggaggtgtggaaacctgccgtgcggtctggcggatctggcggaggctccaccagccccaagaaaaagagaaaagtctaagctgccttctgcggggcttgccttctggccatgcccttcttctctcccttgcacctgtacctcttggtctttgaataaagcctgagtaggaaggctagcaaaaaaaaaaaaaaaaaaaaaaaaaaaaaaaaaaaaaaaaaaaaaaaaaaaaaaaaaaaaaaaaaaaaaaaaaaaaaaaagcccagccggctccccaacctctaccgaggagggcacctctgagtccgccacccccgagagcggccctggcacctccaccgagcccagcgagggcagcgcacccggcagccctgccggcagccccacctccacagaggagggaaccagcaccgagcccagcgaaggcagcgccccaggcaccagcaccgagcctagtgagcaggagattaaacggatcaacaagatcagaagaagacttgtgaaagacagcaacaccaagaaggccggcaagacaggccccatgaaaaccctgctggttagagtgatgacacccgatctgagagagcggctggaaaacctgagaaagaagcctgaaaatatcccccagcccatcagcaatacatctagagccaacctgaataagctgctgaccgattacaccgaaatgaagaaggcgatcctgcatgtgtactgggaagagttccagaaggaccctgtgggcctgatgagccgggtggcccagcctgccagcaagaagatcgatcagaacaagctgaaacctgagatggacgagaagggcaacctgaccaccgccggctttgcctgctctcagtgtggccagcccctgttcgtgtacaagctggagcaggtgtctgagaagggcaaggcttacaccaactacttcggacggtgcaatgtggccgagcacgaaaagctgatcctgctggcccagctgaagcccgagaaggatagcgacgaagccgtgacatatagcctgggaaagtttgggcagagggccctggatttctacagcattcatgtgaccaaggagtccacccaccccgtgaagcccctggcccagatcgccggaaacagatacgcctccggacctgtgggaaaggccctgagcgacgcatgtatgggcacaatcgcctccttcctgtctaagtaccaggacatcatcatcgaacaccagaaggtggtgaagggcaaccagaagagactggagagcctgcgggagctggccggcaaggaaaacctggaataccctagcgtgaccctgccacctcagcctcacaccaaggagggcgttgatgcctacaacgaagtgatcgcccgggtgcgaatgtgggtgaacctgaacctgtggcagaagctgaagctaagcagagatgatgccaagcctctgctgagactgaagggattcccttcctttcctctggtcgagagacaggccaacgaagtggactggtgggacatggtgtgtaacgtgaagaagctgatcaacgagaaaaaggaggatggcaaggtgttttggcagaatctggctggctacaagagacaggaagccctgagaccatacctgagcagcgaggaagatcggaagaagggaaagaaattcgctcggtaccagctgggcgacctgctgctgcacctggaaaagaagcacggcgaggactggggaaaggtgtacgacgaggcctgggagcggattgacaagaaagtggaaggcctgagcaagcacatcaagctggaagaggaacggagaagcgaggacgcccagagcaaggccgccctgaccgactggctgcgggctaaggccagcttcgtgatcgagggcctgaaggaggccgacaaggacgagttctgcagatgcgagctgaagctgcagaagtggtacggggacctgcggggaaagcccttcgccatcgaagccgagaacagcatcctggacatcagcggcttcagcaagcagtacaactgtgccttcatctggcagaaggacggcgtgaagaagctgaacctgtacctgatcatcaactacttcaagggcggcaagctgcggttcaagaagatcaaacctgaagccttcgaagccaacagattctacaccgtgatcaacaaaaagagcggcgagatcgtgcccatggaggtgaacttcaacttcgacgaccccaacctgatcatcctgcctctggcctttggcaagagacagggcagagaattcatctggaacgacctgctgtccctggaaaccggcagcctgaagctggccaacggaagagtgatcgagaagacactgtacaacagaagaacccggcaggatgagcctgccctgttcgtggccctgaccttcgagcggcgggaggtcctggactcctccaatatcaaaccaatgaacctgatcggcgtggcaagaggcgaaaacatccccgccgtgatcgccctgaccgaccccgagggctgcccactgagccggtttaaggatagcctgggaaacccaacccacatcctgagaatcggcgagagctataaggagaagcagcggaccatccaggccaagaaggaggtggagcagcggagagccggcggctacagccggaagtacgccagcaaagccaagaatctggcagacgatatggtgagaaacaccgctagagatctgctgtactacgccgtgacccaggatgccatgctgatcttcgccaacctgagccggggcttcggccggcagggcaagcggaccttcatggccgagagacagtacacacggatggaggactggctgaccgccaagctggcctacgagggcctgagcaagacctacctgtccaagacactggcccagtacacctccaagacatgcagcaactgtgggtttaccatcaccagcgccgactacgacagggtgctggagaagctgaagaagacagcaacaggctggatgaccacaattaacggcaaggagctgaaggtggagggccagattacctactacaacagatacaagagacagaacgtagtcaaggacctgtccgtcgagctggatagactgagcgaagaatctgtgaacaacgacatctcctcctggacaaagggcagaagcggagaagctctgagcctcctgaagaaaagattctcccatagacccgtgcaggagaagttcgtgtgcctgaactgcggcttcgagacacacgcagccgagcaagccgccctgaacatcgccagatcctggctgttcctgcggagccaggagtacaagaaataccagacaaacaagacaaccggcaacaccgataagagagccttcgtcgagacctggcagtccttttaccggaagaagcttaaggaggtgtggaaacctgccgtgcggtctggcggatctggcggaggctccaccagccccaagaaaaagagaaaagtctaagctgccttctgcggggcttgccttctggccatgcccttcttctctcccttgcacctgtacctcttggtctttgaataaagcctgagtaggaaggctagcaaaaaaaaaaaaaaaaaaaaaaaaaaaaaaaaaaaaaaaaaaaaaaaaaaaaaaaaaaaaaaaaaaaaaaaaaaaaaaaa

SEQ ID NO: 9465 - RNA, 8787 nt, synthetic construct
  source 1..8787: mol_type = other RNA
aggaaataagagagaaaagaagagtaagaagaaatataagagccaccatggcccctaagaagaagcgtaaagtgagccggatgaaccacgaccaggagttcgacccccctaaggtgtaccctcccgtccccgccgagaagagaaagcccatccgggtcctgagcctgttcgatggcatcgccaccggtctgctggtgctgaaggacctgggcatccaggtggataggtacattgcctccgaggtgtgcgaggactccatcaccgtgggaatggtgcgtcatcagggcaagatcatgtacgtgggcgacgtgcggagcgtgacacagaagcatatccaggagtggggccctttcgacctggtgatcggcggcagcccttgcaatgacctgagcatcgtgaacccagcccggaagggcctgtacgagggaaccggcagactgttcttcgagttttacagactgctgcacgacgcccggcctaaggaaggcgacgaccggcccttcttttggctgttcgagaatgtggtggccatgggagtcagcgacaagcgggatattagccggttcctggagagcaaccccgtgatgatcgatgccaaggaagtgagcgccgcccaccgggccagatacttctggggcaatctgcctggcatgaacagacccctggccagcaccgtgaacgacaagctggagctgcaggagtgcctggagcacggccggatcgccaagttcagcaaggtgagaaccatcaccacccgaagcaacagcatcaaacaaggcaaggaccagcactttcctgtgttcatgaacgagaaggaggacatcctgtggtgtaccgagatggagagagtgttcgggttcccagtccactacacagatgtcagcaacatgtctagactggccagacagagactgctgggaagaagctggtccgtccctgtgatcagacacctgttcgcccctctgaaggagtacttcgcctgcgtgagcagcggcaacagcaacgccaacagccggggccccagcttctctagcggcctggtgccactgtccctgagagggagccacatgggccccatggagatctacaaaaccgtgagcgcctggaagcggcagcctgtgcgcgtgctgagcctgtttcggaatatcgataaagtcctgaaaagcctgggattcctggagagcggctctggctccggcggtggcaccctgaagtacgtggaggatgtgacaaacgtggtcagacgggatgtggagaagtggggccccttcgatctggtgtacggcagcacccaacccctgggcagctcttgtgaccggtgccctggctggtacatgtttcagttccaccggatcctgcagtacgccctgccgagacaggagtcccagcggccattcttttggattttcatggacaacttgctgctgaccgaggatgaccaggaaactaccactcggttcctgcagaccgaagccgtgaccctgcaggacgtgagaggccgggactaccagaacgccatgcgggtgtggtccaacatccctggactgaaaagcaagcacgcacctctgacccctaaagaagaggagtacctgcaggcccaggtgcggagcagaagcaagctggacgcccctaaggtggatctgctggtgaagaattgcctcctgcccctgagagagtacttcaagtatttcagccagaatagtctgcccctgggaggcagcggcggcggcctgcaggagcccgtgagcttcgccgaggtggccgtgtacttcagcagggaggagtgggccctgctggaccccgcccagagggccctgtacagggacgtgatgctggagacctaccagtgcgtggcctggctggcccccctgcccgcccccaagcccggcctgatcagcctgctggagggcggcgaggacccctggatccccgacgtgaggagccccgaggccgtgcccggcgacctgagccccggcggcccaagcagcggcgcccctcctcccagcggcggcaggcggcccaagcagcggcgcccctcctcccagcggcggcagcccagccggctccccaacctctaccgaggagggcacctctgagtccgccacccccgagagcggccctggcacctccaccgagcccagcgagggcagcgcacccggcagccctgccggcagccccacctccacagaggagggaaccagcaccgagcccagcgaaggcagcgccccaggcaccagcaccgagcctagtgagcaggagattaaacggatcaacaagatcagaagaagacttgtgaaagacagcaacaccaagaaggccggcaagacaggccccatgaaaaccctgctggttagagtgatgacacccgatctgagagagcggctggaaaacctgagaaagaagcctgaaaatatcccccagcccatcagcaatacatctagagccaacctgaataagctgctgaccgattacaccgaaatgaagaaggcgatcctgcatgtgtactgggaagagttccagaaggaccctgtgggcctgatgagccgggtggcccagcctgccagcaagaagatcgatcagaacaagctgaaacctgagatggacgagaagggcaacctgaccaccgccggctttgcctgctctcagtgtggccagcccctgttcgtgtacaagctggagcaggtgtctgagaagggcaaggcttacaccaactacttcggacggtgcaatgtggccgagcacgaaaagctgatcctgctggcccagctgaagcccgagaaggatagcgacgaagccgtgacatatagcctgggaaagtttgggcagagggccctggatttctacagcattcatgtgaccaaggagtccacccaccccgtgaagcccctggcccagatcgccggaaacagatacgcctccggacctgtgggaaaggccctgagcgacgcatgtatgggcacaatcgcctccttcctgtctaagtaccaggacatcatcatcgaacaccagaaggtggtgaagggcaaccagaagagactggagagcctgcgggagctggccggcaaggaaaacctggaataccctagcgtgaccctgccacctcagcctcacaccaaggagggcgttgatgcctacaacgaagtgatcgcccgggtgcgaatgtgggtgaacctgaacctgtggcagaagctgaagctaagcagagatgatgccaagcctctgctgagactgaagggattcccttcctttcctctggtcgagagacaggccaacgaagtggactggtgggacatggtgtgtaacgtgaagaagctgatcaacgagaaaaaggaggatggcaaggtgttttggcagaatctggctggctacaagagacaggaagccctgagaccatacctgagcagcgaggaagatcggaagaagggaaagaaattcgctcggtaccagctgggcgacctgctgctgcacctggaaaagaagcacggcgaggactggggaaaggtgtacgacgaggcctgggagcggattgacaagaaagtggaaggcctgagcaagcacatcaagctggaagaggaacggagaagcgaggacgcccagagcaaggccgccctgaccgactggctgcgggctaaggccagcttcgtgatcgagggcctgaaggaggccgacaaggacgagttctgcagatgcgagctgaagctgcagaagtggtacggggacctgcggggaaagcccttcgccatcgaagccgagaacagcatcctggacatcagcggcttcagcaagcagtacaactgtgccttcatctggcagaaggacggcgtgaagaagctgaacctgtacctgatcatcaactacttcaagggcggcaagctgcggttcaagaagatcaaacctgaagccttcgaagccaacagattctacaccgtgatcaacaaaaagagcggcgagatcgtgcccatggaggtgaacttcaacttcgacgaccccaacctgatcatcctgcctctggcctttggcaagagacagggcagagaattcatctggaacgacctgctgtccctggaaaccggcagcctgaagctggccaacggaagagtgatcgagaagacactgtacaacagaagaacccggcaggatgagcctgccctgttcgtggccctgaccttcgagcggcgggaggtcctggactcctccaatatcaaaccaatgaacctgatcggcgtggcaagaggcgaaaacatccccgccgtgatcgccctgaccgaccccgagggctgcccactgagccggtttaaggatagcctgggaaacccaacccacatcctgagaatcggcgagagctataaggagaagcagcggaccatccaggccaagaaggaggtggagcagcggagagccggcggctacagccggaagtacgccagcaaagccaagaatctggcagacgatatggtgagaaacaccgctagagatctgctgtactacgccgtgacccaggatgccatgctgatcttcgccaacctgagccggggcttcggccggcagggcaagcggaccttcatggccgagagacagtacacacggatggaggactggctgaccgccaagctggcctacgagggcctgagcaagacctacctgtccaagacactggcccagtacacctccaagacatgcagcaactgtgggtttaccatcaccagcgccgactacgacagggtgctggagaagctgaagaagacagcaacaggctggatgaccacaattaacggcaaggagctgaaggtggagggccagattacctactacaacagatacaagagacagaacgtagtcaaggacctgtccgtcgagctggatagactgagcgaagaatctgtgaacaacgacatctcctcctggacaaagggcagaagcggagaagctctgagcctcctgaagaaaagattctcccatagacccgtgcaggagaagttcgtgtgcctgaactgcggcttcgagacacacgcagccgagcaagccgccctgaacatcgccagatcctggctgttcctgcggagccaggagtacaagaaataccagacaaacaagacaaccggcaacaccgataagagagccttcgtcgagacctggcagtccttttaccggaagaagcttaaggaggtgtggaaacctgccgtgcggtctggcggatctggcggaggctccaccagccccaagaaaaagagaaaagtctaagctgccttctgcggggcttgccttctggccatgcccttcttctctcccttgcacctgtacctcttggtctttgaataaagcctgagtaggaaggctagcaaaaaaaaaaaaaaaaaaaaaaaaaaaaaaaaaaaaaaaaaaaaaaaaaaaaaaaaaaaaaaaaaaaaaaaaaaaaaaaagcccagccggctccccaacctctaccgaggagggcacctctgagtccgccacccccgagagcggccctggcacctccaccgagcccagcgagggcagcgcacccggcagccctgccggcagccccacctccacagaggagggaaccagcaccgagcccagcgaaggcagcgccccaggcaccagcaccgagcctagtgagcaggagattaaacggatcaacaagatcagaagaagacttgtgaaagacagcaacaccaagaaggccggcaagacaggccccatgaaaaccctgctggttagagtgatgacacccgatctgagagagcggctggaaaacctgagaaagaagcctgaaaatatcccccagcccatcagcaatacatctagagccaacctgaataagctgctgaccgattacaccgaaatgaagaaggcgatcctgcatgtgtactgggaagagttccagaaggaccctgtgggcctgatgagccgggtggcccagcctgccagcaagaagatcgatcagaacaagctgaaacctgagatggacgagaagggcaacctgaccaccgccggctttgcctgctctcagtgtggccagcccctgttcgtgtacaagctggagcaggtgtctgagaagggcaaggcttacaccaactacttcggacggtgcaatgtggccgagcacgaaaagctgatcctgctggcccagctgaagcccgagaaggatagcgacgaagccgtgacatatagcctgggaaagtttgggcagagggccctggatttctacagcattcatgtgaccaaggagtccacccaccccgtgaagcccctggcccagatcgccggaaacagatacgcctccggacctgtgggaaaggccctgagcgacgcatgtatgggcacaatcgcctccttcctgtctaagtaccaggacatcatcatcgaacaccagaaggtggtgaagggcaaccagaagagactggagagcctgcgggagctggccggcaaggaaaacctggaataccctagcgtgaccctgccacctcagcctcacaccaaggagggcgttgatgcctacaacgaagtgatcgcccgggtgcgaatgtgggtgaacctgaacctgtggcagaagctgaagctaagcagagatgatgccaagcctctgctgagactgaagggattcccttcctttcctctggtcgagagacaggccaacgaagtggactggtgggacatggtgtgtaacgtgaagaagctgatcaacgagaaaaaggaggatggcaaggtgttttggcagaatctggctggctacaagagacaggaagccctgagaccatacctgagcagcgaggaagatcggaagaagggaaagaaattcgctcggtaccagctgggcgacctgctgctgcacctggaaaagaagcacggcgaggactggggaaaggtgtacgacgaggcctgggagcggattgacaagaaagtggaaggcctgagcaagcacatcaagctggaagaggaacggagaagcgaggacgcccagagcaaggccgccctgaccgactggctgcgggctaaggccagcttcgtgatcgagggcctgaaggaggccgacaaggacgagttctgcagatgcgagctgaagctgcagaagtggtacggggacctgcggggaaagcccttcgccatcgaagccgagaacagcatcctggacatcagcggcttcagcaagcagtacaactgtgccttcatctggcagaaggacggcgtgaagaagctgaacctgtacctgatcatcaactacttcaagggcggcaagctgcggttcaagaagatcaaacctgaagccttcgaagccaacagattctacaccgtgatcaacaaaaagagcggcgagatcgtgcccatggaggtgaacttcaacttcgacgaccccaacctgatcatcctgcctctggcctttggcaagagacagggcagagaattcatctggaacgacctgctgtccctggaaaccggcagcctgaagctggccaacggaagagtgatcgagaagacactgtacaacagaagaacccggcaggatgagcctgccctgttcgtggccctgaccttcgagcggcgggaggtcctggactcctccaatatcaaaccaatgaacctgatcggcgtggcaagaggcgaaaacatccccgccgtgatcgccctgaccgaccccgagggctgcccactgagccggtttaaggatagcctgggaaacccaacccacatcctgagaatcggcgagagctataaggagaagcagcggaccatccaggccaagaaggaggtggagcagcggagagccggcggctacagccggaagtacgccagcaaagccaagaatctggcagacgatatggtgagaaacaccgctagagatctgctgtactacgccgtgacccaggatgccatgctgatcttcgccaacctgagccggggcttcggccggcagggcaagcggaccttcatggccgagagacagtacacacggatggaggactggctgaccgccaagctggcctacgagggcctgagcaagacctacctgtccaagacactggcccagtacacctccaagacatgcagcaactgtgggtttaccatcaccagcgccgactacgacagggtgctggagaagctgaagaagacagcaacaggctggatgaccacaattaacggcaaggagctgaaggtggagggccagattacctactacaacagatacaagagacagaacgtagtcaaggacctgtccgtcgagctggatagactgagcgaagaatctgtgaacaacgacatctcctcctggacaaagggcagaagcggagaagctctgagcctcctgaagaaaagattctcccatagacccgtgcaggagaagttcgtgtgcctgaactgcggcttcgagacacacgcagccgagcaagccgccctgaacatcgccagatcctggctgttcctgcggagccaggagtacaagaaataccagacaaacaagacaaccggcaacaccgataagagagccttcgtcgagacctggcagtccttttaccggaagaagcttaaggaggtgtggaaacctgccgtgcggtctggcggatctggcggaggctccaccagccccaagaaaaagagaaaagtctaagctgccttctgcggggcttgccttctggccatgcccttcttctctcccttgcacctgtacctcttggtctttgaataaagcctgagtaggaaggctagcaaaaaaaaaaaaaaaaaaaaaaaaaaaaaaaaaaaaaaaaaaaaaaaaaaaaaaaaaaaaaaaaaaaaaaaaaaaaaaaa

SEQ ID NO: 9466 - RNA, 8787 nt, synthetic construct
  source 1..8787: mol_type = other RNA
aggaaataagagagaaaagaagagtaagaagaaatataagagccaccatggcccctaagaagaagcgtaaagtgagccggatgaaccacgaccaggagttcgacccccctaaggtgtaccctcccgtccccgccgagaagagaaagcccatccgggtcctgagcctgttcgatggcatcgccaccggtctgctggtgctgaaggacctgggcatccaggtggataggtacattgcctccgaggtgtgcgaggactccatcaccgtgggaatggtgcgtcatcagggcaagatcatgtacgtgggcgacgtgcggagcgtgacacagaagcatatccaggagtggggccctttcgacctggtgatcggcggcagcccttgcaatgacctgagcatcgtgaacccagcccggaagggcctgtacgagggaaccggcagactgttcttcgagttttacagactgctgcacgacgcccggcctaaggaaggcgacgaccggcccttcttttggctgttcgagaatgtggtggccatgggagtcagcgacaagcgggatattagccggttcctggagagcaaccccgtgatgatcgatgccaaggaagtgagcgccgcccaccgggccagatacttctggggcaatctgcctggcatgaacagacccctggccagcaccgtgaacgacaagctggagctgcaggagtgcctggagcacggccggatcgccaagttcagcaaggtgagaaccatcaccacccgaagcaacagcatcaaacaaggcaaggaccagcactttcctgtgttcatgaacgagaaggaggacatcctgtggtgtaccgagatggagagagtgttcgggttcccagtccactacacagatgtcagcaacatgtctagactggccagacagagactgctgggaagaagctggtccgtccctgtgatcagacacctgttcgcccctctgaaggagtacttcgcctgcgtgagcagcggcaacagcaacgccaacagccggggccccagcttctctagcggcctggtgccactgtccctgagagggagccacatgggccccatggagatctacaaaaccgtgagcgcctggaagcggcagcctgtgcgcgtgctgagcctgtttcggaatatcgataaagtcctgaaaagcctgggattcctggagagcggctctggctccggcggtggcaccctgaagtacgtggaggatgtgacaaacgtggtcagacgggatgtggagaagtggggccccttcgatctggtgtacggcagcacccaacccctgggcagctcttgtgaccggtgccctggctggtacatgtttcagttccaccggatcctgcagtacgccctgccgagacaggagtcccagcggccattcttttggattttcatggacaacttgctgctgaccgaggatgaccaggaaactaccactcggttcctgcagaccgaagccgtgaccctgcaggacgtgagaggccgggactaccagaacgccatgcgggtgtggtccaacatccctggactgaaaagcaagcacgcacctctgacccctaaagaagaggagtacctgcaggcccaggtgcggagcagaagcaagctggacgcccctaaggtggatctgctggtgaagaattgcctcctgcccctgagagagtacttcaagtatttcagccagaatagtctgcccctgggaggcagcggcggcggcatggagctgagggaggccttcgaggacgtggccgtgtacttcaccaggaaggagtgggagctgctggaggacgaggacaaggagctgtacagggacctgatgctgaggaactaccaggccctggtgagcctgggctaccagggccccacccccggcctgatctgcaggatcaagcagagggaggtggagctgtgggtgtgcgacgacgagcaccacggcgagagcagcgtgagcgagaacctgggcggcccaagcagcggcgcccctcctcccagcggcggcaggcggcccaagcagcggcgcccctcctcccagcggcggcagcccagccggctccccaacctctaccgaggagggcacctctgagtccgccacccccgagagcggccctggcacctccaccgagcccagcgagggcagcgcacccggcagccctgccggcagccccacctccacagaggagggaaccagcaccgagcccagcgaaggcagcgccccaggcaccagcaccgagcctagtgagcaggagattaaacggatcaacaagatcagaagaagacttgtgaaagacagcaacaccaagaaggccggcaagacaggccccatgaaaaccctgctggttagagtgatgacacccgatctgagagagcggctggaaaacctgagaaagaagcctgaaaatatcccccagcccatcagcaatacatctagagccaacctgaataagctgctgaccgattacaccgaaatgaagaaggcgatcctgcatgtgtactgggaagagttccagaaggaccctgtgggcctgatgagccgggtggcccagcctgccagcaagaagatcgatcagaacaagctgaaacctgagatggacgagaagggcaacctgaccaccgccggctttgcctgctctcagtgtggccagcccctgttcgtgtacaagctggagcaggtgtctgagaagggcaaggcttacaccaactacttcggacggtgcaatgtggccgagcacgaaaagctgatcctgctggcccagctgaagcccgagaaggatagcgacgaagccgtgacatatagcctgggaaagtttgggcagagggccctggatttctacagcattcatgtgaccaaggagtccacccaccccgtgaagcccctggcccagatcgccggaaacagatacgcctccggacctgtgggaaaggccctgagcgacgcatgtatgggcacaatcgcctccttcctgtctaagtaccaggacatcatcatcgaacaccagaaggtggtgaagggcaaccagaagagactggagagcctgcgggagctggccggcaaggaaaacctggaataccctagcgtgaccctgccacctcagcctcacaccaaggagggcgttgatgcctacaacgaagtgatcgcccgggtgcgaatgtgggtgaacctgaacctgtggcagaagctgaagctaagcagagatgatgccaagcctctgctgagactgaagggattcccttcctttcctctggtcgagagacaggccaacgaagtggactggtgggacatggtgtgtaacgtgaagaagctgatcaacgagaaaaaggaggatggcaaggtgttttggcagaatctggctggctacaagagacaggaagccctgagaccatacctgagcagcgaggaagatcggaagaagggaaagaaattcgctcggtaccagctgggcgacctgctgctgcacctggaaaagaagcacggcgaggactggggaaaggtgtacgacgaggcctgggagcggattgacaagaaagtggaaggcctgagcaagcacatcaagctggaagaggaacggagaagcgaggacgcccagagcaaggccgccctgaccgactggctgcgggctaaggccagcttcgtgatcgagggcctgaaggaggccgacaaggacgagttctgcagatgcgagctgaagctgcagaagtggtacggggacctgcggggaaagcccttcgccatcgaagccgagaacagcatcctggacatcagcggcttcagcaagcagtacaactgtgccttcatctggcagaaggacggcgtgaagaagctgaacctgtacctgatcatcaactacttcaagggcggcaagctgcggttcaagaagatcaaacctgaagccttcgaagccaacagattctacaccgtgatcaacaaaaagagcggcgagatcgtgcccatggaggtgaacttcaacttcgacgaccccaacctgatcatcctgcctctggcctttggcaagagacagggcagagaattcatctggaacgacctgctgtccctggaaaccggcagcctgaagctggccaacggaagagtgatcgagaagacactgtacaacagaagaacccggcaggatgagcctgccctgttcgtggccctgaccttcgagcggcgggaggtcctggactcctccaatatcaaaccaatgaacctgatcggcgtggcaagaggcgaaaacatccccgccgtgatcgccctgaccgaccccgagggctgcccactgagccggtttaaggatagcctgggaaacccaacccacatcctgagaatcggcgagagctataaggagaagcagcggaccatccaggccaagaaggaggtggagcagcggagagccggcggctacagccggaagtacgccagcaaagccaagaatctggcagacgatatggtgagaaacaccgctagagatctgctgtactacgccgtgacccaggatgccatgctgatcttcgccaacctgagccggggcttcggccggcagggcaagcggaccttcatggccgagagacagtacacacggatggaggactggctgaccgccaagctggcctacgagggcctgagcaagacctacctgtccaagacactggcccagtacacctccaagacatgcagcaactgtgggtttaccatcaccagcgccgactacgacagggtgctggagaagctgaagaagacagcaacaggctggatgaccacaattaacggcaaggagctgaaggtggagggccagattacctactacaacagatacaagagacagaacgtagtcaaggacctgtccgtcgagctggatagactgagcgaagaatctgtgaacaacgacatctcctcctggacaaagggcagaagcggagaagctctgagcctcctgaagaaaagattctcccatagacccgtgcaggagaagttcgtgtgcctgaactgcggcttcgagacacacgcagccgagcaagccgccctgaacatcgccagatcctggctgttcctgcggagccaggagtacaagaaataccagacaaacaagacaaccggcaacaccgataagagagccttcgtcgagacctggcagtccttttaccggaagaagcttaaggaggtgtggaaacctgccgtgcggtctggcggatctggcggaggctccaccagccccaagaaaaagagaaaagtctaagctgccttctgcggggcttgccttctggccatgcccttcttctctcccttgcacctgtacctcttggtctttgaataaagcctgagtaggaaggctagcaaaaaaaaaaaaaaaaaaaaaaaaaaaaaaaaaaaaaaaaaaaaaaaaaaaaaaaaaaaaaaaaaaaaaaaaaaaaaaaagcccagccggctccccaacctctaccgaggagggcacctctgagtccgccacccccgagagcggccctggcacctccaccgagcccagcgagggcagcgcacccggcagccctgccggcagccccacctccacagaggagggaaccagcaccgagcccagcgaaggcagcgccccaggcaccagcaccgagcctagtgagcaggagattaaacggatcaacaagatcagaagaagacttgtgaaagacagcaacaccaagaaggccggcaagacaggccccatgaaaaccctgctggttagagtgatgacacccgatctgagagagcggctggaaaacctgagaaagaagcctgaaaatatcccccagcccatcagcaatacatctagagccaacctgaataagctgctgaccgattacaccgaaatgaagaaggcgatcctgcatgtgtactgggaagagttccagaaggaccctgtgggcctgatgagccgggtggcccagcctgccagcaagaagatcgatcagaacaagctgaaacctgagatggacgagaagggcaacctgaccaccgccggctttgcctgctctcagtgtggccagcccctgttcgtgtacaagctggagcaggtgtctgagaagggcaaggcttacaccaactacttcggacggtgcaatgtggccgagcacgaaaagctgatcctgctggcccagctgaagcccgagaaggatagcgacgaagccgtgacatatagcctgggaaagtttgggcagagggccctggatttctacagcattcatgtgaccaaggagtccacccaccccgtgaagcccctggcccagatcgccggaaacagatacgcctccggacctgtgggaaaggccctgagcgacgcatgtatgggcacaatcgcctccttcctgtctaagtaccaggacatcatcatcgaacaccagaaggtggtgaagggcaaccagaagagactggagagcctgcgggagctggccggcaaggaaaacctggaataccctagcgtgaccctgccacctcagcctcacaccaaggagggcgttgatgcctacaacgaagtgatcgcccgggtgcgaatgtgggtgaacctgaacctgtggcagaagctgaagctaagcagagatgatgccaagcctctgctgagactgaagggattcccttcctttcctctggtcgagagacaggccaacgaagtggactggtgggacatggtgtgtaacgtgaagaagctgatcaacgagaaaaaggaggatggcaaggtgttttggcagaatctggctggctacaagagacaggaagccctgagaccatacctgagcagcgaggaagatcggaagaagggaaagaaattcgctcggtaccagctgggcgacctgctgctgcacctggaaaagaagcacggcgaggactggggaaaggtgtacgacgaggcctgggagcggattgacaagaaagtggaaggcctgagcaagcacatcaagctggaagaggaacggagaagcgaggacgcccagagcaaggccgccctgaccgactggctgcgggctaaggccagcttcgtgatcgagggcctgaaggaggccgacaaggacgagttctgcagatgcgagctgaagctgcagaagtggtacggggacctgcggggaaagcccttcgccatcgaagccgagaacagcatcctggacatcagcggcttcagcaagcagtacaactgtgccttcatctggcagaaggacggcgtgaagaagctgaacctgtacctgatcatcaactacttcaagggcggcaagctgcggttcaagaagatcaaacctgaagccttcgaagccaacagattctacaccgtgatcaacaaaaagagcggcgagatcgtgcccatggaggtgaacttcaacttcgacgaccccaacctgatcatcctgcctctggcctttggcaagagacagggcagagaattcatctggaacgacctgctgtccctggaaaccggcagcctgaagctggccaacggaagagtgatcgagaagacactgtacaacagaagaacccggcaggatgagcctgccctgttcgtggccctgaccttcgagcggcgggaggtcctggactcctccaatatcaaaccaatgaacctgatcggcgtggcaagaggcgaaaacatccccgccgtgatcgccctgaccgaccccgagggctgcccactgagccggtttaaggatagcctgggaaacccaacccacatcctgagaatcggcgagagctataaggagaagcagcggaccatccaggccaagaaggaggtggagcagcggagagccggcggctacagccggaagtacgccagcaaagccaagaatctggcagacgatatggtgagaaacaccgctagagatctgctgtactacgccgtgacccaggatgccatgctgatcttcgccaacctgagccggggcttcggccggcagggcaagcggaccttcatggccgagagacagtacacacggatggaggactggctgaccgccaagctggcctacgagggcctgagcaagacctacctgtccaagacactggcccagtacacctccaagacatgcagcaactgtgggtttaccatcaccagcgccgactacgacagggtgctggagaagctgaagaagacagcaacaggctggatgaccacaattaacggcaaggagctgaaggtggagggccagattacctactacaacagatacaagagacagaacgtagtcaaggacctgtccgtcgagctggatagactgagcgaagaatctgtgaacaacgacatctcctcctggacaaagggcagaagcggagaagctctgagcctcctgaagaaaagattctcccatagacccgtgcaggagaagttcgtgtgcctgaactgcggcttcgagacacacgcagccgagcaagccgccctgaacatcgccagatcctggctgttcctgcggagccaggagtacaagaaataccagacaaacaagacaaccggcaacaccgataagagagccttcgtcgagacctggcagtccttttaccggaagaagcttaaggaggtgtggaaacctgccgtgcggtctggcggatctggcggaggctccaccagccccaagaaaaagagaaaagtctaagctgccttctgcggggcttgccttctggccatgcccttcttctctcccttgcacctgtacctcttggtctttgaataaagcctgagtaggaaggctagcaaaaaaaaaaaaaaaaaaaaaaaaaaaaaaaaaaaaaaaaaaaaaaaaaaaaaaaaaaaaaaaaaaaaaaaaaaaaaaaa

SEQ ID NO: 9467 - RNA, 8787 nt, synthetic construct
  source 1..8787: mol_type = other RNA
aggaaataagagagaaaagaagagtaagaagaaatataagagccaccatggcccctaagaagaagcgtaaagtgagccggatgaaccacgaccaggagttcgacccccctaaggtgtaccctcccgtccccgccgagaagagaaagcccatccgggtcctgagcctgttcgatggcatcgccaccggtctgctggtgctgaaggacctgggcatccaggtggataggtacattgcctccgaggtgtgcgaggactccatcaccgtgggaatggtgcgtcatcagggcaagatcatgtacgtgggcgacgtgcggagcgtgacacagaagcatatccaggagtggggccctttcgacctggtgatcggcggcagcccttgcaatgacctgagcatcgtgaacccagcccggaagggcctgtacgagggaaccggcagactgttcttcgagttttacagactgctgcacgacgcccggcctaaggaaggcgacgaccggcccttcttttggctgttcgagaatgtggtggccatgggagtcagcgacaagcgggatattagccggttcctggagagcaaccccgtgatgatcgatgccaaggaagtgagcgccgcccaccgggccagatacttctggggcaatctgcctggcatgaacagacccctggccagcaccgtgaacgacaagctggagctgcaggagtgcctggagcacggccggatcgccaagttcagcaaggtgagaaccatcaccacccgaagcaacagcatcaaacaaggcaaggaccagcactttcctgtgttcatgaacgagaaggaggacatcctgtggtgtaccgagatggagagagtgttcgggttcccagtccactacacagatgtcagcaacatgtctagactggccagacagagactgctgggaagaagctggtccgtccctgtgatcagacacctgttcgcccctctgaaggagtacttcgcctgcgtgagcagcggcaacagcaacgccaacagccggggccccagcttctctagcggcctggtgccactgtccctgagagggagccacatgggccccatggagatctacaaaaccgtgagcgcctggaagcggcagcctgtgcgcgtgctgagcctgtttcggaatatcgataaagtcctgaaaagcctgggattcctggagagcggctctggctccggcggtggcaccctgaagtacgtggaggatgtgacaaacgtggtcagacgggatgtggagaagtggggccccttcgatctggtgtacggcagcacccaacccctgggcagctcttgtgaccggtgccctggctggtacatgtttcagttccaccggatcctgcagtacgccctgccgagacaggagtcccagcggccattcttttggattttcatggacaacttgctgctgaccgaggatgaccaggaaactaccactcggttcctgcagaccgaagccgtgaccctgcaggacgtgagaggccgggactaccagaacgccatgcgggtgtggtccaacatccctggactgaaaagcaagcacgcacctctgacccctaaagaagaggagtacctgcaggcccaggtgcggagcagaagcaagctggacgcccctaaggtggatctgctggtgaagaattgcctcctgcccctgagagagtacttcaagtatttcagccagaatagtctgcccctgggaggcagcggcggcggcttccaggagaccgtgaccttcaaggacgtggccgtggtgttcagcgaggaggagctgggcctgctggacagcacccagaggaagctgtacagggacgtgatgctggagaacttcaggaacctggtgagcgtgggccacagcagcagcaagcccgacatgatcagccagctggagagggaggagaagctgtgcatgaaggagatccacaccgagaggggcaggcacagcggcggcaggaaccagggcggcccaagcagcggcgcccctcctcccagcggcggcaggcggcccaagcagcggcgcccctcctcccagcggcggcagcccagccggctccccaacctctaccgaggagggcacctctgagtccgccacccccgagagcggccctggcacctccaccgagcccagcgagggcagcgcacccggcagccctgccggcagccccacctccacagaggagggaaccagcaccgagcccagcgaaggcagcgccccaggcaccagcaccgagcctagtgagcaggagattaaacggatcaacaagatcagaagaagacttgtgaaagacagcaacaccaagaaggccggcaagacaggccccatgaaaaccctgctggttagagtgatgacacccgatctgagagagcggctggaaaacctgagaaagaagcctgaaaatatcccccagcccatcagcaatacatctagagccaacctgaataagctgctgaccgattacaccgaaatgaagaaggcgatcctgcatgtgtactgggaagagttccagaaggaccctgtgggcctgatgagccgggtggcccagcctgccagcaagaagatcgatcagaacaagctgaaacctgagatggacgagaagggcaacctgaccaccgccggctttgcctgctctcagtgtggccagcccctgttcgtgtacaagctggagcaggtgtctgagaagggcaaggcttacaccaactacttcggacggtgcaatgtggccgagcacgaaaagctgatcctgctggcccagctgaagcccgagaaggatagcgacgaagccgtgacatatagcctgggaaagtttgggcagagggccctggatttctacagcattcatgtgaccaaggagtccacccaccccgtgaagcccctggcccagatcgccggaaacagatacgcctccggacctgtgggaaaggccctgagcgacgcatgtatgggcacaatcgcctccttcctgtctaagtaccaggacatcatcatcgaacaccagaaggtggtgaagggcaaccagaagagactggagagcctgcgggagctggccggcaaggaaaacctggaataccctagcgtgaccctgccacctcagcctcacaccaaggagggcgttgatgcctacaacgaagtgatcgcccgggtgcgaatgtgggtgaacctgaacctgtggcagaagctgaagctaagcagagatgatgccaagcctctgctgagactgaagggattcccttcctttcctctggtcgagagacaggccaacgaagtggactggtgggacatggtgtgtaacgtgaagaagctgatcaacgagaaaaaggaggatggcaaggtgttttggcagaatctggctggctacaagagacaggaagccctgagaccatacctgagcagcgaggaagatcggaagaagggaaagaaattcgctcggtaccagctgggcgacctgctgctgcacctggaaaagaagcacggcgaggactggggaaaggtgtacgacgaggcctgggagcggattgacaagaaagtggaaggcctgagcaagcacatcaagctggaagaggaacggagaagcgaggacgcccagagcaaggccgccctgaccgactggctgcgggctaaggccagcttcgtgatcgagggcctgaaggaggccgacaaggacgagttctgcagatgcgagctgaagctgcagaagtggtacggggacctgcggggaaagcccttcgccatcgaagccgagaacagcatcctggacatcagcggcttcagcaagcagtacaactgtgccttcatctggcagaaggacggcgtgaagaagctgaacctgtacctgatcatcaactacttcaagggcggcaagctgcggttcaagaagatcaaacctgaagccttcgaagccaacagattctacaccgtgatcaacaaaaagagcggcgagatcgtgcccatggaggtgaacttcaacttcgacgaccccaacctgatcatcctgcctctggcctttggcaagagacagggcagagaattcatctggaacgacctgctgtccctggaaaccggcagcctgaagctggccaacggaagagtgatcgagaagacactgtacaacagaagaacccggcaggatgagcctgccctgttcgtggccctgaccttcgagcggcgggaggtcctggactcctccaatatcaaaccaatgaacctgatcggcgtggcaagaggcgaaaacatccccgccgtgatcgccctgaccgaccccgagggctgcccactgagccggtttaaggatagcctgggaaacccaacccacatcctgagaatcggcgagagctataaggagaagcagcggaccatccaggccaagaaggaggtggagcagcggagagccggcggctacagccggaagtacgccagcaaagccaagaatctggcagacgatatggtgagaaacaccgctagagatctgctgtactacgccgtgacccaggatgccatgctgatcttcgccaacctgagccggggcttcggccggcagggcaagcggaccttcatggccgagagacagtacacacggatggaggactggctgaccgccaagctggcctacgagggcctgagcaagacctacctgtccaagacactggcccagtacacctccaagacatgcagcaactgtgggtttaccatcaccagcgccgactacgacagggtgctggagaagctgaagaagacagcaacaggctggatgaccacaattaacggcaaggagctgaaggtggagggccagattacctactacaacagatacaagagacagaacgtagtcaaggacctgtccgtcgagctggatagactgagcgaagaatctgtgaacaacgacatctcctcctggacaaagggcagaagcggagaagctctgagcctcctgaagaaaagattctcccatagacccgtgcaggagaagttcgtgtgcctgaactgcggcttcgagacacacgcagccgagcaagccgccctgaacatcgccagatcctggctgttcctgcggagccaggagtacaagaaataccagacaaacaagacaaccggcaacaccgataagagagccttcgtcgagacctggcagtccttttaccggaagaagcttaaggaggtgtggaaacctgccgtgcggtctggcggatctggcggaggctccaccagccccaagaaaaagagaaaagtctaagctgccttctgcggggcttgccttctggccatgcccttcttctctcccttgcacctgtacctcttggtctttgaataaagcctgagtaggaaggctagcaaaaaaaaaaaaaaaaaaaaaaaaaaaaaaaaaaaaaaaaaaaaaaaaaaaaaaaaaaaaaaaaaaaaaaaaaaaaaaaagcccagccggctccccaacctctaccgaggagggcacctctgagtccgccacccccgagagcggccctggcacctccaccgagcccagcgagggcagcgcacccggcagccctgccggcagccccacctccacagaggagggaaccagcaccgagcccagcgaaggcagcgccccaggcaccagcaccgagcctagtgagcaggagattaaacggatcaacaagatcagaagaagacttgtgaaagacagcaacaccaagaaggccggcaagacaggccccatgaaaaccctgctggttagagtgatgacacccgatctgagagagcggctggaaaacctgagaaagaagcctgaaaatatcccccagcccatcagcaatacatctagagccaacctgaataagctgctgaccgattacaccgaaatgaagaaggcgatcctgcatgtgtactgggaagagttccagaaggaccctgtgggcctgatgagccgggtggcccagcctgccagcaagaagatcgatcagaacaagctgaaacctgagatggacgagaagggcaacctgaccaccgccggctttgcctgctctcagtgtggccagcccctgttcgtgtacaagctggagcaggtgtctgagaagggcaaggcttacaccaactacttcggacggtgcaatgtggccgagcacgaaaagctgatcctgctggcccagctgaagcccgagaaggatagcgacgaagccgtgacatatagcctgggaaagtttgggcagagggccctggatttctacagcattcatgtgaccaaggagtccacccaccccgtgaagcccctggcccagatcgccggaaacagatacgcctccggacctgtgggaaaggccctgagcgacgcatgtatgggcacaatcgcctccttcctgtctaagtaccaggacatcatcatcgaacaccagaaggtggtgaagggcaaccagaagagactggagagcctgcgggagctggccggcaaggaaaacctggaataccctagcgtgaccctgccacctcagcctcacaccaaggagggcgttgatgcctacaacgaagtgatcgcccgggtgcgaatgtgggtgaacctgaacctgtggcagaagctgaagctaagcagagatgatgccaagcctctgctgagactgaagggattcccttcctttcctctggtcgagagacaggccaacgaagtggactggtgggacatggtgtgtaacgtgaagaagctgatcaacgagaaaaaggaggatggcaaggtgttttggcagaatctggctggctacaagagacaggaagccctgagaccatacctgagcagcgaggaagatcggaagaagggaaagaaattcgctcggtaccagctgggcgacctgctgctgcacctggaaaagaagcacggcgaggactggggaaaggtgtacgacgaggcctgggagcggattgacaagaaagtggaaggcctgagcaagcacatcaagctggaagaggaacggagaagcgaggacgcccagagcaaggccgccctgaccgactggctgcgggctaaggccagcttcgtgatcgagggcctgaaggaggccgacaaggacgagttctgcagatgcgagctgaagctgcagaagtggtacggggacctgcggggaaagcccttcgccatcgaagccgagaacagcatcctggacatcagcggcttcagcaagcagtacaactgtgccttcatctggcagaaggacggcgtgaagaagctgaacctgtacctgatcatcaactacttcaagggcggcaagctgcggttcaagaagatcaaacctgaagccttcgaagccaacagattctacaccgtgatcaacaaaaagagcggcgagatcgtgcccatggaggtgaacttcaacttcgacgaccccaacctgatcatcctgcctctggcctttggcaagagacagggcagagaattcatctggaacgacctgctgtccctggaaaccggcagcctgaagctggccaacggaagagtgatcgagaagacactgtacaacagaagaacccggcaggatgagcctgccctgttcgtggccctgaccttcgagcggcgggaggtcctggactcctccaatatcaaaccaatgaacctgatcggcgtggcaagaggcgaaaacatccccgccgtgatcgccctgaccgaccccgagggctgcccactgagccggtttaaggatagcctgggaaacccaacccacatcctgagaatcggcgagagctataaggagaagcagcggaccatccaggccaagaaggaggtggagcagcggagagccggcggctacagccggaagtacgccagcaaagccaagaatctggcagacgatatggtgagaaacaccgctagagatctgctgtactacgccgtgacccaggatgccatgctgatcttcgccaacctgagccggggcttcggccggcagggcaagcggaccttcatggccgagagacagtacacacggatggaggactggctgaccgccaagctggcctacgagggcctgagcaagacctacctgtccaagacactggcccagtacacctccaagacatgcagcaactgtgggtttaccatcaccagcgccgactacgacagggtgctggagaagctgaagaagacagcaacaggctggatgaccacaattaacggcaaggagctgaaggtggagggccagattacctactacaacagatacaagagacagaacgtagtcaaggacctgtccgtcgagctggatagactgagcgaagaatctgtgaacaacgacatctcctcctggacaaagggcagaagcggagaagctctgagcctcctgaagaaaagattctcccatagacccgtgcaggagaagttcgtgtgcctgaactgcggcttcgagacacacgcagccgagcaagccgccctgaacatcgccagatcctggctgttcctgcggagccaggagtacaagaaataccagacaaacaagacaaccggcaacaccgataagagagccttcgtcgagacctggcagtccttttaccggaagaagcttaaggaggtgtggaaacctgccgtgcggtctggcggatctggcggaggctccaccagccccaagaaaaagagaaaagtctaagctgccttctgcggggcttgccttctggccatgcccttcttctctcccttgcacctgtacctcttggtctttgaataaagcctgagtaggaaggctagcaaaaaaaaaaaaaaaaaaaaaaaaaaaaaaaaaaaaaaaaaaaaaaaaaaaaaaaaaaaaaaaaaaaaaaaaaaaaaaaa

SEQ ID NO: 9468 - RNA, 8787 nt, synthetic construct
  source 1..8787: mol_type = other RNA
aggaaataagagagaaaagaagagtaagaagaaatataagagccaccatggcccctaagaagaagcgtaaagtgagccggatgaaccacgaccaggagttcgacccccctaaggtgtaccctcccgtccccgccgagaagagaaagcccatccgggtcctgagcctgttcgatggcatcgccaccggtctgctggtgctgaaggacctgggcatccaggtggataggtacattgcctccgaggtgtgcgaggactccatcaccgtgggaatggtgcgtcatcagggcaagatcatgtacgtgggcgacgtgcggagcgtgacacagaagcatatccaggagtggggccctttcgacctggtgatcggcggcagcccttgcaatgacctgagcatcgtgaacccagcccggaagggcctgtacgagggaaccggcagactgttcttcgagttttacagactgctgcacgacgcccggcctaaggaaggcgacgaccggcccttcttttggctgttcgagaatgtggtggccatgggagtcagcgacaagcgggatattagccggttcctggagagcaaccccgtgatgatcgatgccaaggaagtgagcgccgcccaccgggccagatacttctggggcaatctgcctggcatgaacagacccctggccagcaccgtgaacgacaagctggagctgcaggagtgcctggagcacggccggatcgccaagttcagcaaggtgagaaccatcaccacccgaagcaacagcatcaaacaaggcaaggaccagcactttcctgtgttcatgaacgagaaggaggacatcctgtggtgtaccgagatggagagagtgttcgggttcccagtccactacacagatgtcagcaacatgtctagactggccagacagagactgctgggaagaagctggtccgtccctgtgatcagacacctgttcgcccctctgaaggagtacttcgcctgcgtgagcagcggcaacagcaacgccaacagccggggccccagcttctctagcggcctggtgccactgtccctgagagggagccacatgggccccatggagatctacaaaaccgtgagcgcctggaagcggcagcctgtgcgcgtgctgagcctgtttcggaatatcgataaagtcctgaaaagcctgggattcctggagagcggctctggctccggcggtggcaccctgaagtacgtggaggatgtgacaaacgtggtcagacgggatgtggagaagtggggccccttcgatctggtgtacggcagcacccaacccctgggcagctcttgtgaccggtgccctggctggtacatgtttcagttccaccggatcctgcagtacgccctgccgagacaggagtcccagcggccattcttttggattttcatggacaacttgctgctgaccgaggatgaccaggaaactaccactcggttcctgcagaccgaagccgtgaccctgcaggacgtgagaggccgggactaccagaacgccatgcgggtgtggtccaacatccctggactgaaaagcaagcacgcacctctgacccctaaagaagaggagtacctgcaggcccaggtgcggagcagaagcaagctggacgcccctaaggtggatctgctggtgaagaattgcctcctgcccctgagagagtacttcaagtatttcagccagaatagtctgcccctgggaggcagcggcggcggctaccagatccccgtgagcttcaaggacgtggtggtgggcttcacccaggaggagtggcacaggctgagccccgcccagagggccctgtacagggacgtgatgctggagacctacagcaacctggtgagcgtgggctacgagggcaccaagcccgacgtgatcctgaggctggagcaggaggaggccccctggatcggcgaggccgcctgccccggctgccactgctgggaggacatctggaggggcggcccaagcagcggcgcccctcctcccagcggcggcaggcggcccaagcagcggcgcccctcctcccagcggcggcagcccagccggctccccaacctctaccgaggagggcacctctgagtccgccacccccgagagcggccctggcacctccaccgagcccagcgagggcagcgcacccggcagccctgccggcagccccacctccacagaggagggaaccagcaccgagcccagcgaaggcagcgccccaggcaccagcaccgagcctagtgagcaggagattaaacggatcaacaagatcagaagaagacttgtgaaagacagcaacaccaagaaggccggcaagacaggccccatgaaaaccctgctggttagagtgatgacacccgatctgagagagcggctggaaaacctgagaaagaagcctgaaaatatcccccagcccatcagcaatacatctagagccaacctgaataagctgctgaccgattacaccgaaatgaagaaggcgatcctgcatgtgtactgggaagagttccagaaggaccctgtgggcctgatgagccgggtggcccagcctgccagcaagaagatcgatcagaacaagctgaaacctgagatggacgagaagggcaacctgaccaccgccggctttgcctgctctcagtgtggccagcccctgttcgtgtacaagctggagcaggtgtctgagaagggcaaggcttacaccaactacttcggacggtgcaatgtggccgagcacgaaaagctgatcctgctggcccagctgaagcccgagaaggatagcgacgaagccgtgacatatagcctgggaaagtttgggcagagggccctggatttctacagcattcatgtgaccaaggagtccacccaccccgtgaagcccctggcccagatcgccggaaacagatacgcctccggacctgtgggaaaggccctgagcgacgcatgtatgggcacaatcgcctccttcctgtctaagtaccaggacatcatcatcgaacaccagaaggtggtgaagggcaaccagaagagactggagagcctgcgggagctggccggcaaggaaaacctggaataccctagcgtgaccctgccacctcagcctcacaccaaggagggcgttgatgcctacaacgaagtgatcgcccgggtgcgaatgtgggtgaacctgaacctgtggcagaagctgaagctaagcagagatgatgccaagcctctgctgagactgaagggattcccttcctttcctctggtcgagagacaggccaacgaagtggactggtgggacatggtgtgtaacgtgaagaagctgatcaacgagaaaaaggaggatggcaaggtgttttggcagaatctggctggctacaagagacaggaagccctgagaccatacctgagcagcgaggaagatcggaagaagggaaagaaattcgctcggtaccagctgggcgacctgctgctgcacctggaaaagaagcacggcgaggactggggaaaggtgtacgacgaggcctgggagcggattgacaagaaagtggaaggcctgagcaagcacatcaagctggaagaggaacggagaagcgaggacgcccagagcaaggccgccctgaccgactggctgcgggctaaggccagcttcgtgatcgagggcctgaaggaggccgacaaggacgagttctgcagatgcgagctgaagctgcagaagtggtacggggacctgcggggaaagcccttcgccatcgaagccgagaacagcatcctggacatcagcggcttcagcaagcagtacaactgtgccttcatctggcagaaggacggcgtgaagaagctgaacctgtacctgatcatcaactacttcaagggcggcaagctgcggttcaagaagatcaaacctgaagccttcgaagccaacagattctacaccgtgatcaacaaaaagagcggcgagatcgtgcccatggaggtgaacttcaacttcgacgaccccaacctgatcatcctgcctctggcctttggcaagagacagggcagagaattcatctggaacgacctgctgtccctggaaaccggcagcctgaagctggccaacggaagagtgatcgagaagacactgtacaacagaagaacccggcaggatgagcctgccctgttcgtggccctgaccttcgagcggcgggaggtcctggactcctccaatatcaaaccaatgaacctgatcggcgtggcaagaggcgaaaacatccccgccgtgatcgccctgaccgaccccgagggctgcccactgagccggtttaaggatagcctgggaaacccaacccacatcctgagaatcggcgagagctataaggagaagcagcggaccatccaggccaagaaggaggtggagcagcggagagccggcggctacagccggaagtacgccagcaaagccaagaatctggcagacgatatggtgagaaacaccgctagagatctgctgtactacgccgtgacccaggatgccatgctgatcttcgccaacctgagccggggcttcggccggcagggcaagcggaccttcatggccgagagacagtacacacggatggaggactggctgaccgccaagctggcctacgagggcctgagcaagacctacctgtccaagacactggcccagtacacctccaagacatgcagcaactgtgggtttaccatcaccagcgccgactacgacagggtgctggagaagctgaagaagacagcaacaggctggatgaccacaattaacggcaaggagctgaaggtggagggccagattacctactacaacagatacaagagacagaacgtagtcaaggacctgtccgtcgagctggatagactgagcgaagaatctgtgaacaacgacatctcctcctggacaaagggcagaagcggagaagctctgagcctcctgaagaaaagattctcccatagacccgtgcaggagaagttcgtgtgcctgaactgcggcttcgagacacacgcagccgagcaagccgccctgaacatcgccagatcctggctgttcctgcggagccaggagtacaagaaataccagacaaacaagacaaccggcaacaccgataagagagccttcgtcgagacctggcagtccttttaccggaagaagcttaaggaggtgtggaaacctgccgtgcggtctggcggatctggcggaggctccaccagccccaagaaaaagagaaaagtctaagctgccttctgcggggcttgccttctggccatgcccttcttctctcccttgcacctgtacctcttggtctttgaataaagcctgagtaggaaggctagcaaaaaaaaaaaaaaaaaaaaaaaaaaaaaaaaaaaaaaaaaaaaaaaaaaaaaaaaaaaaaaaaaaaaaaaaaaaaaaaagcccagccggctccccaacctctaccgaggagggcacctctgagtccgccacccccgagagcggccctggcacctccaccgagcccagcgagggcagcgcacccggcagccctgccggcagccccacctccacagaggagggaaccagcaccgagcccagcgaaggcagcgccccaggcaccagcaccgagcctagtgagcaggagattaaacggatcaacaagatcagaagaagacttgtgaaagacagcaacaccaagaaggccggcaagacaggccccatgaaaaccctgctggttagagtgatgacacccgatctgagagagcggctggaaaacctgagaaagaagcctgaaaatatcccccagcccatcagcaatacatctagagccaacctgaataagctgctgaccgattacaccgaaatgaagaaggcgatcctgcatgtgtactgggaagagttccagaaggaccctgtgggcctgatgagccgggtggcccagcctgccagcaagaagatcgatcagaacaagctgaaacctgagatggacgagaagggcaacctgaccaccgccggctttgcctgctctcagtgtggccagcccctgttcgtgtacaagctggagcaggtgtctgagaagggcaaggcttacaccaactacttcggacggtgcaatgtggccgagcacgaaaagctgatcctgctggcccagctgaagcccgagaaggatagcgacgaagccgtgacatatagcctgggaaagtttgggcagagggccctggatttctacagcattcatgtgaccaaggagtccacccaccccgtgaagcccctggcccagatcgccggaaacagatacgcctccggacctgtgggaaaggccctgagcgacgcatgtatgggcacaatcgcctccttcctgtctaagtaccaggacatcatcatcgaacaccagaaggtggtgaagggcaaccagaagagactggagagcctgcgggagctggccggcaaggaaaacctggaataccctagcgtgaccctgccacctcagcctcacaccaaggagggcgttgatgcctacaacgaagtgatcgcccgggtgcgaatgtgggtgaacctgaacctgtggcagaagctgaagctaagcagagatgatgccaagcctctgctgagactgaagggattcccttcctttcctctggtcgagagacaggccaacgaagtggactggtgggacatggtgtgtaacgtgaagaagctgatcaacgagaaaaaggaggatggcaaggtgttttggcagaatctggctggctacaagagacaggaagccctgagaccatacctgagcagcgaggaagatcggaagaagggaaagaaattcgctcggtaccagctgggcgacctgctgctgcacctggaaaagaagcacggcgaggactggggaaaggtgtacgacgaggcctgggagcggattgacaagaaagtggaaggcctgagcaagcacatcaagctggaagaggaacggagaagcgaggacgcccagagcaaggccgccctgaccgactggctgcgggctaaggccagcttcgtgatcgagggcctgaaggaggccgacaaggacgagttctgcagatgcgagctgaagctgcagaagtggtacggggacctgcggggaaagcccttcgccatcgaagccgagaacagcatcctggacatcagcggcttcagcaagcagtacaactgtgccttcatctggcagaaggacggcgtgaagaagctgaacctgtacctgatcatcaactacttcaagggcggcaagctgcggttcaagaagatcaaacctgaagccttcgaagccaacagattctacaccgtgatcaacaaaaagagcggcgagatcgtgcccatggaggtgaacttcaacttcgacgaccccaacctgatcatcctgcctctggcctttggcaagagacagggcagagaattcatctggaacgacctgctgtccctggaaaccggcagcctgaagctggccaacggaagagtgatcgagaagacactgtacaacagaagaacccggcaggatgagcctgccctgttcgtggccctgaccttcgagcggcgggaggtcctggactcctccaatatcaaaccaatgaacctgatcggcgtggcaagaggcgaaaacatccccgccgtgatcgccctgaccgaccccgagggctgcccactgagccggtttaaggatagcctgggaaacccaacccacatcctgagaatcggcgagagctataaggagaagcagcggaccatccaggccaagaaggaggtggagcagcggagagccggcggctacagccggaagtacgccagcaaagccaagaatctggcagacgatatggtgagaaacaccgctagagatctgctgtactacgccgtgacccaggatgccatgctgatcttcgccaacctgagccggggcttcggccggcagggcaagcggaccttcatggccgagagacagtacacacggatggaggactggctgaccgccaagctggcctacgagggcctgagcaagacctacctgtccaagacactggcccagtacacctccaagacatgcagcaactgtgggtttaccatcaccagcgccgactacgacagggtgctggagaagctgaagaagacagcaacaggctggatgaccacaattaacggcaaggagctgaaggtggagggccagattacctactacaacagatacaagagacagaacgtagtcaaggacctgtccgtcgagctggatagactgagcgaagaatctgtgaacaacgacatctcctcctggacaaagggcagaagcggagaagctctgagcctcctgaagaaaagattctcccatagacccgtgcaggagaagttcgtgtgcctgaactgcggcttcgagacacacgcagccgagcaagccgccctgaacatcgccagatcctggctgttcctgcggagccaggagtacaagaaataccagacaaacaagacaaccggcaacaccgataagagagccttcgtcgagacctggcagtccttttaccggaagaagcttaaggaggtgtggaaacctgccgtgcggtctggcggatctggcggaggctccaccagccccaagaaaaagagaaaagtctaagctgccttctgcggggcttgccttctggccatgcccttcttctctcccttgcacctgtacctcttggtctttgaataaagcctgagtaggaaggctagcaaaaaaaaaaaaaaaaaaaaaaaaaaaaaaaaaaaaaaaaaaaaaaaaaaaaaaaaaaaaaaaaaaaaaaaaaaaaaaaa

SEQ ID NO: 9469 - RNA, 8787 nt, synthetic construct
  source 1..8787: mol_type = other RNA
aggaaataagagagaaaagaagagtaagaagaaatataagagccaccatggcccctaagaagaagcgtaaagtgagccggatgaaccacgaccaggagttcgacccccctaaggtgtaccctcccgtccccgccgagaagagaaagcccatccgggtcctgagcctgttcgatggcatcgccaccggtctgctggtgctgaaggacctgggcatccaggtggataggtacattgcctccgaggtgtgcgaggactccatcaccgtgggaatggtgcgtcatcagggcaagatcatgtacgtgggcgacgtgcggagcgtgacacagaagcatatccaggagtggggccctttcgacctggtgatcggcggcagcccttgcaatgacctgagcatcgtgaacccagcccggaagggcctgtacgagggaaccggcagactgttcttcgagttttacagactgctgcacgacgcccggcctaaggaaggcgacgaccggcccttcttttggctgttcgagaatgtggtggccatgggagtcagcgacaagcgggatattagccggttcctggagagcaaccccgtgatgatcgatgccaaggaagtgagcgccgcccaccgggccagatacttctggggcaatctgcctggcatgaacagacccctggccagcaccgtgaacgacaagctggagctgcaggagtgcctggagcacggccggatcgccaagttcagcaaggtgagaaccatcaccacccgaagcaacagcatcaaacaaggcaaggaccagcactttcctgtgttcatgaacgagaaggaggacatcctgtggtgtaccgagatggagagagtgttcgggttcccagtccactacacagatgtcagcaacatgtctagactggccagacagagactgctgggaagaagctggtccgtccctgtgatcagacacctgttcgcccctctgaaggagtacttcgcctgcgtgagcagcggcaacagcaacgccaacagccggggccccagcttctctagcggcctggtgccactgtccctgagagggagccacatgggccccatggagatctacaaaaccgtgagcgcctggaagcggcagcctgtgcgcgtgctgagcctgtttcggaatatcgataaagtcctgaaaagcctgggattcctggagagcggctctggctccggcggtggcaccctgaagtacgtggaggatgtgacaaacgtggtcagacgggatgtggagaagtggggccccttcgatctggtgtacggcagcacccaacccctgggcagctcttgtgaccggtgccctggctggtacatgtttcagttccaccggatcctgcagtacgccctgccgagacaggagtcccagcggccattcttttggattttcatggacaacttgctgctgaccgaggatgaccaggaaactaccactcggttcctgcagaccgaagccgtgaccctgcaggacgtgagaggccgggactaccagaacgccatgcgggtgtggtccaacatccctggactgaaaagcaagcacgcacctctgacccctaaagaagaggagtacctgcaggcccaggtgcggagcagaagcaagctggacgcccctaaggtggatctgctggtgaagaattgcctcctgcccctgagagagtacttcaagtatttcagccagaatagtctgcccctgggaggcagcggcggcggcagccagagcctggtgaccttcggcgacgtggccgtggacttcagcagggaggagtgggagtggctgagcagcgcccagaggaccctgtacaggaccgtgatgctggagaactacaggaacctggtgagcctgggcctgtgcatcagcaagcccgacatgatcagcagcctggagcagaggaaggagccctggatggccaagaggaagctgaccaggggcaggtgccccgacctgaagatcgtgggcggcccaagcagcggcgcccctcctcccagcggcggcaggcggcccaagcagcggcgcccctcctcccagcggcggcagcccagccggctccccaacctctaccgaggagggcacctctgagtccgccacccccgagagcggccctggcacctccaccgagcccagcgagggcagcgcacccggcagccctgccggcagccccacctccacagaggagggaaccagcaccgagcccagcgaaggcagcgccccaggcaccagcaccgagcctagtgagcaggagattaaacggatcaacaagatcagaagaagacttgtgaaagacagcaacaccaagaaggccggcaagacaggccccatgaaaaccctgctggttagagtgatgacacccgatctgagagagcggctggaaaacctgagaaagaagcctgaaaatatcccccagcccatcagcaatacatctagagccaacctgaataagctgctgaccgattacaccgaaatgaagaaggcgatcctgcatgtgtactgggaagagttccagaaggaccctgtgggcctgatgagccgggtggcccagcctgccagcaagaagatcgatcagaacaagctgaaacctgagatggacgagaagggcaacctgaccaccgccggctttgcctgctctcagtgtggccagcccctgttcgtgtacaagctggagcaggtgtctgagaagggcaaggcttacaccaactacttcggacggtgcaatgtggccgagcacgaaaagctgatcctgctggcccagctgaagcccgagaaggatagcgacgaagccgtgacatatagcctgggaaagtttgggcagagggccctggatttctacagcattcatgtgaccaaggagtccacccaccccgtgaagcccctggcccagatcgccggaaacagatacgcctccggacctgtgggaaaggccctgagcgacgcatgtatgggcacaatcgcctccttcctgtctaagtaccaggacatcatcatcgaacaccagaaggtggtgaagggcaaccagaagagactggagagcctgcgggagctggccggcaaggaaaacctggaataccctagcgtgaccctgccacctcagcctcacaccaaggagggcgttgatgcctacaacgaagtgatcgcccgggtgcgaatgtgggtgaacctgaacctgtggcagaagctgaagctaagcagagatgatgccaagcctctgctgagactgaagggattcccttcctttcctctggtcgagagacaggccaacgaagtggactggtgggacatggtgtgtaacgtgaagaagctgatcaacgagaaaaaggaggatggcaaggtgttttggcagaatctggctggctacaagagacaggaagccctgagaccatacctgagcagcgaggaagatcggaagaagggaaagaaattcgctcggtaccagctgggcgacctgctgctgcacctggaaaagaagcacggcgaggactggggaaaggtgtacgacgaggcctgggagcggattgacaagaaagtggaaggcctgagcaagcacatcaagctggaagaggaacggagaagcgaggacgcccagagcaaggccgccctgaccgactggctgcgggctaaggccagcttcgtgatcgagggcctgaaggaggccgacaaggacgagttctgcagatgcgagctgaagctgcagaagtggtacggggacctgcggggaaagcccttcgccatcgaagccgagaacagcatcctggacatcagcggcttcagcaagcagtacaactgtgccttcatctggcagaaggacggcgtgaagaagctgaacctgtacctgatcatcaactacttcaagggcggcaagctgcggttcaagaagatcaaacctgaagccttcgaagccaacagattctacaccgtgatcaacaaaaagagcggcgagatcgtgcccatggaggtgaacttcaacttcgacgaccccaacctgatcatcctgcctctggcctttggcaagagacagggcagagaattcatctggaacgacctgctgtccctggaaaccggcagcctgaagctggccaacggaagagtgatcgagaagacactgtacaacagaagaacccggcaggatgagcctgccctgttcgtggccctgaccttcgagcggcgggaggtcctggactcctccaatatcaaaccaatgaacctgatcggcgtggcaagaggcgaaaacatccccgccgtgatcgccctgaccgaccccgagggctgcccactgagccggtttaaggatagcctgggaaacccaacccacatcctgagaatcggcgagagctataaggagaagcagcggaccatccaggccaagaaggaggtggagcagcggagagccggcggctacagccggaagtacgccagcaaagccaagaatctggcagacgatatggtgagaaacaccgctagagatctgctgtactacgccgtgacccaggatgccatgctgatcttcgccaacctgagccggggcttcggccggcagggcaagcggaccttcatggccgagagacagtacacacggatggaggactggctgaccgccaagctggcctacgagggcctgagcaagacctacctgtccaagacactggcccagtacacctccaagacatgcagcaactgtgggtttaccatcaccagcgccgactacgacagggtgctggagaagctgaagaagacagcaacaggctggatgaccacaattaacggcaaggagctgaaggtggagggccagattacctactacaacagatacaagagacagaacgtagtcaaggacctgtccgtcgagctggatagactgagcgaagaatctgtgaacaacgacatctcctcctggacaaagggcagaagcggagaagctctgagcctcctgaagaaaagattctcccatagacccgtgcaggagaagttcgtgtgcctgaactgcggcttcgagacacacgcagccgagcaagccgccctgaacatcgccagatcctggctgttcctgcggagccaggagtacaagaaataccagacaaacaagacaaccggcaacaccgataagagagccttcgtcgagacctggcagtccttttaccggaagaagcttaaggaggtgtggaaacctgccgtgcggtctggcggatctggcggaggctccaccagccccaagaaaaagagaaaagtctaagctgccttctgcggggcttgccttctggccatgcccttcttctctcccttgcacctgtacctcttggtctttgaataaagcctgagtaggaaggctagcaaaaaaaaaaaaaaaaaaaaaaaaaaaaaaaaaaaaaaaaaaaaaaaaaaaaaaaaaaaaaaaaaaaaaaaaaaaaaaaagcccagccggctccccaacctctaccgaggagggcacctctgagtccgccacccccgagagcggccctggcacctccaccgagcccagcgagggcagcgcacccggcagccctgccggcagccccacctccacagaggagggaaccagcaccgagcccagcgaaggcagcgccccaggcaccagcaccgagcctagtgagcaggagattaaacggatcaacaagatcagaagaagacttgtgaaagacagcaacaccaagaaggccggcaagacaggccccatgaaaaccctgctggttagagtgatgacacccgatctgagagagcggctggaaaacctgagaaagaagcctgaaaatatcccccagcccatcagcaatacatctagagccaacctgaataagctgctgaccgattacaccgaaatgaagaaggcgatcctgcatgtgtactgggaagagttccagaaggaccctgtgggcctgatgagccgggtggcccagcctgccagcaagaagatcgatcagaacaagctgaaacctgagatggacgagaagggcaacctgaccaccgccggctttgcctgctctcagtgtggccagcccctgttcgtgtacaagctggagcaggtgtctgagaagggcaaggcttacaccaactacttcggacggtgcaatgtggccgagcacgaaaagctgatcctgctggcccagctgaagcccgagaaggatagcgacgaagccgtgacatatagcctgggaaagtttgggcagagggccctggatttctacagcattcatgtgaccaaggagtccacccaccccgtgaagcccctggcccagatcgccggaaacagatacgcctccggacctgtgggaaaggccctgagcgacgcatgtatgggcacaatcgcctccttcctgtctaagtaccaggacatcatcatcgaacaccagaaggtggtgaagggcaaccagaagagactggagagcctgcgggagctggccggcaaggaaaacctggaataccctagcgtgaccctgccacctcagcctcacaccaaggagggcgttgatgcctacaacgaagtgatcgcccgggtgcgaatgtgggtgaacctgaacctgtggcagaagctgaagctaagcagagatgatgccaagcctctgctgagactgaagggattcccttcctttcctctggtcgagagacaggccaacgaagtggactggtgggacatggtgtgtaacgtgaagaagctgatcaacgagaaaaaggaggatggcaaggtgttttggcagaatctggctggctacaagagacaggaagccctgagaccatacctgagcagcgaggaagatcggaagaagggaaagaaattcgctcggtaccagctgggcgacctgctgctgcacctggaaaagaagcacggcgaggactggggaaaggtgtacgacgaggcctgggagcggattgacaagaaagtggaaggcctgagcaagcacatcaagctggaagaggaacggagaagcgaggacgcccagagcaaggccgccctgaccgactggctgcgggctaaggccagcttcgtgatcgagggcctgaaggaggccgacaaggacgagttctgcagatgcgagctgaagctgcagaagtggtacggggacctgcggggaaagcccttcgccatcgaagccgagaacagcatcctggacatcagcggcttcagcaagcagtacaactgtgccttcatctggcagaaggacggcgtgaagaagctgaacctgtacctgatcatcaactacttcaagggcggcaagctgcggttcaagaagatcaaacctgaagccttcgaagccaacagattctacaccgtgatcaacaaaaagagcggcgagatcgtgcccatggaggtgaacttcaacttcgacgaccccaacctgatcatcctgcctctggcctttggcaagagacagggcagagaattcatctggaacgacctgctgtccctggaaaccggcagcctgaagctggccaacggaagagtgatcgagaagacactgtacaacagaagaacccggcaggatgagcctgccctgttcgtggccctgaccttcgagcggcgggaggtcctggactcctccaatatcaaaccaatgaacctgatcggcgtggcaagaggcgaaaacatccccgccgtgatcgccctgaccgaccccgagggctgcccactgagccggtttaaggatagcctgggaaacccaacccacatcctgagaatcggcgagagctataaggagaagcagcggaccatccaggccaagaaggaggtggagcagcggagagccggcggctacagccggaagtacgccagcaaagccaagaatctggcagacgatatggtgagaaacaccgctagagatctgctgtactacgccgtgacccaggatgccatgctgatcttcgccaacctgagccggggcttcggccggcagggcaagcggaccttcatggccgagagacagtacacacggatggaggactggctgaccgccaagctggcctacgagggcctgagcaagacctacctgtccaagacactggcccagtacacctccaagacatgcagcaactgtgggtttaccatcaccagcgccgactacgacagggtgctggagaagctgaagaagacagcaacaggctggatgaccacaattaacggcaaggagctgaaggtggagggccagattacctactacaacagatacaagagacagaacgtagtcaaggacctgtccgtcgagctggatagactgagcgaagaatctgtgaacaacgacatctcctcctggacaaagggcagaagcggagaagctctgagcctcctgaagaaaagattctcccatagacccgtgcaggagaagttcgtgtgcctgaactgcggcttcgagacacacgcagccgagcaagccgccctgaacatcgccagatcctggctgttcctgcggagccaggagtacaagaaataccagacaaacaagacaaccggcaacaccgataagagagccttcgtcgagacctggcagtccttttaccggaagaagcttaaggaggtgtggaaacctgccgtgcggtctggcggatctggcggaggctccaccagccccaagaaaaagagaaaagtctaagctgccttctgcggggcttgccttctggccatgcccttcttctctcccttgcacctgtacctcttggtctttgaataaagcctgagtaggaaggctagcaaaaaaaaaaaaaaaaaaaaaaaaaaaaaaaaaaaaaaaaaaaaaaaaaaaaaaaaaaaaaaaaaaaaaaaaaaaaaaaa

SEQ ID NO: 9470 - RNA, 8787 nt, synthetic construct
  source 1..8787: mol_type = other RNA
aggaaataagagagaaaagaagagtaagaagaaatataagagccaccatggcccctaagaagaagcgtaaagtgagccggatgaaccacgaccaggagttcgacccccctaaggtgtaccctcccgtccccgccgagaagagaaagcccatccgggtcctgagcctgttcgatggcatcgccaccggtctgctggtgctgaaggacctgggcatccaggtggataggtacattgcctccgaggtgtgcgaggactccatcaccgtgggaatggtgcgtcatcagggcaagatcatgtacgtgggcgacgtgcggagcgtgacacagaagcatatccaggagtggggccctttcgacctggtgatcggcggcagcccttgcaatgacctgagcatcgtgaacccagcccggaagggcctgtacgagggaaccggcagactgttcttcgagttttacagactgctgcacgacgcccggcctaaggaaggcgacgaccggcccttcttttggctgttcgagaatgtggtggccatgggagtcagcgacaagcgggatattagccggttcctggagagcaaccccgtgatgatcgatgccaaggaagtgagcgccgcccaccgggccagatacttctggggcaatctgcctggcatgaacagacccctggccagcaccgtgaacgacaagctggagctgcaggagtgcctggagcacggccggatcgccaagttcagcaaggtgagaaccatcaccacccgaagcaacagcatcaaacaaggcaaggaccagcactttcctgtgttcatgaacgagaaggaggacatcctgtggtgtaccgagatggagagagtgttcgggttcccagtccactacacagatgtcagcaacatgtctagactggccagacagagactgctgggaagaagctggtccgtccctgtgatcagacacctgttcgcccctctgaaggagtacttcgcctgcgtgagcagcggcaacagcaacgccaacagccggggccccagcttctctagcggcctggtgccactgtccctgagagggagccacatgggccccatggagatctacaaaaccgtgagcgcctggaagcggcagcctgtgcgcgtgctgagcctgtttcggaatatcgataaagtcctgaaaagcctgggattcctggagagcggctctggctccggcggtggcaccctgaagtacgtggaggatgtgacaaacgtggtcagacgggatgtggagaagtggggccccttcgatctggtgtacggcagcacccaacccctgggcagctcttgtgaccggtgccctggctggtacatgtttcagttccaccggatcctgcagtacgccctgccgagacaggagtcccagcggccattcttttggattttcatggacaacttgctgctgaccgaggatgaccaggaaactaccactcggttcctgcagaccgaagccgtgaccctgcaggacgtgagaggccgggactaccagaacgccatgcgggtgtggtccaacatccctggactgaaaagcaagcacgcacctctgacccctaaagaagaggagtacctgcaggcccaggtgcggagcagaagcaagctggacgcccctaaggtggatctgctggtgaagaattgcctcctgcccctgagagagtacttcaagtatttcagccagaatagtctgcccctgggaggcagcggcggcggcatgatgcaggcccaggagagcctgaccctggaggacgtggccgtggacttcacctgggaggagtggcagctgctgagccccgcccagaaggacctgtacagggacgtgatgctggagaactacagcaacctggtgagcgtgggctaccaggccagcaagcccgacgccttcagcaagctggagaggggcgaggagacctgcaccaccgaggacgagatctacagcaggatctgcagcgagatcggcggcccaagcagcggcgcccctcctcccagcggcggcaggcggcccaagcagcggcgcccctcctcccagcggcggcagcccagccggctccccaacctctaccgaggagggcacctctgagtccgccacccccgagagcggccctggcacctccaccgagcccagcgagggcagcgcacccggcagccctgccggcagccccacctccacagaggagggaaccagcaccgagcccagcgaaggcagcgccccaggcaccagcaccgagcctagtgagcaggagattaaacggatcaacaagatcagaagaagacttgtgaaagacagcaacaccaagaaggccggcaagacaggccccatgaaaaccctgctggttagagtgatgacacccgatctgagagagcggctggaaaacctgagaaagaagcctgaaaatatcccccagcccatcagcaatacatctagagccaacctgaataagctgctgaccgattacaccgaaatgaagaaggcgatcctgcatgtgtactgggaagagttccagaaggaccctgtgggcctgatgagccgggtggcccagcctgccagcaagaagatcgatcagaacaagctgaaacctgagatggacgagaagggcaacctgaccaccgccggctttgcctgctctcagtgtggccagcccctgttcgtgtacaagctggagcaggtgtctgagaagggcaaggcttacaccaactacttcggacggtgcaatgtggccgagcacgaaaagctgatcctgctggcccagctgaagcccgagaaggatagcgacgaagccgtgacatatagcctgggaaagtttgggcagagggccctggatttctacagcattcatgtgaccaaggagtccacccaccccgtgaagcccctggcccagatcgccggaaacagatacgcctccggacctgtgggaaaggccctgagcgacgcatgtatgggcacaatcgcctccttcctgtctaagtaccaggacatcatcatcgaacaccagaaggtggtgaagggcaaccagaagagactggagagcctgcgggagctggccggcaaggaaaacctggaataccctagcgtgaccctgccacctcagcctcacaccaaggagggcgttgatgcctacaacgaagtgatcgcccgggtgcgaatgtgggtgaacctgaacctgtggcagaagctgaagctaagcagagatgatgccaagcctctgctgagactgaagggattcccttcctttcctctggtcgagagacaggccaacgaagtggactggtgggacatggtgtgtaacgtgaagaagctgatcaacgagaaaaaggaggatggcaaggtgttttggcagaatctggctggctacaagagacaggaagccctgagaccatacctgagcagcgaggaagatcggaagaagggaaagaaattcgctcggtaccagctgggcgacctgctgctgcacctggaaaagaagcacggcgaggactggggaaaggtgtacgacgaggcctgggagcggattgacaagaaagtggaaggcctgagcaagcacatcaagctggaagaggaacggagaagcgaggacgcccagagcaaggccgccctgaccgactggctgcgggctaaggccagcttcgtgatcgagggcctgaaggaggccgacaaggacgagttctgcagatgcgagctgaagctgcagaagtggtacggggacctgcggggaaagcccttcgccatcgaagccgagaacagcatcctggacatcagcggcttcagcaagcagtacaactgtgccttcatctggcagaaggacggcgtgaagaagctgaacctgtacctgatcatcaactacttcaagggcggcaagctgcggttcaagaagatcaaacctgaagccttcgaagccaacagattctacaccgtgatcaacaaaaagagcggcgagatcgtgcccatggaggtgaacttcaacttcgacgaccccaacctgatcatcctgcctctggcctttggcaagagacagggcagagaattcatctggaacgacctgctgtccctggaaaccggcagcctgaagctggccaacggaagagtgatcgagaagacactgtacaacagaagaacccggcaggatgagcctgccctgttcgtggccctgaccttcgagcggcgggaggtcctggactcctccaatatcaaaccaatgaacctgatcggcgtggcaagaggcgaaaacatccccgccgtgatcgccctgaccgaccccgagggctgcccactgagccggtttaaggatagcctgggaaacccaacccacatcctgagaatcggcgagagctataaggagaagcagcggaccatccaggccaagaaggaggtggagcagcggagagccggcggctacagccggaagtacgccagcaaagccaagaatctggcagacgatatggtgagaaacaccgctagagatctgctgtactacgccgtgacccaggatgccatgctgatcttcgccaacctgagccggggcttcggccggcagggcaagcggaccttcatggccgagagacagtacacacggatggaggactggctgaccgccaagctggcctacgagggcctgagcaagacctacctgtccaagacactggcccagtacacctccaagacatgcagcaactgtgggtttaccatcaccagcgccgactacgacagggtgctggagaagctgaagaagacagcaacaggctggatgaccacaattaacggcaaggagctgaaggtggagggccagattacctactacaacagatacaagagacagaacgtagtcaaggacctgtccgtcgagctggatagactgagcgaagaatctgtgaacaacgacatctcctcctggacaaagggcagaagcggagaagctctgagcctcctgaagaaaagattctcccatagacccgtgcaggagaagttcgtgtgcctgaactgcggcttcgagacacacgcagccgagcaagccgccctgaacatcgccagatcctggctgttcctgcggagccaggagtacaagaaataccagacaaacaagacaaccggcaacaccgataagagagccttcgtcgagacctggcagtccttttaccggaagaagcttaaggaggtgtggaaacctgccgtgcggtctggcggatctggcggaggctccaccagccccaagaaaaagagaaaagtctaagctgccttctgcggggcttgccttctggccatgcccttcttctctcccttgcacctgtacctcttggtctttgaataaagcctgagtaggaaggctagcaaaaaaaaaaaaaaaaaaaaaaaaaaaaaaaaaaaaaaaaaaaaaaaaaaaaaaaaaaaaaaaaaaaaaaaaaaaaaaaagcccagccggctccccaacctctaccgaggagggcacctctgagtccgccacccccgagagcggccctggcacctccaccgagcccagcgagggcagcgcacccggcagccctgccggcagccccacctccacagaggagggaaccagcaccgagcccagcgaaggcagcgccccaggcaccagcaccgagcctagtgagcaggagattaaacggatcaacaagatcagaagaagacttgtgaaagacagcaacaccaagaaggccggcaagacaggccccatgaaaaccctgctggttagagtgatgacacccgatctgagagagcggctggaaaacctgagaaagaagcctgaaaatatcccccagcccatcagcaatacatctagagccaacctgaataagctgctgaccgattacaccgaaatgaagaaggcgatcctgcatgtgtactgggaagagttccagaaggaccctgtgggcctgatgagccgggtggcccagcctgccagcaagaagatcgatcagaacaagctgaaacctgagatggacgagaagggcaacctgaccaccgccggctttgcctgctctcagtgtggccagcccctgttcgtgtacaagctggagcaggtgtctgagaagggcaaggcttacaccaactacttcggacggtgcaatgtggccgagcacgaaaagctgatcctgctggcccagctgaagcccgagaaggatagcgacgaagccgtgacatatagcctgggaaagtttgggcagagggccctggatttctacagcattcatgtgaccaaggagtccacccaccccgtgaagcccctggcccagatcgccggaaacagatacgcctccggacctgtgggaaaggccctgagcgacgcatgtatgggcacaatcgcctccttcctgtctaagtaccaggacatcatcatcgaacaccagaaggtggtgaagggcaaccagaagagactggagagcctgcgggagctggccggcaaggaaaacctggaataccctagcgtgaccctgccacctcagcctcacaccaaggagggcgttgatgcctacaacgaagtgatcgcccgggtgcgaatgtgggtgaacctgaacctgtggcagaagctgaagctaagcagagatgatgccaagcctctgctgagactgaagggattcccttcctttcctctggtcgagagacaggccaacgaagtggactggtgggacatggtgtgtaacgtgaagaagctgatcaacgagaaaaaggaggatggcaaggtgttttggcagaatctggctggctacaagagacaggaagccctgagaccatacctgagcagcgaggaagatcggaagaagggaaagaaattcgctcggtaccagctgggcgacctgctgctgcacctggaaaagaagcacggcgaggactggggaaaggtgtacgacgaggcctgggagcggattgacaagaaagtggaaggcctgagcaagcacatcaagctggaagaggaacggagaagcgaggacgcccagagcaaggccgccctgaccgactggctgcgggctaaggccagcttcgtgatcgagggcctgaaggaggccgacaaggacgagttctgcagatgcgagctgaagctgcagaagtggtacggggacctgcggggaaagcccttcgccatcgaagccgagaacagcatcctggacatcagcggcttcagcaagcagtacaactgtgccttcatctggcagaaggacggcgtgaagaagctgaacctgtacctgatcatcaactacttcaagggcggcaagctgcggttcaagaagatcaaacctgaagccttcgaagccaacagattctacaccgtgatcaacaaaaagagcggcgagatcgtgcccatggaggtgaacttcaacttcgacgaccccaacctgatcatcctgcctctggcctttggcaagagacagggcagagaattcatctggaacgacctgctgtccctggaaaccggcagcctgaagctggccaacggaagagtgatcgagaagacactgtacaacagaagaacccggcaggatgagcctgccctgttcgtggccctgaccttcgagcggcgggaggtcctggactcctccaatatcaaaccaatgaacctgatcggcgtggcaagaggcgaaaacatccccgccgtgatcgccctgaccgaccccgagggctgcccactgagccggtttaaggatagcctgggaaacccaacccacatcctgagaatcggcgagagctataaggagaagcagcggaccatccaggccaagaaggaggtggagcagcggagagccggcggctacagccggaagtacgccagcaaagccaagaatctggcagacgatatggtgagaaacaccgctagagatctgctgtactacgccgtgacccaggatgccatgctgatcttcgccaacctgagccggggcttcggccggcagggcaagcggaccttcatggccgagagacagtacacacggatggaggactggctgaccgccaagctggcctacgagggcctgagcaagacctacctgtccaagacactggcccagtacacctccaagacatgcagcaactgtgggtttaccatcaccagcgccgactacgacagggtgctggagaagctgaagaagacagcaacaggctggatgaccacaattaacggcaaggagctgaaggtggagggccagattacctactacaacagatacaagagacagaacgtagtcaaggacctgtccgtcgagctggatagactgagcgaagaatctgtgaacaacgacatctcctcctggacaaagggcagaagcggagaagctctgagcctcctgaagaaaagattctcccatagacccgtgcaggagaagttcgtgtgcctgaactgcggcttcgagacacacgcagccgagcaagccgccctgaacatcgccagatcctggctgttcctgcggagccaggagtacaagaaataccagacaaacaagacaaccggcaacaccgataagagagccttcgtcgagacctggcagtccttttaccggaagaagcttaaggaggtgtggaaacctgccgtgcggtctggcggatctggcggaggctccaccagccccaagaaaaagagaaaagtctaagctgccttctgcggggcttgccttctggccatgcccttcttctctcccttgcacctgtacctcttggtctttgaataaagcctgagtaggaaggctagcaaaaaaaaaaaaaaaaaaaaaaaaaaaaaaaaaaaaaaaaaaaaaaaaaaaaaaaaaaaaaaaaaaaaaaaaaaaaaaaa

SEQ ID NO: 9471 - RNA, 8787 nt, synthetic construct
  source 1..8787: mol_type = other RNA
aggaaataagagagaaaagaagagtaagaagaaatataagagccaccatggcccctaagaagaagcgtaaagtgagccggatgaaccacgaccaggagttcgacccccctaaggtgtaccctcccgtccccgccgagaagagaaagcccatccgggtcctgagcctgttcgatggcatcgccaccggtctgctggtgctgaaggacctgggcatccaggtggataggtacattgcctccgaggtgtgcgaggactccatcaccgtgggaatggtgcgtcatcagggcaagatcatgtacgtgggcgacgtgcggagcgtgacacagaagcatatccaggagtggggccctttcgacctggtgatcggcggcagcccttgcaatgacctgagcatcgtgaacccagcccggaagggcctgtacgagggaaccggcagactgttcttcgagttttacagactgctgcacgacgcccggcctaaggaaggcgacgaccggcccttcttttggctgttcgagaatgtggtggccatgggagtcagcgacaagcgggatattagccggttcctggagagcaaccccgtgatgatcgatgccaaggaagtgagcgccgcccaccgggccagatacttctggggcaatctgcctggcatgaacagacccctggccagcaccgtgaacgacaagctggagctgcaggagtgcctggagcacggccggatcgccaagttcagcaaggtgagaaccatcaccacccgaagcaacagcatcaaacaaggcaaggaccagcactttcctgtgttcatgaacgagaaggaggacatcctgtggtgtaccgagatggagagagtgttcgggttcccagtccactacacagatgtcagcaacatgtctagactggccagacagagactgctgggaagaagctggtccgtccctgtgatcagacacctgttcgcccctctgaaggagtacttcgcctgcgtgagcagcggcaacagcaacgccaacagccggggccccagcttctctagcggcctggtgccactgtccctgagagggagccacatgggccccatggagatctacaaaaccgtgagcgcctggaagcggcagcctgtgcgcgtgctgagcctgtttcggaatatcgataaagtcctgaaaagcctgggattcctggagagcggctctggctccggcggtggcaccctgaagtacgtggaggatgtgacaaacgtggtcagacgggatgtggagaagtggggccccttcgatctggtgtacggcagcacccaacccctgggcagctcttgtgaccggtgccctggctggtacatgtttcagttccaccggatcctgcagtacgccctgccgagacaggagtcccagcggccattcttttggattttcatggacaacttgctgctgaccgaggatgaccaggaaactaccactcggttcctgcagaccgaagccgtgaccctgcaggacgtgagaggccgggactaccagaacgccatgcgggtgtggtccaacatccctggactgaaaagcaagcacgcacctctgacccctaaagaagaggagtacctgcaggcccaggtgcggagcagaagcaagctggacgcccctaaggtggatctgctggtgaagaattgcctcctgcccctgagagagtacttcaagtatttcagccagaatagtctgcccctgggaggcagcggcggcggcagccaggagcccgtgaccttcgaggacgtggccgtgtacttcacccagaaccagtgggccagcctggaccccatgcagagggccctgtacctggaggtgatgctggagaactacgccaacatcaccagcctggccctgcccttccccaagcccgacctgatcctgcagctggagcagggcgaggccccctgggacctggacccctggacccccctggagggcgaggccctggagggcgtgcacggcggcccaagcagcggcgcccctcctcccagcggcggcaggcggcccaagcagcggcgcccctcctcccagcggcggcagcccagccggctccccaacctctaccgaggagggcacctctgagtccgccacccccgagagcggccctggcacctccaccgagcccagcgagggcagcgcacccggcagccctgccggcagccccacctccacagaggagggaaccagcaccgagcccagcgaaggcagcgccccaggcaccagcaccgagcctagtgagcaggagattaaacggatcaacaagatcagaagaagacttgtgaaagacagcaacaccaagaaggccggcaagacaggccccatgaaaaccctgctggttagagtgatgacacccgatctgagagagcggctggaaaacctgagaaagaagcctgaaaatatcccccagcccatcagcaatacatctagagccaacctgaataagctgctgaccgattacaccgaaatgaagaaggcgatcctgcatgtgtactgggaagagttccagaaggaccctgtgggcctgatgagccgggtggcccagcctgccagcaagaagatcgatcagaacaagctgaaacctgagatggacgagaagggcaacctgaccaccgccggctttgcctgctctcagtgtggccagcccctgttcgtgtacaagctggagcaggtgtctgagaagggcaaggcttacaccaactacttcggacggtgcaatgtggccgagcacgaaaagctgatcctgctggcccagctgaagcccgagaaggatagcgacgaagccgtgacatatagcctgggaaagtttgggcagagggccctggatttctacagcattcatgtgaccaaggagtccacccaccccgtgaagcccctggcccagatcgccggaaacagatacgcctccggacctgtgggaaaggccctgagcgacgcatgtatgggcacaatcgcctccttcctgtctaagtaccaggacatcatcatcgaacaccagaaggtggtgaagggcaaccagaagagactggagagcctgcgggagctggccggcaaggaaaacctggaataccctagcgtgaccctgccacctcagcctcacaccaaggagggcgttgatgcctacaacgaagtgatcgcccgggtgcgaatgtgggtgaacctgaacctgtggcagaagctgaagctaagcagagatgatgccaagcctctgctgagactgaagggattcccttcctttcctctggtcgagagacaggccaacgaagtggactggtgggacatggtgtgtaacgtgaagaagctgatcaacgagaaaaaggaggatggcaaggtgttttggcagaatctggctggctacaagagacaggaagccctgagaccatacctgagcagcgaggaagatcggaagaagggaaagaaattcgctcggtaccagctgggcgacctgctgctgcacctggaaaagaagcacggcgaggactggggaaaggtgtacgacgaggcctgggagcggattgacaagaaagtggaaggcctgagcaagcacatcaagctggaagaggaacggagaagcgaggacgcccagagcaaggccgccctgaccgactggctgcgggctaaggccagcttcgtgatcgagggcctgaaggaggccgacaaggacgagttctgcagatgcgagctgaagctgcagaagtggtacggggacctgcggggaaagcccttcgccatcgaagccgagaacagcatcctggacatcagcggcttcagcaagcagtacaactgtgccttcatctggcagaaggacggcgtgaagaagctgaacctgtacctgatcatcaactacttcaagggcggcaagctgcggttcaagaagatcaaacctgaagccttcgaagccaacagattctacaccgtgatcaacaaaaagagcggcgagatcgtgcccatggaggtgaacttcaacttcgacgaccccaacctgatcatcctgcctctggcctttggcaagagacagggcagagaattcatctggaacgacctgctgtccctggaaaccggcagcctgaagctggccaacggaagagtgatcgagaagacactgtacaacagaagaacccggcaggatgagcctgccctgttcgtggccctgaccttcgagcggcgggaggtcctggactcctccaatatcaaaccaatgaacctgatcggcgtggcaagaggcgaaaacatccccgccgtgatcgccctgaccgaccccgagggctgcccactgagccggtttaaggatagcctgggaaacccaacccacatcctgagaatcggcgagagctataaggagaagcagcggaccatccaggccaagaaggaggtggagcagcggagagccggcggctacagccggaagtacgccagcaaagccaagaatctggcagacgatatggtgagaaacaccgctagagatctgctgtactacgccgtgacccaggatgccatgctgatcttcgccaacctgagccggggcttcggccggcagggcaagcggaccttcatggccgagagacagtacacacggatggaggactggctgaccgccaagctggcctacgagggcctgagcaagacctacctgtccaagacactggcccagtacacctccaagacatgcagcaactgtgggtttaccatcaccagcgccgactacgacagggtgctggagaagctgaagaagacagcaacaggctggatgaccacaattaacggcaaggagctgaaggtggagggccagattacctactacaacagatacaagagacagaacgtagtcaaggacctgtccgtcgagctggatagactgagcgaagaatctgtgaacaacgacatctcctcctggacaaagggcagaagcggagaagctctgagcctcctgaagaaaagattctcccatagacccgtgcaggagaagttcgtgtgcctgaactgcggcttcgagacacacgcagccgagcaagccgccctgaacatcgccagatcctggctgttcctgcggagccaggagtacaagaaataccagacaaacaagacaaccggcaacaccgataagagagccttcgtcgagacctggcagtccttttaccggaagaagcttaaggaggtgtggaaacctgccgtgcggtctggcggatctggcggaggctccaccagccccaagaaaaagagaaaagtctaagctgccttctgcggggcttgccttctggccatgcccttcttctctcccttgcacctgtacctcttggtctttgaataaagcctgagtaggaaggctagcaaaaaaaaaaaaaaaaaaaaaaaaaaaaaaaaaaaaaaaaaaaaaaaaaaaaaaaaaaaaaaaaaaaaaaaaaaaaaaaagcccagccggctccccaacctctaccgaggagggcacctctgagtccgccacccccgagagcggccctggcacctccaccgagcccagcgagggcagcgcacccggcagccctgccggcagccccacctccacagaggagggaaccagcaccgagcccagcgaaggcagcgccccaggcaccagcaccgagcctagtgagcaggagattaaacggatcaacaagatcagaagaagacttgtgaaagacagcaacaccaagaaggccggcaagacaggccccatgaaaaccctgctggttagagtgatgacacccgatctgagagagcggctggaaaacctgagaaagaagcctgaaaatatcccccagcccatcagcaatacatctagagccaacctgaataagctgctgaccgattacaccgaaatgaagaaggcgatcctgcatgtgtactgggaagagttccagaaggaccctgtgggcctgatgagccgggtggcccagcctgccagcaagaagatcgatcagaacaagctgaaacctgagatggacgagaagggcaacctgaccaccgccggctttgcctgctctcagtgtggccagcccctgttcgtgtacaagctggagcaggtgtctgagaagggcaaggcttacaccaactacttcggacggtgcaatgtggccgagcacgaaaagctgatcctgctggcccagctgaagcccgagaaggatagcgacgaagccgtgacatatagcctgggaaagtttgggcagagggccctggatttctacagcattcatgtgaccaaggagtccacccaccccgtgaagcccctggcccagatcgccggaaacagatacgcctccggacctgtgggaaaggccctgagcgacgcatgtatgggcacaatcgcctccttcctgtctaagtaccaggacatcatcatcgaacaccagaaggtggtgaagggcaaccagaagagactggagagcctgcgggagctggccggcaaggaaaacctggaataccctagcgtgaccctgccacctcagcctcacaccaaggagggcgttgatgcctacaacgaagtgatcgcccgggtgcgaatgtgggtgaacctgaacctgtggcagaagctgaagctaagcagagatgatgccaagcctctgctgagactgaagggattcccttcctttcctctggtcgagagacaggccaacgaagtggactggtgggacatggtgtgtaacgtgaagaagctgatcaacgagaaaaaggaggatggcaaggtgttttggcagaatctggctggctacaagagacaggaagccctgagaccatacctgagcagcgaggaagatcggaagaagggaaagaaattcgctcggtaccagctgggcgacctgctgctgcacctggaaaagaagcacggcgaggactggggaaaggtgtacgacgaggcctgggagcggattgacaagaaagtggaaggcctgagcaagcacatcaagctggaagaggaacggagaagcgaggacgcccagagcaaggccgccctgaccgactggctgcgggctaaggccagcttcgtgatcgagggcctgaaggaggccgacaaggacgagttctgcagatgcgagctgaagctgcagaagtggtacggggacctgcggggaaagcccttcgccatcgaagccgagaacagcatcctggacatcagcggcttcagcaagcagtacaactgtgccttcatctggcagaaggacggcgtgaagaagctgaacctgtacctgatcatcaactacttcaagggcggcaagctgcggttcaagaagatcaaacctgaagccttcgaagccaacagattctacaccgtgatcaacaaaaagagcggcgagatcgtgcccatggaggtgaacttcaacttcgacgaccccaacctgatcatcctgcctctggcctttggcaagagacagggcagagaattcatctggaacgacctgctgtccctggaaaccggcagcctgaagctggccaacggaagagtgatcgagaagacactgtacaacagaagaacccggcaggatgagcctgccctgttcgtggccctgaccttcgagcggcgggaggtcctggactcctccaatatcaaaccaatgaacctgatcggcgtggcaagaggcgaaaacatccccgccgtgatcgccctgaccgaccccgagggctgcccactgagccggtttaaggatagcctgggaaacccaacccacatcctgagaatcggcgagagctataaggagaagcagcggaccatccaggccaagaaggaggtggagcagcggagagccggcggctacagccggaagtacgccagcaaagccaagaatctggcagacgatatggtgagaaacaccgctagagatctgctgtactacgccgtgacccaggatgccatgctgatcttcgccaacctgagccggggcttcggccggcagggcaagcggaccttcatggccgagagacagtacacacggatggaggactggctgaccgccaagctggcctacgagggcctgagcaagacctacctgtccaagacactggcccagtacacctccaagacatgcagcaactgtgggtttaccatcaccagcgccgactacgacagggtgctggagaagctgaagaagacagcaacaggctggatgaccacaattaacggcaaggagctgaaggtggagggccagattacctactacaacagatacaagagacagaacgtagtcaaggacctgtccgtcgagctggatagactgagcgaagaatctgtgaacaacgacatctcctcctggacaaagggcagaagcggagaagctctgagcctcctgaagaaaagattctcccatagacccgtgcaggagaagttcgtgtgcctgaactgcggcttcgagacacacgcagccgagcaagccgccctgaacatcgccagatcctggctgttcctgcggagccaggagtacaagaaataccagacaaacaagacaaccggcaacaccgataagagagccttcgtcgagacctggcagtccttttaccggaagaagcttaaggaggtgtggaaacctgccgtgcggtctggcggatctggcggaggctccaccagccccaagaaaaagagaaaagtctaagctgccttctgcggggcttgccttctggccatgcccttcttctctcccttgcacctgtacctcttggtctttgaataaagcctgagtaggaaggctagcaaaaaaaaaaaaaaaaaaaaaaaaaaaaaaaaaaaaaaaaaaaaaaaaaaaaaaaaaaaaaaaaaaaaaaaaaaaaaaaa

SEQ ID NO: 9472 - RNA, 8787 nt, synthetic construct
  source 1..8787: mol_type = other RNA
aggaaataagagagaaaagaagagtaagaagaaatataagagccaccatggcccctaagaagaagcgtaaagtgagccggatgaaccacgaccaggagttcgacccccctaaggtgtaccctcccgtccccgccgagaagagaaagcccatccgggtcctgagcctgttcgatggcatcgccaccggtctgctggtgctgaaggacctgggcatccaggtggataggtacattgcctccgaggtgtgcgaggactccatcaccgtgggaatggtgcgtcatcagggcaagatcatgtacgtgggcgacgtgcggagcgtgacacagaagcatatccaggagtggggccctttcgacctggtgatcggcggcagcccttgcaatgacctgagcatcgtgaacccagcccggaagggcctgtacgagggaaccggcagactgttcttcgagttttacagactgctgcacgacgcccggcctaaggaaggcgacgaccggcccttcttttggctgttcgagaatgtggtggccatgggagtcagcgacaagcgggatattagccggttcctggagagcaaccccgtgatgatcgatgccaaggaagtgagcgccgcccaccgggccagatacttctggggcaatctgcctggcatgaacagacccctggccagcaccgtgaacgacaagctggagctgcaggagtgcctggagcacggccggatcgccaagttcagcaaggtgagaaccatcaccacccgaagcaacagcatcaaacaaggcaaggaccagcactttcctgtgttcatgaacgagaaggaggacatcctgtggtgtaccgagatggagagagtgttcgggttcccagtccactacacagatgtcagcaacatgtctagactggccagacagagactgctgggaagaagctggtccgtccctgtgatcagacacctgttcgcccctctgaaggagtacttcgcctgcgtgagcagcggcaacagcaacgccaacagccggggccccagcttctctagcggcctggtgccactgtccctgagagggagccacatgggccccatggagatctacaaaaccgtgagcgcctggaagcggcagcctgtgcgcgtgctgagcctgtttcggaatatcgataaagtcctgaaaagcctgggattcctggagagcggctctggctccggcggtggcaccctgaagtacgtggaggatgtgacaaacgtggtcagacgggatgtggagaagtggggccccttcgatctggtgtacggcagcacccaacccctgggcagctcttgtgaccggtgccctggctggtacatgtttcagttccaccggatcctgcagtacgccctgccgagacaggagtcccagcggccattcttttggattttcatggacaacttgctgctgaccgaggatgaccaggaaactaccactcggttcctgcagaccgaagccgtgaccctgcaggacgtgagaggccgggactaccagaacgccatgcgggtgtggtccaacatccctggactgaaaagcaagcacgcacctctgacccctaaagaagaggagtacctgcaggcccaggtgcggagcagaagcaagctggacgcccctaaggtggatctgctggtgaagaattgcctcctgcccctgagagagtacttcaagtatttcagccagaatagtctgcccctgggaggcagcggcggcggcctgcaggagagcgtgaccttcaaggacgtggccgtgctgttcacccaggacgagtgggcccagctgagccccgcccagagggccctgtacagggacgtgatgctggagaactacagccacctggtgagcctgggcctgctgggccccaagcccgacctgttcgcccagctgggcaagggcgaggagtggacccccgaggacaccagcaggggcttctgcctggactggatgaccatccccgtgggcggcccaagcagcggcgcccctcctcccagcggcggcaggcggcccaagcagcggcgcccctcctcccagcggcggcagcccagccggctccccaacctctaccgaggagggcacctctgagtccgccacccccgagagcggccctggcacctccaccgagcccagcgagggcagcgcacccggcagccctgccggcagccccacctccacagaggagggaaccagcaccgagcccagcgaaggcagcgccccaggcaccagcaccgagcctagtgagcaggagattaaacggatcaacaagatcagaagaagacttgtgaaagacagcaacaccaagaaggccggcaagacaggccccatgaaaaccctgctggttagagtgatgacacccgatctgagagagcggctggaaaacctgagaaagaagcctgaaaatatcccccagcccatcagcaatacatctagagccaacctgaataagctgctgaccgattacaccgaaatgaagaaggcgatcctgcatgtgtactgggaagagttccagaaggaccctgtgggcctgatgagccgggtggcccagcctgccagcaagaagatcgatcagaacaagctgaaacctgagatggacgagaagggcaacctgaccaccgccggctttgcctgctctcagtgtggccagcccctgttcgtgtacaagctggagcaggtgtctgagaagggcaaggcttacaccaactacttcggacggtgcaatgtggccgagcacgaaaagctgatcctgctggcccagctgaagcccgagaaggatagcgacgaagccgtgacatatagcctgggaaagtttgggcagagggccctggatttctacagcattcatgtgaccaaggagtccacccaccccgtgaagcccctggcccagatcgccggaaacagatacgcctccggacctgtgggaaaggccctgagcgacgcatgtatgggcacaatcgcctccttcctgtctaagtaccaggacatcatcatcgaacaccagaaggtggtgaagggcaaccagaagagactggagagcctgcgggagctggccggcaaggaaaacctggaataccctagcgtgaccctgccacctcagcctcacaccaaggagggcgttgatgcctacaacgaagtgatcgcccgggtgcgaatgtgggtgaacctgaacctgtggcagaagctgaagctaagcagagatgatgccaagcctctgctgagactgaagggattcccttcctttcctctggtcgagagacaggccaacgaagtggactggtgggacatggtgtgtaacgtgaagaagctgatcaacgagaaaaaggaggatggcaaggtgttttggcagaatctggctggctacaagagacaggaagccctgagaccatacctgagcagcgaggaagatcggaagaagggaaagaaattcgctcggtaccagctgggcgacctgctgctgcacctggaaaagaagcacggcgaggactggggaaaggtgtacgacgaggcctgggagcggattgacaagaaagtggaaggcctgagcaagcacatcaagctggaagaggaacggagaagcgaggacgcccagagcaaggccgccctgaccgactggctgcgggctaaggccagcttcgtgatcgagggcctgaaggaggccgacaaggacgagttctgcagatgcgagctgaagctgcagaagtggtacggggacctgcggggaaagcccttcgccatcgaagccgagaacagcatcctggacatcagcggcttcagcaagcagtacaactgtgccttcatctggcagaaggacggcgtgaagaagctgaacctgtacctgatcatcaactacttcaagggcggcaagctgcggttcaagaagatcaaacctgaagccttcgaagccaacagattctacaccgtgatcaacaaaaagagcggcgagatcgtgcccatggaggtgaacttcaacttcgacgaccccaacctgatcatcctgcctctggcctttggcaagagacagggcagagaattcatctggaacgacctgctgtccctggaaaccggcagcctgaagctggccaacggaagagtgatcgagaagacactgtacaacagaagaacccggcaggatgagcctgccctgttcgtggccctgaccttcgagcggcgggaggtcctggactcctccaatatcaaaccaatgaacctgatcggcgtggcaagaggcgaaaacatccccgccgtgatcgccctgaccgaccccgagggctgcccactgagccggtttaaggatagcctgggaaacccaacccacatcctgagaatcggcgagagctataaggagaagcagcggaccatccaggccaagaaggaggtggagcagcggagagccggcggctacagccggaagtacgccagcaaagccaagaatctggcagacgatatggtgagaaacaccgctagagatctgctgtactacgccgtgacccaggatgccatgctgatcttcgccaacctgagccggggcttcggccggcagggcaagcggaccttcatggccgagagacagtacacacggatggaggactggctgaccgccaagctggcctacgagggcctgagcaagacctacctgtccaagacactggcccagtacacctccaagacatgcagcaactgtgggtttaccatcaccagcgccgactacgacagggtgctggagaagctgaagaagacagcaacaggctggatgaccacaattaacggcaaggagctgaaggtggagggccagattacctactacaacagatacaagagacagaacgtagtcaaggacctgtccgtcgagctggatagactgagcgaagaatctgtgaacaacgacatctcctcctggacaaagggcagaagcggagaagctctgagcctcctgaagaaaagattctcccatagacccgtgcaggagaagttcgtgtgcctgaactgcggcttcgagacacacgcagccgagcaagccgccctgaacatcgccagatcctggctgttcctgcggagccaggagtacaagaaataccagacaaacaagacaaccggcaacaccgataagagagccttcgtcgagacctggcagtccttttaccggaagaagcttaaggaggtgtggaaacctgccgtgcggtctggcggatctggcggaggctccaccagccccaagaaaaagagaaaagtctaagctgccttctgcggggcttgccttctggccatgcccttcttctctcccttgcacctgtacctcttggtctttgaataaagcctgagtaggaaggctagcaaaaaaaaaaaaaaaaaaaaaaaaaaaaaaaaaaaaaaaaaaaaaaaaaaaaaaaaaaaaaaaaaaaaaaaaaaaaaaaagcccagccggctccccaacctctaccgaggagggcacctctgagtccgccacccccgagagcggccctggcacctccaccgagcccagcgagggcagcgcacccggcagccctgccggcagccccacctccacagaggagggaaccagcaccgagcccagcgaaggcagcgccccaggcaccagcaccgagcctagtgagcaggagattaaacggatcaacaagatcagaagaagacttgtgaaagacagcaacaccaagaaggccggcaagacaggccccatgaaaaccctgctggttagagtgatgacacccgatctgagagagcggctggaaaacctgagaaagaagcctgaaaatatcccccagcccatcagcaatacatctagagccaacctgaataagctgctgaccgattacaccgaaatgaagaaggcgatcctgcatgtgtactgggaagagttccagaaggaccctgtgggcctgatgagccgggtggcccagcctgccagcaagaagatcgatcagaacaagctgaaacctgagatggacgagaagggcaacctgaccaccgccggctttgcctgctctcagtgtggccagcccctgttcgtgtacaagctggagcaggtgtctgagaagggcaaggcttacaccaactacttcggacggtgcaatgtggccgagcacgaaaagctgatcctgctggcccagctgaagcccgagaaggatagcgacgaagccgtgacatatagcctgggaaagtttgggcagagggccctggatttctacagcattcatgtgaccaaggagtccacccaccccgtgaagcccctggcccagatcgccggaaacagatacgcctccggacctgtgggaaaggccctgagcgacgcatgtatgggcacaatcgcctccttcctgtctaagtaccaggacatcatcatcgaacaccagaaggtggtgaagggcaaccagaagagactggagagcctgcgggagctggccggcaaggaaaacctggaataccctagcgtgaccctgccacctcagcctcacaccaaggagggcgttgatgcctacaacgaagtgatcgcccgggtgcgaatgtgggtgaacctgaacctgtggcagaagctgaagctaagcagagatgatgccaagcctctgctgagactgaagggattcccttcctttcctctggtcgagagacaggccaacgaagtggactggtgggacatggtgtgtaacgtgaagaagctgatcaacgagaaaaaggaggatggcaaggtgttttggcagaatctggctggctacaagagacaggaagccctgagaccatacctgagcagcgaggaagatcggaagaagggaaagaaattcgctcggtaccagctgggcgacctgctgctgcacctggaaaagaagcacggcgaggactggggaaaggtgtacgacgaggcctgggagcggattgacaagaaagtggaaggcctgagcaagcacatcaagctggaagaggaacggagaagcgaggacgcccagagcaaggccgccctgaccgactggctgcgggctaaggccagcttcgtgatcgagggcctgaaggaggccgacaaggacgagttctgcagatgcgagctgaagctgcagaagtggtacggggacctgcggggaaagcccttcgccatcgaagccgagaacagcatcctggacatcagcggcttcagcaagcagtacaactgtgccttcatctggcagaaggacggcgtgaagaagctgaacctgtacctgatcatcaactacttcaagggcggcaagctgcggttcaagaagatcaaacctgaagccttcgaagccaacagattctacaccgtgatcaacaaaaagagcggcgagatcgtgcccatggaggtgaacttcaacttcgacgaccccaacctgatcatcctgcctctggcctttggcaagagacagggcagagaattcatctggaacgacctgctgtccctggaaaccggcagcctgaagctggccaacggaagagtgatcgagaagacactgtacaacagaagaacccggcaggatgagcctgccctgttcgtggccctgaccttcgagcggcgggaggtcctggactcctccaatatcaaaccaatgaacctgatcggcgtggcaagaggcgaaaacatccccgccgtgatcgccctgaccgaccccgagggctgcccactgagccggtttaaggatagcctgggaaacccaacccacatcctgagaatcggcgagagctataaggagaagcagcggaccatccaggccaagaaggaggtggagcagcggagagccggcggctacagccggaagtacgccagcaaagccaagaatctggcagacgatatggtgagaaacaccgctagagatctgctgtactacgccgtgacccaggatgccatgctgatcttcgccaacctgagccggggcttcggccggcagggcaagcggaccttcatggccgagagacagtacacacggatggaggactggctgaccgccaagctggcctacgagggcctgagcaagacctacctgtccaagacactggcccagtacacctccaagacatgcagcaactgtgggtttaccatcaccagcgccgactacgacagggtgctggagaagctgaagaagacagcaacaggctggatgaccacaattaacggcaaggagctgaaggtggagggccagattacctactacaacagatacaagagacagaacgtagtcaaggacctgtccgtcgagctggatagactgagcgaagaatctgtgaacaacgacatctcctcctggacaaagggcagaagcggagaagctctgagcctcctgaagaaaagattctcccatagacccgtgcaggagaagttcgtgtgcctgaactgcggcttcgagacacacgcagccgagcaagccgccctgaacatcgccagatcctggctgttcctgcggagccaggagtacaagaaataccagacaaacaagacaaccggcaacaccgataagagagccttcgtcgagacctggcagtccttttaccggaagaagcttaaggaggtgtggaaacctgccgtgcggtctggcggatctggcggaggctccaccagccccaagaaaaagagaaaagtctaagctgccttctgcggggcttgccttctggccatgcccttcttctctcccttgcacctgtacctcttggtctttgaataaagcctgagtaggaaggctagcaaaaaaaaaaaaaaaaaaaaaaaaaaaaaaaaaaaaaaaaaaaaaaaaaaaaaaaaaaaaaaaaaaaaaaaaaaaaaaaa

SEQ ID NO: 9473 - RNA, 8787 nt, synthetic construct
  source 1..8787: mol_type = other RNA
aggaaataagagagaaaagaagagtaagaagaaatataagagccaccatggcccctaagaagaagcgtaaagtgagccggatgaaccacgaccaggagttcgacccccctaaggtgtaccctcccgtccccgccgagaagagaaagcccatccgggtcctgagcctgttcgatggcatcgccaccggtctgctggtgctgaaggacctgggcatccaggtggataggtacattgcctccgaggtgtgcgaggactccatcaccgtgggaatggtgcgtcatcagggcaagatcatgtacgtgggcgacgtgcggagcgtgacacagaagcatatccaggagtggggccctttcgacctggtgatcggcggcagcccttgcaatgacctgagcatcgtgaacccagcccggaagggcctgtacgagggaaccggcagactgttcttcgagttttacagactgctgcacgacgcccggcctaaggaaggcgacgaccggcccttcttttggctgttcgagaatgtggtggccatgggagtcagcgacaagcgggatattagccggttcctggagagcaaccccgtgatgatcgatgccaaggaagtgagcgccgcccaccgggccagatacttctggggcaatctgcctggcatgaacagacccctggccagcaccgtgaacgacaagctggagctgcaggagtgcctggagcacggccggatcgccaagttcagcaaggtgagaaccatcaccacccgaagcaacagcatcaaacaaggcaaggaccagcactttcctgtgttcatgaacgagaaggaggacatcctgtggtgtaccgagatggagagagtgttcgggttcccagtccactacacagatgtcagcaacatgtctagactggccagacagagactgctgggaagaagctggtccgtccctgtgatcagacacctgttcgcccctctgaaggagtacttcgcctgcgtgagcagcggcaacagcaacgccaacagccggggccccagcttctctagcggcctggtgccactgtccctgagagggagccacatgggccccatggagatctacaaaaccgtgagcgcctggaagcggcagcctgtgcgcgtgctgagcctgtttcggaatatcgataaagtcctgaaaagcctgggattcctggagagcggctctggctccggcggtggcaccctgaagtacgtggaggatgtgacaaacgtggtcagacgggatgtggagaagtggggccccttcgatctggtgtacggcagcacccaacccctgggcagctcttgtgaccggtgccctggctggtacatgtttcagttccaccggatcctgcagtacgccctgccgagacaggagtcccagcggccattcttttggattttcatggacaacttgctgctgaccgaggatgaccaggaaactaccactcggttcctgcagaccgaagccgtgaccctgcaggacgtgagaggccgggactaccagaacgccatgcgggtgtggtccaacatccctggactgaaaagcaagcacgcacctctgacccctaaagaagaggagtacctgcaggcccaggtgcggagcagaagcaagctggacgcccctaaggtggatctgctggtgaagaattgcctcctgcccctgagagagtacttcaagtatttcagccagaatagtctgcccctgggaggcagcggcggcggcagcctgggcagcgtgagcttcaaggacgtgaccgtggacttcagcagggaggagtggcagcagctggacctggcccagaagagcctgtacagggacgtgaccctggagaactacttcaacctgatcagcgtgggctgccaggtgcccaagcccgaggtgatcttcaacctggagcagggcggcgagctgtgcgtgctggacggcggcctgagctgccagaactgcagcgacggcgacatcggcggcggcccaagcagcggcgcccctcctcccagcggcggcaggcggcccaagcagcggcgcccctcctcccagcggcggcagcccagccggctccccaacctctaccgaggagggcacctctgagtccgccacccccgagagcggccctggcacctccaccgagcccagcgagggcagcgcacccggcagccctgccggcagccccacctccacagaggagggaaccagcaccgagcccagcgaaggcagcgccccaggcaccagcaccgagcctagtgagcaggagattaaacggatcaacaagatcagaagaagacttgtgaaagacagcaacaccaagaaggccggcaagacaggccccatgaaaaccctgctggttagagtgatgacacccgatctgagagagcggctggaaaacctgagaaagaagcctgaaaatatcccccagcccatcagcaatacatctagagccaacctgaataagctgctgaccgattacaccgaaatgaagaaggcgatcctgcatgtgtactgggaagagttccagaaggaccctgtgggcctgatgagccgggtggcccagcctgccagcaagaagatcgatcagaacaagctgaaacctgagatggacgagaagggcaacctgaccaccgccggctttgcctgctctcagtgtggccagcccctgttcgtgtacaagctggagcaggtgtctgagaagggcaaggcttacaccaactacttcggacggtgcaatgtggccgagcacgaaaagctgatcctgctggcccagctgaagcccgagaaggatagcgacgaagccgtgacatatagcctgggaaagtttgggcagagggccctggatttctacagcattcatgtgaccaaggagtccacccaccccgtgaagcccctggcccagatcgccggaaacagatacgcctccggacctgtgggaaaggccctgagcgacgcatgtatgggcacaatcgcctccttcctgtctaagtaccaggacatcatcatcgaacaccagaaggtggtgaagggcaaccagaagagactggagagcctgcgggagctggccggcaaggaaaacctggaataccctagcgtgaccctgccacctcagcctcacaccaaggagggcgttgatgcctacaacgaagtgatcgcccgggtgcgaatgtgggtgaacctgaacctgtggcagaagctgaagctaagcagagatgatgccaagcctctgctgagactgaagggattcccttcctttcctctggtcgagagacaggccaacgaagtggactggtgggacatggtgtgtaacgtgaagaagctgatcaacgagaaaaaggaggatggcaaggtgttttggcagaatctggctggctacaagagacaggaagccctgagaccatacctgagcagcgaggaagatcggaagaagggaaagaaattcgctcggtaccagctgggcgacctgctgctgcacctggaaaagaagcacggcgaggactggggaaaggtgtacgacgaggcctgggagcggattgacaagaaagtggaaggcctgagcaagcacatcaagctggaagaggaacggagaagcgaggacgcccagagcaaggccgccctgaccgactggctgcgggctaaggccagcttcgtgatcgagggcctgaaggaggccgacaaggacgagttctgcagatgcgagctgaagctgcagaagtggtacggggacctgcggggaaagcccttcgccatcgaagccgagaacagcatcctggacatcagcggcttcagcaagcagtacaactgtgccttcatctggcagaaggacggcgtgaagaagctgaacctgtacctgatcatcaactacttcaagggcggcaagctgcggttcaagaagatcaaacctgaagccttcgaagccaacagattctacaccgtgatcaacaaaaagagcggcgagatcgtgcccatggaggtgaacttcaacttcgacgaccccaacctgatcatcctgcctctggcctttggcaagagacagggcagagaattcatctggaacgacctgctgtccctggaaaccggcagcctgaagctggccaacggaagagtgatcgagaagacactgtacaacagaagaacccggcaggatgagcctgccctgttcgtggccctgaccttcgagcggcgggaggtcctggactcctccaatatcaaaccaatgaacctgatcggcgtggcaagaggcgaaaacatccccgccgtgatcgccctgaccgaccccgagggctgcccactgagccggtttaaggatagcctgggaaacccaacccacatcctgagaatcggcgagagctataaggagaagcagcggaccatccaggccaagaaggaggtggagcagcggagagccggcggctacagccggaagtacgccagcaaagccaagaatctggcagacgatatggtgagaaacaccgctagagatctgctgtactacgccgtgacccaggatgccatgctgatcttcgccaacctgagccggggcttcggccggcagggcaagcggaccttcatggccgagagacagtacacacggatggaggactggctgaccgccaagctggcctacgagggcctgagcaagacctacctgtccaagacactggcccagtacacctccaagacatgcagcaactgtgggtttaccatcaccagcgccgactacgacagggtgctggagaagctgaagaagacagcaacaggctggatgaccacaattaacggcaaggagctgaaggtggagggccagattacctactacaacagatacaagagacagaacgtagtcaaggacctgtccgtcgagctggatagactgagcgaagaatctgtgaacaacgacatctcctcctggacaaagggcagaagcggagaagctctgagcctcctgaagaaaagattctcccatagacccgtgcaggagaagttcgtgtgcctgaactgcggcttcgagacacacgcagccgagcaagccgccctgaacatcgccagatcctggctgttcctgcggagccaggagtacaagaaataccagacaaacaagacaaccggcaacaccgataagagagccttcgtcgagacctggcagtccttttaccggaagaagcttaaggaggtgtggaaacctgccgtgcggtctggcggatctggcggaggctccaccagccccaagaaaaagagaaaagtctaagctgccttctgcggggcttgccttctggccatgcccttcttctctcccttgcacctgtacctcttggtctttgaataaagcctgagtaggaaggctagcaaaaaaaaaaaaaaaaaaaaaaaaaaaaaaaaaaaaaaaaaaaaaaaaaaaaaaaaaaaaaaaaaaaaaaaaaaaaaaaagcccagccggctccccaacctctaccgaggagggcacctctgagtccgccacccccgagagcggccctggcacctccaccgagcccagcgagggcagcgcacccggcagccctgccggcagccccacctccacagaggagggaaccagcaccgagcccagcgaaggcagcgccccaggcaccagcaccgagcctagtgagcaggagattaaacggatcaacaagatcagaagaagacttgtgaaagacagcaacaccaagaaggccggcaagacaggccccatgaaaaccctgctggttagagtgatgacacccgatctgagagagcggctggaaaacctgagaaagaagcctgaaaatatcccccagcccatcagcaatacatctagagccaacctgaataagctgctgaccgattacaccgaaatgaagaaggcgatcctgcatgtgtactgggaagagttccagaaggaccctgtgggcctgatgagccgggtggcccagcctgccagcaagaagatcgatcagaacaagctgaaacctgagatggacgagaagggcaacctgaccaccgccggctttgcctgctctcagtgtggccagcccctgttcgtgtacaagctggagcaggtgtctgagaagggcaaggcttacaccaactacttcggacggtgcaatgtggccgagcacgaaaagctgatcctgctggcccagctgaagcccgagaaggatagcgacgaagccgtgacatatagcctgggaaagtttgggcagagggccctggatttctacagcattcatgtgaccaaggagtccacccaccccgtgaagcccctggcccagatcgccggaaacagatacgcctccggacctgtgggaaaggccctgagcgacgcatgtatgggcacaatcgcctccttcctgtctaagtaccaggacatcatcatcgaacaccagaaggtggtgaagggcaaccagaagagactggagagcctgcgggagctggccggcaaggaaaacctggaataccctagcgtgaccctgccacctcagcctcacaccaaggagggcgttgatgcctacaacgaagtgatcgcccgggtgcgaatgtgggtgaacctgaacctgtggcagaagctgaagctaagcagagatgatgccaagcctctgctgagactgaagggattcccttcctttcctctggtcgagagacaggccaacgaagtggactggtgggacatggtgtgtaacgtgaagaagctgatcaacgagaaaaaggaggatggcaaggtgttttggcagaatctggctggctacaagagacaggaagccctgagaccatacctgagcagcgaggaagatcggaagaagggaaagaaattcgctcggtaccagctgggcgacctgctgctgcacctggaaaagaagcacggcgaggactggggaaaggtgtacgacgaggcctgggagcggattgacaagaaagtggaaggcctgagcaagcacatcaagctggaagaggaacggagaagcgaggacgcccagagcaaggccgccctgaccgactggctgcgggctaaggccagcttcgtgatcgagggcctgaaggaggccgacaaggacgagttctgcagatgcgagctgaagctgcagaagtggtacggggacctgcggggaaagcccttcgccatcgaagccgagaacagcatcctggacatcagcggcttcagcaagcagtacaactgtgccttcatctggcagaaggacggcgtgaagaagctgaacctgtacctgatcatcaactacttcaagggcggcaagctgcggttcaagaagatcaaacctgaagccttcgaagccaacagattctacaccgtgatcaacaaaaagagcggcgagatcgtgcccatggaggtgaacttcaacttcgacgaccccaacctgatcatcctgcctctggcctttggcaagagacagggcagagaattcatctggaacgacctgctgtccctggaaaccggcagcctgaagctggccaacggaagagtgatcgagaagacactgtacaacagaagaacccggcaggatgagcctgccctgttcgtggccctgaccttcgagcggcgggaggtcctggactcctccaatatcaaaccaatgaacctgatcggcgtggcaagaggcgaaaacatccccgccgtgatcgccctgaccgaccccgagggctgcccactgagccggtttaaggatagcctgggaaacccaacccacatcctgagaatcggcgagagctataaggagaagcagcggaccatccaggccaagaaggaggtggagcagcggagagccggcggctacagccggaagtacgccagcaaagccaagaatctggcagacgatatggtgagaaacaccgctagagatctgctgtactacgccgtgacccaggatgccatgctgatcttcgccaacctgagccggggcttcggccggcagggcaagcggaccttcatggccgagagacagtacacacggatggaggactggctgaccgccaagctggcctacgagggcctgagcaagacctacctgtccaagacactggcccagtacacctccaagacatgcagcaactgtgggtttaccatcaccagcgccgactacgacagggtgctggagaagctgaagaagacagcaacaggctggatgaccacaattaacggcaaggagctgaaggtggagggccagattacctactacaacagatacaagagacagaacgtagtcaaggacctgtccgtcgagctggatagactgagcgaagaatctgtgaacaacgacatctcctcctggacaaagggcagaagcggagaagctctgagcctcctgaagaaaagattctcccatagacccgtgcaggagaagttcgtgtgcctgaactgcggcttcgagacacacgcagccgagcaagccgccctgaacatcgccagatcctggctgttcctgcggagccaggagtacaagaaataccagacaaacaagacaaccggcaacaccgataagagagccttcgtcgagacctggcagtccttttaccggaagaagcttaaggaggtgtggaaacctgccgtgcggtctggcggatctggcggaggctccaccagccccaagaaaaagagaaaagtctaagctgccttctgcggggcttgccttctggccatgcccttcttctctcccttgcacctgtacctcttggtctttgaataaagcctgagtaggaaggctagcaaaaaaaaaaaaaaaaaaaaaaaaaaaaaaaaaaaaaaaaaaaaaaaaaaaaaaaaaaaaaaaaaaaaaaaaaaaaaaaa

SEQ ID NO: 9474 - RNA, 8787 nt, synthetic construct
  source 1..8787: mol_type = other RNA
aggaaataagagagaaaagaagagtaagaagaaatataagagccaccatggcccctaagaagaagcgtaaagtgagccggatgaaccacgaccaggagttcgacccccctaaggtgtaccctcccgtccccgccgagaagagaaagcccatccgggtcctgagcctgttcgatggcatcgccaccggtctgctggtgctgaaggacctgggcatccaggtggataggtacattgcctccgaggtgtgcgaggactccatcaccgtgggaatggtgcgtcatcagggcaagatcatgtacgtgggcgacgtgcggagcgtgacacagaagcatatccaggagtggggccctttcgacctggtgatcggcggcagcccttgcaatgacctgagcatcgtgaacccagcccggaagggcctgtacgagggaaccggcagactgttcttcgagttttacagactgctgcacgacgcccggcctaaggaaggcgacgaccggcccttcttttggctgttcgagaatgtggtggccatgggagtcagcgacaagcgggatattagccggttcctggagagcaaccccgtgatgatcgatgccaaggaagtgagcgccgcccaccgggccagatacttctggggcaatctgcctggcatgaacagacccctggccagcaccgtgaacgacaagctggagctgcaggagtgcctggagcacggccggatcgccaagttcagcaaggtgagaaccatcaccacccgaagcaacagcatcaaacaaggcaaggaccagcactttcctgtgttcatgaacgagaaggaggacatcctgtggtgtaccgagatggagagagtgttcgggttcccagtccactacacagatgtcagcaacatgtctagactggccagacagagactgctgggaagaagctggtccgtccctgtgatcagacacctgttcgcccctctgaaggagtacttcgcctgcgtgagcagcggcaacagcaacgccaacagccggggccccagcttctctagcggcctggtgccactgtccctgagagggagccacatgggccccatggagatctacaaaaccgtgagcgcctggaagcggcagcctgtgcgcgtgctgagcctgtttcggaatatcgataaagtcctgaaaagcctgggattcctggagagcggctctggctccggcggtggcaccctgaagtacgtggaggatgtgacaaacgtggtcagacgggatgtggagaagtggggccccttcgatctggtgtacggcagcacccaacccctgggcagctcttgtgaccggtgccctggctggtacatgtttcagttccaccggatcctgcagtacgccctgccgagacaggagtcccagcggccattcttttggattttcatggacaacttgctgctgaccgaggatgaccaggaaactaccactcggttcctgcagaccgaagccgtgaccctgcaggacgtgagaggccgggactaccagaacgccatgcgggtgtggtccaacatccctggactgaaaagcaagcacgcacctctgacccctaaagaagaggagtacctgcaggcccaggtgcggagcagaagcaagctggacgcccctaaggtggatctgctggtgaagaattgcctcctgcccctgagagagtacttcaagtatttcagccagaatagtctgcccctgggaggcagcggcggcggccccgcccagggccccggcgaggccaggcccagcaggaagaggggcaggaggcccagggccctgaagttcgtggacgtggccgtgtacttcagccccgaggagtggggctgcctgaggcccgcccagagggccctgtacagggacgtgatgagggagacctacggccacctgggcgccctgggctgcgccggccccaagcccgccctgatcagctggctggagaggaacaccgacgactgggagggcggcccaagcagcggcgcccctcctcccagcggcggcaggcggcccaagcagcggcgcccctcctcccagcggcggcagcccagccggctccccaacctctaccgaggagggcacctctgagtccgccacccccgagagcggccctggcacctccaccgagcccagcgagggcagcgcacccggcagccctgccggcagccccacctccacagaggagggaaccagcaccgagcccagcgaaggcagcgccccaggcaccagcaccgagcctagtgagcaggagattaaacggatcaacaagatcagaagaagacttgtgaaagacagcaacaccaagaaggccggcaagacaggccccatgaaaaccctgctggttagagtgatgacacccgatctgagagagcggctggaaaacctgagaaagaagcctgaaaatatcccccagcccatcagcaatacatctagagccaacctgaataagctgctgaccgattacaccgaaatgaagaaggcgatcctgcatgtgtactgggaagagttccagaaggaccctgtgggcctgatgagccgggtggcccagcctgccagcaagaagatcgatcagaacaagctgaaacctgagatggacgagaagggcaacctgaccaccgccggctttgcctgctctcagtgtggccagcccctgttcgtgtacaagctggagcaggtgtctgagaagggcaaggcttacaccaactacttcggacggtgcaatgtggccgagcacgaaaagctgatcctgctggcccagctgaagcccgagaaggatagcgacgaagccgtgacatatagcctgggaaagtttgggcagagggccctggatttctacagcattcatgtgaccaaggagtccacccaccccgtgaagcccctggcccagatcgccggaaacagatacgcctccggacctgtgggaaaggccctgagcgacgcatgtatgggcacaatcgcctccttcctgtctaagtaccaggacatcatcatcgaacaccagaaggtggtgaagggcaaccagaagagactggagagcctgcgggagctggccggcaaggaaaacctggaataccctagcgtgaccctgccacctcagcctcacaccaaggagggcgttgatgcctacaacgaagtgatcgcccgggtgcgaatgtgggtgaacctgaacctgtggcagaagctgaagctaagcagagatgatgccaagcctctgctgagactgaagggattcccttcctttcctctggtcgagagacaggccaacgaagtggactggtgggacatggtgtgtaacgtgaagaagctgatcaacgagaaaaaggaggatggcaaggtgttttggcagaatctggctggctacaagagacaggaagccctgagaccatacctgagcagcgaggaagatcggaagaagggaaagaaattcgctcggtaccagctgggcgacctgctgctgcacctggaaaagaagcacggcgaggactggggaaaggtgtacgacgaggcctgggagcggattgacaagaaagtggaaggcctgagcaagcacatcaagctggaagaggaacggagaagcgaggacgcccagagcaaggccgccctgaccgactggctgcgggctaaggccagcttcgtgatcgagggcctgaaggaggccgacaaggacgagttctgcagatgcgagctgaagctgcagaagtggtacggggacctgcggggaaagcccttcgccatcgaagccgagaacagcatcctggacatcagcggcttcagcaagcagtacaactgtgccttcatctggcagaaggacggcgtgaagaagctgaacctgtacctgatcatcaactacttcaagggcggcaagctgcggttcaagaagatcaaacctgaagccttcgaagccaacagattctacaccgtgatcaacaaaaagagcggcgagatcgtgcccatggaggtgaacttcaacttcgacgaccccaacctgatcatcctgcctctggcctttggcaagagacagggcagagaattcatctggaacgacctgctgtccctggaaaccggcagcctgaagctggccaacggaagagtgatcgagaagacactgtacaacagaagaacccggcaggatgagcctgccctgttcgtggccctgaccttcgagcggcgggaggtcctggactcctccaatatcaaaccaatgaacctgatcggcgtggcaagaggcgaaaacatccccgccgtgatcgccctgaccgaccccgagggctgcccactgagccggtttaaggatagcctgggaaacccaacccacatcctgagaatcggcgagagctataaggagaagcagcggaccatccaggccaagaaggaggtggagcagcggagagccggcggctacagccggaagtacgccagcaaagccaagaatctggcagacgatatggtgagaaacaccgctagagatctgctgtactacgccgtgacccaggatgccatgctgatcttcgccaacctgagccggggcttcggccggcagggcaagcggaccttcatggccgagagacagtacacacggatggaggactggctgaccgccaagctggcctacgagggcctgagcaagacctacctgtccaagacactggcccagtacacctccaagacatgcagcaactgtgggtttaccatcaccagcgccgactacgacagggtgctggagaagctgaagaagacagcaacaggctggatgaccacaattaacggcaaggagctgaaggtggagggccagattacctactacaacagatacaagagacagaacgtagtcaaggacctgtccgtcgagctggatagactgagcgaagaatctgtgaacaacgacatctcctcctggacaaagggcagaagcggagaagctctgagcctcctgaagaaaagattctcccatagacccgtgcaggagaagttcgtgtgcctgaactgcggcttcgagacacacgcagccgagcaagccgccctgaacatcgccagatcctggctgttcctgcggagccaggagtacaagaaataccagacaaacaagacaaccggcaacaccgataagagagccttcgtcgagacctggcagtccttttaccggaagaagcttaaggaggtgtggaaacctgccgtgcggtctggcggatctggcggaggctccaccagccccaagaaaaagagaaaagtctaagctgccttctgcggggcttgccttctggccatgcccttcttctctcccttgcacctgtacctcttggtctttgaataaagcctgagtaggaaggctagcaaaaaaaaaaaaaaaaaaaaaaaaaaaaaaaaaaaaaaaaaaaaaaaaaaaaaaaaaaaaaaaaaaaaaaaaaaaaaaaagcccagccggctccccaacctctaccgaggagggcacctctgagtccgccacccccgagagcggccctggcacctccaccgagcccagcgagggcagcgcacccggcagccctgccggcagccccacctccacagaggagggaaccagcaccgagcccagcgaaggcagcgccccaggcaccagcaccgagcctagtgagcaggagattaaacggatcaacaagatcagaagaagacttgtgaaagacagcaacaccaagaaggccggcaagacaggccccatgaaaaccctgctggttagagtgatgacacccgatctgagagagcggctggaaaacctgagaaagaagcctgaaaatatcccccagcccatcagcaatacatctagagccaacctgaataagctgctgaccgattacaccgaaatgaagaaggcgatcctgcatgtgtactgggaagagttccagaaggaccctgtgggcctgatgagccgggtggcccagcctgccagcaagaagatcgatcagaacaagctgaaacctgagatggacgagaagggcaacctgaccaccgccggctttgcctgctctcagtgtggccagcccctgttcgtgtacaagctggagcaggtgtctgagaagggcaaggcttacaccaactacttcggacggtgcaatgtggccgagcacgaaaagctgatcctgctggcccagctgaagcccgagaaggatagcgacgaagccgtgacatatagcctgggaaagtttgggcagagggccctggatttctacagcattcatgtgaccaaggagtccacccaccccgtgaagcccctggcccagatcgccggaaacagatacgcctccggacctgtgggaaaggccctgagcgacgcatgtatgggcacaatcgcctccttcctgtctaagtaccaggacatcatcatcgaacaccagaaggtggtgaagggcaaccagaagagactggagagcctgcgggagctggccggcaaggaaaacctggaataccctagcgtgaccctgccacctcagcctcacaccaaggagggcgttgatgcctacaacgaagtgatcgcccgggtgcgaatgtgggtgaacctgaacctgtggcagaagctgaagctaagcagagatgatgccaagcctctgctgagactgaagggattcccttcctttcctctggtcgagagacaggccaacgaagtggactggtgggacatggtgtgtaacgtgaagaagctgatcaacgagaaaaaggaggatggcaaggtgttttggcagaatctggctggctacaagagacaggaagccctgagaccatacctgagcagcgaggaagatcggaagaagggaaagaaattcgctcggtaccagctgggcgacctgctgctgcacctggaaaagaagcacggcgaggactggggaaaggtgtacgacgaggcctgggagcggattgacaagaaagtggaaggcctgagcaagcacatcaagctggaagaggaacggagaagcgaggacgcccagagcaaggccgccctgaccgactggctgcgggctaaggccagcttcgtgatcgagggcctgaaggaggccgacaaggacgagttctgcagatgcgagctgaagctgcagaagtggtacggggacctgcggggaaagcccttcgccatcgaagccgagaacagcatcctggacatcagcggcttcagcaagcagtacaactgtgccttcatctggcagaaggacggcgtgaagaagctgaacctgtacctgatcatcaactacttcaagggcggcaagctgcggttcaagaagatcaaacctgaagccttcgaagccaacagattctacaccgtgatcaacaaaaagagcggcgagatcgtgcccatggaggtgaacttcaacttcgacgaccccaacctgatcatcctgcctctggcctttggcaagagacagggcagagaattcatctggaacgacctgctgtccctggaaaccggcagcctgaagctggccaacggaagagtgatcgagaagacactgtacaacagaagaacccggcaggatgagcctgccctgttcgtggccctgaccttcgagcggcgggaggtcctggactcctccaatatcaaaccaatgaacctgatcggcgtggcaagaggcgaaaacatccccgccgtgatcgccctgaccgaccccgagggctgcccactgagccggtttaaggatagcctgggaaacccaacccacatcctgagaatcggcgagagctataaggagaagcagcggaccatccaggccaagaaggaggtggagcagcggagagccggcggctacagccggaagtacgccagcaaagccaagaatctggcagacgatatggtgagaaacaccgctagagatctgctgtactacgccgtgacccaggatgccatgctgatcttcgccaacctgagccggggcttcggccggcagggcaagcggaccttcatggccgagagacagtacacacggatggaggactggctgaccgccaagctggcctacgagggcctgagcaagacctacctgtccaagacactggcccagtacacctccaagacatgcagcaactgtgggtttaccatcaccagcgccgactacgacagggtgctggagaagctgaagaagacagcaacaggctggatgaccacaattaacggcaaggagctgaaggtggagggccagattacctactacaacagatacaagagacagaacgtagtcaaggacctgtccgtcgagctggatagactgagcgaagaatctgtgaacaacgacatctcctcctggacaaagggcagaagcggagaagctctgagcctcctgaagaaaagattctcccatagacccgtgcaggagaagttcgtgtgcctgaactgcggcttcgagacacacgcagccgagcaagccgccctgaacatcgccagatcctggctgttcctgcggagccaggagtacaagaaataccagacaaacaagacaaccggcaacaccgataagagagccttcgtcgagacctggcagtccttttaccggaagaagcttaaggaggtgtggaaacctgccgtgcggtctggcggatctggcggaggctccaccagccccaagaaaaagagaaaagtctaagctgccttctgcggggcttgccttctggccatgcccttcttctctcccttgcacctgtacctcttggtctttgaataaagcctgagtaggaaggctagcaaaaaaaaaaaaaaaaaaaaaaaaaaaaaaaaaaaaaaaaaaaaaaaaaaaaaaaaaaaaaaaaaaaaaaaaaaaaaaaa

SEQ ID NO: 9475 - RNA, 8787 nt, synthetic construct
  source 1..8787: mol_type = other RNA
aggaaataagagagaaaagaagagtaagaagaaatataagagccaccatggcccctaagaagaagcgtaaagtgagccggatgaaccacgaccaggagttcgacccccctaaggtgtaccctcccgtccccgccgagaagagaaagcccatccgggtcctgagcctgttcgatggcatcgccaccggtctgctggtgctgaaggacctgggcatccaggtggataggtacattgcctccgaggtgtgcgaggactccatcaccgtgggaatggtgcgtcatcagggcaagatcatgtacgtgggcgacgtgcggagcgtgacacagaagcatatccaggagtggggccctttcgacctggtgatcggcggcagcccttgcaatgacctgagcatcgtgaacccagcccggaagggcctgtacgagggaaccggcagactgttcttcgagttttacagactgctgcacgacgcccggcctaaggaaggcgacgaccggcccttcttttggctgttcgagaatgtggtggccatgggagtcagcgacaagcgggatattagccggttcctggagagcaaccccgtgatgatcgatgccaaggaagtgagcgccgcccaccgggccagatacttctggggcaatctgcctggcatgaacagacccctggccagcaccgtgaacgacaagctggagctgcaggagtgcctggagcacggccggatcgccaagttcagcaaggtgagaaccatcaccacccgaagcaacagcatcaaacaaggcaaggaccagcactttcctgtgttcatgaacgagaaggaggacatcctgtggtgtaccgagatggagagagtgttcgggttcccagtccactacacagatgtcagcaacatgtctagactggccagacagagactgctgggaagaagctggtccgtccctgtgatcagacacctgttcgcccctctgaaggagtacttcgcctgcgtgagcagcggcaacagcaacgccaacagccggggccccagcttctctagcggcctggtgccactgtccctgagagggagccacatgggccccatggagatctacaaaaccgtgagcgcctggaagcggcagcctgtgcgcgtgctgagcctgtttcggaatatcgataaagtcctgaaaagcctgggattcctggagagcggctctggctccggcggtggcaccctgaagtacgtggaggatgtgacaaacgtggtcagacgggatgtggagaagtggggccccttcgatctggtgtacggcagcacccaacccctgggcagctcttgtgaccggtgccctggctggtacatgtttcagttccaccggatcctgcagtacgccctgccgagacaggagtcccagcggccattcttttggattttcatggacaacttgctgctgaccgaggatgaccaggaaactaccactcggttcctgcagaccgaagccgtgaccctgcaggacgtgagaggccgggactaccagaacgccatgcgggtgtggtccaacatccctggactgaaaagcaagcacgcacctctgacccctaaagaagaggagtacctgcaggcccaggtgcggagcagaagcaagctggacgcccctaaggtggatctgctggtgaagaattgcctcctgcccctgagagagtacttcaagtatttcagccagaatagtctgcccctgggaggcagcggcggcggcatgaacatggagggcctggtgatgttccaggacctgagcatcgacttcagccaggaggagtgggagtgcctgaaccccacccagaaggacctgtacagggacgtgatgatggagaactacagcagcctgctgagcctgggcctgagcatccccaagcccgacgtgatcagcctgctggagcagggcaaggagccctggatggtgagcagggacgtgctgggcggctggtgccccgacaggctgggcggcccaagcagcggcgcccctcctcccagcggcggcaggcggcccaagcagcggcgcccctcctcccagcggcggcagcccagccggctccccaacctctaccgaggagggcacctctgagtccgccacccccgagagcggccctggcacctccaccgagcccagcgagggcagcgcacccggcagccctgccggcagccccacctccacagaggagggaaccagcaccgagcccagcgaaggcagcgccccaggcaccagcaccgagcctagtgagcaggagattaaacggatcaacaagatcagaagaagacttgtgaaagacagcaacaccaagaaggccggcaagacaggccccatgaaaaccctgctggttagagtgatgacacccgatctgagagagcggctggaaaacctgagaaagaagcctgaaaatatcccccagcccatcagcaatacatctagagccaacctgaataagctgctgaccgattacaccgaaatgaagaaggcgatcctgcatgtgtactgggaagagttccagaaggaccctgtgggcctgatgagccgggtggcccagcctgccagcaagaagatcgatcagaacaagctgaaacctgagatggacgagaagggcaacctgaccaccgccggctttgcctgctctcagtgtggccagcccctgttcgtgtacaagctggagcaggtgtctgagaagggcaaggcttacaccaactacttcggacggtgcaatgtggccgagcacgaaaagctgatcctgctggcccagctgaagcccgagaaggatagcgacgaagccgtgacatatagcctgggaaagtttgggcagagggccctggatttctacagcattcatgtgaccaaggagtccacccaccccgtgaagcccctggcccagatcgccggaaacagatacgcctccggacctgtgggaaaggccctgagcgacgcatgtatgggcacaatcgcctccttcctgtctaagtaccaggacatcatcatcgaacaccagaaggtggtgaagggcaaccagaagagactggagagcctgcgggagctggccggcaaggaaaacctggaataccctagcgtgaccctgccacctcagcctcacaccaaggagggcgttgatgcctacaacgaagtgatcgcccgggtgcgaatgtgggtgaacctgaacctgtggcagaagctgaagctaagcagagatgatgccaagcctctgctgagactgaagggattcccttcctttcctctggtcgagagacaggccaacgaagtggactggtgggacatggtgtgtaacgtgaagaagctgatcaacgagaaaaaggaggatggcaaggtgttttggcagaatctggctggctacaagagacaggaagccctgagaccatacctgagcagcgaggaagatcggaagaagggaaagaaattcgctcggtaccagctgggcgacctgctgctgcacctggaaaagaagcacggcgaggactggggaaaggtgtacgacgaggcctgggagcggattgacaagaaagtggaaggcctgagcaagcacatcaagctggaagaggaacggagaagcgaggacgcccagagcaaggccgccctgaccgactggctgcgggctaaggccagcttcgtgatcgagggcctgaaggaggccgacaaggacgagttctgcagatgcgagctgaagctgcagaagtggtacggggacctgcggggaaagcccttcgccatcgaagccgagaacagcatcctggacatcagcggcttcagcaagcagtacaactgtgccttcatctggcagaaggacggcgtgaagaagctgaacctgtacctgatcatcaactacttcaagggcggcaagctgcggttcaagaagatcaaacctgaagccttcgaagccaacagattctacaccgtgatcaacaaaaagagcggcgagatcgtgcccatggaggtgaacttcaacttcgacgaccccaacctgatcatcctgcctctggcctttggcaagagacagggcagagaattcatctggaacgacctgctgtccctggaaaccggcagcctgaagctggccaacggaagagtgatcgagaagacactgtacaacagaagaacccggcaggatgagcctgccctgttcgtggccctgaccttcgagcggcgggaggtcctggactcctccaatatcaaaccaatgaacctgatcggcgtggcaagaggcgaaaacatccccgccgtgatcgccctgaccgaccccgagggctgcccactgagccggtttaaggatagcctgggaaacccaacccacatcctgagaatcggcgagagctataaggagaagcagcggaccatccaggccaagaaggaggtggagcagcggagagccggcggctacagccggaagtacgccagcaaagccaagaatctggcagacgatatggtgagaaacaccgctagagatctgctgtactacgccgtgacccaggatgccatgctgatcttcgccaacctgagccggggcttcggccggcagggcaagcggaccttcatggccgagagacagtacacacggatggaggactggctgaccgccaagctggcctacgagggcctgagcaagacctacctgtccaagacactggcccagtacacctccaagacatgcagcaactgtgggtttaccatcaccagcgccgactacgacagggtgctggagaagctgaagaagacagcaacaggctggatgaccacaattaacggcaaggagctgaaggtggagggccagattacctactacaacagatacaagagacagaacgtagtcaaggacctgtccgtcgagctggatagactgagcgaagaatctgtgaacaacgacatctcctcctggacaaagggcagaagcggagaagctctgagcctcctgaagaaaagattctcccatagacccgtgcaggagaagttcgtgtgcctgaactgcggcttcgagacacacgcagccgagcaagccgccctgaacatcgccagatcctggctgttcctgcggagccaggagtacaagaaataccagacaaacaagacaaccggcaacaccgataagagagccttcgtcgagacctggcagtccttttaccggaagaagcttaaggaggtgtggaaacctgccgtgcggtctggcggatctggcggaggctccaccagccccaagaaaaagagaaaagtctaagctgccttctgcggggcttgccttctggccatgcccttcttctctcccttgcacctgtacctcttggtctttgaataaagcctgagtaggaaggctagcaaaaaaaaaaaaaaaaaaaaaaaaaaaaaaaaaaaaaaaaaaaaaaaaaaaaaaaaaaaaaaaaaaaaaaaaaaaaaaaagcccagccggctccccaacctctaccgaggagggcacctctgagtccgccacccccgagagcggccctggcacctccaccgagcccagcgagggcagcgcacccggcagccctgccggcagccccacctccacagaggagggaaccagcaccgagcccagcgaaggcagcgccccaggcaccagcaccgagcctagtgagcaggagattaaacggatcaacaagatcagaagaagacttgtgaaagacagcaacaccaagaaggccggcaagacaggccccatgaaaaccctgctggttagagtgatgacacccgatctgagagagcggctggaaaacctgagaaagaagcctgaaaatatcccccagcccatcagcaatacatctagagccaacctgaataagctgctgaccgattacaccgaaatgaagaaggcgatcctgcatgtgtactgggaagagttccagaaggaccctgtgggcctgatgagccgggtggcccagcctgccagcaagaagatcgatcagaacaagctgaaacctgagatggacgagaagggcaacctgaccaccgccggctttgcctgctctcagtgtggccagcccctgttcgtgtacaagctggagcaggtgtctgagaagggcaaggcttacaccaactacttcggacggtgcaatgtggccgagcacgaaaagctgatcctgctggcccagctgaagcccgagaaggatagcgacgaagccgtgacatatagcctgggaaagtttgggcagagggccctggatttctacagcattcatgtgaccaaggagtccacccaccccgtgaagcccctggcccagatcgccggaaacagatacgcctccggacctgtgggaaaggccctgagcgacgcatgtatgggcacaatcgcctccttcctgtctaagtaccaggacatcatcatcgaacaccagaaggtggtgaagggcaaccagaagagactggagagcctgcgggagctggccggcaaggaaaacctggaataccctagcgtgaccctgccacctcagcctcacaccaaggagggcgttgatgcctacaacgaagtgatcgcccgggtgcgaatgtgggtgaacctgaacctgtggcagaagctgaagctaagcagagatgatgccaagcctctgctgagactgaagggattcccttcctttcctctggtcgagagacaggccaacgaagtggactggtgggacatggtgtgtaacgtgaagaagctgatcaacgagaaaaaggaggatggcaaggtgttttggcagaatctggctggctacaagagacaggaagccctgagaccatacctgagcagcgaggaagatcggaagaagggaaagaaattcgctcggtaccagctgggcgacctgctgctgcacctggaaaagaagcacggcgaggactggggaaaggtgtacgacgaggcctgggagcggattgacaagaaagtggaaggcctgagcaagcacatcaagctggaagaggaacggagaagcgaggacgcccagagcaaggccgccctgaccgactggctgcgggctaaggccagcttcgtgatcgagggcctgaaggaggccgacaaggacgagttctgcagatgcgagctgaagctgcagaagtggtacggggacctgcggggaaagcccttcgccatcgaagccgagaacagcatcctggacatcagcggcttcagcaagcagtacaactgtgccttcatctggcagaaggacggcgtgaagaagctgaacctgtacctgatcatcaactacttcaagggcggcaagctgcggttcaagaagatcaaacctgaagccttcgaagccaacagattctacaccgtgatcaacaaaaagagcggcgagatcgtgcccatggaggtgaacttcaacttcgacgaccccaacctgatcatcctgcctctggcctttggcaagagacagggcagagaattcatctggaacgacctgctgtccctggaaaccggcagcctgaagctggccaacggaagagtgatcgagaagacactgtacaacagaagaacccggcaggatgagcctgccctgttcgtggccctgaccttcgagcggcgggaggtcctggactcctccaatatcaaaccaatgaacctgatcggcgtggcaagaggcgaaaacatccccgccgtgatcgccctgaccgaccccgagggctgcccactgagccggtttaaggatagcctgggaaacccaacccacatcctgagaatcggcgagagctataaggagaagcagcggaccatccaggccaagaaggaggtggagcagcggagagccggcggctacagccggaagtacgccagcaaagccaagaatctggcagacgatatggtgagaaacaccgctagagatctgctgtactacgccgtgacccaggatgccatgctgatcttcgccaacctgagccggggcttcggccggcagggcaagcggaccttcatggccgagagacagtacacacggatggaggactggctgaccgccaagctggcctacgagggcctgagcaagacctacctgtccaagacactggcccagtacacctccaagacatgcagcaactgtgggtttaccatcaccagcgccgactacgacagggtgctggagaagctgaagaagacagcaacaggctggatgaccacaattaacggcaaggagctgaaggtggagggccagattacctactacaacagatacaagagacagaacgtagtcaaggacctgtccgtcgagctggatagactgagcgaagaatctgtgaacaacgacatctcctcctggacaaagggcagaagcggagaagctctgagcctcctgaagaaaagattctcccatagacccgtgcaggagaagttcgtgtgcctgaactgcggcttcgagacacacgcagccgagcaagccgccctgaacatcgccagatcctggctgttcctgcggagccaggagtacaagaaataccagacaaacaagacaaccggcaacaccgataagagagccttcgtcgagacctggcagtccttttaccggaagaagcttaaggaggtgtggaaacctgccgtgcggtctggcggatctggcggaggctccaccagccccaagaaaaagagaaaagtctaagctgccttctgcggggcttgccttctggccatgcccttcttctctcccttgcacctgtacctcttggtctttgaataaagcctgagtaggaaggctagcaaaaaaaaaaaaaaaaaaaaaaaaaaaaaaaaaaaaaaaaaaaaaaaaaaaaaaaaaaaaaaaaaaaaaaaaaaaaaaaa

SEQ ID NO: 9476 - RNA, 8787 nt, synthetic construct
  source 1..8787: mol_type = other RNA
aggaaataagagagaaaagaagagtaagaagaaatataagagccaccatggcccctaagaagaagcgtaaagtgagccggatgaaccacgaccaggagttcgacccccctaaggtgtaccctcccgtccccgccgagaagagaaagcccatccgggtcctgagcctgttcgatggcatcgccaccggtctgctggtgctgaaggacctgggcatccaggtggataggtacattgcctccgaggtgtgcgaggactccatcaccgtgggaatggtgcgtcatcagggcaagatcatgtacgtgggcgacgtgcggagcgtgacacagaagcatatccaggagtggggccctttcgacctggtgatcggcggcagcccttgcaatgacctgagcatcgtgaacccagcccggaagggcctgtacgagggaaccggcagactgttcttcgagttttacagactgctgcacgacgcccggcctaaggaaggcgacgaccggcccttcttttggctgttcgagaatgtggtggccatgggagtcagcgacaagcgggatattagccggttcctggagagcaaccccgtgatgatcgatgccaaggaagtgagcgccgcccaccgggccagatacttctggggcaatctgcctggcatgaacagacccctggccagcaccgtgaacgacaagctggagctgcaggagtgcctggagcacggccggatcgccaagttcagcaaggtgagaaccatcaccacccgaagcaacagcatcaaacaaggcaaggaccagcactttcctgtgttcatgaacgagaaggaggacatcctgtggtgtaccgagatggagagagtgttcgggttcccagtccactacacagatgtcagcaacatgtctagactggccagacagagactgctgggaagaagctggtccgtccctgtgatcagacacctgttcgcccctctgaaggagtacttcgcctgcgtgagcagcggcaacagcaacgccaacagccggggccccagcttctctagcggcctggtgccactgtccctgagagggagccacatgggccccatggagatctacaaaaccgtgagcgcctggaagcggcagcctgtgcgcgtgctgagcctgtttcggaatatcgataaagtcctgaaaagcctgggattcctggagagcggctctggctccggcggtggcaccctgaagtacgtggaggatgtgacaaacgtggtcagacgggatgtggagaagtggggccccttcgatctggtgtacggcagcacccaacccctgggcagctcttgtgaccggtgccctggctggtacatgtttcagttccaccggatcctgcagtacgccctgccgagacaggagtcccagcggccattcttttggattttcatggacaacttgctgctgaccgaggatgaccaggaaactaccactcggttcctgcagaccgaagccgtgaccctgcaggacgtgagaggccgggactaccagaacgccatgcgggtgtggtccaacatccctggactgaaaagcaagcacgcacctctgacccctaaagaagaggagtacctgcaggcccaggtgcggagcagaagcaagctggacgcccctaaggtggatctgctggtgaagaattgcctcctgcccctgagagagtacttcaagtatttcagccagaatagtctgcccctgggaggcagcggcggcggcatgaccttcgaggacgtgagcgtggagttcacccagggcgagtggggccagctgaaccccgcccagaaggacctgtacagggaggtgatgctggagaacttcaggaacctggccttcctgggcctgcccgtgagcaagccctacgtgatctgccagctggaggagggcggcgagcccttcatcgtggagagggaggtgagcaccggcgcctacagcgactgggagaggaggagcaagagcaagggcggcccaagcagcggcgcccctcctcccagcggcggcaggcggcccaagcagcggcgcccctcctcccagcggcggcagcccagccggctccccaacctctaccgaggagggcacctctgagtccgccacccccgagagcggccctggcacctccaccgagcccagcgagggcagcgcacccggcagccctgccggcagccccacctccacagaggagggaaccagcaccgagcccagcgaaggcagcgccccaggcaccagcaccgagcctagtgagcaggagattaaacggatcaacaagatcagaagaagacttgtgaaagacagcaacaccaagaaggccggcaagacaggccccatgaaaaccctgctggttagagtgatgacacccgatctgagagagcggctggaaaacctgagaaagaagcctgaaaatatcccccagcccatcagcaatacatctagagccaacctgaataagctgctgaccgattacaccgaaatgaagaaggcgatcctgcatgtgtactgggaagagttccagaaggaccctgtgggcctgatgagccgggtggcccagcctgccagcaagaagatcgatcagaacaagctgaaacctgagatggacgagaagggcaacctgaccaccgccggctttgcctgctctcagtgtggccagcccctgttcgtgtacaagctggagcaggtgtctgagaagggcaaggcttacaccaactacttcggacggtgcaatgtggccgagcacgaaaagctgatcctgctggcccagctgaagcccgagaaggatagcgacgaagccgtgacatatagcctgggaaagtttgggcagagggccctggatttctacagcattcatgtgaccaaggagtccacccaccccgtgaagcccctggcccagatcgccggaaacagatacgcctccggacctgtgggaaaggccctgagcgacgcatgtatgggcacaatcgcctccttcctgtctaagtaccaggacatcatcatcgaacaccagaaggtggtgaagggcaaccagaagagactggagagcctgcgggagctggccggcaaggaaaacctggaataccctagcgtgaccctgccacctcagcctcacaccaaggagggcgttgatgcctacaacgaagtgatcgcccgggtgcgaatgtgggtgaacctgaacctgtggcagaagctgaagctaagcagagatgatgccaagcctctgctgagactgaagggattcccttcctttcctctggtcgagagacaggccaacgaagtggactggtgggacatggtgtgtaacgtgaagaagctgatcaacgagaaaaaggaggatggcaaggtgttttggcagaatctggctggctacaagagacaggaagccctgagaccatacctgagcagcgaggaagatcggaagaagggaaagaaattcgctcggtaccagctgggcgacctgctgctgcacctggaaaagaagcacggcgaggactggggaaaggtgtacgacgaggcctgggagcggattgacaagaaagtggaaggcctgagcaagcacatcaagctggaagaggaacggagaagcgaggacgcccagagcaaggccgccctgaccgactggctgcgggctaaggccagcttcgtgatcgagggcctgaaggaggccgacaaggacgagttctgcagatgcgagctgaagctgcagaagtggtacggggacctgcggggaaagcccttcgccatcgaagccgagaacagcatcctggacatcagcggcttcagcaagcagtacaactgtgccttcatctggcagaaggacggcgtgaagaagctgaacctgtacctgatcatcaactacttcaagggcggcaagctgcggttcaagaagatcaaacctgaagccttcgaagccaacagattctacaccgtgatcaacaaaaagagcggcgagatcgtgcccatggaggtgaacttcaacttcgacgaccccaacctgatcatcctgcctctggcctttggcaagagacagggcagagaattcatctggaacgacctgctgtccctggaaaccggcagcctgaagctggccaacggaagagtgatcgagaagacactgtacaacagaagaacccggcaggatgagcctgccctgttcgtggccctgaccttcgagcggcgggaggtcctggactcctccaatatcaaaccaatgaacctgatcggcgtggcaagaggcgaaaacatccccgccgtgatcgccctgaccgaccccgagggctgcccactgagccggtttaaggatagcctgggaaacccaacccacatcctgagaatcggcgagagctataaggagaagcagcggaccatccaggccaagaaggaggtggagcagcggagagccggcggctacagccggaagtacgccagcaaagccaagaatctggcagacgatatggtgagaaacaccgctagagatctgctgtactacgccgtgacccaggatgccatgctgatcttcgccaacctgagccggggcttcggccggcagggcaagcggaccttcatggccgagagacagtacacacggatggaggactggctgaccgccaagctggcctacgagggcctgagcaagacctacctgtccaagacactggcccagtacacctccaagacatgcagcaactgtgggtttaccatcaccagcgccgactacgacagggtgctggagaagctgaagaagacagcaacaggctggatgaccacaattaacggcaaggagctgaaggtggagggccagattacctactacaacagatacaagagacagaacgtagtcaaggacctgtccgtcgagctggatagactgagcgaagaatctgtgaacaacgacatctcctcctggacaaagggcagaagcggagaagctctgagcctcctgaagaaaagattctcccatagacccgtgcaggagaagttcgtgtgcctgaactgcggcttcgagacacacgcagccgagcaagccgccctgaacatcgccagatcctggctgttcctgcggagccaggagtacaagaaataccagacaaacaagacaaccggcaacaccgataagagagccttcgtcgagacctggcagtccttttaccggaagaagcttaaggaggtgtggaaacctgccgtgcggtctggcggatctggcggaggctccaccagccccaagaaaaagagaaaagtctaagctgccttctgcggggcttgccttctggccatgcccttcttctctcccttgcacctgtacctcttggtctttgaataaagcctgagtaggaaggctagcaaaaaaaaaaaaaaaaaaaaaaaaaaaaaaaaaaaaaaaaaaaaaaaaaaaaaaaaaaaaaaaaaaaaaaaaaaaaaaaagcccagccggctccccaacctctaccgaggagggcacctctgagtccgccacccccgagagcggccctggcacctccaccgagcccagcgagggcagcgcacccggcagccctgccggcagccccacctccacagaggagggaaccagcaccgagcccagcgaaggcagcgccccaggcaccagcaccgagcctagtgagcaggagattaaacggatcaacaagatcagaagaagacttgtgaaagacagcaacaccaagaaggccggcaagacaggccccatgaaaaccctgctggttagagtgatgacacccgatctgagagagcggctggaaaacctgagaaagaagcctgaaaatatcccccagcccatcagcaatacatctagagccaacctgaataagctgctgaccgattacaccgaaatgaagaaggcgatcctgcatgtgtactgggaagagttccagaaggaccctgtgggcctgatgagccgggtggcccagcctgccagcaagaagatcgatcagaacaagctgaaacctgagatggacgagaagggcaacctgaccaccgccggctttgcctgctctcagtgtggccagcccctgttcgtgtacaagctggagcaggtgtctgagaagggcaaggcttacaccaactacttcggacggtgcaatgtggccgagcacgaaaagctgatcctgctggcccagctgaagcccgagaaggatagcgacgaagccgtgacatatagcctgggaaagtttgggcagagggccctggatttctacagcattcatgtgaccaaggagtccacccaccccgtgaagcccctggcccagatcgccggaaacagatacgcctccggacctgtgggaaaggccctgagcgacgcatgtatgggcacaatcgcctccttcctgtctaagtaccaggacatcatcatcgaacaccagaaggtggtgaagggcaaccagaagagactggagagcctgcgggagctggccggcaaggaaaacctggaataccctagcgtgaccctgccacctcagcctcacaccaaggagggcgttgatgcctacaacgaagtgatcgcccgggtgcgaatgtgggtgaacctgaacctgtggcagaagctgaagctaagcagagatgatgccaagcctctgctgagactgaagggattcccttcctttcctctggtcgagagacaggccaacgaagtggactggtgggacatggtgtgtaacgtgaagaagctgatcaacgagaaaaaggaggatggcaaggtgttttggcagaatctggctggctacaagagacaggaagccctgagaccatacctgagcagcgaggaagatcggaagaagggaaagaaattcgctcggtaccagctgggcgacctgctgctgcacctggaaaagaagcacggcgaggactggggaaaggtgtacgacgaggcctgggagcggattgacaagaaagtggaaggcctgagcaagcacatcaagctggaagaggaacggagaagcgaggacgcccagagcaaggccgccctgaccgactggctgcgggctaaggccagcttcgtgatcgagggcctgaaggaggccgacaaggacgagttctgcagatgcgagctgaagctgcagaagtggtacggggacctgcggggaaagcccttcgccatcgaagccgagaacagcatcctggacatcagcggcttcagcaagcagtacaactgtgccttcatctggcagaaggacggcgtgaagaagctgaacctgtacctgatcatcaactacttcaagggcggcaagctgcggttcaagaagatcaaacctgaagccttcgaagccaacagattctacaccgtgatcaacaaaaagagcggcgagatcgtgcccatggaggtgaacttcaacttcgacgaccccaacctgatcatcctgcctctggcctttggcaagagacagggcagagaattcatctggaacgacctgctgtccctggaaaccggcagcctgaagctggccaacggaagagtgatcgagaagacactgtacaacagaagaacccggcaggatgagcctgccctgttcgtggccctgaccttcgagcggcgggaggtcctggactcctccaatatcaaaccaatgaacctgatcggcgtggcaagaggcgaaaacatccccgccgtgatcgccctgaccgaccccgagggctgcccactgagccggtttaaggatagcctgggaaacccaacccacatcctgagaatcggcgagagctataaggagaagcagcggaccatccaggccaagaaggaggtggagcagcggagagccggcggctacagccggaagtacgccagcaaagccaagaatctggcagacgatatggtgagaaacaccgctagagatctgctgtactacgccgtgacccaggatgccatgctgatcttcgccaacctgagccggggcttcggccggcagggcaagcggaccttcatggccgagagacagtacacacggatggaggactggctgaccgccaagctggcctacgagggcctgagcaagacctacctgtccaagacactggcccagtacacctccaagacatgcagcaactgtgggtttaccatcaccagcgccgactacgacagggtgctggagaagctgaagaagacagcaacaggctggatgaccacaattaacggcaaggagctgaaggtggagggccagattacctactacaacagatacaagagacagaacgtagtcaaggacctgtccgtcgagctggatagactgagcgaagaatctgtgaacaacgacatctcctcctggacaaagggcagaagcggagaagctctgagcctcctgaagaaaagattctcccatagacccgtgcaggagaagttcgtgtgcctgaactgcggcttcgagacacacgcagccgagcaagccgccctgaacatcgccagatcctggctgttcctgcggagccaggagtacaagaaataccagacaaacaagacaaccggcaacaccgataagagagccttcgtcgagacctggcagtccttttaccggaagaagcttaaggaggtgtggaaacctgccgtgcggtctggcggatctggcggaggctccaccagccccaagaaaaagagaaaagtctaagctgccttctgcggggcttgccttctggccatgcccttcttctctcccttgcacctgtacctcttggtctttgaataaagcctgagtaggaaggctagcaaaaaaaaaaaaaaaaaaaaaaaaaaaaaaaaaaaaaaaaaaaaaaaaaaaaaaaaaaaaaaaaaaaaaaaaaaaaaaaa

SEQ ID NO: 9477 - RNA, 8787 nt, synthetic construct
  source 1..8787: mol_type = other RNA
aggaaataagagagaaaagaagagtaagaagaaatataagagccaccatggcccctaagaagaagcgtaaagtgagccggatgaaccacgaccaggagttcgacccccctaaggtgtaccctcccgtccccgccgagaagagaaagcccatccgggtcctgagcctgttcgatggcatcgccaccggtctgctggtgctgaaggacctgggcatccaggtggataggtacattgcctccgaggtgtgcgaggactccatcaccgtgggaatggtgcgtcatcagggcaagatcatgtacgtgggcgacgtgcggagcgtgacacagaagcatatccaggagtggggccctttcgacctggtgatcggcggcagcccttgcaatgacctgagcatcgtgaacccagcccggaagggcctgtacgagggaaccggcagactgttcttcgagttttacagactgctgcacgacgcccggcctaaggaaggcgacgaccggcccttcttttggctgttcgagaatgtggtggccatgggagtcagcgacaagcgggatattagccggttcctggagagcaaccccgtgatgatcgatgccaaggaagtgagcgccgcccaccgggccagatacttctggggcaatctgcctggcatgaacagacccctggccagcaccgtgaacgacaagctggagctgcaggagtgcctggagcacggccggatcgccaagttcagcaaggtgagaaccatcaccacccgaagcaacagcatcaaacaaggcaaggaccagcactttcctgtgttcatgaacgagaaggaggacatcctgtggtgtaccgagatggagagagtgttcgggttcccagtccactacacagatgtcagcaacatgtctagactggccagacagagactgctgggaagaagctggtccgtccctgtgatcagacacctgttcgcccctctgaaggagtacttcgcctgcgtgagcagcggcaacagcaacgccaacagccggggccccagcttctctagcggcctggtgccactgtccctgagagggagccacatgggccccatggagatctacaaaaccgtgagcgcctggaagcggcagcctgtgcgcgtgctgagcctgtttcggaatatcgataaagtcctgaaaagcctgggattcctggagagcggctctggctccggcggtggcaccctgaagtacgtggaggatgtgacaaacgtggtcagacgggatgtggagaagtggggccccttcgatctggtgtacggcagcacccaacccctgggcagctcttgtgaccggtgccctggctggtacatgtttcagttccaccggatcctgcagtacgccctgccgagacaggagtcccagcggccattcttttggattttcatggacaacttgctgctgaccgaggatgaccaggaaactaccactcggttcctgcagaccgaagccgtgaccctgcaggacgtgagaggccgggactaccagaacgccatgcgggtgtggtccaacatccctggactgaaaagcaagcacgcacctctgacccctaaagaagaggagtacctgcaggcccaggtgcggagcagaagcaagctggacgcccctaaggtggatctgctggtgaagaattgcctcctgcccctgagagagtacttcaagtatttcagccagaatagtctgcccctgggaggcagcggcggcggcctgcagaagagcgtgaccttcgaggacgtggccgtgtacttcacccagaccgagtgggacggcctgagccccgcccagagggccctgtacagggacgtgatgctggagaactacggcaacgtggccagcctgggcttcagcctgttcaagcccgccgtgatcagccagctggagggcgccggcgagctgggcggccccagccccctggtggacggcaccgagaccggcccccagggcctgtggggcggcccaagcagcggcgcccctcctcccagcggcggcaggcggcccaagcagcggcgcccctcctcccagcggcggcagcccagccggctccccaacctctaccgaggagggcacctctgagtccgccacccccgagagcggccctggcacctccaccgagcccagcgagggcagcgcacccggcagccctgccggcagccccacctccacagaggagggaaccagcaccgagcccagcgaaggcagcgccccaggcaccagcaccgagcctagtgagcaggagattaaacggatcaacaagatcagaagaagacttgtgaaagacagcaacaccaagaaggccggcaagacaggccccatgaaaaccctgctggttagagtgatgacacccgatctgagagagcggctggaaaacctgagaaagaagcctgaaaatatcccccagcccatcagcaatacatctagagccaacctgaataagctgctgaccgattacaccgaaatgaagaaggcgatcctgcatgtgtactgggaagagttccagaaggaccctgtgggcctgatgagccgggtggcccagcctgccagcaagaagatcgatcagaacaagctgaaacctgagatggacgagaagggcaacctgaccaccgccggctttgcctgctctcagtgtggccagcccctgttcgtgtacaagctggagcaggtgtctgagaagggcaaggcttacaccaactacttcggacggtgcaatgtggccgagcacgaaaagctgatcctgctggcccagctgaagcccgagaaggatagcgacgaagccgtgacatatagcctgggaaagtttgggcagagggccctggatttctacagcattcatgtgaccaaggagtccacccaccccgtgaagcccctggcccagatcgccggaaacagatacgcctccggacctgtgggaaaggccctgagcgacgcatgtatgggcacaatcgcctccttcctgtctaagtaccaggacatcatcatcgaacaccagaaggtggtgaagggcaaccagaagagactggagagcctgcgggagctggccggcaaggaaaacctggaataccctagcgtgaccctgccacctcagcctcacaccaaggagggcgttgatgcctacaacgaagtgatcgcccgggtgcgaatgtgggtgaacctgaacctgtggcagaagctgaagctaagcagagatgatgccaagcctctgctgagactgaagggattcccttcctttcctctggtcgagagacaggccaacgaagtggactggtgggacatggtgtgtaacgtgaagaagctgatcaacgagaaaaaggaggatggcaaggtgttttggcagaatctggctggctacaagagacaggaagccctgagaccatacctgagcagcgaggaagatcggaagaagggaaagaaattcgctcggtaccagctgggcgacctgctgctgcacctggaaaagaagcacggcgaggactggggaaaggtgtacgacgaggcctgggagcggattgacaagaaagtggaaggcctgagcaagcacatcaagctggaagaggaacggagaagcgaggacgcccagagcaaggccgccctgaccgactggctgcgggctaaggccagcttcgtgatcgagggcctgaaggaggccgacaaggacgagttctgcagatgcgagctgaagctgcagaagtggtacggggacctgcggggaaagcccttcgccatcgaagccgagaacagcatcctggacatcagcggcttcagcaagcagtacaactgtgccttcatctggcagaaggacggcgtgaagaagctgaacctgtacctgatcatcaactacttcaagggcggcaagctgcggttcaagaagatcaaacctgaagccttcgaagccaacagattctacaccgtgatcaacaaaaagagcggcgagatcgtgcccatggaggtgaacttcaacttcgacgaccccaacctgatcatcctgcctctggcctttggcaagagacagggcagagaattcatctggaacgacctgctgtccctggaaaccggcagcctgaagctggccaacggaagagtgatcgagaagacactgtacaacagaagaacccggcaggatgagcctgccctgttcgtggccctgaccttcgagcggcgggaggtcctggactcctccaatatcaaaccaatgaacctgatcggcgtggcaagaggcgaaaacatccccgccgtgatcgccctgaccgaccccgagggctgcccactgagccggtttaaggatagcctgggaaacccaacccacatcctgagaatcggcgagagctataaggagaagcagcggaccatccaggccaagaaggaggtggagcagcggagagccggcggctacagccggaagtacgccagcaaagccaagaatctggcagacgatatggtgagaaacaccgctagagatctgctgtactacgccgtgacccaggatgccatgctgatcttcgccaacctgagccggggcttcggccggcagggcaagcggaccttcatggccgagagacagtacacacggatggaggactggctgaccgccaagctggcctacgagggcctgagcaagacctacctgtccaagacactggcccagtacacctccaagacatgcagcaactgtgggtttaccatcaccagcgccgactacgacagggtgctggagaagctgaagaagacagcaacaggctggatgaccacaattaacggcaaggagctgaaggtggagggccagattacctactacaacagatacaagagacagaacgtagtcaaggacctgtccgtcgagctggatagactgagcgaagaatctgtgaacaacgacatctcctcctggacaaagggcagaagcggagaagctctgagcctcctgaagaaaagattctcccatagacccgtgcaggagaagttcgtgtgcctgaactgcggcttcgagacacacgcagccgagcaagccgccctgaacatcgccagatcctggctgttcctgcggagccaggagtacaagaaataccagacaaacaagacaaccggcaacaccgataagagagccttcgtcgagacctggcagtccttttaccggaagaagcttaaggaggtgtggaaacctgccgtgcggtctggcggatctggcggaggctccaccagccccaagaaaaagagaaaagtctaagctgccttctgcggggcttgccttctggccatgcccttcttctctcccttgcacctgtacctcttggtctttgaataaagcctgagtaggaaggctagcaaaaaaaaaaaaaaaaaaaaaaaaaaaaaaaaaaaaaaaaaaaaaaaaaaaaaaaaaaaaaaaaaaaaaaaaaaaaaaaagcccagccggctccccaacctctaccgaggagggcacctctgagtccgccacccccgagagcggccctggcacctccaccgagcccagcgagggcagcgcacccggcagccctgccggcagccccacctccacagaggagggaaccagcaccgagcccagcgaaggcagcgccccaggcaccagcaccgagcctagtgagcaggagattaaacggatcaacaagatcagaagaagacttgtgaaagacagcaacaccaagaaggccggcaagacaggccccatgaaaaccctgctggttagagtgatgacacccgatctgagagagcggctggaaaacctgagaaagaagcctgaaaatatcccccagcccatcagcaatacatctagagccaacctgaataagctgctgaccgattacaccgaaatgaagaaggcgatcctgcatgtgtactgggaagagttccagaaggaccctgtgggcctgatgagccgggtggcccagcctgccagcaagaagatcgatcagaacaagctgaaacctgagatggacgagaagggcaacctgaccaccgccggctttgcctgctctcagtgtggccagcccctgttcgtgtacaagctggagcaggtgtctgagaagggcaaggcttacaccaactacttcggacggtgcaatgtggccgagcacgaaaagctgatcctgctggcccagctgaagcccgagaaggatagcgacgaagccgtgacatatagcctgggaaagtttgggcagagggccctggatttctacagcattcatgtgaccaaggagtccacccaccccgtgaagcccctggcccagatcgccggaaacagatacgcctccggacctgtgggaaaggccctgagcgacgcatgtatgggcacaatcgcctccttcctgtctaagtaccaggacatcatcatcgaacaccagaaggtggtgaagggcaaccagaagagactggagagcctgcgggagctggccggcaaggaaaacctggaataccctagcgtgaccctgccacctcagcctcacaccaaggagggcgttgatgcctacaacgaagtgatcgcccgggtgcgaatgtgggtgaacctgaacctgtggcagaagctgaagctaagcagagatgatgccaagcctctgctgagactgaagggattcccttcctttcctctggtcgagagacaggccaacgaagtggactggtgggacatggtgtgtaacgtgaagaagctgatcaacgagaaaaaggaggatggcaaggtgttttggcagaatctggctggctacaagagacaggaagccctgagaccatacctgagcagcgaggaagatcggaagaagggaaagaaattcgctcggtaccagctgggcgacctgctgctgcacctggaaaagaagcacggcgaggactggggaaaggtgtacgacgaggcctgggagcggattgacaagaaagtggaaggcctgagcaagcacatcaagctggaagaggaacggagaagcgaggacgcccagagcaaggccgccctgaccgactggctgcgggctaaggccagcttcgtgatcgagggcctgaaggaggccgacaaggacgagttctgcagatgcgagctgaagctgcagaagtggtacggggacctgcggggaaagcccttcgccatcgaagccgagaacagcatcctggacatcagcggcttcagcaagcagtacaactgtgccttcatctggcagaaggacggcgtgaagaagctgaacctgtacctgatcatcaactacttcaagggcggcaagctgcggttcaagaagatcaaacctgaagccttcgaagccaacagattctacaccgtgatcaacaaaaagagcggcgagatcgtgcccatggaggtgaacttcaacttcgacgaccccaacctgatcatcctgcctctggcctttggcaagagacagggcagagaattcatctggaacgacctgctgtccctggaaaccggcagcctgaagctggccaacggaagagtgatcgagaagacactgtacaacagaagaacccggcaggatgagcctgccctgttcgtggccctgaccttcgagcggcgggaggtcctggactcctccaatatcaaaccaatgaacctgatcggcgtggcaagaggcgaaaacatccccgccgtgatcgccctgaccgaccccgagggctgcccactgagccggtttaaggatagcctgggaaacccaacccacatcctgagaatcggcgagagctataaggagaagcagcggaccatccaggccaagaaggaggtggagcagcggagagccggcggctacagccggaagtacgccagcaaagccaagaatctggcagacgatatggtgagaaacaccgctagagatctgctgtactacgccgtgacccaggatgccatgctgatcttcgccaacctgagccggggcttcggccggcagggcaagcggaccttcatggccgagagacagtacacacggatggaggactggctgaccgccaagctggcctacgagggcctgagcaagacctacctgtccaagacactggcccagtacacctccaagacatgcagcaactgtgggtttaccatcaccagcgccgactacgacagggtgctggagaagctgaagaagacagcaacaggctggatgaccacaattaacggcaaggagctgaaggtggagggccagattacctactacaacagatacaagagacagaacgtagtcaaggacctgtccgtcgagctggatagactgagcgaagaatctgtgaacaacgacatctcctcctggacaaagggcagaagcggagaagctctgagcctcctgaagaaaagattctcccatagacccgtgcaggagaagttcgtgtgcctgaactgcggcttcgagacacacgcagccgagcaagccgccctgaacatcgccagatcctggctgttcctgcggagccaggagtacaagaaataccagacaaacaagacaaccggcaacaccgataagagagccttcgtcgagacctggcagtccttttaccggaagaagcttaaggaggtgtggaaacctgccgtgcggtctggcggatctggcggaggctccaccagccccaagaaaaagagaaaagtctaagctgccttctgcggggcttgccttctggccatgcccttcttctctcccttgcacctgtacctcttggtctttgaataaagcctgagtaggaaggctagcaaaaaaaaaaaaaaaaaaaaaaaaaaaaaaaaaaaaaaaaaaaaaaaaaaaaaaaaaaaaaaaaaaaaaaaaaaaaaaaa

SEQ ID NO: 9478 - RNA, 8787 nt, synthetic construct
  source 1..8787: mol_type = other RNA
aggaaataagagagaaaagaagagtaagaagaaatataagagccaccatggcccctaagaagaagcgtaaagtgagccggatgaaccacgaccaggagttcgacccccctaaggtgtaccctcccgtccccgccgagaagagaaagcccatccgggtcctgagcctgttcgatggcatcgccaccggtctgctggtgctgaaggacctgggcatccaggtggataggtacattgcctccgaggtgtgcgaggactccatcaccgtgggaatggtgcgtcatcagggcaagatcatgtacgtgggcgacgtgcggagcgtgacacagaagcatatccaggagtggggccctttcgacctggtgatcggcggcagcccttgcaatgacctgagcatcgtgaacccagcccggaagggcctgtacgagggaaccggcagactgttcttcgagttttacagactgctgcacgacgcccggcctaaggaaggcgacgaccggcccttcttttggctgttcgagaatgtggtggccatgggagtcagcgacaagcgggatattagccggttcctggagagcaaccccgtgatgatcgatgccaaggaagtgagcgccgcccaccgggccagatacttctggggcaatctgcctggcatgaacagacccctggccagcaccgtgaacgacaagctggagctgcaggagtgcctggagcacggccggatcgccaagttcagcaaggtgagaaccatcaccacccgaagcaacagcatcaaacaaggcaaggaccagcactttcctgtgttcatgaacgagaaggaggacatcctgtggtgtaccgagatggagagagtgttcgggttcccagtccactacacagatgtcagcaacatgtctagactggccagacagagactgctgggaagaagctggtccgtccctgtgatcagacacctgttcgcccctctgaaggagtacttcgcctgcgtgagcagcggcaacagcaacgccaacagccggggccccagcttctctagcggcctggtgccactgtccctgagagggagccacatgggccccatggagatctacaaaaccgtgagcgcctggaagcggcagcctgtgcgcgtgctgagcctgtttcggaatatcgataaagtcctgaaaagcctgggattcctggagagcggctctggctccggcggtggcaccctgaagtacgtggaggatgtgacaaacgtggtcagacgggatgtggagaagtggggccccttcgatctggtgtacggcagcacccaacccctgggcagctcttgtgaccggtgccctggctggtacatgtttcagttccaccggatcctgcagtacgccctgccgagacaggagtcccagcggccattcttttggattttcatggacaacttgctgctgaccgaggatgaccaggaaactaccactcggttcctgcagaccgaagccgtgaccctgcaggacgtgagaggccgggactaccagaacgccatgcgggtgtggtccaacatccctggactgaaaagcaagcacgcacctctgacccctaaagaagaggagtacctgcaggcccaggtgcggagcagaagcaagctggacgcccctaaggtggatctgctggtgaagaattgcctcctgcccctgagagagtacttcaagtatttcagccagaatagtctgcccctgggaggcagcggcggcggcatccagggcagcctgaccttcaaggacgtggccgtggacttcacccaggacgagtggtgcctgctggacaacagccagaaggagctgtacctggaggtgatgctggagaacgtgcagaacctgctgagcgtgggcctgcccgtgcccagggagtacctgaccagctgcttccagcagggcgaggccccctggctgctggagcaggaggtgcccaggagcagctgccccgaggccgagaccaacggcggcccaagcagcggcgcccctcctcccagcggcggcaggcggcccaagcagcggcgcccctcctcccagcggcggcagcccagccggctccccaacctctaccgaggagggcacctctgagtccgccacccccgagagcggccctggcacctccaccgagcccagcgagggcagcgcacccggcagccctgccggcagccccacctccacagaggagggaaccagcaccgagcccagcgaaggcagcgccccaggcaccagcaccgagcctagtgagcaggagattaaacggatcaacaagatcagaagaagacttgtgaaagacagcaacaccaagaaggccggcaagacaggccccatgaaaaccctgctggttagagtgatgacacccgatctgagagagcggctggaaaacctgagaaagaagcctgaaaatatcccccagcccatcagcaatacatctagagccaacctgaataagctgctgaccgattacaccgaaatgaagaaggcgatcctgcatgtgtactgggaagagttccagaaggaccctgtgggcctgatgagccgggtggcccagcctgccagcaagaagatcgatcagaacaagctgaaacctgagatggacgagaagggcaacctgaccaccgccggctttgcctgctctcagtgtggccagcccctgttcgtgtacaagctggagcaggtgtctgagaagggcaaggcttacaccaactacttcggacggtgcaatgtggccgagcacgaaaagctgatcctgctggcccagctgaagcccgagaaggatagcgacgaagccgtgacatatagcctgggaaagtttgggcagagggccctggatttctacagcattcatgtgaccaaggagtccacccaccccgtgaagcccctggcccagatcgccggaaacagatacgcctccggacctgtgggaaaggccctgagcgacgcatgtatgggcacaatcgcctccttcctgtctaagtaccaggacatcatcatcgaacaccagaaggtggtgaagggcaaccagaagagactggagagcctgcgggagctggccggcaaggaaaacctggaataccctagcgtgaccctgccacctcagcctcacaccaaggagggcgttgatgcctacaacgaagtgatcgcccgggtgcgaatgtgggtgaacctgaacctgtggcagaagctgaagctaagcagagatgatgccaagcctctgctgagactgaagggattcccttcctttcctctggtcgagagacaggccaacgaagtggactggtgggacatggtgtgtaacgtgaagaagctgatcaacgagaaaaaggaggatggcaaggtgttttggcagaatctggctggctacaagagacaggaagccctgagaccatacctgagcagcgaggaagatcggaagaagggaaagaaattcgctcggtaccagctgggcgacctgctgctgcacctggaaaagaagcacggcgaggactggggaaaggtgtacgacgaggcctgggagcggattgacaagaaagtggaaggcctgagcaagcacatcaagctggaagaggaacggagaagcgaggacgcccagagcaaggccgccctgaccgactggctgcgggctaaggccagcttcgtgatcgagggcctgaaggaggccgacaaggacgagttctgcagatgcgagctgaagctgcagaagtggtacggggacctgcggggaaagcccttcgccatcgaagccgagaacagcatcctggacatcagcggcttcagcaagcagtacaactgtgccttcatctggcagaaggacggcgtgaagaagctgaacctgtacctgatcatcaactacttcaagggcggcaagctgcggttcaagaagatcaaacctgaagccttcgaagccaacagattctacaccgtgatcaacaaaaagagcggcgagatcgtgcccatggaggtgaacttcaacttcgacgaccccaacctgatcatcctgcctctggcctttggcaagagacagggcagagaattcatctggaacgacctgctgtccctggaaaccggcagcctgaagctggccaacggaagagtgatcgagaagacactgtacaacagaagaacccggcaggatgagcctgccctgttcgtggccctgaccttcgagcggcgggaggtcctggactcctccaatatcaaaccaatgaacctgatcggcgtggcaagaggcgaaaacatccccgccgtgatcgccctgaccgaccccgagggctgcccactgagccggtttaaggatagcctgggaaacccaacccacatcctgagaatcggcgagagctataaggagaagcagcggaccatccaggccaagaaggaggtggagcagcggagagccggcggctacagccggaagtacgccagcaaagccaagaatctggcagacgatatggtgagaaacaccgctagagatctgctgtactacgccgtgacccaggatgccatgctgatcttcgccaacctgagccggggcttcggccggcagggcaagcggaccttcatggccgagagacagtacacacggatggaggactggctgaccgccaagctggcctacgagggcctgagcaagacctacctgtccaagacactggcccagtacacctccaagacatgcagcaactgtgggtttaccatcaccagcgccgactacgacagggtgctggagaagctgaagaagacagcaacaggctggatgaccacaattaacggcaaggagctgaaggtggagggccagattacctactacaacagatacaagagacagaacgtagtcaaggacctgtccgtcgagctggatagactgagcgaagaatctgtgaacaacgacatctcctcctggacaaagggcagaagcggagaagctctgagcctcctgaagaaaagattctcccatagacccgtgcaggagaagttcgtgtgcctgaactgcggcttcgagacacacgcagccgagcaagccgccctgaacatcgccagatcctggctgttcctgcggagccaggagtacaagaaataccagacaaacaagacaaccggcaacaccgataagagagccttcgtcgagacctggcagtccttttaccggaagaagcttaaggaggtgtggaaacctgccgtgcggtctggcggatctggcggaggctccaccagccccaagaaaaagagaaaagtctaagctgccttctgcggggcttgccttctggccatgcccttcttctctcccttgcacctgtacctcttggtctttgaataaagcctgagtaggaaggctagcaaaaaaaaaaaaaaaaaaaaaaaaaaaaaaaaaaaaaaaaaaaaaaaaaaaaaaaaaaaaaaaaaaaaaaaaaaaaaaaagcccagccggctccccaacctctaccgaggagggcacctctgagtccgccacccccgagagcggccctggcacctccaccgagcccagcgagggcagcgcacccggcagccctgccggcagccccacctccacagaggagggaaccagcaccgagcccagcgaaggcagcgccccaggcaccagcaccgagcctagtgagcaggagattaaacggatcaacaagatcagaagaagacttgtgaaagacagcaacaccaagaaggccggcaagacaggccccatgaaaaccctgctggttagagtgatgacacccgatctgagagagcggctggaaaacctgagaaagaagcctgaaaatatcccccagcccatcagcaatacatctagagccaacctgaataagctgctgaccgattacaccgaaatgaagaaggcgatcctgcatgtgtactgggaagagttccagaaggaccctgtgggcctgatgagccgggtggcccagcctgccagcaagaagatcgatcagaacaagctgaaacctgagatggacgagaagggcaacctgaccaccgccggctttgcctgctctcagtgtggccagcccctgttcgtgtacaagctggagcaggtgtctgagaagggcaaggcttacaccaactacttcggacggtgcaatgtggccgagcacgaaaagctgatcctgctggcccagctgaagcccgagaaggatagcgacgaagccgtgacatatagcctgggaaagtttgggcagagggccctggatttctacagcattcatgtgaccaaggagtccacccaccccgtgaagcccctggcccagatcgccggaaacagatacgcctccggacctgtgggaaaggccctgagcgacgcatgtatgggcacaatcgcctccttcctgtctaagtaccaggacatcatcatcgaacaccagaaggtggtgaagggcaaccagaagagactggagagcctgcgggagctggccggcaaggaaaacctggaataccctagcgtgaccctgccacctcagcctcacaccaaggagggcgttgatgcctacaacgaagtgatcgcccgggtgcgaatgtgggtgaacctgaacctgtggcagaagctgaagctaagcagagatgatgccaagcctctgctgagactgaagggattcccttcctttcctctggtcgagagacaggccaacgaagtggactggtgggacatggtgtgtaacgtgaagaagctgatcaacgagaaaaaggaggatggcaaggtgttttggcagaatctggctggctacaagagacaggaagccctgagaccatacctgagcagcgaggaagatcggaagaagggaaagaaattcgctcggtaccagctgggcgacctgctgctgcacctggaaaagaagcacggcgaggactggggaaaggtgtacgacgaggcctgggagcggattgacaagaaagtggaaggcctgagcaagcacatcaagctggaagaggaacggagaagcgaggacgcccagagcaaggccgccctgaccgactggctgcgggctaaggccagcttcgtgatcgagggcctgaaggaggccgacaaggacgagttctgcagatgcgagctgaagctgcagaagtggtacggggacctgcggggaaagcccttcgccatcgaagccgagaacagcatcctggacatcagcggcttcagcaagcagtacaactgtgccttcatctggcagaaggacggcgtgaagaagctgaacctgtacctgatcatcaactacttcaagggcggcaagctgcggttcaagaagatcaaacctgaagccttcgaagccaacagattctacaccgtgatcaacaaaaagagcggcgagatcgtgcccatggaggtgaacttcaacttcgacgaccccaacctgatcatcctgcctctggcctttggcaagagacagggcagagaattcatctggaacgacctgctgtccctggaaaccggcagcctgaagctggccaacggaagagtgatcgagaagacactgtacaacagaagaacccggcaggatgagcctgccctgttcgtggccctgaccttcgagcggcgggaggtcctggactcctccaatatcaaaccaatgaacctgatcggcgtggcaagaggcgaaaacatccccgccgtgatcgccctgaccgaccccgagggctgcccactgagccggtttaaggatagcctgggaaacccaacccacatcctgagaatcggcgagagctataaggagaagcagcggaccatccaggccaagaaggaggtggagcagcggagagccggcggctacagccggaagtacgccagcaaagccaagaatctggcagacgatatggtgagaaacaccgctagagatctgctgtactacgccgtgacccaggatgccatgctgatcttcgccaacctgagccggggcttcggccggcagggcaagcggaccttcatggccgagagacagtacacacggatggaggactggctgaccgccaagctggcctacgagggcctgagcaagacctacctgtccaagacactggcccagtacacctccaagacatgcagcaactgtgggtttaccatcaccagcgccgactacgacagggtgctggagaagctgaagaagacagcaacaggctggatgaccacaattaacggcaaggagctgaaggtggagggccagattacctactacaacagatacaagagacagaacgtagtcaaggacctgtccgtcgagctggatagactgagcgaagaatctgtgaacaacgacatctcctcctggacaaagggcagaagcggagaagctctgagcctcctgaagaaaagattctcccatagacccgtgcaggagaagttcgtgtgcctgaactgcggcttcgagacacacgcagccgagcaagccgccctgaacatcgccagatcctggctgttcctgcggagccaggagtacaagaaataccagacaaacaagacaaccggcaacaccgataagagagccttcgtcgagacctggcagtccttttaccggaagaagcttaaggaggtgtggaaacctgccgtgcggtctggcggatctggcggaggctccaccagccccaagaaaaagagaaaagtctaagctgccttctgcggggcttgccttctggccatgcccttcttctctcccttgcacctgtacctcttggtctttgaataaagcctgagtaggaaggctagcaaaaaaaaaaaaaaaaaaaaaaaaaaaaaaaaaaaaaaaaaaaaaaaaaaaaaaaaaaaaaaaaaaaaaaaaaaaaaaaa

SEQ ID NO: 9479 - RNA, 8787 nt, synthetic construct
  source 1..8787: mol_type = other RNA
aggaaataagagagaaaagaagagtaagaagaaatataagagccaccatggcccctaagaagaagcgtaaagtgagccggatgaaccacgaccaggagttcgacccccctaaggtgtaccctcccgtccccgccgagaagagaaagcccatccgggtcctgagcctgttcgatggcatcgccaccggtctgctggtgctgaaggacctgggcatccaggtggataggtacattgcctccgaggtgtgcgaggactccatcaccgtgggaatggtgcgtcatcagggcaagatcatgtacgtgggcgacgtgcggagcgtgacacagaagcatatccaggagtggggccctttcgacctggtgatcggcggcagcccttgcaatgacctgagcatcgtgaacccagcccggaagggcctgtacgagggaaccggcagactgttcttcgagttttacagactgctgcacgacgcccggcctaaggaaggcgacgaccggcccttcttttggctgttcgagaatgtggtggccatgggagtcagcgacaagcgggatattagccggttcctggagagcaaccccgtgatgatcgatgccaaggaagtgagcgccgcccaccgggccagatacttctggggcaatctgcctggcatgaacagacccctggccagcaccgtgaacgacaagctggagctgcaggagtgcctggagcacggccggatcgccaagttcagcaaggtgagaaccatcaccacccgaagcaacagcatcaaacaaggcaaggaccagcactttcctgtgttcatgaacgagaaggaggacatcctgtggtgtaccgagatggagagagtgttcgggttcccagtccactacacagatgtcagcaacatgtctagactggccagacagagactgctgggaagaagctggtccgtccctgtgatcagacacctgttcgcccctctgaaggagtacttcgcctgcgtgagcagcggcaacagcaacgccaacagccggggccccagcttctctagcggcctggtgccactgtccctgagagggagccacatgggccccatggagatctacaaaaccgtgagcgcctggaagcggcagcctgtgcgcgtgctgagcctgtttcggaatatcgataaagtcctgaaaagcctgggattcctggagagcggctctggctccggcggtggcaccctgaagtacgtggaggatgtgacaaacgtggtcagacgggatgtggagaagtggggccccttcgatctggtgtacggcagcacccaacccctgggcagctcttgtgaccggtgccctggctggtacatgtttcagttccaccggatcctgcagtacgccctgccgagacaggagtcccagcggccattcttttggattttcatggacaacttgctgctgaccgaggatgaccaggaaactaccactcggttcctgcagaccgaagccgtgaccctgcaggacgtgagaggccgggactaccagaacgccatgcgggtgtggtccaacatccctggactgaaaagcaagcacgcacctctgacccctaaagaagaggagtacctgcaggcccaggtgcggagcagaagcaagctggacgcccctaaggtggatctgctggtgaagaattgcctcctgcccctgagagagtacttcaagtatttcagccagaatagtctgcccctgggaggcagcggcggcggcttccagggcagcgtgaccttcagggacgtggccatcgacttcagccaggaggagtggaagtggctgcagcccgcccagagggacctgtacaggtgcgtgatgctggagaactacggccacctggtgagcctgggcctgagcatcagcaagcccgacgtggtgagcctgctggagcagggcaaggagccctggctgggcaagaggaacgtgaacagggacctgcaggccctgtgcatccccatcggcggcccaagcagcggcgcccctcctcccagcggcggcaggcggcccaagcagcggcgcccctcctcccagcggcggcagcccagccggctccccaacctctaccgaggagggcacctctgagtccgccacccccgagagcggccctggcacctccaccgagcccagcgagggcagcgcacccggcagccctgccggcagccccacctccacagaggagggaaccagcaccgagcccagcgaaggcagcgccccaggcaccagcaccgagcctagtgagcaggagattaaacggatcaacaagatcagaagaagacttgtgaaagacagcaacaccaagaaggccggcaagacaggccccatgaaaaccctgctggttagagtgatgacacccgatctgagagagcggctggaaaacctgagaaagaagcctgaaaatatcccccagcccatcagcaatacatctagagccaacctgaataagctgctgaccgattacaccgaaatgaagaaggcgatcctgcatgtgtactgggaagagttccagaaggaccctgtgggcctgatgagccgggtggcccagcctgccagcaagaagatcgatcagaacaagctgaaacctgagatggacgagaagggcaacctgaccaccgccggctttgcctgctctcagtgtggccagcccctgttcgtgtacaagctggagcaggtgtctgagaagggcaaggcttacaccaactacttcggacggtgcaatgtggccgagcacgaaaagctgatcctgctggcccagctgaagcccgagaaggatagcgacgaagccgtgacatatagcctgggaaagtttgggcagagggccctggatttctacagcattcatgtgaccaaggagtccacccaccccgtgaagcccctggcccagatcgccggaaacagatacgcctccggacctgtgggaaaggccctgagcgacgcatgtatgggcacaatcgcctccttcctgtctaagtaccaggacatcatcatcgaacaccagaaggtggtgaagggcaaccagaagagactggagagcctgcgggagctggccggcaaggaaaacctggaataccctagcgtgaccctgccacctcagcctcacaccaaggagggcgttgatgcctacaacgaagtgatcgcccgggtgcgaatgtgggtgaacctgaacctgtggcagaagctgaagctaagcagagatgatgccaagcctctgctgagactgaagggattcccttcctttcctctggtcgagagacaggccaacgaagtggactggtgggacatggtgtgtaacgtgaagaagctgatcaacgagaaaaaggaggatggcaaggtgttttggcagaatctggctggctacaagagacaggaagccctgagaccatacctgagcagcgaggaagatcggaagaagggaaagaaattcgctcggtaccagctgggcgacctgctgctgcacctggaaaagaagcacggcgaggactggggaaaggtgtacgacgaggcctgggagcggattgacaagaaagtggaaggcctgagcaagcacatcaagctggaagaggaacggagaagcgaggacgcccagagcaaggccgccctgaccgactggctgcgggctaaggccagcttcgtgatcgagggcctgaaggaggccgacaaggacgagttctgcagatgcgagctgaagctgcagaagtggtacggggacctgcggggaaagcccttcgccatcgaagccgagaacagcatcctggacatcagcggcttcagcaagcagtacaactgtgccttcatctggcagaaggacggcgtgaagaagctgaacctgtacctgatcatcaactacttcaagggcggcaagctgcggttcaagaagatcaaacctgaagccttcgaagccaacagattctacaccgtgatcaacaaaaagagcggcgagatcgtgcccatggaggtgaacttcaacttcgacgaccccaacctgatcatcctgcctctggcctttggcaagagacagggcagagaattcatctggaacgacctgctgtccctggaaaccggcagcctgaagctggccaacggaagagtgatcgagaagacactgtacaacagaagaacccggcaggatgagcctgccctgttcgtggccctgaccttcgagcggcgggaggtcctggactcctccaatatcaaaccaatgaacctgatcggcgtggcaagaggcgaaaacatccccgccgtgatcgccctgaccgaccccgagggctgcccactgagccggtttaaggatagcctgggaaacccaacccacatcctgagaatcggcgagagctataaggagaagcagcggaccatccaggccaagaaggaggtggagcagcggagagccggcggctacagccggaagtacgccagcaaagccaagaatctggcagacgatatggtgagaaacaccgctagagatctgctgtactacgccgtgacccaggatgccatgctgatcttcgccaacctgagccggggcttcggccggcagggcaagcggaccttcatggccgagagacagtacacacggatggaggactggctgaccgccaagctggcctacgagggcctgagcaagacctacctgtccaagacactggcccagtacacctccaagacatgcagcaactgtgggtttaccatcaccagcgccgactacgacagggtgctggagaagctgaagaagacagcaacaggctggatgaccacaattaacggcaaggagctgaaggtggagggccagattacctactacaacagatacaagagacagaacgtagtcaaggacctgtccgtcgagctggatagactgagcgaagaatctgtgaacaacgacatctcctcctggacaaagggcagaagcggagaagctctgagcctcctgaagaaaagattctcccatagacccgtgcaggagaagttcgtgtgcctgaactgcggcttcgagacacacgcagccgagcaagccgccctgaacatcgccagatcctggctgttcctgcggagccaggagtacaagaaataccagacaaacaagacaaccggcaacaccgataagagagccttcgtcgagacctggcagtccttttaccggaagaagcttaaggaggtgtggaaacctgccgtgcggtctggcggatctggcggaggctccaccagccccaagaaaaagagaaaagtctaagctgccttctgcggggcttgccttctggccatgcccttcttctctcccttgcacctgtacctcttggtctttgaataaagcctgagtaggaaggctagcaaaaaaaaaaaaaaaaaaaaaaaaaaaaaaaaaaaaaaaaaaaaaaaaaaaaaaaaaaaaaaaaaaaaaaaaaaaaaaaagcccagccggctccccaacctctaccgaggagggcacctctgagtccgccacccccgagagcggccctggcacctccaccgagcccagcgagggcagcgcacccggcagccctgccggcagccccacctccacagaggagggaaccagcaccgagcccagcgaaggcagcgccccaggcaccagcaccgagcctagtgagcaggagattaaacggatcaacaagatcagaagaagacttgtgaaagacagcaacaccaagaaggccggcaagacaggccccatgaaaaccctgctggttagagtgatgacacccgatctgagagagcggctggaaaacctgagaaagaagcctgaaaatatcccccagcccatcagcaatacatctagagccaacctgaataagctgctgaccgattacaccgaaatgaagaaggcgatcctgcatgtgtactgggaagagttccagaaggaccctgtgggcctgatgagccgggtggcccagcctgccagcaagaagatcgatcagaacaagctgaaacctgagatggacgagaagggcaacctgaccaccgccggctttgcctgctctcagtgtggccagcccctgttcgtgtacaagctggagcaggtgtctgagaagggcaaggcttacaccaactacttcggacggtgcaatgtggccgagcacgaaaagctgatcctgctggcccagctgaagcccgagaaggatagcgacgaagccgtgacatatagcctgggaaagtttgggcagagggccctggatttctacagcattcatgtgaccaaggagtccacccaccccgtgaagcccctggcccagatcgccggaaacagatacgcctccggacctgtgggaaaggccctgagcgacgcatgtatgggcacaatcgcctccttcctgtctaagtaccaggacatcatcatcgaacaccagaaggtggtgaagggcaaccagaagagactggagagcctgcgggagctggccggcaaggaaaacctggaataccctagcgtgaccctgccacctcagcctcacaccaaggagggcgttgatgcctacaacgaagtgatcgcccgggtgcgaatgtgggtgaacctgaacctgtggcagaagctgaagctaagcagagatgatgccaagcctctgctgagactgaagggattcccttcctttcctctggtcgagagacaggccaacgaagtggactggtgggacatggtgtgtaacgtgaagaagctgatcaacgagaaaaaggaggatggcaaggtgttttggcagaatctggctggctacaagagacaggaagccctgagaccatacctgagcagcgaggaagatcggaagaagggaaagaaattcgctcggtaccagctgggcgacctgctgctgcacctggaaaagaagcacggcgaggactggggaaaggtgtacgacgaggcctgggagcggattgacaagaaagtggaaggcctgagcaagcacatcaagctggaagaggaacggagaagcgaggacgcccagagcaaggccgccctgaccgactggctgcgggctaaggccagcttcgtgatcgagggcctgaaggaggccgacaaggacgagttctgcagatgcgagctgaagctgcagaagtggtacggggacctgcggggaaagcccttcgccatcgaagccgagaacagcatcctggacatcagcggcttcagcaagcagtacaactgtgccttcatctggcagaaggacggcgtgaagaagctgaacctgtacctgatcatcaactacttcaagggcggcaagctgcggttcaagaagatcaaacctgaagccttcgaagccaacagattctacaccgtgatcaacaaaaagagcggcgagatcgtgcccatggaggtgaacttcaacttcgacgaccccaacctgatcatcctgcctctggcctttggcaagagacagggcagagaattcatctggaacgacctgctgtccctggaaaccggcagcctgaagctggccaacggaagagtgatcgagaagacactgtacaacagaagaacccggcaggatgagcctgccctgttcgtggccctgaccttcgagcggcgggaggtcctggactcctccaatatcaaaccaatgaacctgatcggcgtggcaagaggcgaaaacatccccgccgtgatcgccctgaccgaccccgagggctgcccactgagccggtttaaggatagcctgggaaacccaacccacatcctgagaatcggcgagagctataaggagaagcagcggaccatccaggccaagaaggaggtggagcagcggagagccggcggctacagccggaagtacgccagcaaagccaagaatctggcagacgatatggtgagaaacaccgctagagatctgctgtactacgccgtgacccaggatgccatgctgatcttcgccaacctgagccggggcttcggccggcagggcaagcggaccttcatggccgagagacagtacacacggatggaggactggctgaccgccaagctggcctacgagggcctgagcaagacctacctgtccaagacactggcccagtacacctccaagacatgcagcaactgtgggtttaccatcaccagcgccgactacgacagggtgctggagaagctgaagaagacagcaacaggctggatgaccacaattaacggcaaggagctgaaggtggagggccagattacctactacaacagatacaagagacagaacgtagtcaaggacctgtccgtcgagctggatagactgagcgaagaatctgtgaacaacgacatctcctcctggacaaagggcagaagcggagaagctctgagcctcctgaagaaaagattctcccatagacccgtgcaggagaagttcgtgtgcctgaactgcggcttcgagacacacgcagccgagcaagccgccctgaacatcgccagatcctggctgttcctgcggagccaggagtacaagaaataccagacaaacaagacaaccggcaacaccgataagagagccttcgtcgagacctggcagtccttttaccggaagaagcttaaggaggtgtggaaacctgccgtgcggtctggcggatctggcggaggctccaccagccccaagaaaaagagaaaagtctaagctgccttctgcggggcttgccttctggccatgcccttcttctctcccttgcacctgtacctcttggtctttgaataaagcctgagtaggaaggctagcaaaaaaaaaaaaaaaaaaaaaaaaaaaaaaaaaaaaaaaaaaaaaaaaaaaaaaaaaaaaaaaaaaaaaaaaaaaaaaaa

SEQ ID NO: 9480 - RNA, 8787 nt, synthetic construct
  source 1..8787: mol_type = other RNA
aggaaataagagagaaaagaagagtaagaagaaatataagagccaccatggcccctaagaagaagcgtaaagtgagccggatgaaccacgaccaggagttcgacccccctaaggtgtaccctcccgtccccgccgagaagagaaagcccatccgggtcctgagcctgttcgatggcatcgccaccggtctgctggtgctgaaggacctgggcatccaggtggataggtacattgcctccgaggtgtgcgaggactccatcaccgtgggaatggtgcgtcatcagggcaagatcatgtacgtgggcgacgtgcggagcgtgacacagaagcatatccaggagtggggccctttcgacctggtgatcggcggcagcccttgcaatgacctgagcatcgtgaacccagcccggaagggcctgtacgagggaaccggcagactgttcttcgagttttacagactgctgcacgacgcccggcctaaggaaggcgacgaccggcccttcttttggctgttcgagaatgtggtggccatgggagtcagcgacaagcgggatattagccggttcctggagagcaaccccgtgatgatcgatgccaaggaagtgagcgccgcccaccgggccagatacttctggggcaatctgcctggcatgaacagacccctggccagcaccgtgaacgacaagctggagctgcaggagtgcctggagcacggccggatcgccaagttcagcaaggtgagaaccatcaccacccgaagcaacagcatcaaacaaggcaaggaccagcactttcctgtgttcatgaacgagaaggaggacatcctgtggtgtaccgagatggagagagtgttcgggttcccagtccactacacagatgtcagcaacatgtctagactggccagacagagactgctgggaagaagctggtccgtccctgtgatcagacacctgttcgcccctctgaaggagtacttcgcctgcgtgagcagcggcaacagcaacgccaacagccggggccccagcttctctagcggcctggtgccactgtccctgagagggagccacatgggccccatggagatctacaaaaccgtgagcgcctggaagcggcagcctgtgcgcgtgctgagcctgtttcggaatatcgataaagtcctgaaaagcctgggattcctggagagcggctctggctccggcggtggcaccctgaagtacgtggaggatgtgacaaacgtggtcagacgggatgtggagaagtggggccccttcgatctggtgtacggcagcacccaacccctgggcagctcttgtgaccggtgccctggctggtacatgtttcagttccaccggatcctgcagtacgccctgccgagacaggagtcccagcggccattcttttggattttcatggacaacttgctgctgaccgaggatgaccaggaaactaccactcggttcctgcagaccgaagccgtgaccctgcaggacgtgagaggccgggactaccagaacgccatgcgggtgtggtccaacatccctggactgaaaagcaagcacgcacctctgacccctaaagaagaggagtacctgcaggcccaggtgcggagcagaagcaagctggacgcccctaaggtggatctgctggtgaagaattgcctcctgcccctgagagagtacttcaagtatttcagccagaatagtctgcccctgggaggcagcggcggcggcaacctggaggccgtgaccttccaggacgtggccgtggagttcacctgcgaggagtggaggcacctggcccccccccagaaggagctgtacagggacgtgatgctggagaactacaagaacctggtgaggctgggcctggccgtgagcaagcccgacgtgatcagccagctggagaggagggaggccccctggatgcccggcggcatccagaggagcaggtgccccgactgggaggccagctgcggcggcccaagcagcggcgcccctcctcccagcggcggcaggcggcccaagcagcggcgcccctcctcccagcggcggcagcccagccggctccccaacctctaccgaggagggcacctctgagtccgccacccccgagagcggccctggcacctccaccgagcccagcgagggcagcgcacccggcagccctgccggcagccccacctccacagaggagggaaccagcaccgagcccagcgaaggcagcgccccaggcaccagcaccgagcctagtgagcaggagattaaacggatcaacaagatcagaagaagacttgtgaaagacagcaacaccaagaaggccggcaagacaggccccatgaaaaccctgctggttagagtgatgacacccgatctgagagagcggctggaaaacctgagaaagaagcctgaaaatatcccccagcccatcagcaatacatctagagccaacctgaataagctgctgaccgattacaccgaaatgaagaaggcgatcctgcatgtgtactgggaagagttccagaaggaccctgtgggcctgatgagccgggtggcccagcctgccagcaagaagatcgatcagaacaagctgaaacctgagatggacgagaagggcaacctgaccaccgccggctttgcctgctctcagtgtggccagcccctgttcgtgtacaagctggagcaggtgtctgagaagggcaaggcttacaccaactacttcggacggtgcaatgtggccgagcacgaaaagctgatcctgctggcccagctgaagcccgagaaggatagcgacgaagccgtgacatatagcctgggaaagtttgggcagagggccctggatttctacagcattcatgtgaccaaggagtccacccaccccgtgaagcccctggcccagatcgccggaaacagatacgcctccggacctgtgggaaaggccctgagcgacgcatgtatgggcacaatcgcctccttcctgtctaagtaccaggacatcatcatcgaacaccagaaggtggtgaagggcaaccagaagagactggagagcctgcgggagctggccggcaaggaaaacctggaataccctagcgtgaccctgccacctcagcctcacaccaaggagggcgttgatgcctacaacgaagtgatcgcccgggtgcgaatgtgggtgaacctgaacctgtggcagaagctgaagctaagcagagatgatgccaagcctctgctgagactgaagggattcccttcctttcctctggtcgagagacaggccaacgaagtggactggtgggacatggtgtgtaacgtgaagaagctgatcaacgagaaaaaggaggatggcaaggtgttttggcagaatctggctggctacaagagacaggaagccctgagaccatacctgagcagcgaggaagatcggaagaagggaaagaaattcgctcggtaccagctgggcgacctgctgctgcacctggaaaagaagcacggcgaggactggggaaaggtgtacgacgaggcctgggagcggattgacaagaaagtggaaggcctgagcaagcacatcaagctggaagaggaacggagaagcgaggacgcccagagcaaggccgccctgaccgactggctgcgggctaaggccagcttcgtgatcgagggcctgaaggaggccgacaaggacgagttctgcagatgcgagctgaagctgcagaagtggtacggggacctgcggggaaagcccttcgccatcgaagccgagaacagcatcctggacatcagcggcttcagcaagcagtacaactgtgccttcatctggcagaaggacggcgtgaagaagctgaacctgtacctgatcatcaactacttcaagggcggcaagctgcggttcaagaagatcaaacctgaagccttcgaagccaacagattctacaccgtgatcaacaaaaagagcggcgagatcgtgcccatggaggtgaacttcaacttcgacgaccccaacctgatcatcctgcctctggcctttggcaagagacagggcagagaattcatctggaacgacctgctgtccctggaaaccggcagcctgaagctggccaacggaagagtgatcgagaagacactgtacaacagaagaacccggcaggatgagcctgccctgttcgtggccctgaccttcgagcggcgggaggtcctggactcctccaatatcaaaccaatgaacctgatcggcgtggcaagaggcgaaaacatccccgccgtgatcgccctgaccgaccccgagggctgcccactgagccggtttaaggatagcctgggaaacccaacccacatcctgagaatcggcgagagctataaggagaagcagcggaccatccaggccaagaaggaggtggagcagcggagagccggcggctacagccggaagtacgccagcaaagccaagaatctggcagacgatatggtgagaaacaccgctagagatctgctgtactacgccgtgacccaggatgccatgctgatcttcgccaacctgagccggggcttcggccggcagggcaagcggaccttcatggccgagagacagtacacacggatggaggactggctgaccgccaagctggcctacgagggcctgagcaagacctacctgtccaagacactggcccagtacacctccaagacatgcagcaactgtgggtttaccatcaccagcgccgactacgacagggtgctggagaagctgaagaagacagcaacaggctggatgaccacaattaacggcaaggagctgaaggtggagggccagattacctactacaacagatacaagagacagaacgtagtcaaggacctgtccgtcgagctggatagactgagcgaagaatctgtgaacaacgacatctcctcctggacaaagggcagaagcggagaagctctgagcctcctgaagaaaagattctcccatagacccgtgcaggagaagttcgtgtgcctgaactgcggcttcgagacacacgcagccgagcaagccgccctgaacatcgccagatcctggctgttcctgcggagccaggagtacaagaaataccagacaaacaagacaaccggcaacaccgataagagagccttcgtcgagacctggcagtccttttaccggaagaagcttaaggaggtgtggaaacctgccgtgcggtctggcggatctggcggaggctccaccagccccaagaaaaagagaaaagtctaagctgccttctgcggggcttgccttctggccatgcccttcttctctcccttgcacctgtacctcttggtctttgaataaagcctgagtaggaaggctagcaaaaaaaaaaaaaaaaaaaaaaaaaaaaaaaaaaaaaaaaaaaaaaaaaaaaaaaaaaaaaaaaaaaaaaaaaaaaaaaagcccagccggctccccaacctctaccgaggagggcacctctgagtccgccacccccgagagcggccctggcacctccaccgagcccagcgagggcagcgcacccggcagccctgccggcagccccacctccacagaggagggaaccagcaccgagcccagcgaaggcagcgccccaggcaccagcaccgagcctagtgagcaggagattaaacggatcaacaagatcagaagaagacttgtgaaagacagcaacaccaagaaggccggcaagacaggccccatgaaaaccctgctggttagagtgatgacacccgatctgagagagcggctggaaaacctgagaaagaagcctgaaaatatcccccagcccatcagcaatacatctagagccaacctgaataagctgctgaccgattacaccgaaatgaagaaggcgatcctgcatgtgtactgggaagagttccagaaggaccctgtgggcctgatgagccgggtggcccagcctgccagcaagaagatcgatcagaacaagctgaaacctgagatggacgagaagggcaacctgaccaccgccggctttgcctgctctcagtgtggccagcccctgttcgtgtacaagctggagcaggtgtctgagaagggcaaggcttacaccaactacttcggacggtgcaatgtggccgagcacgaaaagctgatcctgctggcccagctgaagcccgagaaggatagcgacgaagccgtgacatatagcctgggaaagtttgggcagagggccctggatttctacagcattcatgtgaccaaggagtccacccaccccgtgaagcccctggcccagatcgccggaaacagatacgcctccggacctgtgggaaaggccctgagcgacgcatgtatgggcacaatcgcctccttcctgtctaagtaccaggacatcatcatcgaacaccagaaggtggtgaagggcaaccagaagagactggagagcctgcgggagctggccggcaaggaaaacctggaataccctagcgtgaccctgccacctcagcctcacaccaaggagggcgttgatgcctacaacgaagtgatcgcccgggtgcgaatgtgggtgaacctgaacctgtggcagaagctgaagctaagcagagatgatgccaagcctctgctgagactgaagggattcccttcctttcctctggtcgagagacaggccaacgaagtggactggtgggacatggtgtgtaacgtgaagaagctgatcaacgagaaaaaggaggatggcaaggtgttttggcagaatctggctggctacaagagacaggaagccctgagaccatacctgagcagcgaggaagatcggaagaagggaaagaaattcgctcggtaccagctgggcgacctgctgctgcacctggaaaagaagcacggcgaggactggggaaaggtgtacgacgaggcctgggagcggattgacaagaaagtggaaggcctgagcaagcacatcaagctggaagaggaacggagaagcgaggacgcccagagcaaggccgccctgaccgactggctgcgggctaaggccagcttcgtgatcgagggcctgaaggaggccgacaaggacgagttctgcagatgcgagctgaagctgcagaagtggtacggggacctgcggggaaagcccttcgccatcgaagccgagaacagcatcctggacatcagcggcttcagcaagcagtacaactgtgccttcatctggcagaaggacggcgtgaagaagctgaacctgtacctgatcatcaactacttcaagggcggcaagctgcggttcaagaagatcaaacctgaagccttcgaagccaacagattctacaccgtgatcaacaaaaagagcggcgagatcgtgcccatggaggtgaacttcaacttcgacgaccccaacctgatcatcctgcctctggcctttggcaagagacagggcagagaattcatctggaacgacctgctgtccctggaaaccggcagcctgaagctggccaacggaagagtgatcgagaagacactgtacaacagaagaacccggcaggatgagcctgccctgttcgtggccctgaccttcgagcggcgggaggtcctggactcctccaatatcaaaccaatgaacctgatcggcgtggcaagaggcgaaaacatccccgccgtgatcgccctgaccgaccccgagggctgcccactgagccggtttaaggatagcctgggaaacccaacccacatcctgagaatcggcgagagctataaggagaagcagcggaccatccaggccaagaaggaggtggagcagcggagagccggcggctacagccggaagtacgccagcaaagccaagaatctggcagacgatatggtgagaaacaccgctagagatctgctgtactacgccgtgacccaggatgccatgctgatcttcgccaacctgagccggggcttcggccggcagggcaagcggaccttcatggccgagagacagtacacacggatggaggactggctgaccgccaagctggcctacgagggcctgagcaagacctacctgtccaagacactggcccagtacacctccaagacatgcagcaactgtgggtttaccatcaccagcgccgactacgacagggtgctggagaagctgaagaagacagcaacaggctggatgaccacaattaacggcaaggagctgaaggtggagggccagattacctactacaacagatacaagagacagaacgtagtcaaggacctgtccgtcgagctggatagactgagcgaagaatctgtgaacaacgacatctcctcctggacaaagggcagaagcggagaagctctgagcctcctgaagaaaagattctcccatagacccgtgcaggagaagttcgtgtgcctgaactgcggcttcgagacacacgcagccgagcaagccgccctgaacatcgccagatcctggctgttcctgcggagccaggagtacaagaaataccagacaaacaagacaaccggcaacaccgataagagagccttcgtcgagacctggcagtccttttaccggaagaagcttaaggaggtgtggaaacctgccgtgcggtctggcggatctggcggaggctccaccagccccaagaaaaagagaaaagtctaagctgccttctgcggggcttgccttctggccatgcccttcttctctcccttgcacctgtacctcttggtctttgaataaagcctgagtaggaaggctagcaaaaaaaaaaaaaaaaaaaaaaaaaaaaaaaaaaaaaaaaaaaaaaaaaaaaaaaaaaaaaaaaaaaaaaaaaaaaaaaa

SEQ ID NO: 9481 - RNA, 8787 nt, synthetic construct
  source 1..8787: mol_type = other RNA
aggaaataagagagaaaagaagagtaagaagaaatataagagccaccatggcccctaagaagaagcgtaaagtgagccggatgaaccacgaccaggagttcgacccccctaaggtgtaccctcccgtccccgccgagaagagaaagcccatccgggtcctgagcctgttcgatggcatcgccaccggtctgctggtgctgaaggacctgggcatccaggtggataggtacattgcctccgaggtgtgcgaggactccatcaccgtgggaatggtgcgtcatcagggcaagatcatgtacgtgggcgacgtgcggagcgtgacacagaagcatatccaggagtggggccctttcgacctggtgatcggcggcagcccttgcaatgacctgagcatcgtgaacccagcccggaagggcctgtacgagggaaccggcagactgttcttcgagttttacagactgctgcacgacgcccggcctaaggaaggcgacgaccggcccttcttttggctgttcgagaatgtggtggccatgggagtcagcgacaagcgggatattagccggttcctggagagcaaccccgtgatgatcgatgccaaggaagtgagcgccgcccaccgggccagatacttctggggcaatctgcctggcatgaacagacccctggccagcaccgtgaacgacaagctggagctgcaggagtgcctggagcacggccggatcgccaagttcagcaaggtgagaaccatcaccacccgaagcaacagcatcaaacaaggcaaggaccagcactttcctgtgttcatgaacgagaaggaggacatcctgtggtgtaccgagatggagagagtgttcgggttcccagtccactacacagatgtcagcaacatgtctagactggccagacagagactgctgggaagaagctggtccgtccctgtgatcagacacctgttcgcccctctgaaggagtacttcgcctgcgtgagcagcggcaacagcaacgccaacagccggggccccagcttctctagcggcctggtgccactgtccctgagagggagccacatgggccccatggagatctacaaaaccgtgagcgcctggaagcggcagcctgtgcgcgtgctgagcctgtttcggaatatcgataaagtcctgaaaagcctgggattcctggagagcggctctggctccggcggtggcaccctgaagtacgtggaggatgtgacaaacgtggtcagacgggatgtggagaagtggggccccttcgatctggtgtacggcagcacccaacccctgggcagctcttgtgaccggtgccctggctggtacatgtttcagttccaccggatcctgcagtacgccctgccgagacaggagtcccagcggccattcttttggattttcatggacaacttgctgctgaccgaggatgaccaggaaactaccactcggttcctgcagaccgaagccgtgaccctgcaggacgtgagaggccgggactaccagaacgccatgcgggtgtggtccaacatccctggactgaaaagcaagcacgcacctctgacccctaaagaagaggagtacctgcaggcccaggtgcggagcagaagcaagctggacgcccctaaggtggatctgctggtgaagaattgcctcctgcccctgagagagtacttcaagtatttcagccagaatagtctgcccctgggaggcagcggcggcggcaggcccagggccgtgaagttcgccgacgtggccgtgtacttcagccccgaggagtggggctgcctgaggcccgcccagagggccctgtacagggacgtgatgagggagacctacggccacctgagcgccctgggctgcagcggccccaagcccgccctgatcagctggctggagaggaacaccgacgactgggagcccgccgccctggacccccaggagtgccccaggggcctgaccgtgcagggcggcccaagcagcggcgcccctcctcccagcggcggcaggcggcccaagcagcggcgcccctcctcccagcggcggcagcccagccggctccccaacctctaccgaggagggcacctctgagtccgccacccccgagagcggccctggcacctccaccgagcccagcgagggcagcgcacccggcagccctgccggcagccccacctccacagaggagggaaccagcaccgagcccagcgaaggcagcgccccaggcaccagcaccgagcctagtgagcaggagattaaacggatcaacaagatcagaagaagacttgtgaaagacagcaacaccaagaaggccggcaagacaggccccatgaaaaccctgctggttagagtgatgacacccgatctgagagagcggctggaaaacctgagaaagaagcctgaaaatatcccccagcccatcagcaatacatctagagccaacctgaataagctgctgaccgattacaccgaaatgaagaaggcgatcctgcatgtgtactgggaagagttccagaaggaccctgtgggcctgatgagccgggtggcccagcctgccagcaagaagatcgatcagaacaagctgaaacctgagatggacgagaagggcaacctgaccaccgccggctttgcctgctctcagtgtggccagcccctgttcgtgtacaagctggagcaggtgtctgagaagggcaaggcttacaccaactacttcggacggtgcaatgtggccgagcacgaaaagctgatcctgctggcccagctgaagcccgagaaggatagcgacgaagccgtgacatatagcctgggaaagtttgggcagagggccctggatttctacagcattcatgtgaccaaggagtccacccaccccgtgaagcccctggcccagatcgccggaaacagatacgcctccggacctgtgggaaaggccctgagcgacgcatgtatgggcacaatcgcctccttcctgtctaagtaccaggacatcatcatcgaacaccagaaggtggtgaagggcaaccagaagagactggagagcctgcgggagctggccggcaaggaaaacctggaataccctagcgtgaccctgccacctcagcctcacaccaaggagggcgttgatgcctacaacgaagtgatcgcccgggtgcgaatgtgggtgaacctgaacctgtggcagaagctgaagctaagcagagatgatgccaagcctctgctgagactgaagggattcccttcctttcctctggtcgagagacaggccaacgaagtggactggtgggacatggtgtgtaacgtgaagaagctgatcaacgagaaaaaggaggatggcaaggtgttttggcagaatctggctggctacaagagacaggaagccctgagaccatacctgagcagcgaggaagatcggaagaagggaaagaaattcgctcggtaccagctgggcgacctgctgctgcacctggaaaagaagcacggcgaggactggggaaaggtgtacgacgaggcctgggagcggattgacaagaaagtggaaggcctgagcaagcacatcaagctggaagaggaacggagaagcgaggacgcccagagcaaggccgccctgaccgactggctgcgggctaaggccagcttcgtgatcgagggcctgaaggaggccgacaaggacgagttctgcagatgcgagctgaagctgcagaagtggtacggggacctgcggggaaagcccttcgccatcgaagccgagaacagcatcctggacatcagcggcttcagcaagcagtacaactgtgccttcatctggcagaaggacggcgtgaagaagctgaacctgtacctgatcatcaactacttcaagggcggcaagctgcggttcaagaagatcaaacctgaagccttcgaagccaacagattctacaccgtgatcaacaaaaagagcggcgagatcgtgcccatggaggtgaacttcaacttcgacgaccccaacctgatcatcctgcctctggcctttggcaagagacagggcagagaattcatctggaacgacctgctgtccctggaaaccggcagcctgaagctggccaacggaagagtgatcgagaagacactgtacaacagaagaacccggcaggatgagcctgccctgttcgtggccctgaccttcgagcggcgggaggtcctggactcctccaatatcaaaccaatgaacctgatcggcgtggcaagaggcgaaaacatccccgccgtgatcgccctgaccgaccccgagggctgcccactgagccggtttaaggatagcctgggaaacccaacccacatcctgagaatcggcgagagctataaggagaagcagcggaccatccaggccaagaaggaggtggagcagcggagagccggcggctacagccggaagtacgccagcaaagccaagaatctggcagacgatatggtgagaaacaccgctagagatctgctgtactacgccgtgacccaggatgccatgctgatcttcgccaacctgagccggggcttcggccggcagggcaagcggaccttcatggccgagagacagtacacacggatggaggactggctgaccgccaagctggcctacgagggcctgagcaagacctacctgtccaagacactggcccagtacacctccaagacatgcagcaactgtgggtttaccatcaccagcgccgactacgacagggtgctggagaagctgaagaagacagcaacaggctggatgaccacaattaacggcaaggagctgaaggtggagggccagattacctactacaacagatacaagagacagaacgtagtcaaggacctgtccgtcgagctggatagactgagcgaagaatctgtgaacaacgacatctcctcctggacaaagggcagaagcggagaagctctgagcctcctgaagaaaagattctcccatagacccgtgcaggagaagttcgtgtgcctgaactgcggcttcgagacacacgcagccgagcaagccgccctgaacatcgccagatcctggctgttcctgcggagccaggagtacaagaaataccagacaaacaagacaaccggcaacaccgataagagagccttcgtcgagacctggcagtccttttaccggaagaagcttaaggaggtgtggaaacctgccgtgcggtctggcggatctggcggaggctccaccagccccaagaaaaagagaaaagtctaagctgccttctgcggggcttgccttctggccatgcccttcttctctcccttgcacctgtacctcttggtctttgaataaagcctgagtaggaaggctagcaaaaaaaaaaaaaaaaaaaaaaaaaaaaaaaaaaaaaaaaaaaaaaaaaaaaaaaaaaaaaaaaaaaaaaaaaaaaaaaagcccagccggctccccaacctctaccgaggagggcacctctgagtccgccacccccgagagcggccctggcacctccaccgagcccagcgagggcagcgcacccggcagccctgccggcagccccacctccacagaggagggaaccagcaccgagcccagcgaaggcagcgccccaggcaccagcaccgagcctagtgagcaggagattaaacggatcaacaagatcagaagaagacttgtgaaagacagcaacaccaagaaggccggcaagacaggccccatgaaaaccctgctggttagagtgatgacacccgatctgagagagcggctggaaaacctgagaaagaagcctgaaaatatcccccagcccatcagcaatacatctagagccaacctgaataagctgctgaccgattacaccgaaatgaagaaggcgatcctgcatgtgtactgggaagagttccagaaggaccctgtgggcctgatgagccgggtggcccagcctgccagcaagaagatcgatcagaacaagctgaaacctgagatggacgagaagggcaacctgaccaccgccggctttgcctgctctcagtgtggccagcccctgttcgtgtacaagctggagcaggtgtctgagaagggcaaggcttacaccaactacttcggacggtgcaatgtggccgagcacgaaaagctgatcctgctggcccagctgaagcccgagaaggatagcgacgaagccgtgacatatagcctgggaaagtttgggcagagggccctggatttctacagcattcatgtgaccaaggagtccacccaccccgtgaagcccctggcccagatcgccggaaacagatacgcctccggacctgtgggaaaggccctgagcgacgcatgtatgggcacaatcgcctccttcctgtctaagtaccaggacatcatcatcgaacaccagaaggtggtgaagggcaaccagaagagactggagagcctgcgggagctggccggcaaggaaaacctggaataccctagcgtgaccctgccacctcagcctcacaccaaggagggcgttgatgcctacaacgaagtgatcgcccgggtgcgaatgtgggtgaacctgaacctgtggcagaagctgaagctaagcagagatgatgccaagcctctgctgagactgaagggattcccttcctttcctctggtcgagagacaggccaacgaagtggactggtgggacatggtgtgtaacgtgaagaagctgatcaacgagaaaaaggaggatggcaaggtgttttggcagaatctggctggctacaagagacaggaagccctgagaccatacctgagcagcgaggaagatcggaagaagggaaagaaattcgctcggtaccagctgggcgacctgctgctgcacctggaaaagaagcacggcgaggactggggaaaggtgtacgacgaggcctgggagcggattgacaagaaagtggaaggcctgagcaagcacatcaagctggaagaggaacggagaagcgaggacgcccagagcaaggccgccctgaccgactggctgcgggctaaggccagcttcgtgatcgagggcctgaaggaggccgacaaggacgagttctgcagatgcgagctgaagctgcagaagtggtacggggacctgcggggaaagcccttcgccatcgaagccgagaacagcatcctggacatcagcggcttcagcaagcagtacaactgtgccttcatctggcagaaggacggcgtgaagaagctgaacctgtacctgatcatcaactacttcaagggcggcaagctgcggttcaagaagatcaaacctgaagccttcgaagccaacagattctacaccgtgatcaacaaaaagagcggcgagatcgtgcccatggaggtgaacttcaacttcgacgaccccaacctgatcatcctgcctctggcctttggcaagagacagggcagagaattcatctggaacgacctgctgtccctggaaaccggcagcctgaagctggccaacggaagagtgatcgagaagacactgtacaacagaagaacccggcaggatgagcctgccctgttcgtggccctgaccttcgagcggcgggaggtcctggactcctccaatatcaaaccaatgaacctgatcggcgtggcaagaggcgaaaacatccccgccgtgatcgccctgaccgaccccgagggctgcccactgagccggtttaaggatagcctgggaaacccaacccacatcctgagaatcggcgagagctataaggagaagcagcggaccatccaggccaagaaggaggtggagcagcggagagccggcggctacagccggaagtacgccagcaaagccaagaatctggcagacgatatggtgagaaacaccgctagagatctgctgtactacgccgtgacccaggatgccatgctgatcttcgccaacctgagccggggcttcggccggcagggcaagcggaccttcatggccgagagacagtacacacggatggaggactggctgaccgccaagctggcctacgagggcctgagcaagacctacctgtccaagacactggcccagtacacctccaagacatgcagcaactgtgggtttaccatcaccagcgccgactacgacagggtgctggagaagctgaagaagacagcaacaggctggatgaccacaattaacggcaaggagctgaaggtggagggccagattacctactacaacagatacaagagacagaacgtagtcaaggacctgtccgtcgagctggatagactgagcgaagaatctgtgaacaacgacatctcctcctggacaaagggcagaagcggagaagctctgagcctcctgaagaaaagattctcccatagacccgtgcaggagaagttcgtgtgcctgaactgcggcttcgagacacacgcagccgagcaagccgccctgaacatcgccagatcctggctgttcctgcggagccaggagtacaagaaataccagacaaacaagacaaccggcaacaccgataagagagccttcgtcgagacctggcagtccttttaccggaagaagcttaaggaggtgtggaaacctgccgtgcggtctggcggatctggcggaggctccaccagccccaagaaaaagagaaaagtctaagctgccttctgcggggcttgccttctggccatgcccttcttctctcccttgcacctgtacctcttggtctttgaataaagcctgagtaggaaggctagcaaaaaaaaaaaaaaaaaaaaaaaaaaaaaaaaaaaaaaaaaaaaaaaaaaaaaaaaaaaaaaaaaaaaaaaaaaaaaaaa

SEQ ID NO: 9482 - RNA, 8787 nt, synthetic construct
  source 1..8787: mol_type = other RNA
aggaaataagagagaaaagaagagtaagaagaaatataagagccaccatggcccctaagaagaagcgtaaagtgagccggatgaaccacgaccaggagttcgacccccctaaggtgtaccctcccgtccccgccgagaagagaaagcccatccgggtcctgagcctgttcgatggcatcgccaccggtctgctggtgctgaaggacctgggcatccaggtggataggtacattgcctccgaggtgtgcgaggactccatcaccgtgggaatggtgcgtcatcagggcaagatcatgtacgtgggcgacgtgcggagcgtgacacagaagcatatccaggagtggggccctttcgacctggtgatcggcggcagcccttgcaatgacctgagcatcgtgaacccagcccggaagggcctgtacgagggaaccggcagactgttcttcgagttttacagactgctgcacgacgcccggcctaaggaaggcgacgaccggcccttcttttggctgttcgagaatgtggtggccatgggagtcagcgacaagcgggatattagccggttcctggagagcaaccccgtgatgatcgatgccaaggaagtgagcgccgcccaccgggccagatacttctggggcaatctgcctggcatgaacagacccctggccagcaccgtgaacgacaagctggagctgcaggagtgcctggagcacggccggatcgccaagttcagcaaggtgagaaccatcaccacccgaagcaacagcatcaaacaaggcaaggaccagcactttcctgtgttcatgaacgagaaggaggacatcctgtggtgtaccgagatggagagagtgttcgggttcccagtccactacacagatgtcagcaacatgtctagactggccagacagagactgctgggaagaagctggtccgtccctgtgatcagacacctgttcgcccctctgaaggagtacttcgcctgcgtgagcagcggcaacagcaacgccaacagccggggccccagcttctctagcggcctggtgccactgtccctgagagggagccacatgggccccatggagatctacaaaaccgtgagcgcctggaagcggcagcctgtgcgcgtgctgagcctgtttcggaatatcgataaagtcctgaaaagcctgggattcctggagagcggctctggctccggcggtggcaccctgaagtacgtggaggatgtgacaaacgtggtcagacgggatgtggagaagtggggccccttcgatctggtgtacggcagcacccaacccctgggcagctcttgtgaccggtgccctggctggtacatgtttcagttccaccggatcctgcagtacgccctgccgagacaggagtcccagcggccattcttttggattttcatggacaacttgctgctgaccgaggatgaccaggaaactaccactcggttcctgcagaccgaagccgtgaccctgcaggacgtgagaggccgggactaccagaacgccatgcgggtgtggtccaacatccctggactgaaaagcaagcacgcacctctgacccctaaagaagaggagtacctgcaggcccaggtgcggagcagaagcaagctggacgcccctaaggtggatctgctggtgaagaattgcctcctgcccctgagagagtacttcaagtatttcagccagaatagtctgcccctgggaggcagcggcggcggcaggcagggcagcgtgaccttccaggacgtggccgtggacttcagctgggaggagtggggcaggctgggccccacccagaaggagctgtacagggaggtgatgctggagaactacaggaacctggtgtgcctgggcctggaggtgagcaagcccgacgtggtgtaccagctggagaggggcgaggccccctggatgcccgagggcgccgtgaggaggagctgcagccagaactggggcgccaggggcggcccaagcagcggcgcccctcctcccagcggcggcaggcggcccaagcagcggcgcccctcctcccagcggcggcagcccagccggctccccaacctctaccgaggagggcacctctgagtccgccacccccgagagcggccctggcacctccaccgagcccagcgagggcagcgcacccggcagccctgccggcagccccacctccacagaggagggaaccagcaccgagcccagcgaaggcagcgccccaggcaccagcaccgagcctagtgagcaggagattaaacggatcaacaagatcagaagaagacttgtgaaagacagcaacaccaagaaggccggcaagacaggccccatgaaaaccctgctggttagagtgatgacacccgatctgagagagcggctggaaaacctgagaaagaagcctgaaaatatcccccagcccatcagcaatacatctagagccaacctgaataagctgctgaccgattacaccgaaatgaagaaggcgatcctgcatgtgtactgggaagagttccagaaggaccctgtgggcctgatgagccgggtggcccagcctgccagcaagaagatcgatcagaacaagctgaaacctgagatggacgagaagggcaacctgaccaccgccggctttgcctgctctcagtgtggccagcccctgttcgtgtacaagctggagcaggtgtctgagaagggcaaggcttacaccaactacttcggacggtgcaatgtggccgagcacgaaaagctgatcctgctggcccagctgaagcccgagaaggatagcgacgaagccgtgacatatagcctgggaaagtttgggcagagggccctggatttctacagcattcatgtgaccaaggagtccacccaccccgtgaagcccctggcccagatcgccggaaacagatacgcctccggacctgtgggaaaggccctgagcgacgcatgtatgggcacaatcgcctccttcctgtctaagtaccaggacatcatcatcgaacaccagaaggtggtgaagggcaaccagaagagactggagagcctgcgggagctggccggcaaggaaaacctggaataccctagcgtgaccctgccacctcagcctcacaccaaggagggcgttgatgcctacaacgaagtgatcgcccgggtgcgaatgtgggtgaacctgaacctgtggcagaagctgaagctaagcagagatgatgccaagcctctgctgagactgaagggattcccttcctttcctctggtcgagagacaggccaacgaagtggactggtgggacatggtgtgtaacgtgaagaagctgatcaacgagaaaaaggaggatggcaaggtgttttggcagaatctggctggctacaagagacaggaagccctgagaccatacctgagcagcgaggaagatcggaagaagggaaagaaattcgctcggtaccagctgggcgacctgctgctgcacctggaaaagaagcacggcgaggactggggaaaggtgtacgacgaggcctgggagcggattgacaagaaagtggaaggcctgagcaagcacatcaagctggaagaggaacggagaagcgaggacgcccagagcaaggccgccctgaccgactggctgcgggctaaggccagcttcgtgatcgagggcctgaaggaggccgacaaggacgagttctgcagatgcgagctgaagctgcagaagtggtacggggacctgcggggaaagcccttcgccatcgaagccgagaacagcatcctggacatcagcggcttcagcaagcagtacaactgtgccttcatctggcagaaggacggcgtgaagaagctgaacctgtacctgatcatcaactacttcaagggcggcaagctgcggttcaagaagatcaaacctgaagccttcgaagccaacagattctacaccgtgatcaacaaaaagagcggcgagatcgtgcccatggaggtgaacttcaacttcgacgaccccaacctgatcatcctgcctctggcctttggcaagagacagggcagagaattcatctggaacgacctgctgtccctggaaaccggcagcctgaagctggccaacggaagagtgatcgagaagacactgtacaacagaagaacccggcaggatgagcctgccctgttcgtggccctgaccttcgagcggcgggaggtcctggactcctccaatatcaaaccaatgaacctgatcggcgtggcaagaggcgaaaacatccccgccgtgatcgccctgaccgaccccgagggctgcccactgagccggtttaaggatagcctgggaaacccaacccacatcctgagaatcggcgagagctataaggagaagcagcggaccatccaggccaagaaggaggtggagcagcggagagccggcggctacagccggaagtacgccagcaaagccaagaatctggcagacgatatggtgagaaacaccgctagagatctgctgtactacgccgtgacccaggatgccatgctgatcttcgccaacctgagccggggcttcggccggcagggcaagcggaccttcatggccgagagacagtacacacggatggaggactggctgaccgccaagctggcctacgagggcctgagcaagacctacctgtccaagacactggcccagtacacctccaagacatgcagcaactgtgggtttaccatcaccagcgccgactacgacagggtgctggagaagctgaagaagacagcaacaggctggatgaccacaattaacggcaaggagctgaaggtggagggccagattacctactacaacagatacaagagacagaacgtagtcaaggacctgtccgtcgagctggatagactgagcgaagaatctgtgaacaacgacatctcctcctggacaaagggcagaagcggagaagctctgagcctcctgaagaaaagattctcccatagacccgtgcaggagaagttcgtgtgcctgaactgcggcttcgagacacacgcagccgagcaagccgccctgaacatcgccagatcctggctgttcctgcggagccaggagtacaagaaataccagacaaacaagacaaccggcaacaccgataagagagccttcgtcgagacctggcagtccttttaccggaagaagcttaaggaggtgtggaaacctgccgtgcggtctggcggatctggcggaggctccaccagccccaagaaaaagagaaaagtctaagctgccttctgcggggcttgccttctggccatgcccttcttctctcccttgcacctgtacctcttggtctttgaataaagcctgagtaggaaggctagcaaaaaaaaaaaaaaaaaaaaaaaaaaaaaaaaaaaaaaaaaaaaaaaaaaaaaaaaaaaaaaaaaaaaaaaaaaaaaaaagcccagccggctccccaacctctaccgaggagggcacctctgagtccgccacccccgagagcggccctggcacctccaccgagcccagcgagggcagcgcacccggcagccctgccggcagccccacctccacagaggagggaaccagcaccgagcccagcgaaggcagcgccccaggcaccagcaccgagcctagtgagcaggagattaaacggatcaacaagatcagaagaagacttgtgaaagacagcaacaccaagaaggccggcaagacaggccccatgaaaaccctgctggttagagtgatgacacccgatctgagagagcggctggaaaacctgagaaagaagcctgaaaatatcccccagcccatcagcaatacatctagagccaacctgaataagctgctgaccgattacaccgaaatgaagaaggcgatcctgcatgtgtactgggaagagttccagaaggaccctgtgggcctgatgagccgggtggcccagcctgccagcaagaagatcgatcagaacaagctgaaacctgagatggacgagaagggcaacctgaccaccgccggctttgcctgctctcagtgtggccagcccctgttcgtgtacaagctggagcaggtgtctgagaagggcaaggcttacaccaactacttcggacggtgcaatgtggccgagcacgaaaagctgatcctgctggcccagctgaagcccgagaaggatagcgacgaagccgtgacatatagcctgggaaagtttgggcagagggccctggatttctacagcattcatgtgaccaaggagtccacccaccccgtgaagcccctggcccagatcgccggaaacagatacgcctccggacctgtgggaaaggccctgagcgacgcatgtatgggcacaatcgcctccttcctgtctaagtaccaggacatcatcatcgaacaccagaaggtggtgaagggcaaccagaagagactggagagcctgcgggagctggccggcaaggaaaacctggaataccctagcgtgaccctgccacctcagcctcacaccaaggagggcgttgatgcctacaacgaagtgatcgcccgggtgcgaatgtgggtgaacctgaacctgtggcagaagctgaagctaagcagagatgatgccaagcctctgctgagactgaagggattcccttcctttcctctggtcgagagacaggccaacgaagtggactggtgggacatggtgtgtaacgtgaagaagctgatcaacgagaaaaaggaggatggcaaggtgttttggcagaatctggctggctacaagagacaggaagccctgagaccatacctgagcagcgaggaagatcggaagaagggaaagaaattcgctcggtaccagctgggcgacctgctgctgcacctggaaaagaagcacggcgaggactggggaaaggtgtacgacgaggcctgggagcggattgacaagaaagtggaaggcctgagcaagcacatcaagctggaagaggaacggagaagcgaggacgcccagagcaaggccgccctgaccgactggctgcgggctaaggccagcttcgtgatcgagggcctgaaggaggccgacaaggacgagttctgcagatgcgagctgaagctgcagaagtggtacggggacctgcggggaaagcccttcgccatcgaagccgagaacagcatcctggacatcagcggcttcagcaagcagtacaactgtgccttcatctggcagaaggacggcgtgaagaagctgaacctgtacctgatcatcaactacttcaagggcggcaagctgcggttcaagaagatcaaacctgaagccttcgaagccaacagattctacaccgtgatcaacaaaaagagcggcgagatcgtgcccatggaggtgaacttcaacttcgacgaccccaacctgatcatcctgcctctggcctttggcaagagacagggcagagaattcatctggaacgacctgctgtccctggaaaccggcagcctgaagctggccaacggaagagtgatcgagaagacactgtacaacagaagaacccggcaggatgagcctgccctgttcgtggccctgaccttcgagcggcgggaggtcctggactcctccaatatcaaaccaatgaacctgatcggcgtggcaagaggcgaaaacatccccgccgtgatcgccctgaccgaccccgagggctgcccactgagccggtttaaggatagcctgggaaacccaacccacatcctgagaatcggcgagagctataaggagaagcagcggaccatccaggccaagaaggaggtggagcagcggagagccggcggctacagccggaagtacgccagcaaagccaagaatctggcagacgatatggtgagaaacaccgctagagatctgctgtactacgccgtgacccaggatgccatgctgatcttcgccaacctgagccggggcttcggccggcagggcaagcggaccttcatggccgagagacagtacacacggatggaggactggctgaccgccaagctggcctacgagggcctgagcaagacctacctgtccaagacactggcccagtacacctccaagacatgcagcaactgtgggtttaccatcaccagcgccgactacgacagggtgctggagaagctgaagaagacagcaacaggctggatgaccacaattaacggcaaggagctgaaggtggagggccagattacctactacaacagatacaagagacagaacgtagtcaaggacctgtccgtcgagctggatagactgagcgaagaatctgtgaacaacgacatctcctcctggacaaagggcagaagcggagaagctctgagcctcctgaagaaaagattctcccatagacccgtgcaggagaagttcgtgtgcctgaactgcggcttcgagacacacgcagccgagcaagccgccctgaacatcgccagatcctggctgttcctgcggagccaggagtacaagaaataccagacaaacaagacaaccggcaacaccgataagagagccttcgtcgagacctggcagtccttttaccggaagaagcttaaggaggtgtggaaacctgccgtgcggtctggcggatctggcggaggctccaccagccccaagaaaaagagaaaagtctaagctgccttctgcggggcttgccttctggccatgcccttcttctctcccttgcacctgtacctcttggtctttgaataaagcctgagtaggaaggctagcaaaaaaaaaaaaaaaaaaaaaaaaaaaaaaaaaaaaaaaaaaaaaaaaaaaaaaaaaaaaaaaaaaaaaaaaaaaaaaaa

SEQ ID NO: 9483 - RNA, 8787 nt, synthetic construct
  source 1..8787: mol_type = other RNA
aggaaataagagagaaaagaagagtaagaagaaatataagagccaccatggcccctaagaagaagcgtaaagtgagccggatgaaccacgaccaggagttcgacccccctaaggtgtaccctcccgtccccgccgagaagagaaagcccatccgggtcctgagcctgttcgatggcatcgccaccggtctgctggtgctgaaggacctgggcatccaggtggataggtacattgcctccgaggtgtgcgaggactccatcaccgtgggaatggtgcgtcatcagggcaagatcatgtacgtgggcgacgtgcggagcgtgacacagaagcatatccaggagtggggccctttcgacctggtgatcggcggcagcccttgcaatgacctgagcatcgtgaacccagcccggaagggcctgtacgagggaaccggcagactgttcttcgagttttacagactgctgcacgacgcccggcctaaggaaggcgacgaccggcccttcttttggctgttcgagaatgtggtggccatgggagtcagcgacaagcgggatattagccggttcctggagagcaaccccgtgatgatcgatgccaaggaagtgagcgccgcccaccgggccagatacttctggggcaatctgcctggcatgaacagacccctggccagcaccgtgaacgacaagctggagctgcaggagtgcctggagcacggccggatcgccaagttcagcaaggtgagaaccatcaccacccgaagcaacagcatcaaacaaggcaaggaccagcactttcctgtgttcatgaacgagaaggaggacatcctgtggtgtaccgagatggagagagtgttcgggttcccagtccactacacagatgtcagcaacatgtctagactggccagacagagactgctgggaagaagctggtccgtccctgtgatcagacacctgttcgcccctctgaaggagtacttcgcctgcgtgagcagcggcaacagcaacgccaacagccggggccccagcttctctagcggcctggtgccactgtccctgagagggagccacatgggccccatggagatctacaaaaccgtgagcgcctggaagcggcagcctgtgcgcgtgctgagcctgtttcggaatatcgataaagtcctgaaaagcctgggattcctggagagcggctctggctccggcggtggcaccctgaagtacgtggaggatgtgacaaacgtggtcagacgggatgtggagaagtggggccccttcgatctggtgtacggcagcacccaacccctgggcagctcttgtgaccggtgccctggctggtacatgtttcagttccaccggatcctgcagtacgccctgccgagacaggagtcccagcggccattcttttggattttcatggacaacttgctgctgaccgaggatgaccaggaaactaccactcggttcctgcagaccgaagccgtgaccctgcaggacgtgagaggccgggactaccagaacgccatgcgggtgtggtccaacatccctggactgaaaagcaagcacgcacctctgacccctaaagaagaggagtacctgcaggcccaggtgcggagcagaagcaagctggacgcccctaaggtggatctgctggtgaagaattgcctcctgcccctgagagagtacttcaagtatttcagccagaatagtctgcccctgggaggcagcggcggcggccaggccgaggtgaccttcgaggacgtggccgtgctgctgagcagggaggagtggggcaggctgggccccgcccagaagggcctgtacagggacgtgatgctggagacctacaggaacctggtgagcctgggcgccggccacgccggccccaagcccggcgtgatcgcccagctggagaggggcgacgagccctgggtgctggacatgcagggcagggagcagagcaccatcgacggcagcgccggcggcccaagcagcggcgcccctcctcccagcggcggcaggcggcccaagcagcggcgcccctcctcccagcggcggcagcccagccggctccccaacctctaccgaggagggcacctctgagtccgccacccccgagagcggccctggcacctccaccgagcccagcgagggcagcgcacccggcagccctgccggcagccccacctccacagaggagggaaccagcaccgagcccagcgaaggcagcgccccaggcaccagcaccgagcctagtgagcaggagattaaacggatcaacaagatcagaagaagacttgtgaaagacagcaacaccaagaaggccggcaagacaggccccatgaaaaccctgctggttagagtgatgacacccgatctgagagagcggctggaaaacctgagaaagaagcctgaaaatatcccccagcccatcagcaatacatctagagccaacctgaataagctgctgaccgattacaccgaaatgaagaaggcgatcctgcatgtgtactgggaagagttccagaaggaccctgtgggcctgatgagccgggtggcccagcctgccagcaagaagatcgatcagaacaagctgaaacctgagatggacgagaagggcaacctgaccaccgccggctttgcctgctctcagtgtggccagcccctgttcgtgtacaagctggagcaggtgtctgagaagggcaaggcttacaccaactacttcggacggtgcaatgtggccgagcacgaaaagctgatcctgctggcccagctgaagcccgagaaggatagcgacgaagccgtgacatatagcctgggaaagtttgggcagagggccctggatttctacagcattcatgtgaccaaggagtccacccaccccgtgaagcccctggcccagatcgccggaaacagatacgcctccggacctgtgggaaaggccctgagcgacgcatgtatgggcacaatcgcctccttcctgtctaagtaccaggacatcatcatcgaacaccagaaggtggtgaagggcaaccagaagagactggagagcctgcgggagctggccggcaaggaaaacctggaataccctagcgtgaccctgccacctcagcctcacaccaaggagggcgttgatgcctacaacgaagtgatcgcccgggtgcgaatgtgggtgaacctgaacctgtggcagaagctgaagctaagcagagatgatgccaagcctctgctgagactgaagggattcccttcctttcctctggtcgagagacaggccaacgaagtggactggtgggacatggtgtgtaacgtgaagaagctgatcaacgagaaaaaggaggatggcaaggtgttttggcagaatctggctggctacaagagacaggaagccctgagaccatacctgagcagcgaggaagatcggaagaagggaaagaaattcgctcggtaccagctgggcgacctgctgctgcacctggaaaagaagcacggcgaggactggggaaaggtgtacgacgaggcctgggagcggattgacaagaaagtggaaggcctgagcaagcacatcaagctggaagaggaacggagaagcgaggacgcccagagcaaggccgccctgaccgactggctgcgggctaaggccagcttcgtgatcgagggcctgaaggaggccgacaaggacgagttctgcagatgcgagctgaagctgcagaagtggtacggggacctgcggggaaagcccttcgccatcgaagccgagaacagcatcctggacatcagcggcttcagcaagcagtacaactgtgccttcatctggcagaaggacggcgtgaagaagctgaacctgtacctgatcatcaactacttcaagggcggcaagctgcggttcaagaagatcaaacctgaagccttcgaagccaacagattctacaccgtgatcaacaaaaagagcggcgagatcgtgcccatggaggtgaacttcaacttcgacgaccccaacctgatcatcctgcctctggcctttggcaagagacagggcagagaattcatctggaacgacctgctgtccctggaaaccggcagcctgaagctggccaacggaagagtgatcgagaagacactgtacaacagaagaacccggcaggatgagcctgccctgttcgtggccctgaccttcgagcggcgggaggtcctggactcctccaatatcaaaccaatgaacctgatcggcgtggcaagaggcgaaaacatccccgccgtgatcgccctgaccgaccccgagggctgcccactgagccggtttaaggatagcctgggaaacccaacccacatcctgagaatcggcgagagctataaggagaagcagcggaccatccaggccaagaaggaggtggagcagcggagagccggcggctacagccggaagtacgccagcaaagccaagaatctggcagacgatatggtgagaaacaccgctagagatctgctgtactacgccgtgacccaggatgccatgctgatcttcgccaacctgagccggggcttcggccggcagggcaagcggaccttcatggccgagagacagtacacacggatggaggactggctgaccgccaagctggcctacgagggcctgagcaagacctacctgtccaagacactggcccagtacacctccaagacatgcagcaactgtgggtttaccatcaccagcgccgactacgacagggtgctggagaagctgaagaagacagcaacaggctggatgaccacaattaacggcaaggagctgaaggtggagggccagattacctactacaacagatacaagagacagaacgtagtcaaggacctgtccgtcgagctggatagactgagcgaagaatctgtgaacaacgacatctcctcctggacaaagggcagaagcggagaagctctgagcctcctgaagaaaagattctcccatagacccgtgcaggagaagttcgtgtgcctgaactgcggcttcgagacacacgcagccgagcaagccgccctgaacatcgccagatcctggctgttcctgcggagccaggagtacaagaaataccagacaaacaagacaaccggcaacaccgataagagagccttcgtcgagacctggcagtccttttaccggaagaagcttaaggaggtgtggaaacctgccgtgcggtctggcggatctggcggaggctccaccagccccaagaaaaagagaaaagtctaagctgccttctgcggggcttgccttctggccatgcccttcttctctcccttgcacctgtacctcttggtctttgaataaagcctgagtaggaaggctagcaaaaaaaaaaaaaaaaaaaaaaaaaaaaaaaaaaaaaaaaaaaaaaaaaaaaaaaaaaaaaaaaaaaaaaaaaaaaaaaagcccagccggctccccaacctctaccgaggagggcacctctgagtccgccacccccgagagcggccctggcacctccaccgagcccagcgagggcagcgcacccggcagccctgccggcagccccacctccacagaggagggaaccagcaccgagcccagcgaaggcagcgccccaggcaccagcaccgagcctagtgagcaggagattaaacggatcaacaagatcagaagaagacttgtgaaagacagcaacaccaagaaggccggcaagacaggccccatgaaaaccctgctggttagagtgatgacacccgatctgagagagcggctggaaaacctgagaaagaagcctgaaaatatcccccagcccatcagcaatacatctagagccaacctgaataagctgctgaccgattacaccgaaatgaagaaggcgatcctgcatgtgtactgggaagagttccagaaggaccctgtgggcctgatgagccgggtggcccagcctgccagcaagaagatcgatcagaacaagctgaaacctgagatggacgagaagggcaacctgaccaccgccggctttgcctgctctcagtgtggccagcccctgttcgtgtacaagctggagcaggtgtctgagaagggcaaggcttacaccaactacttcggacggtgcaatgtggccgagcacgaaaagctgatcctgctggcccagctgaagcccgagaaggatagcgacgaagccgtgacatatagcctgggaaagtttgggcagagggccctggatttctacagcattcatgtgaccaaggagtccacccaccccgtgaagcccctggcccagatcgccggaaacagatacgcctccggacctgtgggaaaggccctgagcgacgcatgtatgggcacaatcgcctccttcctgtctaagtaccaggacatcatcatcgaacaccagaaggtggtgaagggcaaccagaagagactggagagcctgcgggagctggccggcaaggaaaacctggaataccctagcgtgaccctgccacctcagcctcacaccaaggagggcgttgatgcctacaacgaagtgatcgcccgggtgcgaatgtgggtgaacctgaacctgtggcagaagctgaagctaagcagagatgatgccaagcctctgctgagactgaagggattcccttcctttcctctggtcgagagacaggccaacgaagtggactggtgggacatggtgtgtaacgtgaagaagctgatcaacgagaaaaaggaggatggcaaggtgttttggcagaatctggctggctacaagagacaggaagccctgagaccatacctgagcagcgaggaagatcggaagaagggaaagaaattcgctcggtaccagctgggcgacctgctgctgcacctggaaaagaagcacggcgaggactggggaaaggtgtacgacgaggcctgggagcggattgacaagaaagtggaaggcctgagcaagcacatcaagctggaagaggaacggagaagcgaggacgcccagagcaaggccgccctgaccgactggctgcgggctaaggccagcttcgtgatcgagggcctgaaggaggccgacaaggacgagttctgcagatgcgagctgaagctgcagaagtggtacggggacctgcggggaaagcccttcgccatcgaagccgagaacagcatcctggacatcagcggcttcagcaagcagtacaactgtgccttcatctggcagaaggacggcgtgaagaagctgaacctgtacctgatcatcaactacttcaagggcggcaagctgcggttcaagaagatcaaacctgaagccttcgaagccaacagattctacaccgtgatcaacaaaaagagcggcgagatcgtgcccatggaggtgaacttcaacttcgacgaccccaacctgatcatcctgcctctggcctttggcaagagacagggcagagaattcatctggaacgacctgctgtccctggaaaccggcagcctgaagctggccaacggaagagtgatcgagaagacactgtacaacagaagaacccggcaggatgagcctgccctgttcgtggccctgaccttcgagcggcgggaggtcctggactcctccaatatcaaaccaatgaacctgatcggcgtggcaagaggcgaaaacatccccgccgtgatcgccctgaccgaccccgagggctgcccactgagccggtttaaggatagcctgggaaacccaacccacatcctgagaatcggcgagagctataaggagaagcagcggaccatccaggccaagaaggaggtggagcagcggagagccggcggctacagccggaagtacgccagcaaagccaagaatctggcagacgatatggtgagaaacaccgctagagatctgctgtactacgccgtgacccaggatgccatgctgatcttcgccaacctgagccggggcttcggccggcagggcaagcggaccttcatggccgagagacagtacacacggatggaggactggctgaccgccaagctggcctacgagggcctgagcaagacctacctgtccaagacactggcccagtacacctccaagacatgcagcaactgtgggtttaccatcaccagcgccgactacgacagggtgctggagaagctgaagaagacagcaacaggctggatgaccacaattaacggcaaggagctgaaggtggagggccagattacctactacaacagatacaagagacagaacgtagtcaaggacctgtccgtcgagctggatagactgagcgaagaatctgtgaacaacgacatctcctcctggacaaagggcagaagcggagaagctctgagcctcctgaagaaaagattctcccatagacccgtgcaggagaagttcgtgtgcctgaactgcggcttcgagacacacgcagccgagcaagccgccctgaacatcgccagatcctggctgttcctgcggagccaggagtacaagaaataccagacaaacaagacaaccggcaacaccgataagagagccttcgtcgagacctggcagtccttttaccggaagaagcttaaggaggtgtggaaacctgccgtgcggtctggcggatctggcggaggctccaccagccccaagaaaaagagaaaagtctaagctgccttctgcggggcttgccttctggccatgcccttcttctctcccttgcacctgtacctcttggtctttgaataaagcctgagtaggaaggctagcaaaaaaaaaaaaaaaaaaaaaaaaaaaaaaaaaaaaaaaaaaaaaaaaaaaaaaaaaaaaaaaaaaaaaaaaaaaaaaaa

SEQ ID NO: 9484 - RNA, 8787 nt, synthetic construct
  source 1..8787: mol_type = other RNA
aggaaataagagagaaaagaagagtaagaagaaatataagagccaccatggcccctaagaagaagcgtaaagtgagccggatgaaccacgaccaggagttcgacccccctaaggtgtaccctcccgtccccgccgagaagagaaagcccatccgggtcctgagcctgttcgatggcatcgccaccggtctgctggtgctgaaggacctgggcatccaggtggataggtacattgcctccgaggtgtgcgaggactccatcaccgtgggaatggtgcgtcatcagggcaagatcatgtacgtgggcgacgtgcggagcgtgacacagaagcatatccaggagtggggccctttcgacctggtgatcggcggcagcccttgcaatgacctgagcatcgtgaacccagcccggaagggcctgtacgagggaaccggcagactgttcttcgagttttacagactgctgcacgacgcccggcctaaggaaggcgacgaccggcccttcttttggctgttcgagaatgtggtggccatgggagtcagcgacaagcgggatattagccggttcctggagagcaaccccgtgatgatcgatgccaaggaagtgagcgccgcccaccgggccagatacttctggggcaatctgcctggcatgaacagacccctggccagcaccgtgaacgacaagctggagctgcaggagtgcctggagcacggccggatcgccaagttcagcaaggtgagaaccatcaccacccgaagcaacagcatcaaacaaggcaaggaccagcactttcctgtgttcatgaacgagaaggaggacatcctgtggtgtaccgagatggagagagtgttcgggttcccagtccactacacagatgtcagcaacatgtctagactggccagacagagactgctgggaagaagctggtccgtccctgtgatcagacacctgttcgcccctctgaaggagtacttcgcctgcgtgagcagcggcaacagcaacgccaacagccggggccccagcttctctagcggcctggtgccactgtccctgagagggagccacatgggccccatggagatctacaaaaccgtgagcgcctggaagcggcagcctgtgcgcgtgctgagcctgtttcggaatatcgataaagtcctgaaaagcctgggattcctggagagcggctctggctccggcggtggcaccctgaagtacgtggaggatgtgacaaacgtggtcagacgggatgtggagaagtggggccccttcgatctggtgtacggcagcacccaacccctgggcagctcttgtgaccggtgccctggctggtacatgtttcagttccaccggatcctgcagtacgccctgccgagacaggagtcccagcggccattcttttggattttcatggacaacttgctgctgaccgaggatgaccaggaaactaccactcggttcctgcagaccgaagccgtgaccctgcaggacgtgagaggccgggactaccagaacgccatgcgggtgtggtccaacatccctggactgaaaagcaagcacgcacctctgacccctaaagaagaggagtacctgcaggcccaggtgcggagcagaagcaagctggacgcccctaaggtggatctgctggtgaagaattgcctcctgcccctgagagagtacttcaagtatttcagccagaatagtctgcccctgggaggcagcggcggcggcagcagccaggagctgctgaccttcagggacgtggccatcgagttcagccaggaggagtggaggtgcctgaaccacacccagagggagctgtacagggacgtgatgctggagaactacggccacctgctgttcctgggcctgatcgtgagcaagcccgacctggtgagcttcctggagcagaccaaggacccctgggacggcaagagcaagaagaccgtggccttccaccccggcaggtgggagggcggcccaagcagcggcgcccctcctcccagcggcggcaggcggcccaagcagcggcgcccctcctcccagcggcggcagcccagccggctccccaacctctaccgaggagggcacctctgagtccgccacccccgagagcggccctggcacctccaccgagcccagcgagggcagcgcacccggcagccctgccggcagccccacctccacagaggagggaaccagcaccgagcccagcgaaggcagcgccccaggcaccagcaccgagcctagtgagcaggagattaaacggatcaacaagatcagaagaagacttgtgaaagacagcaacaccaagaaggccggcaagacaggccccatgaaaaccctgctggttagagtgatgacacccgatctgagagagcggctggaaaacctgagaaagaagcctgaaaatatcccccagcccatcagcaatacatctagagccaacctgaataagctgctgaccgattacaccgaaatgaagaaggcgatcctgcatgtgtactgggaagagttccagaaggaccctgtgggcctgatgagccgggtggcccagcctgccagcaagaagatcgatcagaacaagctgaaacctgagatggacgagaagggcaacctgaccaccgccggctttgcctgctctcagtgtggccagcccctgttcgtgtacaagctggagcaggtgtctgagaagggcaaggcttacaccaactacttcggacggtgcaatgtggccgagcacgaaaagctgatcctgctggcccagctgaagcccgagaaggatagcgacgaagccgtgacatatagcctgggaaagtttgggcagagggccctggatttctacagcattcatgtgaccaaggagtccacccaccccgtgaagcccctggcccagatcgccggaaacagatacgcctccggacctgtgggaaaggccctgagcgacgcatgtatgggcacaatcgcctccttcctgtctaagtaccaggacatcatcatcgaacaccagaaggtggtgaagggcaaccagaagagactggagagcctgcgggagctggccggcaaggaaaacctggaataccctagcgtgaccctgccacctcagcctcacaccaaggagggcgttgatgcctacaacgaagtgatcgcccgggtgcgaatgtgggtgaacctgaacctgtggcagaagctgaagctaagcagagatgatgccaagcctctgctgagactgaagggattcccttcctttcctctggtcgagagacaggccaacgaagtggactggtgggacatggtgtgtaacgtgaagaagctgatcaacgagaaaaaggaggatggcaaggtgttttggcagaatctggctggctacaagagacaggaagccctgagaccatacctgagcagcgaggaagatcggaagaagggaaagaaattcgctcggtaccagctgggcgacctgctgctgcacctggaaaagaagcacggcgaggactggggaaaggtgtacgacgaggcctgggagcggattgacaagaaagtggaaggcctgagcaagcacatcaagctggaagaggaacggagaagcgaggacgcccagagcaaggccgccctgaccgactggctgcgggctaaggccagcttcgtgatcgagggcctgaaggaggccgacaaggacgagttctgcagatgcgagctgaagctgcagaagtggtacggggacctgcggggaaagcccttcgccatcgaagccgagaacagcatcctggacatcagcggcttcagcaagcagtacaactgtgccttcatctggcagaaggacggcgtgaagaagctgaacctgtacctgatcatcaactacttcaagggcggcaagctgcggttcaagaagatcaaacctgaagccttcgaagccaacagattctacaccgtgatcaacaaaaagagcggcgagatcgtgcccatggaggtgaacttcaacttcgacgaccccaacctgatcatcctgcctctggcctttggcaagagacagggcagagaattcatctggaacgacctgctgtccctggaaaccggcagcctgaagctggccaacggaagagtgatcgagaagacactgtacaacagaagaacccggcaggatgagcctgccctgttcgtggccctgaccttcgagcggcgggaggtcctggactcctccaatatcaaaccaatgaacctgatcggcgtggcaagaggcgaaaacatccccgccgtgatcgccctgaccgaccccgagggctgcccactgagccggtttaaggatagcctgggaaacccaacccacatcctgagaatcggcgagagctataaggagaagcagcggaccatccaggccaagaaggaggtggagcagcggagagccggcggctacagccggaagtacgccagcaaagccaagaatctggcagacgatatggtgagaaacaccgctagagatctgctgtactacgccgtgacccaggatgccatgctgatcttcgccaacctgagccggggcttcggccggcagggcaagcggaccttcatggccgagagacagtacacacggatggaggactggctgaccgccaagctggcctacgagggcctgagcaagacctacctgtccaagacactggcccagtacacctccaagacatgcagcaactgtgggtttaccatcaccagcgccgactacgacagggtgctggagaagctgaagaagacagcaacaggctggatgaccacaattaacggcaaggagctgaaggtggagggccagattacctactacaacagatacaagagacagaacgtagtcaaggacctgtccgtcgagctggatagactgagcgaagaatctgtgaacaacgacatctcctcctggacaaagggcagaagcggagaagctctgagcctcctgaagaaaagattctcccatagacccgtgcaggagaagttcgtgtgcctgaactgcggcttcgagacacacgcagccgagcaagccgccctgaacatcgccagatcctggctgttcctgcggagccaggagtacaagaaataccagacaaacaagacaaccggcaacaccgataagagagccttcgtcgagacctggcagtccttttaccggaagaagcttaaggaggtgtggaaacctgccgtgcggtctggcggatctggcggaggctccaccagccccaagaaaaagagaaaagtctaagctgccttctgcggggcttgccttctggccatgcccttcttctctcccttgcacctgtacctcttggtctttgaataaagcctgagtaggaaggctagcaaaaaaaaaaaaaaaaaaaaaaaaaaaaaaaaaaaaaaaaaaaaaaaaaaaaaaaaaaaaaaaaaaaaaaaaaaaaaaaagcccagccggctccccaacctctaccgaggagggcacctctgagtccgccacccccgagagcggccctggcacctccaccgagcccagcgagggcagcgcacccggcagccctgccggcagccccacctccacagaggagggaaccagcaccgagcccagcgaaggcagcgccccaggcaccagcaccgagcctagtgagcaggagattaaacggatcaacaagatcagaagaagacttgtgaaagacagcaacaccaagaaggccggcaagacaggccccatgaaaaccctgctggttagagtgatgacacccgatctgagagagcggctggaaaacctgagaaagaagcctgaaaatatcccccagcccatcagcaatacatctagagccaacctgaataagctgctgaccgattacaccgaaatgaagaaggcgatcctgcatgtgtactgggaagagttccagaaggaccctgtgggcctgatgagccgggtggcccagcctgccagcaagaagatcgatcagaacaagctgaaacctgagatggacgagaagggcaacctgaccaccgccggctttgcctgctctcagtgtggccagcccctgttcgtgtacaagctggagcaggtgtctgagaagggcaaggcttacaccaactacttcggacggtgcaatgtggccgagcacgaaaagctgatcctgctggcccagctgaagcccgagaaggatagcgacgaagccgtgacatatagcctgggaaagtttgggcagagggccctggatttctacagcattcatgtgaccaaggagtccacccaccccgtgaagcccctggcccagatcgccggaaacagatacgcctccggacctgtgggaaaggccctgagcgacgcatgtatgggcacaatcgcctccttcctgtctaagtaccaggacatcatcatcgaacaccagaaggtggtgaagggcaaccagaagagactggagagcctgcgggagctggccggcaaggaaaacctggaataccctagcgtgaccctgccacctcagcctcacaccaaggagggcgttgatgcctacaacgaagtgatcgcccgggtgcgaatgtgggtgaacctgaacctgtggcagaagctgaagctaagcagagatgatgccaagcctctgctgagactgaagggattcccttcctttcctctggtcgagagacaggccaacgaagtggactggtgggacatggtgtgtaacgtgaagaagctgatcaacgagaaaaaggaggatggcaaggtgttttggcagaatctggctggctacaagagacaggaagccctgagaccatacctgagcagcgaggaagatcggaagaagggaaagaaattcgctcggtaccagctgggcgacctgctgctgcacctggaaaagaagcacggcgaggactggggaaaggtgtacgacgaggcctgggagcggattgacaagaaagtggaaggcctgagcaagcacatcaagctggaagaggaacggagaagcgaggacgcccagagcaaggccgccctgaccgactggctgcgggctaaggccagcttcgtgatcgagggcctgaaggaggccgacaaggacgagttctgcagatgcgagctgaagctgcagaagtggtacggggacctgcggggaaagcccttcgccatcgaagccgagaacagcatcctggacatcagcggcttcagcaagcagtacaactgtgccttcatctggcagaaggacggcgtgaagaagctgaacctgtacctgatcatcaactacttcaagggcggcaagctgcggttcaagaagatcaaacctgaagccttcgaagccaacagattctacaccgtgatcaacaaaaagagcggcgagatcgtgcccatggaggtgaacttcaacttcgacgaccccaacctgatcatcctgcctctggcctttggcaagagacagggcagagaattcatctggaacgacctgctgtccctggaaaccggcagcctgaagctggccaacggaagagtgatcgagaagacactgtacaacagaagaacccggcaggatgagcctgccctgttcgtggccctgaccttcgagcggcgggaggtcctggactcctccaatatcaaaccaatgaacctgatcggcgtggcaagaggcgaaaacatccccgccgtgatcgccctgaccgaccccgagggctgcccactgagccggtttaaggatagcctgggaaacccaacccacatcctgagaatcggcgagagctataaggagaagcagcggaccatccaggccaagaaggaggtggagcagcggagagccggcggctacagccggaagtacgccagcaaagccaagaatctggcagacgatatggtgagaaacaccgctagagatctgctgtactacgccgtgacccaggatgccatgctgatcttcgccaacctgagccggggcttcggccggcagggcaagcggaccttcatggccgagagacagtacacacggatggaggactggctgaccgccaagctggcctacgagggcctgagcaagacctacctgtccaagacactggcccagtacacctccaagacatgcagcaactgtgggtttaccatcaccagcgccgactacgacagggtgctggagaagctgaagaagacagcaacaggctggatgaccacaattaacggcaaggagctgaaggtggagggccagattacctactacaacagatacaagagacagaacgtagtcaaggacctgtccgtcgagctggatagactgagcgaagaatctgtgaacaacgacatctcctcctggacaaagggcagaagcggagaagctctgagcctcctgaagaaaagattctcccatagacccgtgcaggagaagttcgtgtgcctgaactgcggcttcgagacacacgcagccgagcaagccgccctgaacatcgccagatcctggctgttcctgcggagccaggagtacaagaaataccagacaaacaagacaaccggcaacaccgataagagagccttcgtcgagacctggcagtccttttaccggaagaagcttaaggaggtgtggaaacctgccgtgcggtctggcggatctggcggaggctccaccagccccaagaaaaagagaaaagtctaagctgccttctgcggggcttgccttctggccatgcccttcttctctcccttgcacctgtacctcttggtctttgaataaagcctgagtaggaaggctagcaaaaaaaaaaaaaaaaaaaaaaaaaaaaaaaaaaaaaaaaaaaaaaaaaaaaaaaaaaaaaaaaaaaaaaaaaaaaaaaa

SEQ ID NO: 9485 - RNA, 8787 nt, synthetic construct
  source 1..8787: mol_type = other RNA
aggaaataagagagaaaagaagagtaagaagaaatataagagccaccatggcccctaagaagaagcgtaaagtgagccggatgaaccacgaccaggagttcgacccccctaaggtgtaccctcccgtccccgccgagaagagaaagcccatccgggtcctgagcctgttcgatggcatcgccaccggtctgctggtgctgaaggacctgggcatccaggtggataggtacattgcctccgaggtgtgcgaggactccatcaccgtgggaatggtgcgtcatcagggcaagatcatgtacgtgggcgacgtgcggagcgtgacacagaagcatatccaggagtggggccctttcgacctggtgatcggcggcagcccttgcaatgacctgagcatcgtgaacccagcccggaagggcctgtacgagggaaccggcagactgttcttcgagttttacagactgctgcacgacgcccggcctaaggaaggcgacgaccggcccttcttttggctgttcgagaatgtggtggccatgggagtcagcgacaagcgggatattagccggttcctggagagcaaccccgtgatgatcgatgccaaggaagtgagcgccgcccaccgggccagatacttctggggcaatctgcctggcatgaacagacccctggccagcaccgtgaacgacaagctggagctgcaggagtgcctggagcacggccggatcgccaagttcagcaaggtgagaaccatcaccacccgaagcaacagcatcaaacaaggcaaggaccagcactttcctgtgttcatgaacgagaaggaggacatcctgtggtgtaccgagatggagagagtgttcgggttcccagtccactacacagatgtcagcaacatgtctagactggccagacagagactgctgggaagaagctggtccgtccctgtgatcagacacctgttcgcccctctgaaggagtacttcgcctgcgtgagcagcggcaacagcaacgccaacagccggggccccagcttctctagcggcctggtgccactgtccctgagagggagccacatgggccccatggagatctacaaaaccgtgagcgcctggaagcggcagcctgtgcgcgtgctgagcctgtttcggaatatcgataaagtcctgaaaagcctgggattcctggagagcggctctggctccggcggtggcaccctgaagtacgtggaggatgtgacaaacgtggtcagacgggatgtggagaagtggggccccttcgatctggtgtacggcagcacccaacccctgggcagctcttgtgaccggtgccctggctggtacatgtttcagttccaccggatcctgcagtacgccctgccgagacaggagtcccagcggccattcttttggattttcatggacaacttgctgctgaccgaggatgaccaggaaactaccactcggttcctgcagaccgaagccgtgaccctgcaggacgtgagaggccgggactaccagaacgccatgcgggtgtggtccaacatccctggactgaaaagcaagcacgcacctctgacccctaaagaagaggagtacctgcaggcccaggtgcggagcagaagcaagctggacgcccctaaggtggatctgctggtgaagaattgcctcctgcccctgagagagtacttcaagtatttcagccagaatagtctgcccctgggaggcagcggcggcggcctgcaggtgagcgtgagcttcgaggacgtgaccgtgaacttcagcagggaggagtggcagcacctggaccccgcccagaggaggctgtacagggacgtgaccctggagaactacagccacctgaggagcgtgggctaccaggtgcccaagcccgaggtgatcttcaagctggagcagggcgagggcccctggaccctggagggcgagaccccccaccagagctgcagcggcgaggacatcggcggcggcccaagcagcggcgcccctcctcccagcggcggcaggcggcccaagcagcggcgcccctcctcccagcggcggcagcccagccggctccccaacctctaccgaggagggcacctctgagtccgccacccccgagagcggccctggcacctccaccgagcccagcgagggcagcgcacccggcagccctgccggcagccccacctccacagaggagggaaccagcaccgagcccagcgaaggcagcgccccaggcaccagcaccgagcctagtgagcaggagattaaacggatcaacaagatcagaagaagacttgtgaaagacagcaacaccaagaaggccggcaagacaggccccatgaaaaccctgctggttagagtgatgacacccgatctgagagagcggctggaaaacctgagaaagaagcctgaaaatatcccccagcccatcagcaatacatctagagccaacctgaataagctgctgaccgattacaccgaaatgaagaaggcgatcctgcatgtgtactgggaagagttccagaaggaccctgtgggcctgatgagccgggtggcccagcctgccagcaagaagatcgatcagaacaagctgaaacctgagatggacgagaagggcaacctgaccaccgccggctttgcctgctctcagtgtggccagcccctgttcgtgtacaagctggagcaggtgtctgagaagggcaaggcttacaccaactacttcggacggtgcaatgtggccgagcacgaaaagctgatcctgctggcccagctgaagcccgagaaggatagcgacgaagccgtgacatatagcctgggaaagtttgggcagagggccctggatttctacagcattcatgtgaccaaggagtccacccaccccgtgaagcccctggcccagatcgccggaaacagatacgcctccggacctgtgggaaaggccctgagcgacgcatgtatgggcacaatcgcctccttcctgtctaagtaccaggacatcatcatcgaacaccagaaggtggtgaagggcaaccagaagagactggagagcctgcgggagctggccggcaaggaaaacctggaataccctagcgtgaccctgccacctcagcctcacaccaaggagggcgttgatgcctacaacgaagtgatcgcccgggtgcgaatgtgggtgaacctgaacctgtggcagaagctgaagctaagcagagatgatgccaagcctctgctgagactgaagggattcccttcctttcctctggtcgagagacaggccaacgaagtggactggtgggacatggtgtgtaacgtgaagaagctgatcaacgagaaaaaggaggatggcaaggtgttttggcagaatctggctggctacaagagacaggaagccctgagaccatacctgagcagcgaggaagatcggaagaagggaaagaaattcgctcggtaccagctgggcgacctgctgctgcacctggaaaagaagcacggcgaggactggggaaaggtgtacgacgaggcctgggagcggattgacaagaaagtggaaggcctgagcaagcacatcaagctggaagaggaacggagaagcgaggacgcccagagcaaggccgccctgaccgactggctgcgggctaaggccagcttcgtgatcgagggcctgaaggaggccgacaaggacgagttctgcagatgcgagctgaagctgcagaagtggtacggggacctgcggggaaagcccttcgccatcgaagccgagaacagcatcctggacatcagcggcttcagcaagcagtacaactgtgccttcatctggcagaaggacggcgtgaagaagctgaacctgtacctgatcatcaactacttcaagggcggcaagctgcggttcaagaagatcaaacctgaagccttcgaagccaacagattctacaccgtgatcaacaaaaagagcggcgagatcgtgcccatggaggtgaacttcaacttcgacgaccccaacctgatcatcctgcctctggcctttggcaagagacagggcagagaattcatctggaacgacctgctgtccctggaaaccggcagcctgaagctggccaacggaagagtgatcgagaagacactgtacaacagaagaacccggcaggatgagcctgccctgttcgtggccctgaccttcgagcggcgggaggtcctggactcctccaatatcaaaccaatgaacctgatcggcgtggcaagaggcgaaaacatccccgccgtgatcgccctgaccgaccccgagggctgcccactgagccggtttaaggatagcctgggaaacccaacccacatcctgagaatcggcgagagctataaggagaagcagcggaccatccaggccaagaaggaggtggagcagcggagagccggcggctacagccggaagtacgccagcaaagccaagaatctggcagacgatatggtgagaaacaccgctagagatctgctgtactacgccgtgacccaggatgccatgctgatcttcgccaacctgagccggggcttcggccggcagggcaagcggaccttcatggccgagagacagtacacacggatggaggactggctgaccgccaagctggcctacgagggcctgagcaagacctacctgtccaagacactggcccagtacacctccaagacatgcagcaactgtgggtttaccatcaccagcgccgactacgacagggtgctggagaagctgaagaagacagcaacaggctggatgaccacaattaacggcaaggagctgaaggtggagggccagattacctactacaacagatacaagagacagaacgtagtcaaggacctgtccgtcgagctggatagactgagcgaagaatctgtgaacaacgacatctcctcctggacaaagggcagaagcggagaagctctgagcctcctgaagaaaagattctcccatagacccgtgcaggagaagttcgtgtgcctgaactgcggcttcgagacacacgcagccgagcaagccgccctgaacatcgccagatcctggctgttcctgcggagccaggagtacaagaaataccagacaaacaagacaaccggcaacaccgataagagagccttcgtcgagacctggcagtccttttaccggaagaagcttaaggaggtgtggaaacctgccgtgcggtctggcggatctggcggaggctccaccagccccaagaaaaagagaaaagtctaagctgccttctgcggggcttgccttctggccatgcccttcttctctcccttgcacctgtacctcttggtctttgaataaagcctgagtaggaaggctagcaaaaaaaaaaaaaaaaaaaaaaaaaaaaaaaaaaaaaaaaaaaaaaaaaaaaaaaaaaaaaaaaaaaaaaaaaaaaaaaagcccagccggctccccaacctctaccgaggagggcacctctgagtccgccacccccgagagcggccctggcacctccaccgagcccagcgagggcagcgcacccggcagccctgccggcagccccacctccacagaggagggaaccagcaccgagcccagcgaaggcagcgccccaggcaccagcaccgagcctagtgagcaggagattaaacggatcaacaagatcagaagaagacttgtgaaagacagcaacaccaagaaggccggcaagacaggccccatgaaaaccctgctggttagagtgatgacacccgatctgagagagcggctggaaaacctgagaaagaagcctgaaaatatcccccagcccatcagcaatacatctagagccaacctgaataagctgctgaccgattacaccgaaatgaagaaggcgatcctgcatgtgtactgggaagagttccagaaggaccctgtgggcctgatgagccgggtggcccagcctgccagcaagaagatcgatcagaacaagctgaaacctgagatggacgagaagggcaacctgaccaccgccggctttgcctgctctcagtgtggccagcccctgttcgtgtacaagctggagcaggtgtctgagaagggcaaggcttacaccaactacttcggacggtgcaatgtggccgagcacgaaaagctgatcctgctggcccagctgaagcccgagaaggatagcgacgaagccgtgacatatagcctgggaaagtttgggcagagggccctggatttctacagcattcatgtgaccaaggagtccacccaccccgtgaagcccctggcccagatcgccggaaacagatacgcctccggacctgtgggaaaggccctgagcgacgcatgtatgggcacaatcgcctccttcctgtctaagtaccaggacatcatcatcgaacaccagaaggtggtgaagggcaaccagaagagactggagagcctgcgggagctggccggcaaggaaaacctggaataccctagcgtgaccctgccacctcagcctcacaccaaggagggcgttgatgcctacaacgaagtgatcgcccgggtgcgaatgtgggtgaacctgaacctgtggcagaagctgaagctaagcagagatgatgccaagcctctgctgagactgaagggattcccttcctttcctctggtcgagagacaggccaacgaagtggactggtgggacatggtgtgtaacgtgaagaagctgatcaacgagaaaaaggaggatggcaaggtgttttggcagaatctggctggctacaagagacaggaagccctgagaccatacctgagcagcgaggaagatcggaagaagggaaagaaattcgctcggtaccagctgggcgacctgctgctgcacctggaaaagaagcacggcgaggactggggaaaggtgtacgacgaggcctgggagcggattgacaagaaagtggaaggcctgagcaagcacatcaagctggaagaggaacggagaagcgaggacgcccagagcaaggccgccctgaccgactggctgcgggctaaggccagcttcgtgatcgagggcctgaaggaggccgacaaggacgagttctgcagatgcgagctgaagctgcagaagtggtacggggacctgcggggaaagcccttcgccatcgaagccgagaacagcatcctggacatcagcggcttcagcaagcagtacaactgtgccttcatctggcagaaggacggcgtgaagaagctgaacctgtacctgatcatcaactacttcaagggcggcaagctgcggttcaagaagatcaaacctgaagccttcgaagccaacagattctacaccgtgatcaacaaaaagagcggcgagatcgtgcccatggaggtgaacttcaacttcgacgaccccaacctgatcatcctgcctctggcctttggcaagagacagggcagagaattcatctggaacgacctgctgtccctggaaaccggcagcctgaagctggccaacggaagagtgatcgagaagacactgtacaacagaagaacccggcaggatgagcctgccctgttcgtggccctgaccttcgagcggcgggaggtcctggactcctccaatatcaaaccaatgaacctgatcggcgtggcaagaggcgaaaacatccccgccgtgatcgccctgaccgaccccgagggctgcccactgagccggtttaaggatagcctgggaaacccaacccacatcctgagaatcggcgagagctataaggagaagcagcggaccatccaggccaagaaggaggtggagcagcggagagccggcggctacagccggaagtacgccagcaaagccaagaatctggcagacgatatggtgagaaacaccgctagagatctgctgtactacgccgtgacccaggatgccatgctgatcttcgccaacctgagccggggcttcggccggcagggcaagcggaccttcatggccgagagacagtacacacggatggaggactggctgaccgccaagctggcctacgagggcctgagcaagacctacctgtccaagacactggcccagtacacctccaagacatgcagcaactgtgggtttaccatcaccagcgccgactacgacagggtgctggagaagctgaagaagacagcaacaggctggatgaccacaattaacggcaaggagctgaaggtggagggccagattacctactacaacagatacaagagacagaacgtagtcaaggacctgtccgtcgagctggatagactgagcgaagaatctgtgaacaacgacatctcctcctggacaaagggcagaagcggagaagctctgagcctcctgaagaaaagattctcccatagacccgtgcaggagaagttcgtgtgcctgaactgcggcttcgagacacacgcagccgagcaagccgccctgaacatcgccagatcctggctgttcctgcggagccaggagtacaagaaataccagacaaacaagacaaccggcaacaccgataagagagccttcgtcgagacctggcagtccttttaccggaagaagcttaaggaggtgtggaaacctgccgtgcggtctggcggatctggcggaggctccaccagccccaagaaaaagagaaaagtctaagctgccttctgcggggcttgccttctggccatgcccttcttctctcccttgcacctgtacctcttggtctttgaataaagcctgagtaggaaggctagcaaaaaaaaaaaaaaaaaaaaaaaaaaaaaaaaaaaaaaaaaaaaaaaaaaaaaaaaaaaaaaaaaaaaaaaaaaaaaaaa

SEQ ID NO: 9486 - RNA, 8787 nt, synthetic construct
  source 1..8787: mol_type = other RNA
aggaaataagagagaaaagaagagtaagaagaaatataagagccaccatggcccctaagaagaagcgtaaagtgagccggatgaaccacgaccaggagttcgacccccctaaggtgtaccctcccgtccccgccgagaagagaaagcccatccgggtcctgagcctgttcgatggcatcgccaccggtctgctggtgctgaaggacctgggcatccaggtggataggtacattgcctccgaggtgtgcgaggactccatcaccgtgggaatggtgcgtcatcagggcaagatcatgtacgtgggcgacgtgcggagcgtgacacagaagcatatccaggagtggggccctttcgacctggtgatcggcggcagcccttgcaatgacctgagcatcgtgaacccagcccggaagggcctgtacgagggaaccggcagactgttcttcgagttttacagactgctgcacgacgcccggcctaaggaaggcgacgaccggcccttcttttggctgttcgagaatgtggtggccatgggagtcagcgacaagcgggatattagccggttcctggagagcaaccccgtgatgatcgatgccaaggaagtgagcgccgcccaccgggccagatacttctggggcaatctgcctggcatgaacagacccctggccagcaccgtgaacgacaagctggagctgcaggagtgcctggagcacggccggatcgccaagttcagcaaggtgagaaccatcaccacccgaagcaacagcatcaaacaaggcaaggaccagcactttcctgtgttcatgaacgagaaggaggacatcctgtggtgtaccgagatggagagagtgttcgggttcccagtccactacacagatgtcagcaacatgtctagactggccagacagagactgctgggaagaagctggtccgtccctgtgatcagacacctgttcgcccctctgaaggagtacttcgcctgcgtgagcagcggcaacagcaacgccaacagccggggccccagcttctctagcggcctggtgccactgtccctgagagggagccacatgggccccatggagatctacaaaaccgtgagcgcctggaagcggcagcctgtgcgcgtgctgagcctgtttcggaatatcgataaagtcctgaaaagcctgggattcctggagagcggctctggctccggcggtggcaccctgaagtacgtggaggatgtgacaaacgtggtcagacgggatgtggagaagtggggccccttcgatctggtgtacggcagcacccaacccctgggcagctcttgtgaccggtgccctggctggtacatgtttcagttccaccggatcctgcagtacgccctgccgagacaggagtcccagcggccattcttttggattttcatggacaacttgctgctgaccgaggatgaccaggaaactaccactcggttcctgcagaccgaagccgtgaccctgcaggacgtgagaggccgggactaccagaacgccatgcgggtgtggtccaacatccctggactgaaaagcaagcacgcacctctgacccctaaagaagaggagtacctgcaggcccaggtgcggagcagaagcaagctggacgcccctaaggtggatctgctggtgaagaattgcctcctgcccctgagagagtacttcaagtatttcagccagaatagtctgcccctgggaggcagcggcggcggcatggccctgaggagcgtgatgttcagcgacgtgagcatcgacttcagccccgaggagtgggagtacctggacctggagcagaaggacctgtacagggacgtgatgctggagaactacagcaacctggtgagcctgggctgcttcatcagcaagcccgacgtgatcagcctgctggagcagggcaaggagccctggaaggtggtgaggaagggcaggaggcagtaccccgacctggagaccaggggcggcccaagcagcggcgcccctcctcccagcggcggcaggcggcccaagcagcggcgcccctcctcccagcggcggcagcccagccggctccccaacctctaccgaggagggcacctctgagtccgccacccccgagagcggccctggcacctccaccgagcccagcgagggcagcgcacccggcagccctgccggcagccccacctccacagaggagggaaccagcaccgagcccagcgaaggcagcgccccaggcaccagcaccgagcctagtgagcaggagattaaacggatcaacaagatcagaagaagacttgtgaaagacagcaacaccaagaaggccggcaagacaggccccatgaaaaccctgctggttagagtgatgacacccgatctgagagagcggctggaaaacctgagaaagaagcctgaaaatatcccccagcccatcagcaatacatctagagccaacctgaataagctgctgaccgattacaccgaaatgaagaaggcgatcctgcatgtgtactgggaagagttccagaaggaccctgtgggcctgatgagccgggtggcccagcctgccagcaagaagatcgatcagaacaagctgaaacctgagatggacgagaagggcaacctgaccaccgccggctttgcctgctctcagtgtggccagcccctgttcgtgtacaagctggagcaggtgtctgagaagggcaaggcttacaccaactacttcggacggtgcaatgtggccgagcacgaaaagctgatcctgctggcccagctgaagcccgagaaggatagcgacgaagccgtgacatatagcctgggaaagtttgggcagagggccctggatttctacagcattcatgtgaccaaggagtccacccaccccgtgaagcccctggcccagatcgccggaaacagatacgcctccggacctgtgggaaaggccctgagcgacgcatgtatgggcacaatcgcctccttcctgtctaagtaccaggacatcatcatcgaacaccagaaggtggtgaagggcaaccagaagagactggagagcctgcgggagctggccggcaaggaaaacctggaataccctagcgtgaccctgccacctcagcctcacaccaaggagggcgttgatgcctacaacgaagtgatcgcccgggtgcgaatgtgggtgaacctgaacctgtggcagaagctgaagctaagcagagatgatgccaagcctctgctgagactgaagggattcccttcctttcctctggtcgagagacaggccaacgaagtggactggtgggacatggtgtgtaacgtgaagaagctgatcaacgagaaaaaggaggatggcaaggtgttttggcagaatctggctggctacaagagacaggaagccctgagaccatacctgagcagcgaggaagatcggaagaagggaaagaaattcgctcggtaccagctgggcgacctgctgctgcacctggaaaagaagcacggcgaggactggggaaaggtgtacgacgaggcctgggagcggattgacaagaaagtggaaggcctgagcaagcacatcaagctggaagaggaacggagaagcgaggacgcccagagcaaggccgccctgaccgactggctgcgggctaaggccagcttcgtgatcgagggcctgaaggaggccgacaaggacgagttctgcagatgcgagctgaagctgcagaagtggtacggggacctgcggggaaagcccttcgccatcgaagccgagaacagcatcctggacatcagcggcttcagcaagcagtacaactgtgccttcatctggcagaaggacggcgtgaagaagctgaacctgtacctgatcatcaactacttcaagggcggcaagctgcggttcaagaagatcaaacctgaagccttcgaagccaacagattctacaccgtgatcaacaaaaagagcggcgagatcgtgcccatggaggtgaacttcaacttcgacgaccccaacctgatcatcctgcctctggcctttggcaagagacagggcagagaattcatctggaacgacctgctgtccctggaaaccggcagcctgaagctggccaacggaagagtgatcgagaagacactgtacaacagaagaacccggcaggatgagcctgccctgttcgtggccctgaccttcgagcggcgggaggtcctggactcctccaatatcaaaccaatgaacctgatcggcgtggcaagaggcgaaaacatccccgccgtgatcgccctgaccgaccccgagggctgcccactgagccggtttaaggatagcctgggaaacccaacccacatcctgagaatcggcgagagctataaggagaagcagcggaccatccaggccaagaaggaggtggagcagcggagagccggcggctacagccggaagtacgccagcaaagccaagaatctggcagacgatatggtgagaaacaccgctagagatctgctgtactacgccgtgacccaggatgccatgctgatcttcgccaacctgagccggggcttcggccggcagggcaagcggaccttcatggccgagagacagtacacacggatggaggactggctgaccgccaagctggcctacgagggcctgagcaagacctacctgtccaagacactggcccagtacacctccaagacatgcagcaactgtgggtttaccatcaccagcgccgactacgacagggtgctggagaagctgaagaagacagcaacaggctggatgaccacaattaacggcaaggagctgaaggtggagggccagattacctactacaacagatacaagagacagaacgtagtcaaggacctgtccgtcgagctggatagactgagcgaagaatctgtgaacaacgacatctcctcctggacaaagggcagaagcggagaagctctgagcctcctgaagaaaagattctcccatagacccgtgcaggagaagttcgtgtgcctgaactgcggcttcgagacacacgcagccgagcaagccgccctgaacatcgccagatcctggctgttcctgcggagccaggagtacaagaaataccagacaaacaagacaaccggcaacaccgataagagagccttcgtcgagacctggcagtccttttaccggaagaagcttaaggaggtgtggaaacctgccgtgcggtctggcggatctggcggaggctccaccagccccaagaaaaagagaaaagtctaagctgccttctgcggggcttgccttctggccatgcccttcttctctcccttgcacctgtacctcttggtctttgaataaagcctgagtaggaaggctagcaaaaaaaaaaaaaaaaaaaaaaaaaaaaaaaaaaaaaaaaaaaaaaaaaaaaaaaaaaaaaaaaaaaaaaaaaaaaaaaagcccagccggctccccaacctctaccgaggagggcacctctgagtccgccacccccgagagcggccctggcacctccaccgagcccagcgagggcagcgcacccggcagccctgccggcagccccacctccacagaggagggaaccagcaccgagcccagcgaaggcagcgccccaggcaccagcaccgagcctagtgagcaggagattaaacggatcaacaagatcagaagaagacttgtgaaagacagcaacaccaagaaggccggcaagacaggccccatgaaaaccctgctggttagagtgatgacacccgatctgagagagcggctggaaaacctgagaaagaagcctgaaaatatcccccagcccatcagcaatacatctagagccaacctgaataagctgctgaccgattacaccgaaatgaagaaggcgatcctgcatgtgtactgggaagagttccagaaggaccctgtgggcctgatgagccgggtggcccagcctgccagcaagaagatcgatcagaacaagctgaaacctgagatggacgagaagggcaacctgaccaccgccggctttgcctgctctcagtgtggccagcccctgttcgtgtacaagctggagcaggtgtctgagaagggcaaggcttacaccaactacttcggacggtgcaatgtggccgagcacgaaaagctgatcctgctggcccagctgaagcccgagaaggatagcgacgaagccgtgacatatagcctgggaaagtttgggcagagggccctggatttctacagcattcatgtgaccaaggagtccacccaccccgtgaagcccctggcccagatcgccggaaacagatacgcctccggacctgtgggaaaggccctgagcgacgcatgtatgggcacaatcgcctccttcctgtctaagtaccaggacatcatcatcgaacaccagaaggtggtgaagggcaaccagaagagactggagagcctgcgggagctggccggcaaggaaaacctggaataccctagcgtgaccctgccacctcagcctcacaccaaggagggcgttgatgcctacaacgaagtgatcgcccgggtgcgaatgtgggtgaacctgaacctgtggcagaagctgaagctaagcagagatgatgccaagcctctgctgagactgaagggattcccttcctttcctctggtcgagagacaggccaacgaagtggactggtgggacatggtgtgtaacgtgaagaagctgatcaacgagaaaaaggaggatggcaaggtgttttggcagaatctggctggctacaagagacaggaagccctgagaccatacctgagcagcgaggaagatcggaagaagggaaagaaattcgctcggtaccagctgggcgacctgctgctgcacctggaaaagaagcacggcgaggactggggaaaggtgtacgacgaggcctgggagcggattgacaagaaagtggaaggcctgagcaagcacatcaagctggaagaggaacggagaagcgaggacgcccagagcaaggccgccctgaccgactggctgcgggctaaggccagcttcgtgatcgagggcctgaaggaggccgacaaggacgagttctgcagatgcgagctgaagctgcagaagtggtacggggacctgcggggaaagcccttcgccatcgaagccgagaacagcatcctggacatcagcggcttcagcaagcagtacaactgtgccttcatctggcagaaggacggcgtgaagaagctgaacctgtacctgatcatcaactacttcaagggcggcaagctgcggttcaagaagatcaaacctgaagccttcgaagccaacagattctacaccgtgatcaacaaaaagagcggcgagatcgtgcccatggaggtgaacttcaacttcgacgaccccaacctgatcatcctgcctctggcctttggcaagagacagggcagagaattcatctggaacgacctgctgtccctggaaaccggcagcctgaagctggccaacggaagagtgatcgagaagacactgtacaacagaagaacccggcaggatgagcctgccctgttcgtggccctgaccttcgagcggcgggaggtcctggactcctccaatatcaaaccaatgaacctgatcggcgtggcaagaggcgaaaacatccccgccgtgatcgccctgaccgaccccgagggctgcccactgagccggtttaaggatagcctgggaaacccaacccacatcctgagaatcggcgagagctataaggagaagcagcggaccatccaggccaagaaggaggtggagcagcggagagccggcggctacagccggaagtacgccagcaaagccaagaatctggcagacgatatggtgagaaacaccgctagagatctgctgtactacgccgtgacccaggatgccatgctgatcttcgccaacctgagccggggcttcggccggcagggcaagcggaccttcatggccgagagacagtacacacggatggaggactggctgaccgccaagctggcctacgagggcctgagcaagacctacctgtccaagacactggcccagtacacctccaagacatgcagcaactgtgggtttaccatcaccagcgccgactacgacagggtgctggagaagctgaagaagacagcaacaggctggatgaccacaattaacggcaaggagctgaaggtggagggccagattacctactacaacagatacaagagacagaacgtagtcaaggacctgtccgtcgagctggatagactgagcgaagaatctgtgaacaacgacatctcctcctggacaaagggcagaagcggagaagctctgagcctcctgaagaaaagattctcccatagacccgtgcaggagaagttcgtgtgcctgaactgcggcttcgagacacacgcagccgagcaagccgccctgaacatcgccagatcctggctgttcctgcggagccaggagtacaagaaataccagacaaacaagacaaccggcaacaccgataagagagccttcgtcgagacctggcagtccttttaccggaagaagcttaaggaggtgtggaaacctgccgtgcggtctggcggatctggcggaggctccaccagccccaagaaaaagagaaaagtctaagctgccttctgcggggcttgccttctggccatgcccttcttctctcccttgcacctgtacctcttggtctttgaataaagcctgagtaggaaggctagcaaaaaaaaaaaaaaaaaaaaaaaaaaaaaaaaaaaaaaaaaaaaaaaaaaaaaaaaaaaaaaaaaaaaaaaaaaaaaaaa

SEQ ID NO: 9487 - RNA, 8787 nt, synthetic construct
  source 1..8787: mol_type = other RNA
aggaaataagagagaaaagaagagtaagaagaaatataagagccaccatggcccctaagaagaagcgtaaagtgagccggatgaaccacgaccaggagttcgacccccctaaggtgtaccctcccgtccccgccgagaagagaaagcccatccgggtcctgagcctgttcgatggcatcgccaccggtctgctggtgctgaaggacctgggcatccaggtggataggtacattgcctccgaggtgtgcgaggactccatcaccgtgggaatggtgcgtcatcagggcaagatcatgtacgtgggcgacgtgcggagcgtgacacagaagcatatccaggagtggggccctttcgacctggtgatcggcggcagcccttgcaatgacctgagcatcgtgaacccagcccggaagggcctgtacgagggaaccggcagactgttcttcgagttttacagactgctgcacgacgcccggcctaaggaaggcgacgaccggcccttcttttggctgttcgagaatgtggtggccatgggagtcagcgacaagcgggatattagccggttcctggagagcaaccccgtgatgatcgatgccaaggaagtgagcgccgcccaccgggccagatacttctggggcaatctgcctggcatgaacagacccctggccagcaccgtgaacgacaagctggagctgcaggagtgcctggagcacggccggatcgccaagttcagcaaggtgagaaccatcaccacccgaagcaacagcatcaaacaaggcaaggaccagcactttcctgtgttcatgaacgagaaggaggacatcctgtggtgtaccgagatggagagagtgttcgggttcccagtccactacacagatgtcagcaacatgtctagactggccagacagagactgctgggaagaagctggtccgtccctgtgatcagacacctgttcgcccctctgaaggagtacttcgcctgcgtgagcagcggcaacagcaacgccaacagccggggccccagcttctctagcggcctggtgccactgtccctgagagggagccacatgggccccatggagatctacaaaaccgtgagcgcctggaagcggcagcctgtgcgcgtgctgagcctgtttcggaatatcgataaagtcctgaaaagcctgggattcctggagagcggctctggctccggcggtggcaccctgaagtacgtggaggatgtgacaaacgtggtcagacgggatgtggagaagtggggccccttcgatctggtgtacggcagcacccaacccctgggcagctcttgtgaccggtgccctggctggtacatgtttcagttccaccggatcctgcagtacgccctgccgagacaggagtcccagcggccattcttttggattttcatggacaacttgctgctgaccgaggatgaccaggaaactaccactcggttcctgcagaccgaagccgtgaccctgcaggacgtgagaggccgggactaccagaacgccatgcgggtgtggtccaacatccctggactgaaaagcaagcacgcacctctgacccctaaagaagaggagtacctgcaggcccaggtgcggagcagaagcaagctggacgcccctaaggtggatctgctggtgaagaattgcctcctgcccctgagagagtacttcaagtatttcagccagaatagtctgcccctgggaggcagcggcggcggcttccagggcagcgtgagcttcaaggacgtgaccgtgggcttcagccaggaggagtggcagcacctggaccccagccagagggccctgtacagggacgtgatgctggagaactacagcaacctggtgagcgtgggctactgcgtgcacaagcccgaggtgatcttcaggctggagcagggcgaggagccctggaggctggaggaggagttccccagccagagcttccccgaggtgtggaccgccggcggcccaagcagcggcgcccctcctcccagcggcggcaggcggcccaagcagcggcgcccctcctcccagcggcggcagcccagccggctccccaacctctaccgaggagggcacctctgagtccgccacccccgagagcggccctggcacctccaccgagcccagcgagggcagcgcacccggcagccctgccggcagccccacctccacagaggagggaaccagcaccgagcccagcgaaggcagcgccccaggcaccagcaccgagcctagtgagcaggagattaaacggatcaacaagatcagaagaagacttgtgaaagacagcaacaccaagaaggccggcaagacaggccccatgaaaaccctgctggttagagtgatgacacccgatctgagagagcggctggaaaacctgagaaagaagcctgaaaatatcccccagcccatcagcaatacatctagagccaacctgaataagctgctgaccgattacaccgaaatgaagaaggcgatcctgcatgtgtactgggaagagttccagaaggaccctgtgggcctgatgagccgggtggcccagcctgccagcaagaagatcgatcagaacaagctgaaacctgagatggacgagaagggcaacctgaccaccgccggctttgcctgctctcagtgtggccagcccctgttcgtgtacaagctggagcaggtgtctgagaagggcaaggcttacaccaactacttcggacggtgcaatgtggccgagcacgaaaagctgatcctgctggcccagctgaagcccgagaaggatagcgacgaagccgtgacatatagcctgggaaagtttgggcagagggccctggatttctacagcattcatgtgaccaaggagtccacccaccccgtgaagcccctggcccagatcgccggaaacagatacgcctccggacctgtgggaaaggccctgagcgacgcatgtatgggcacaatcgcctccttcctgtctaagtaccaggacatcatcatcgaacaccagaaggtggtgaagggcaaccagaagagactggagagcctgcgggagctggccggcaaggaaaacctggaataccctagcgtgaccctgccacctcagcctcacaccaaggagggcgttgatgcctacaacgaagtgatcgcccgggtgcgaatgtgggtgaacctgaacctgtggcagaagctgaagctaagcagagatgatgccaagcctctgctgagactgaagggattcccttcctttcctctggtcgagagacaggccaacgaagtggactggtgggacatggtgtgtaacgtgaagaagctgatcaacgagaaaaaggaggatggcaaggtgttttggcagaatctggctggctacaagagacaggaagccctgagaccatacctgagcagcgaggaagatcggaagaagggaaagaaattcgctcggtaccagctgggcgacctgctgctgcacctggaaaagaagcacggcgaggactggggaaaggtgtacgacgaggcctgggagcggattgacaagaaagtggaaggcctgagcaagcacatcaagctggaagaggaacggagaagcgaggacgcccagagcaaggccgccctgaccgactggctgcgggctaaggccagcttcgtgatcgagggcctgaaggaggccgacaaggacgagttctgcagatgcgagctgaagctgcagaagtggtacggggacctgcggggaaagcccttcgccatcgaagccgagaacagcatcctggacatcagcggcttcagcaagcagtacaactgtgccttcatctggcagaaggacggcgtgaagaagctgaacctgtacctgatcatcaactacttcaagggcggcaagctgcggttcaagaagatcaaacctgaagccttcgaagccaacagattctacaccgtgatcaacaaaaagagcggcgagatcgtgcccatggaggtgaacttcaacttcgacgaccccaacctgatcatcctgcctctggcctttggcaagagacagggcagagaattcatctggaacgacctgctgtccctggaaaccggcagcctgaagctggccaacggaagagtgatcgagaagacactgtacaacagaagaacccggcaggatgagcctgccctgttcgtggccctgaccttcgagcggcgggaggtcctggactcctccaatatcaaaccaatgaacctgatcggcgtggcaagaggcgaaaacatccccgccgtgatcgccctgaccgaccccgagggctgcccactgagccggtttaaggatagcctgggaaacccaacccacatcctgagaatcggcgagagctataaggagaagcagcggaccatccaggccaagaaggaggtggagcagcggagagccggcggctacagccggaagtacgccagcaaagccaagaatctggcagacgatatggtgagaaacaccgctagagatctgctgtactacgccgtgacccaggatgccatgctgatcttcgccaacctgagccggggcttcggccggcagggcaagcggaccttcatggccgagagacagtacacacggatggaggactggctgaccgccaagctggcctacgagggcctgagcaagacctacctgtccaagacactggcccagtacacctccaagacatgcagcaactgtgggtttaccatcaccagcgccgactacgacagggtgctggagaagctgaagaagacagcaacaggctggatgaccacaattaacggcaaggagctgaaggtggagggccagattacctactacaacagatacaagagacagaacgtagtcaaggacctgtccgtcgagctggatagactgagcgaagaatctgtgaacaacgacatctcctcctggacaaagggcagaagcggagaagctctgagcctcctgaagaaaagattctcccatagacccgtgcaggagaagttcgtgtgcctgaactgcggcttcgagacacacgcagccgagcaagccgccctgaacatcgccagatcctggctgttcctgcggagccaggagtacaagaaataccagacaaacaagacaaccggcaacaccgataagagagccttcgtcgagacctggcagtccttttaccggaagaagcttaaggaggtgtggaaacctgccgtgcggtctggcggatctggcggaggctccaccagccccaagaaaaagagaaaagtctaagctgccttctgcggggcttgccttctggccatgcccttcttctctcccttgcacctgtacctcttggtctttgaataaagcctgagtaggaaggctagcaaaaaaaaaaaaaaaaaaaaaaaaaaaaaaaaaaaaaaaaaaaaaaaaaaaaaaaaaaaaaaaaaaaaaaaaaaaaaaaagcccagccggctccccaacctctaccgaggagggcacctctgagtccgccacccccgagagcggccctggcacctccaccgagcccagcgagggcagcgcacccggcagccctgccggcagccccacctccacagaggagggaaccagcaccgagcccagcgaaggcagcgccccaggcaccagcaccgagcctagtgagcaggagattaaacggatcaacaagatcagaagaagacttgtgaaagacagcaacaccaagaaggccggcaagacaggccccatgaaaaccctgctggttagagtgatgacacccgatctgagagagcggctggaaaacctgagaaagaagcctgaaaatatcccccagcccatcagcaatacatctagagccaacctgaataagctgctgaccgattacaccgaaatgaagaaggcgatcctgcatgtgtactgggaagagttccagaaggaccctgtgggcctgatgagccgggtggcccagcctgccagcaagaagatcgatcagaacaagctgaaacctgagatggacgagaagggcaacctgaccaccgccggctttgcctgctctcagtgtggccagcccctgttcgtgtacaagctggagcaggtgtctgagaagggcaaggcttacaccaactacttcggacggtgcaatgtggccgagcacgaaaagctgatcctgctggcccagctgaagcccgagaaggatagcgacgaagccgtgacatatagcctgggaaagtttgggcagagggccctggatttctacagcattcatgtgaccaaggagtccacccaccccgtgaagcccctggcccagatcgccggaaacagatacgcctccggacctgtgggaaaggccctgagcgacgcatgtatgggcacaatcgcctccttcctgtctaagtaccaggacatcatcatcgaacaccagaaggtggtgaagggcaaccagaagagactggagagcctgcgggagctggccggcaaggaaaacctggaataccctagcgtgaccctgccacctcagcctcacaccaaggagggcgttgatgcctacaacgaagtgatcgcccgggtgcgaatgtgggtgaacctgaacctgtggcagaagctgaagctaagcagagatgatgccaagcctctgctgagactgaagggattcccttcctttcctctggtcgagagacaggccaacgaagtggactggtgggacatggtgtgtaacgtgaagaagctgatcaacgagaaaaaggaggatggcaaggtgttttggcagaatctggctggctacaagagacaggaagccctgagaccatacctgagcagcgaggaagatcggaagaagggaaagaaattcgctcggtaccagctgggcgacctgctgctgcacctggaaaagaagcacggcgaggactggggaaaggtgtacgacgaggcctgggagcggattgacaagaaagtggaaggcctgagcaagcacatcaagctggaagaggaacggagaagcgaggacgcccagagcaaggccgccctgaccgactggctgcgggctaaggccagcttcgtgatcgagggcctgaaggaggccgacaaggacgagttctgcagatgcgagctgaagctgcagaagtggtacggggacctgcggggaaagcccttcgccatcgaagccgagaacagcatcctggacatcagcggcttcagcaagcagtacaactgtgccttcatctggcagaaggacggcgtgaagaagctgaacctgtacctgatcatcaactacttcaagggcggcaagctgcggttcaagaagatcaaacctgaagccttcgaagccaacagattctacaccgtgatcaacaaaaagagcggcgagatcgtgcccatggaggtgaacttcaacttcgacgaccccaacctgatcatcctgcctctggcctttggcaagagacagggcagagaattcatctggaacgacctgctgtccctggaaaccggcagcctgaagctggccaacggaagagtgatcgagaagacactgtacaacagaagaacccggcaggatgagcctgccctgttcgtggccctgaccttcgagcggcgggaggtcctggactcctccaatatcaaaccaatgaacctgatcggcgtggcaagaggcgaaaacatccccgccgtgatcgccctgaccgaccccgagggctgcccactgagccggtttaaggatagcctgggaaacccaacccacatcctgagaatcggcgagagctataaggagaagcagcggaccatccaggccaagaaggaggtggagcagcggagagccggcggctacagccggaagtacgccagcaaagccaagaatctggcagacgatatggtgagaaacaccgctagagatctgctgtactacgccgtgacccaggatgccatgctgatcttcgccaacctgagccggggcttcggccggcagggcaagcggaccttcatggccgagagacagtacacacggatggaggactggctgaccgccaagctggcctacgagggcctgagcaagacctacctgtccaagacactggcccagtacacctccaagacatgcagcaactgtgggtttaccatcaccagcgccgactacgacagggtgctggagaagctgaagaagacagcaacaggctggatgaccacaattaacggcaaggagctgaaggtggagggccagattacctactacaacagatacaagagacagaacgtagtcaaggacctgtccgtcgagctggatagactgagcgaagaatctgtgaacaacgacatctcctcctggacaaagggcagaagcggagaagctctgagcctcctgaagaaaagattctcccatagacccgtgcaggagaagttcgtgtgcctgaactgcggcttcgagacacacgcagccgagcaagccgccctgaacatcgccagatcctggctgttcctgcggagccaggagtacaagaaataccagacaaacaagacaaccggcaacaccgataagagagccttcgtcgagacctggcagtccttttaccggaagaagcttaaggaggtgtggaaacctgccgtgcggtctggcggatctggcggaggctccaccagccccaagaaaaagagaaaagtctaagctgccttctgcggggcttgccttctggccatgcccttcttctctcccttgcacctgtacctcttggtctttgaataaagcctgagtaggaaggctagcaaaaaaaaaaaaaaaaaaaaaaaaaaaaaaaaaaaaaaaaaaaaaaaaaaaaaaaaaaaaaaaaaaaaaaaaaaaaaaaa

SEQ ID NO: 9488 - RNA, 8787 nt, synthetic construct
  source 1..8787: mol_type = other RNA
aggaaataagagagaaaagaagagtaagaagaaatataagagccaccatggcccctaagaagaagcgtaaagtgagccggatgaaccacgaccaggagttcgacccccctaaggtgtaccctcccgtccccgccgagaagagaaagcccatccgggtcctgagcctgttcgatggcatcgccaccggtctgctggtgctgaaggacctgggcatccaggtggataggtacattgcctccgaggtgtgcgaggactccatcaccgtgggaatggtgcgtcatcagggcaagatcatgtacgtgggcgacgtgcggagcgtgacacagaagcatatccaggagtggggccctttcgacctggtgatcggcggcagcccttgcaatgacctgagcatcgtgaacccagcccggaagggcctgtacgagggaaccggcagactgttcttcgagttttacagactgctgcacgacgcccggcctaaggaaggcgacgaccggcccttcttttggctgttcgagaatgtggtggccatgggagtcagcgacaagcgggatattagccggttcctggagagcaaccccgtgatgatcgatgccaaggaagtgagcgccgcccaccgggccagatacttctggggcaatctgcctggcatgaacagacccctggccagcaccgtgaacgacaagctggagctgcaggagtgcctggagcacggccggatcgccaagttcagcaaggtgagaaccatcaccacccgaagcaacagcatcaaacaaggcaaggaccagcactttcctgtgttcatgaacgagaaggaggacatcctgtggtgtaccgagatggagagagtgttcgggttcccagtccactacacagatgtcagcaacatgtctagactggccagacagagactgctgggaagaagctggtccgtccctgtgatcagacacctgttcgcccctctgaaggagtacttcgcctgcgtgagcagcggcaacagcaacgccaacagccggggccccagcttctctagcggcctggtgccactgtccctgagagggagccacatgggccccatggagatctacaaaaccgtgagcgcctggaagcggcagcctgtgcgcgtgctgagcctgtttcggaatatcgataaagtcctgaaaagcctgggattcctggagagcggctctggctccggcggtggcaccctgaagtacgtggaggatgtgacaaacgtggtcagacgggatgtggagaagtggggccccttcgatctggtgtacggcagcacccaacccctgggcagctcttgtgaccggtgccctggctggtacatgtttcagttccaccggatcctgcagtacgccctgccgagacaggagtcccagcggccattcttttggattttcatggacaacttgctgctgaccgaggatgaccaggaaactaccactcggttcctgcagaccgaagccgtgaccctgcaggacgtgagaggccgggactaccagaacgccatgcgggtgtggtccaacatccctggactgaaaagcaagcacgcacctctgacccctaaagaagaggagtacctgcaggcccaggtgcggagcagaagcaagctggacgcccctaaggtggatctgctggtgaagaattgcctcctgcccctgagagagtacttcaagtatttcagccagaatagtctgcccctgggaggcagcggcggcggcctgcaggaggccgtgaccttcaaggacgtggccgtggtgttcagcgaggaggagctgggcctgctggacagcgcccagaggaccctgtacagggacgtgatgctggagaccttccagaacctggtgagcctgggccaccagcccttcaagcccgacgtgatcagccagctggagagggaggagatgctgtggatgaagggcctgcagaccggcaggggcaggtgcagcggcggcaggaaccagggcggcccaagcagcggcgcccctcctcccagcggcggcaggcggcccaagcagcggcgcccctcctcccagcggcggcagcccagccggctccccaacctctaccgaggagggcacctctgagtccgccacccccgagagcggccctggcacctccaccgagcccagcgagggcagcgcacccggcagccctgccggcagccccacctccacagaggagggaaccagcaccgagcccagcgaaggcagcgccccaggcaccagcaccgagcctagtgagcaggagattaaacggatcaacaagatcagaagaagacttgtgaaagacagcaacaccaagaaggccggcaagacaggccccatgaaaaccctgctggttagagtgatgacacccgatctgagagagcggctggaaaacctgagaaagaagcctgaaaatatcccccagcccatcagcaatacatctagagccaacctgaataagctgctgaccgattacaccgaaatgaagaaggcgatcctgcatgtgtactgggaagagttccagaaggaccctgtgggcctgatgagccgggtggcccagcctgccagcaagaagatcgatcagaacaagctgaaacctgagatggacgagaagggcaacctgaccaccgccggctttgcctgctctcagtgtggccagcccctgttcgtgtacaagctggagcaggtgtctgagaagggcaaggcttacaccaactacttcggacggtgcaatgtggccgagcacgaaaagctgatcctgctggcccagctgaagcccgagaaggatagcgacgaagccgtgacatatagcctgggaaagtttgggcagagggccctggatttctacagcattcatgtgaccaaggagtccacccaccccgtgaagcccctggcccagatcgccggaaacagatacgcctccggacctgtgggaaaggccctgagcgacgcatgtatgggcacaatcgcctccttcctgtctaagtaccaggacatcatcatcgaacaccagaaggtggtgaagggcaaccagaagagactggagagcctgcgggagctggccggcaaggaaaacctggaataccctagcgtgaccctgccacctcagcctcacaccaaggagggcgttgatgcctacaacgaagtgatcgcccgggtgcgaatgtgggtgaacctgaacctgtggcagaagctgaagctaagcagagatgatgccaagcctctgctgagactgaagggattcccttcctttcctctggtcgagagacaggccaacgaagtggactggtgggacatggtgtgtaacgtgaagaagctgatcaacgagaaaaaggaggatggcaaggtgttttggcagaatctggctggctacaagagacaggaagccctgagaccatacctgagcagcgaggaagatcggaagaagggaaagaaattcgctcggtaccagctgggcgacctgctgctgcacctggaaaagaagcacggcgaggactggggaaaggtgtacgacgaggcctgggagcggattgacaagaaagtggaaggcctgagcaagcacatcaagctggaagaggaacggagaagcgaggacgcccagagcaaggccgccctgaccgactggctgcgggctaaggccagcttcgtgatcgagggcctgaaggaggccgacaaggacgagttctgcagatgcgagctgaagctgcagaagtggtacggggacctgcggggaaagcccttcgccatcgaagccgagaacagcatcctggacatcagcggcttcagcaagcagtacaactgtgccttcatctggcagaaggacggcgtgaagaagctgaacctgtacctgatcatcaactacttcaagggcggcaagctgcggttcaagaagatcaaacctgaagccttcgaagccaacagattctacaccgtgatcaacaaaaagagcggcgagatcgtgcccatggaggtgaacttcaacttcgacgaccccaacctgatcatcctgcctctggcctttggcaagagacagggcagagaattcatctggaacgacctgctgtccctggaaaccggcagcctgaagctggccaacggaagagtgatcgagaagacactgtacaacagaagaacccggcaggatgagcctgccctgttcgtggccctgaccttcgagcggcgggaggtcctggactcctccaatatcaaaccaatgaacctgatcggcgtggcaagaggcgaaaacatccccgccgtgatcgccctgaccgaccccgagggctgcccactgagccggtttaaggatagcctgggaaacccaacccacatcctgagaatcggcgagagctataaggagaagcagcggaccatccaggccaagaaggaggtggagcagcggagagccggcggctacagccggaagtacgccagcaaagccaagaatctggcagacgatatggtgagaaacaccgctagagatctgctgtactacgccgtgacccaggatgccatgctgatcttcgccaacctgagccggggcttcggccggcagggcaagcggaccttcatggccgagagacagtacacacggatggaggactggctgaccgccaagctggcctacgagggcctgagcaagacctacctgtccaagacactggcccagtacacctccaagacatgcagcaactgtgggtttaccatcaccagcgccgactacgacagggtgctggagaagctgaagaagacagcaacaggctggatgaccacaattaacggcaaggagctgaaggtggagggccagattacctactacaacagatacaagagacagaacgtagtcaaggacctgtccgtcgagctggatagactgagcgaagaatctgtgaacaacgacatctcctcctggacaaagggcagaagcggagaagctctgagcctcctgaagaaaagattctcccatagacccgtgcaggagaagttcgtgtgcctgaactgcggcttcgagacacacgcagccgagcaagccgccctgaacatcgccagatcctggctgttcctgcggagccaggagtacaagaaataccagacaaacaagacaaccggcaacaccgataagagagccttcgtcgagacctggcagtccttttaccggaagaagcttaaggaggtgtggaaacctgccgtgcggtctggcggatctggcggaggctccaccagccccaagaaaaagagaaaagtctaagctgccttctgcggggcttgccttctggccatgcccttcttctctcccttgcacctgtacctcttggtctttgaataaagcctgagtaggaaggctagcaaaaaaaaaaaaaaaaaaaaaaaaaaaaaaaaaaaaaaaaaaaaaaaaaaaaaaaaaaaaaaaaaaaaaaaaaaaaaaaagcccagccggctccccaacctctaccgaggagggcacctctgagtccgccacccccgagagcggccctggcacctccaccgagcccagcgagggcagcgcacccggcagccctgccggcagccccacctccacagaggagggaaccagcaccgagcccagcgaaggcagcgccccaggcaccagcaccgagcctagtgagcaggagattaaacggatcaacaagatcagaagaagacttgtgaaagacagcaacaccaagaaggccggcaagacaggccccatgaaaaccctgctggttagagtgatgacacccgatctgagagagcggctggaaaacctgagaaagaagcctgaaaatatcccccagcccatcagcaatacatctagagccaacctgaataagctgctgaccgattacaccgaaatgaagaaggcgatcctgcatgtgtactgggaagagttccagaaggaccctgtgggcctgatgagccgggtggcccagcctgccagcaagaagatcgatcagaacaagctgaaacctgagatggacgagaagggcaacctgaccaccgccggctttgcctgctctcagtgtggccagcccctgttcgtgtacaagctggagcaggtgtctgagaagggcaaggcttacaccaactacttcggacggtgcaatgtggccgagcacgaaaagctgatcctgctggcccagctgaagcccgagaaggatagcgacgaagccgtgacatatagcctgggaaagtttgggcagagggccctggatttctacagcattcatgtgaccaaggagtccacccaccccgtgaagcccctggcccagatcgccggaaacagatacgcctccggacctgtgggaaaggccctgagcgacgcatgtatgggcacaatcgcctccttcctgtctaagtaccaggacatcatcatcgaacaccagaaggtggtgaagggcaaccagaagagactggagagcctgcgggagctggccggcaaggaaaacctggaataccctagcgtgaccctgccacctcagcctcacaccaaggagggcgttgatgcctacaacgaagtgatcgcccgggtgcgaatgtgggtgaacctgaacctgtggcagaagctgaagctaagcagagatgatgccaagcctctgctgagactgaagggattcccttcctttcctctggtcgagagacaggccaacgaagtggactggtgggacatggtgtgtaacgtgaagaagctgatcaacgagaaaaaggaggatggcaaggtgttttggcagaatctggctggctacaagagacaggaagccctgagaccatacctgagcagcgaggaagatcggaagaagggaaagaaattcgctcggtaccagctgggcgacctgctgctgcacctggaaaagaagcacggcgaggactggggaaaggtgtacgacgaggcctgggagcggattgacaagaaagtggaaggcctgagcaagcacatcaagctggaagaggaacggagaagcgaggacgcccagagcaaggccgccctgaccgactggctgcgggctaaggccagcttcgtgatcgagggcctgaaggaggccgacaaggacgagttctgcagatgcgagctgaagctgcagaagtggtacggggacctgcggggaaagcccttcgccatcgaagccgagaacagcatcctggacatcagcggcttcagcaagcagtacaactgtgccttcatctggcagaaggacggcgtgaagaagctgaacctgtacctgatcatcaactacttcaagggcggcaagctgcggttcaagaagatcaaacctgaagccttcgaagccaacagattctacaccgtgatcaacaaaaagagcggcgagatcgtgcccatggaggtgaacttcaacttcgacgaccccaacctgatcatcctgcctctggcctttggcaagagacagggcagagaattcatctggaacgacctgctgtccctggaaaccggcagcctgaagctggccaacggaagagtgatcgagaagacactgtacaacagaagaacccggcaggatgagcctgccctgttcgtggccctgaccttcgagcggcgggaggtcctggactcctccaatatcaaaccaatgaacctgatcggcgtggcaagaggcgaaaacatccccgccgtgatcgccctgaccgaccccgagggctgcccactgagccggtttaaggatagcctgggaaacccaacccacatcctgagaatcggcgagagctataaggagaagcagcggaccatccaggccaagaaggaggtggagcagcggagagccggcggctacagccggaagtacgccagcaaagccaagaatctggcagacgatatggtgagaaacaccgctagagatctgctgtactacgccgtgacccaggatgccatgctgatcttcgccaacctgagccggggcttcggccggcagggcaagcggaccttcatggccgagagacagtacacacggatggaggactggctgaccgccaagctggcctacgagggcctgagcaagacctacctgtccaagacactggcccagtacacctccaagacatgcagcaactgtgggtttaccatcaccagcgccgactacgacagggtgctggagaagctgaagaagacagcaacaggctggatgaccacaattaacggcaaggagctgaaggtggagggccagattacctactacaacagatacaagagacagaacgtagtcaaggacctgtccgtcgagctggatagactgagcgaagaatctgtgaacaacgacatctcctcctggacaaagggcagaagcggagaagctctgagcctcctgaagaaaagattctcccatagacccgtgcaggagaagttcgtgtgcctgaactgcggcttcgagacacacgcagccgagcaagccgccctgaacatcgccagatcctggctgttcctgcggagccaggagtacaagaaataccagacaaacaagacaaccggcaacaccgataagagagccttcgtcgagacctggcagtccttttaccggaagaagcttaaggaggtgtggaaacctgccgtgcggtctggcggatctggcggaggctccaccagccccaagaaaaagagaaaagtctaagctgccttctgcggggcttgccttctggccatgcccttcttctctcccttgcacctgtacctcttggtctttgaataaagcctgagtaggaaggctagcaaaaaaaaaaaaaaaaaaaaaaaaaaaaaaaaaaaaaaaaaaaaaaaaaaaaaaaaaaaaaaaaaaaaaaaaaaaaaaaa

SEQ ID NO: 9489 - RNA, 8787 nt, synthetic construct
  source 1..8787: mol_type = other RNA
aggaaataagagagaaaagaagagtaagaagaaatataagagccaccatggcccctaagaagaagcgtaaagtgagccggatgaaccacgaccaggagttcgacccccctaaggtgtaccctcccgtccccgccgagaagagaaagcccatccgggtcctgagcctgttcgatggcatcgccaccggtctgctggtgctgaaggacctgggcatccaggtggataggtacattgcctccgaggtgtgcgaggactccatcaccgtgggaatggtgcgtcatcagggcaagatcatgtacgtgggcgacgtgcggagcgtgacacagaagcatatccaggagtggggccctttcgacctggtgatcggcggcagcccttgcaatgacctgagcatcgtgaacccagcccggaagggcctgtacgagggaaccggcagactgttcttcgagttttacagactgctgcacgacgcccggcctaaggaaggcgacgaccggcccttcttttggctgttcgagaatgtggtggccatgggagtcagcgacaagcgggatattagccggttcctggagagcaaccccgtgatgatcgatgccaaggaagtgagcgccgcccaccgggccagatacttctggggcaatctgcctggcatgaacagacccctggccagcaccgtgaacgacaagctggagctgcaggagtgcctggagcacggccggatcgccaagttcagcaaggtgagaaccatcaccacccgaagcaacagcatcaaacaaggcaaggaccagcactttcctgtgttcatgaacgagaaggaggacatcctgtggtgtaccgagatggagagagtgttcgggttcccagtccactacacagatgtcagcaacatgtctagactggccagacagagactgctgggaagaagctggtccgtccctgtgatcagacacctgttcgcccctctgaaggagtacttcgcctgcgtgagcagcggcaacagcaacgccaacagccggggccccagcttctctagcggcctggtgccactgtccctgagagggagccacatgggccccatggagatctacaaaaccgtgagcgcctggaagcggcagcctgtgcgcgtgctgagcctgtttcggaatatcgataaagtcctgaaaagcctgggattcctggagagcggctctggctccggcggtggcaccctgaagtacgtggaggatgtgacaaacgtggtcagacgggatgtggagaagtggggccccttcgatctggtgtacggcagcacccaacccctgggcagctcttgtgaccggtgccctggctggtacatgtttcagttccaccggatcctgcagtacgccctgccgagacaggagtcccagcggccattcttttggattttcatggacaacttgctgctgaccgaggatgaccaggaaactaccactcggttcctgcagaccgaagccgtgaccctgcaggacgtgagaggccgggactaccagaacgccatgcgggtgtggtccaacatccctggactgaaaagcaagcacgcacctctgacccctaaagaagaggagtacctgcaggcccaggtgcggagcagaagcaagctggacgcccctaaggtggatctgctggtgaagaattgcctcctgcccctgagagagtacttcaagtatttcagccagaatagtctgcccctgggaggcagcggcggcggcgcccaggtgctggtgaccttccaggacgtggccgtggacttcacccaggaggagtggaggctgctggaccccggccagaaggagctgtacaaggaggtgatgctggacaacgcccagaacatgctgttcctgggcctgcccgtgcccagggaggactggttcagccacttccacgagggcggcgccagctggatgctggagggcgaggaccccagcaacagcggcctggacggcgagaggaggggcggcccaagcagcggcgcccctcctcccagcggcggcaggcggcccaagcagcggcgcccctcctcccagcggcggcagcccagccggctccccaacctctaccgaggagggcacctctgagtccgccacccccgagagcggccctggcacctccaccgagcccagcgagggcagcgcacccggcagccctgccggcagccccacctccacagaggagggaaccagcaccgagcccagcgaaggcagcgccccaggcaccagcaccgagcctagtgagcaggagattaaacggatcaacaagatcagaagaagacttgtgaaagacagcaacaccaagaaggccggcaagacaggccccatgaaaaccctgctggttagagtgatgacacccgatctgagagagcggctggaaaacctgagaaagaagcctgaaaatatcccccagcccatcagcaatacatctagagccaacctgaataagctgctgaccgattacaccgaaatgaagaaggcgatcctgcatgtgtactgggaagagttccagaaggaccctgtgggcctgatgagccgggtggcccagcctgccagcaagaagatcgatcagaacaagctgaaacctgagatggacgagaagggcaacctgaccaccgccggctttgcctgctctcagtgtggccagcccctgttcgtgtacaagctggagcaggtgtctgagaagggcaaggcttacaccaactacttcggacggtgcaatgtggccgagcacgaaaagctgatcctgctggcccagctgaagcccgagaaggatagcgacgaagccgtgacatatagcctgggaaagtttgggcagagggccctggatttctacagcattcatgtgaccaaggagtccacccaccccgtgaagcccctggcccagatcgccggaaacagatacgcctccggacctgtgggaaaggccctgagcgacgcatgtatgggcacaatcgcctccttcctgtctaagtaccaggacatcatcatcgaacaccagaaggtggtgaagggcaaccagaagagactggagagcctgcgggagctggccggcaaggaaaacctggaataccctagcgtgaccctgccacctcagcctcacaccaaggagggcgttgatgcctacaacgaagtgatcgcccgggtgcgaatgtgggtgaacctgaacctgtggcagaagctgaagctaagcagagatgatgccaagcctctgctgagactgaagggattcccttcctttcctctggtcgagagacaggccaacgaagtggactggtgggacatggtgtgtaacgtgaagaagctgatcaacgagaaaaaggaggatggcaaggtgttttggcagaatctggctggctacaagagacaggaagccctgagaccatacctgagcagcgaggaagatcggaagaagggaaagaaattcgctcggtaccagctgggcgacctgctgctgcacctggaaaagaagcacggcgaggactggggaaaggtgtacgacgaggcctgggagcggattgacaagaaagtggaaggcctgagcaagcacatcaagctggaagaggaacggagaagcgaggacgcccagagcaaggccgccctgaccgactggctgcgggctaaggccagcttcgtgatcgagggcctgaaggaggccgacaaggacgagttctgcagatgcgagctgaagctgcagaagtggtacggggacctgcggggaaagcccttcgccatcgaagccgagaacagcatcctggacatcagcggcttcagcaagcagtacaactgtgccttcatctggcagaaggacggcgtgaagaagctgaacctgtacctgatcatcaactacttcaagggcggcaagctgcggttcaagaagatcaaacctgaagccttcgaagccaacagattctacaccgtgatcaacaaaaagagcggcgagatcgtgcccatggaggtgaacttcaacttcgacgaccccaacctgatcatcctgcctctggcctttggcaagagacagggcagagaattcatctggaacgacctgctgtccctggaaaccggcagcctgaagctggccaacggaagagtgatcgagaagacactgtacaacagaagaacccggcaggatgagcctgccctgttcgtggccctgaccttcgagcggcgggaggtcctggactcctccaatatcaaaccaatgaacctgatcggcgtggcaagaggcgaaaacatccccgccgtgatcgccctgaccgaccccgagggctgcccactgagccggtttaaggatagcctgggaaacccaacccacatcctgagaatcggcgagagctataaggagaagcagcggaccatccaggccaagaaggaggtggagcagcggagagccggcggctacagccggaagtacgccagcaaagccaagaatctggcagacgatatggtgagaaacaccgctagagatctgctgtactacgccgtgacccaggatgccatgctgatcttcgccaacctgagccggggcttcggccggcagggcaagcggaccttcatggccgagagacagtacacacggatggaggactggctgaccgccaagctggcctacgagggcctgagcaagacctacctgtccaagacactggcccagtacacctccaagacatgcagcaactgtgggtttaccatcaccagcgccgactacgacagggtgctggagaagctgaagaagacagcaacaggctggatgaccacaattaacggcaaggagctgaaggtggagggccagattacctactacaacagatacaagagacagaacgtagtcaaggacctgtccgtcgagctggatagactgagcgaagaatctgtgaacaacgacatctcctcctggacaaagggcagaagcggagaagctctgagcctcctgaagaaaagattctcccatagacccgtgcaggagaagttcgtgtgcctgaactgcggcttcgagacacacgcagccgagcaagccgccctgaacatcgccagatcctggctgttcctgcggagccaggagtacaagaaataccagacaaacaagacaaccggcaacaccgataagagagccttcgtcgagacctggcagtccttttaccggaagaagcttaaggaggtgtggaaacctgccgtgcggtctggcggatctggcggaggctccaccagccccaagaaaaagagaaaagtctaagctgccttctgcggggcttgccttctggccatgcccttcttctctcccttgcacctgtacctcttggtctttgaataaagcctgagtaggaaggctagcaaaaaaaaaaaaaaaaaaaaaaaaaaaaaaaaaaaaaaaaaaaaaaaaaaaaaaaaaaaaaaaaaaaaaaaaaaaaaaaagcccagccggctccccaacctctaccgaggagggcacctctgagtccgccacccccgagagcggccctggcacctccaccgagcccagcgagggcagcgcacccggcagccctgccggcagccccacctccacagaggagggaaccagcaccgagcccagcgaaggcagcgccccaggcaccagcaccgagcctagtgagcaggagattaaacggatcaacaagatcagaagaagacttgtgaaagacagcaacaccaagaaggccggcaagacaggccccatgaaaaccctgctggttagagtgatgacacccgatctgagagagcggctggaaaacctgagaaagaagcctgaaaatatcccccagcccatcagcaatacatctagagccaacctgaataagctgctgaccgattacaccgaaatgaagaaggcgatcctgcatgtgtactgggaagagttccagaaggaccctgtgggcctgatgagccgggtggcccagcctgccagcaagaagatcgatcagaacaagctgaaacctgagatggacgagaagggcaacctgaccaccgccggctttgcctgctctcagtgtggccagcccctgttcgtgtacaagctggagcaggtgtctgagaagggcaaggcttacaccaactacttcggacggtgcaatgtggccgagcacgaaaagctgatcctgctggcccagctgaagcccgagaaggatagcgacgaagccgtgacatatagcctgggaaagtttgggcagagggccctggatttctacagcattcatgtgaccaaggagtccacccaccccgtgaagcccctggcccagatcgccggaaacagatacgcctccggacctgtgggaaaggccctgagcgacgcatgtatgggcacaatcgcctccttcctgtctaagtaccaggacatcatcatcgaacaccagaaggtggtgaagggcaaccagaagagactggagagcctgcgggagctggccggcaaggaaaacctggaataccctagcgtgaccctgccacctcagcctcacaccaaggagggcgttgatgcctacaacgaagtgatcgcccgggtgcgaatgtgggtgaacctgaacctgtggcagaagctgaagctaagcagagatgatgccaagcctctgctgagactgaagggattcccttcctttcctctggtcgagagacaggccaacgaagtggactggtgggacatggtgtgtaacgtgaagaagctgatcaacgagaaaaaggaggatggcaaggtgttttggcagaatctggctggctacaagagacaggaagccctgagaccatacctgagcagcgaggaagatcggaagaagggaaagaaattcgctcggtaccagctgggcgacctgctgctgcacctggaaaagaagcacggcgaggactggggaaaggtgtacgacgaggcctgggagcggattgacaagaaagtggaaggcctgagcaagcacatcaagctggaagaggaacggagaagcgaggacgcccagagcaaggccgccctgaccgactggctgcgggctaaggccagcttcgtgatcgagggcctgaaggaggccgacaaggacgagttctgcagatgcgagctgaagctgcagaagtggtacggggacctgcggggaaagcccttcgccatcgaagccgagaacagcatcctggacatcagcggcttcagcaagcagtacaactgtgccttcatctggcagaaggacggcgtgaagaagctgaacctgtacctgatcatcaactacttcaagggcggcaagctgcggttcaagaagatcaaacctgaagccttcgaagccaacagattctacaccgtgatcaacaaaaagagcggcgagatcgtgcccatggaggtgaacttcaacttcgacgaccccaacctgatcatcctgcctctggcctttggcaagagacagggcagagaattcatctggaacgacctgctgtccctggaaaccggcagcctgaagctggccaacggaagagtgatcgagaagacactgtacaacagaagaacccggcaggatgagcctgccctgttcgtggccctgaccttcgagcggcgggaggtcctggactcctccaatatcaaaccaatgaacctgatcggcgtggcaagaggcgaaaacatccccgccgtgatcgccctgaccgaccccgagggctgcccactgagccggtttaaggatagcctgggaaacccaacccacatcctgagaatcggcgagagctataaggagaagcagcggaccatccaggccaagaaggaggtggagcagcggagagccggcggctacagccggaagtacgccagcaaagccaagaatctggcagacgatatggtgagaaacaccgctagagatctgctgtactacgccgtgacccaggatgccatgctgatcttcgccaacctgagccggggcttcggccggcagggcaagcggaccttcatggccgagagacagtacacacggatggaggactggctgaccgccaagctggcctacgagggcctgagcaagacctacctgtccaagacactggcccagtacacctccaagacatgcagcaactgtgggtttaccatcaccagcgccgactacgacagggtgctggagaagctgaagaagacagcaacaggctggatgaccacaattaacggcaaggagctgaaggtggagggccagattacctactacaacagatacaagagacagaacgtagtcaaggacctgtccgtcgagctggatagactgagcgaagaatctgtgaacaacgacatctcctcctggacaaagggcagaagcggagaagctctgagcctcctgaagaaaagattctcccatagacccgtgcaggagaagttcgtgtgcctgaactgcggcttcgagacacacgcagccgagcaagccgccctgaacatcgccagatcctggctgttcctgcggagccaggagtacaagaaataccagacaaacaagacaaccggcaacaccgataagagagccttcgtcgagacctggcagtccttttaccggaagaagcttaaggaggtgtggaaacctgccgtgcggtctggcggatctggcggaggctccaccagccccaagaaaaagagaaaagtctaagctgccttctgcggggcttgccttctggccatgcccttcttctctcccttgcacctgtacctcttggtctttgaataaagcctgagtaggaaggctagcaaaaaaaaaaaaaaaaaaaaaaaaaaaaaaaaaaaaaaaaaaaaaaaaaaaaaaaaaaaaaaaaaaaaaaaaaaaaaaaa

SEQ ID NO: 9490 - RNA, 8787 nt, synthetic construct
  source 1..8787: mol_type = other RNA
aggaaataagagagaaaagaagagtaagaagaaatataagagccaccatggcccctaagaagaagcgtaaagtgagccggatgaaccacgaccaggagttcgacccccctaaggtgtaccctcccgtccccgccgagaagagaaagcccatccgggtcctgagcctgttcgatggcatcgccaccggtctgctggtgctgaaggacctgggcatccaggtggataggtacattgcctccgaggtgtgcgaggactccatcaccgtgggaatggtgcgtcatcagggcaagatcatgtacgtgggcgacgtgcggagcgtgacacagaagcatatccaggagtggggccctttcgacctggtgatcggcggcagcccttgcaatgacctgagcatcgtgaacccagcccggaagggcctgtacgagggaaccggcagactgttcttcgagttttacagactgctgcacgacgcccggcctaaggaaggcgacgaccggcccttcttttggctgttcgagaatgtggtggccatgggagtcagcgacaagcgggatattagccggttcctggagagcaaccccgtgatgatcgatgccaaggaagtgagcgccgcccaccgggccagatacttctggggcaatctgcctggcatgaacagacccctggccagcaccgtgaacgacaagctggagctgcaggagtgcctggagcacggccggatcgccaagttcagcaaggtgagaaccatcaccacccgaagcaacagcatcaaacaaggcaaggaccagcactttcctgtgttcatgaacgagaaggaggacatcctgtggtgtaccgagatggagagagtgttcgggttcccagtccactacacagatgtcagcaacatgtctagactggccagacagagactgctgggaagaagctggtccgtccctgtgatcagacacctgttcgcccctctgaaggagtacttcgcctgcgtgagcagcggcaacagcaacgccaacagccggggccccagcttctctagcggcctggtgccactgtccctgagagggagccacatgggccccatggagatctacaaaaccgtgagcgcctggaagcggcagcctgtgcgcgtgctgagcctgtttcggaatatcgataaagtcctgaaaagcctgggattcctggagagcggctctggctccggcggtggcaccctgaagtacgtggaggatgtgacaaacgtggtcagacgggatgtggagaagtggggccccttcgatctggtgtacggcagcacccaacccctgggcagctcttgtgaccggtgccctggctggtacatgtttcagttccaccggatcctgcagtacgccctgccgagacaggagtcccagcggccattcttttggattttcatggacaacttgctgctgaccgaggatgaccaggaaactaccactcggttcctgcagaccgaagccgtgaccctgcaggacgtgagaggccgggactaccagaacgccatgcgggtgtggtccaacatccctggactgaaaagcaagcacgcacctctgacccctaaagaagaggagtacctgcaggcccaggtgcggagcagaagcaagctggacgcccctaaggtggatctgctggtgaagaattgcctcctgcccctgagagagtacttcaagtatttcagccagaatagtctgcccctgggaggcagcggcggcggcccccaggtgctggtgagcttcgaggacgtggccgtgttcctgagcagggaggagtggggctgcctgggccccgcccagaggggcctgtacagggacgtgatgctggagacctacaggaacctgatcagcctgggcttccaggacagcaagcccgacgtgatcagcaagctggagaagggcgaggagccctgggccccctacagccccaggatcgaggagggctggatctggagccacggcagcggcggcccaagcagcggcgcccctcctcccagcggcggcaggcggcccaagcagcggcgcccctcctcccagcggcggcagcccagccggctccccaacctctaccgaggagggcacctctgagtccgccacccccgagagcggccctggcacctccaccgagcccagcgagggcagcgcacccggcagccctgccggcagccccacctccacagaggagggaaccagcaccgagcccagcgaaggcagcgccccaggcaccagcaccgagcctagtgagcaggagattaaacggatcaacaagatcagaagaagacttgtgaaagacagcaacaccaagaaggccggcaagacaggccccatgaaaaccctgctggttagagtgatgacacccgatctgagagagcggctggaaaacctgagaaagaagcctgaaaatatcccccagcccatcagcaatacatctagagccaacctgaataagctgctgaccgattacaccgaaatgaagaaggcgatcctgcatgtgtactgggaagagttccagaaggaccctgtgggcctgatgagccgggtggcccagcctgccagcaagaagatcgatcagaacaagctgaaacctgagatggacgagaagggcaacctgaccaccgccggctttgcctgctctcagtgtggccagcccctgttcgtgtacaagctggagcaggtgtctgagaagggcaaggcttacaccaactacttcggacggtgcaatgtggccgagcacgaaaagctgatcctgctggcccagctgaagcccgagaaggatagcgacgaagccgtgacatatagcctgggaaagtttgggcagagggccctggatttctacagcattcatgtgaccaaggagtccacccaccccgtgaagcccctggcccagatcgccggaaacagatacgcctccggacctgtgggaaaggccctgagcgacgcatgtatgggcacaatcgcctccttcctgtctaagtaccaggacatcatcatcgaacaccagaaggtggtgaagggcaaccagaagagactggagagcctgcgggagctggccggcaaggaaaacctggaataccctagcgtgaccctgccacctcagcctcacaccaaggagggcgttgatgcctacaacgaagtgatcgcccgggtgcgaatgtgggtgaacctgaacctgtggcagaagctgaagctaagcagagatgatgccaagcctctgctgagactgaagggattcccttcctttcctctggtcgagagacaggccaacgaagtggactggtgggacatggtgtgtaacgtgaagaagctgatcaacgagaaaaaggaggatggcaaggtgttttggcagaatctggctggctacaagagacaggaagccctgagaccatacctgagcagcgaggaagatcggaagaagggaaagaaattcgctcggtaccagctgggcgacctgctgctgcacctggaaaagaagcacggcgaggactggggaaaggtgtacgacgaggcctgggagcggattgacaagaaagtggaaggcctgagcaagcacatcaagctggaagaggaacggagaagcgaggacgcccagagcaaggccgccctgaccgactggctgcgggctaaggccagcttcgtgatcgagggcctgaaggaggccgacaaggacgagttctgcagatgcgagctgaagctgcagaagtggtacggggacctgcggggaaagcccttcgccatcgaagccgagaacagcatcctggacatcagcggcttcagcaagcagtacaactgtgccttcatctggcagaaggacggcgtgaagaagctgaacctgtacctgatcatcaactacttcaagggcggcaagctgcggttcaagaagatcaaacctgaagccttcgaagccaacagattctacaccgtgatcaacaaaaagagcggcgagatcgtgcccatggaggtgaacttcaacttcgacgaccccaacctgatcatcctgcctctggcctttggcaagagacagggcagagaattcatctggaacgacctgctgtccctggaaaccggcagcctgaagctggccaacggaagagtgatcgagaagacactgtacaacagaagaacccggcaggatgagcctgccctgttcgtggccctgaccttcgagcggcgggaggtcctggactcctccaatatcaaaccaatgaacctgatcggcgtggcaagaggcgaaaacatccccgccgtgatcgccctgaccgaccccgagggctgcccactgagccggtttaaggatagcctgggaaacccaacccacatcctgagaatcggcgagagctataaggagaagcagcggaccatccaggccaagaaggaggtggagcagcggagagccggcggctacagccggaagtacgccagcaaagccaagaatctggcagacgatatggtgagaaacaccgctagagatctgctgtactacgccgtgacccaggatgccatgctgatcttcgccaacctgagccggggcttcggccggcagggcaagcggaccttcatggccgagagacagtacacacggatggaggactggctgaccgccaagctggcctacgagggcctgagcaagacctacctgtccaagacactggcccagtacacctccaagacatgcagcaactgtgggtttaccatcaccagcgccgactacgacagggtgctggagaagctgaagaagacagcaacaggctggatgaccacaattaacggcaaggagctgaaggtggagggccagattacctactacaacagatacaagagacagaacgtagtcaaggacctgtccgtcgagctggatagactgagcgaagaatctgtgaacaacgacatctcctcctggacaaagggcagaagcggagaagctctgagcctcctgaagaaaagattctcccatagacccgtgcaggagaagttcgtgtgcctgaactgcggcttcgagacacacgcagccgagcaagccgccctgaacatcgccagatcctggctgttcctgcggagccaggagtacaagaaataccagacaaacaagacaaccggcaacaccgataagagagccttcgtcgagacctggcagtccttttaccggaagaagcttaaggaggtgtggaaacctgccgtgcggtctggcggatctggcggaggctccaccagccccaagaaaaagagaaaagtctaagctgccttctgcggggcttgccttctggccatgcccttcttctctcccttgcacctgtacctcttggtctttgaataaagcctgagtaggaaggctagcaaaaaaaaaaaaaaaaaaaaaaaaaaaaaaaaaaaaaaaaaaaaaaaaaaaaaaaaaaaaaaaaaaaaaaaaaaaaaaaagcccagccggctccccaacctctaccgaggagggcacctctgagtccgccacccccgagagcggccctggcacctccaccgagcccagcgagggcagcgcacccggcagccctgccggcagccccacctccacagaggagggaaccagcaccgagcccagcgaaggcagcgccccaggcaccagcaccgagcctagtgagcaggagattaaacggatcaacaagatcagaagaagacttgtgaaagacagcaacaccaagaaggccggcaagacaggccccatgaaaaccctgctggttagagtgatgacacccgatctgagagagcggctggaaaacctgagaaagaagcctgaaaatatcccccagcccatcagcaatacatctagagccaacctgaataagctgctgaccgattacaccgaaatgaagaaggcgatcctgcatgtgtactgggaagagttccagaaggaccctgtgggcctgatgagccgggtggcccagcctgccagcaagaagatcgatcagaacaagctgaaacctgagatggacgagaagggcaacctgaccaccgccggctttgcctgctctcagtgtggccagcccctgttcgtgtacaagctggagcaggtgtctgagaagggcaaggcttacaccaactacttcggacggtgcaatgtggccgagcacgaaaagctgatcctgctggcccagctgaagcccgagaaggatagcgacgaagccgtgacatatagcctgggaaagtttgggcagagggccctggatttctacagcattcatgtgaccaaggagtccacccaccccgtgaagcccctggcccagatcgccggaaacagatacgcctccggacctgtgggaaaggccctgagcgacgcatgtatgggcacaatcgcctccttcctgtctaagtaccaggacatcatcatcgaacaccagaaggtggtgaagggcaaccagaagagactggagagcctgcgggagctggccggcaaggaaaacctggaataccctagcgtgaccctgccacctcagcctcacaccaaggagggcgttgatgcctacaacgaagtgatcgcccgggtgcgaatgtgggtgaacctgaacctgtggcagaagctgaagctaagcagagatgatgccaagcctctgctgagactgaagggattcccttcctttcctctggtcgagagacaggccaacgaagtggactggtgggacatggtgtgtaacgtgaagaagctgatcaacgagaaaaaggaggatggcaaggtgttttggcagaatctggctggctacaagagacaggaagccctgagaccatacctgagcagcgaggaagatcggaagaagggaaagaaattcgctcggtaccagctgggcgacctgctgctgcacctggaaaagaagcacggcgaggactggggaaaggtgtacgacgaggcctgggagcggattgacaagaaagtggaaggcctgagcaagcacatcaagctggaagaggaacggagaagcgaggacgcccagagcaaggccgccctgaccgactggctgcgggctaaggccagcttcgtgatcgagggcctgaaggaggccgacaaggacgagttctgcagatgcgagctgaagctgcagaagtggtacggggacctgcggggaaagcccttcgccatcgaagccgagaacagcatcctggacatcagcggcttcagcaagcagtacaactgtgccttcatctggcagaaggacggcgtgaagaagctgaacctgtacctgatcatcaactacttcaagggcggcaagctgcggttcaagaagatcaaacctgaagccttcgaagccaacagattctacaccgtgatcaacaaaaagagcggcgagatcgtgcccatggaggtgaacttcaacttcgacgaccccaacctgatcatcctgcctctggcctttggcaagagacagggcagagaattcatctggaacgacctgctgtccctggaaaccggcagcctgaagctggccaacggaagagtgatcgagaagacactgtacaacagaagaacccggcaggatgagcctgccctgttcgtggccctgaccttcgagcggcgggaggtcctggactcctccaatatcaaaccaatgaacctgatcggcgtggcaagaggcgaaaacatccccgccgtgatcgccctgaccgaccccgagggctgcccactgagccggtttaaggatagcctgggaaacccaacccacatcctgagaatcggcgagagctataaggagaagcagcggaccatccaggccaagaaggaggtggagcagcggagagccggcggctacagccggaagtacgccagcaaagccaagaatctggcagacgatatggtgagaaacaccgctagagatctgctgtactacgccgtgacccaggatgccatgctgatcttcgccaacctgagccggggcttcggccggcagggcaagcggaccttcatggccgagagacagtacacacggatggaggactggctgaccgccaagctggcctacgagggcctgagcaagacctacctgtccaagacactggcccagtacacctccaagacatgcagcaactgtgggtttaccatcaccagcgccgactacgacagggtgctggagaagctgaagaagacagcaacaggctggatgaccacaattaacggcaaggagctgaaggtggagggccagattacctactacaacagatacaagagacagaacgtagtcaaggacctgtccgtcgagctggatagactgagcgaagaatctgtgaacaacgacatctcctcctggacaaagggcagaagcggagaagctctgagcctcctgaagaaaagattctcccatagacccgtgcaggagaagttcgtgtgcctgaactgcggcttcgagacacacgcagccgagcaagccgccctgaacatcgccagatcctggctgttcctgcggagccaggagtacaagaaataccagacaaacaagacaaccggcaacaccgataagagagccttcgtcgagacctggcagtccttttaccggaagaagcttaaggaggtgtggaaacctgccgtgcggtctggcggatctggcggaggctccaccagccccaagaaaaagagaaaagtctaagctgccttctgcggggcttgccttctggccatgcccttcttctctcccttgcacctgtacctcttggtctttgaataaagcctgagtaggaaggctagcaaaaaaaaaaaaaaaaaaaaaaaaaaaaaaaaaaaaaaaaaaaaaaaaaaaaaaaaaaaaaaaaaaaaaaaaaaaaaaaa

SEQ ID NO: 9491 - RNA, 8787 nt, synthetic construct
  source 1..8787: mol_type = other RNA
aggaaataagagagaaaagaagagtaagaagaaatataagagccaccatggcccctaagaagaagcgtaaagtgagccggatgaaccacgaccaggagttcgacccccctaaggtgtaccctcccgtccccgccgagaagagaaagcccatccgggtcctgagcctgttcgatggcatcgccaccggtctgctggtgctgaaggacctgggcatccaggtggataggtacattgcctccgaggtgtgcgaggactccatcaccgtgggaatggtgcgtcatcagggcaagatcatgtacgtgggcgacgtgcggagcgtgacacagaagcatatccaggagtggggccctttcgacctggtgatcggcggcagcccttgcaatgacctgagcatcgtgaacccagcccggaagggcctgtacgagggaaccggcagactgttcttcgagttttacagactgctgcacgacgcccggcctaaggaaggcgacgaccggcccttcttttggctgttcgagaatgtggtggccatgggagtcagcgacaagcgggatattagccggttcctggagagcaaccccgtgatgatcgatgccaaggaagtgagcgccgcccaccgggccagatacttctggggcaatctgcctggcatgaacagacccctggccagcaccgtgaacgacaagctggagctgcaggagtgcctggagcacggccggatcgccaagttcagcaaggtgagaaccatcaccacccgaagcaacagcatcaaacaaggcaaggaccagcactttcctgtgttcatgaacgagaaggaggacatcctgtggtgtaccgagatggagagagtgttcgggttcccagtccactacacagatgtcagcaacatgtctagactggccagacagagactgctgggaagaagctggtccgtccctgtgatcagacacctgttcgcccctctgaaggagtacttcgcctgcgtgagcagcggcaacagcaacgccaacagccggggccccagcttctctagcggcctggtgccactgtccctgagagggagccacatgggccccatggagatctacaaaaccgtgagcgcctggaagcggcagcctgtgcgcgtgctgagcctgtttcggaatatcgataaagtcctgaaaagcctgggattcctggagagcggctctggctccggcggtggcaccctgaagtacgtggaggatgtgacaaacgtggtcagacgggatgtggagaagtggggccccttcgatctggtgtacggcagcacccaacccctgggcagctcttgtgaccggtgccctggctggtacatgtttcagttccaccggatcctgcagtacgccctgccgagacaggagtcccagcggccattcttttggattttcatggacaacttgctgctgaccgaggatgaccaggaaactaccactcggttcctgcagaccgaagccgtgaccctgcaggacgtgagaggccgggactaccagaacgccatgcgggtgtggtccaacatccctggactgaaaagcaagcacgcacctctgacccctaaagaagaggagtacctgcaggcccaggtgcggagcagaagcaagctggacgcccctaaggtggatctgctggtgaagaattgcctcctgcccctgagagagtacttcaagtatttcagccagaatagtctgcccctgggaggcagcggcggcggcgcccaggagagcatcaccctggaggacgtggccgtggacttcacctgggaggagtggcagctgctgggcgccgcccagaaggacctgtacagggacgtgatgctggagaactacagcaacctggtggccgtgggctaccaggccagcaagcccgacgccctgttcaagctggagcagggcgagcagccctggaccatcgaggacggcatccacagcggcgcctgcagcgacatctggaaggtgggcggcccaagcagcggcgcccctcctcccagcggcggcaggcggcccaagcagcggcgcccctcctcccagcggcggcagcccagccggctccccaacctctaccgaggagggcacctctgagtccgccacccccgagagcggccctggcacctccaccgagcccagcgagggcagcgcacccggcagccctgccggcagccccacctccacagaggagggaaccagcaccgagcccagcgaaggcagcgccccaggcaccagcaccgagcctagtgagcaggagattaaacggatcaacaagatcagaagaagacttgtgaaagacagcaacaccaagaaggccggcaagacaggccccatgaaaaccctgctggttagagtgatgacacccgatctgagagagcggctggaaaacctgagaaagaagcctgaaaatatcccccagcccatcagcaatacatctagagccaacctgaataagctgctgaccgattacaccgaaatgaagaaggcgatcctgcatgtgtactgggaagagttccagaaggaccctgtgggcctgatgagccgggtggcccagcctgccagcaagaagatcgatcagaacaagctgaaacctgagatggacgagaagggcaacctgaccaccgccggctttgcctgctctcagtgtggccagcccctgttcgtgtacaagctggagcaggtgtctgagaagggcaaggcttacaccaactacttcggacggtgcaatgtggccgagcacgaaaagctgatcctgctggcccagctgaagcccgagaaggatagcgacgaagccgtgacatatagcctgggaaagtttgggcagagggccctggatttctacagcattcatgtgaccaaggagtccacccaccccgtgaagcccctggcccagatcgccggaaacagatacgcctccggacctgtgggaaaggccctgagcgacgcatgtatgggcacaatcgcctccttcctgtctaagtaccaggacatcatcatcgaacaccagaaggtggtgaagggcaaccagaagagactggagagcctgcgggagctggccggcaaggaaaacctggaataccctagcgtgaccctgccacctcagcctcacaccaaggagggcgttgatgcctacaacgaagtgatcgcccgggtgcgaatgtgggtgaacctgaacctgtggcagaagctgaagctaagcagagatgatgccaagcctctgctgagactgaagggattcccttcctttcctctggtcgagagacaggccaacgaagtggactggtgggacatggtgtgtaacgtgaagaagctgatcaacgagaaaaaggaggatggcaaggtgttttggcagaatctggctggctacaagagacaggaagccctgagaccatacctgagcagcgaggaagatcggaagaagggaaagaaattcgctcggtaccagctgggcgacctgctgctgcacctggaaaagaagcacggcgaggactggggaaaggtgtacgacgaggcctgggagcggattgacaagaaagtggaaggcctgagcaagcacatcaagctggaagaggaacggagaagcgaggacgcccagagcaaggccgccctgaccgactggctgcgggctaaggccagcttcgtgatcgagggcctgaaggaggccgacaaggacgagttctgcagatgcgagctgaagctgcagaagtggtacggggacctgcggggaaagcccttcgccatcgaagccgagaacagcatcctggacatcagcggcttcagcaagcagtacaactgtgccttcatctggcagaaggacggcgtgaagaagctgaacctgtacctgatcatcaactacttcaagggcggcaagctgcggttcaagaagatcaaacctgaagccttcgaagccaacagattctacaccgtgatcaacaaaaagagcggcgagatcgtgcccatggaggtgaacttcaacttcgacgaccccaacctgatcatcctgcctctggcctttggcaagagacagggcagagaattcatctggaacgacctgctgtccctggaaaccggcagcctgaagctggccaacggaagagtgatcgagaagacactgtacaacagaagaacccggcaggatgagcctgccctgttcgtggccctgaccttcgagcggcgggaggtcctggactcctccaatatcaaaccaatgaacctgatcggcgtggcaagaggcgaaaacatccccgccgtgatcgccctgaccgaccccgagggctgcccactgagccggtttaaggatagcctgggaaacccaacccacatcctgagaatcggcgagagctataaggagaagcagcggaccatccaggccaagaaggaggtggagcagcggagagccggcggctacagccggaagtacgccagcaaagccaagaatctggcagacgatatggtgagaaacaccgctagagatctgctgtactacgccgtgacccaggatgccatgctgatcttcgccaacctgagccggggcttcggccggcagggcaagcggaccttcatggccgagagacagtacacacggatggaggactggctgaccgccaagctggcctacgagggcctgagcaagacctacctgtccaagacactggcccagtacacctccaagacatgcagcaactgtgggtttaccatcaccagcgccgactacgacagggtgctggagaagctgaagaagacagcaacaggctggatgaccacaattaacggcaaggagctgaaggtggagggccagattacctactacaacagatacaagagacagaacgtagtcaaggacctgtccgtcgagctggatagactgagcgaagaatctgtgaacaacgacatctcctcctggacaaagggcagaagcggagaagctctgagcctcctgaagaaaagattctcccatagacccgtgcaggagaagttcgtgtgcctgaactgcggcttcgagacacacgcagccgagcaagccgccctgaacatcgccagatcctggctgttcctgcggagccaggagtacaagaaataccagacaaacaagacaaccggcaacaccgataagagagccttcgtcgagacctggcagtccttttaccggaagaagcttaaggaggtgtggaaacctgccgtgcggtctggcggatctggcggaggctccaccagccccaagaaaaagagaaaagtctaagctgccttctgcggggcttgccttctggccatgcccttcttctctcccttgcacctgtacctcttggtctttgaataaagcctgagtaggaaggctagcaaaaaaaaaaaaaaaaaaaaaaaaaaaaaaaaaaaaaaaaaaaaaaaaaaaaaaaaaaaaaaaaaaaaaaaaaaaaaaaagcccagccggctccccaacctctaccgaggagggcacctctgagtccgccacccccgagagcggccctggcacctccaccgagcccagcgagggcagcgcacccggcagccctgccggcagccccacctccacagaggagggaaccagcaccgagcccagcgaaggcagcgccccaggcaccagcaccgagcctagtgagcaggagattaaacggatcaacaagatcagaagaagacttgtgaaagacagcaacaccaagaaggccggcaagacaggccccatgaaaaccctgctggttagagtgatgacacccgatctgagagagcggctggaaaacctgagaaagaagcctgaaaatatcccccagcccatcagcaatacatctagagccaacctgaataagctgctgaccgattacaccgaaatgaagaaggcgatcctgcatgtgtactgggaagagttccagaaggaccctgtgggcctgatgagccgggtggcccagcctgccagcaagaagatcgatcagaacaagctgaaacctgagatggacgagaagggcaacctgaccaccgccggctttgcctgctctcagtgtggccagcccctgttcgtgtacaagctggagcaggtgtctgagaagggcaaggcttacaccaactacttcggacggtgcaatgtggccgagcacgaaaagctgatcctgctggcccagctgaagcccgagaaggatagcgacgaagccgtgacatatagcctgggaaagtttgggcagagggccctggatttctacagcattcatgtgaccaaggagtccacccaccccgtgaagcccctggcccagatcgccggaaacagatacgcctccggacctgtgggaaaggccctgagcgacgcatgtatgggcacaatcgcctccttcctgtctaagtaccaggacatcatcatcgaacaccagaaggtggtgaagggcaaccagaagagactggagagcctgcgggagctggccggcaaggaaaacctggaataccctagcgtgaccctgccacctcagcctcacaccaaggagggcgttgatgcctacaacgaagtgatcgcccgggtgcgaatgtgggtgaacctgaacctgtggcagaagctgaagctaagcagagatgatgccaagcctctgctgagactgaagggattcccttcctttcctctggtcgagagacaggccaacgaagtggactggtgggacatggtgtgtaacgtgaagaagctgatcaacgagaaaaaggaggatggcaaggtgttttggcagaatctggctggctacaagagacaggaagccctgagaccatacctgagcagcgaggaagatcggaagaagggaaagaaattcgctcggtaccagctgggcgacctgctgctgcacctggaaaagaagcacggcgaggactggggaaaggtgtacgacgaggcctgggagcggattgacaagaaagtggaaggcctgagcaagcacatcaagctggaagaggaacggagaagcgaggacgcccagagcaaggccgccctgaccgactggctgcgggctaaggccagcttcgtgatcgagggcctgaaggaggccgacaaggacgagttctgcagatgcgagctgaagctgcagaagtggtacggggacctgcggggaaagcccttcgccatcgaagccgagaacagcatcctggacatcagcggcttcagcaagcagtacaactgtgccttcatctggcagaaggacggcgtgaagaagctgaacctgtacctgatcatcaactacttcaagggcggcaagctgcggttcaagaagatcaaacctgaagccttcgaagccaacagattctacaccgtgatcaacaaaaagagcggcgagatcgtgcccatggaggtgaacttcaacttcgacgaccccaacctgatcatcctgcctctggcctttggcaagagacagggcagagaattcatctggaacgacctgctgtccctggaaaccggcagcctgaagctggccaacggaagagtgatcgagaagacactgtacaacagaagaacccggcaggatgagcctgccctgttcgtggccctgaccttcgagcggcgggaggtcctggactcctccaatatcaaaccaatgaacctgatcggcgtggcaagaggcgaaaacatccccgccgtgatcgccctgaccgaccccgagggctgcccactgagccggtttaaggatagcctgggaaacccaacccacatcctgagaatcggcgagagctataaggagaagcagcggaccatccaggccaagaaggaggtggagcagcggagagccggcggctacagccggaagtacgccagcaaagccaagaatctggcagacgatatggtgagaaacaccgctagagatctgctgtactacgccgtgacccaggatgccatgctgatcttcgccaacctgagccggggcttcggccggcagggcaagcggaccttcatggccgagagacagtacacacggatggaggactggctgaccgccaagctggcctacgagggcctgagcaagacctacctgtccaagacactggcccagtacacctccaagacatgcagcaactgtgggtttaccatcaccagcgccgactacgacagggtgctggagaagctgaagaagacagcaacaggctggatgaccacaattaacggcaaggagctgaaggtggagggccagattacctactacaacagatacaagagacagaacgtagtcaaggacctgtccgtcgagctggatagactgagcgaagaatctgtgaacaacgacatctcctcctggacaaagggcagaagcggagaagctctgagcctcctgaagaaaagattctcccatagacccgtgcaggagaagttcgtgtgcctgaactgcggcttcgagacacacgcagccgagcaagccgccctgaacatcgccagatcctggctgttcctgcggagccaggagtacaagaaataccagacaaacaagacaaccggcaacaccgataagagagccttcgtcgagacctggcagtccttttaccggaagaagcttaaggaggtgtggaaacctgccgtgcggtctggcggatctggcggaggctccaccagccccaagaaaaagagaaaagtctaagctgccttctgcggggcttgccttctggccatgcccttcttctctcccttgcacctgtacctcttggtctttgaataaagcctgagtaggaaggctagcaaaaaaaaaaaaaaaaaaaaaaaaaaaaaaaaaaaaaaaaaaaaaaaaaaaaaaaaaaaaaaaaaaaaaaaaaaaaaaaa

SEQ ID NO: 9492 - RNA, 8787 nt, synthetic construct
  source 1..8787: mol_type = other RNA
aggaaataagagagaaaagaagagtaagaagaaatataagagccaccatggcccctaagaagaagcgtaaagtgagccggatgaaccacgaccaggagttcgacccccctaaggtgtaccctcccgtccccgccgagaagagaaagcccatccgggtcctgagcctgttcgatggcatcgccaccggtctgctggtgctgaaggacctgggcatccaggtggataggtacattgcctccgaggtgtgcgaggactccatcaccgtgggaatggtgcgtcatcagggcaagatcatgtacgtgggcgacgtgcggagcgtgacacagaagcatatccaggagtggggccctttcgacctggtgatcggcggcagcccttgcaatgacctgagcatcgtgaacccagcccggaagggcctgtacgagggaaccggcagactgttcttcgagttttacagactgctgcacgacgcccggcctaaggaaggcgacgaccggcccttcttttggctgttcgagaatgtggtggccatgggagtcagcgacaagcgggatattagccggttcctggagagcaaccccgtgatgatcgatgccaaggaagtgagcgccgcccaccgggccagatacttctggggcaatctgcctggcatgaacagacccctggccagcaccgtgaacgacaagctggagctgcaggagtgcctggagcacggccggatcgccaagttcagcaaggtgagaaccatcaccacccgaagcaacagcatcaaacaaggcaaggaccagcactttcctgtgttcatgaacgagaaggaggacatcctgtggtgtaccgagatggagagagtgttcgggttcccagtccactacacagatgtcagcaacatgtctagactggccagacagagactgctgggaagaagctggtccgtccctgtgatcagacacctgttcgcccctctgaaggagtacttcgcctgcgtgagcagcggcaacagcaacgccaacagccggggccccagcttctctagcggcctggtgccactgtccctgagagggagccacatgggccccatggagatctacaaaaccgtgagcgcctggaagcggcagcctgtgcgcgtgctgagcctgtttcggaatatcgataaagtcctgaaaagcctgggattcctggagagcggctctggctccggcggtggcaccctgaagtacgtggaggatgtgacaaacgtggtcagacgggatgtggagaagtggggccccttcgatctggtgtacggcagcacccaacccctgggcagctcttgtgaccggtgccctggctggtacatgtttcagttccaccggatcctgcagtacgccctgccgagacaggagtcccagcggccattcttttggattttcatggacaacttgctgctgaccgaggatgaccaggaaactaccactcggttcctgcagaccgaagccgtgaccctgcaggacgtgagaggccgggactaccagaacgccatgcgggtgtggtccaacatccctggactgaaaagcaagcacgcacctctgacccctaaagaagaggagtacctgcaggcccaggtgcggagcagaagcaagctggacgcccctaaggtggatctgctggtgaagaattgcctcctgcccctgagagagtacttcaagtatttcagccagaatagtctgcccctgggaggcagcggcggcggcgccaggggcaagagcaagagcaaggcccccgtgaccttcggcgacctggccatctacttcagccaggaggagtgggagtggctgagccccatccagaaggacctgtacgaggacgtgatgctggagaactacaggaacctggtgagcctgggcctgagcttcaggaggcccaacgtgatcaccctgctggagaagggcaaggccccctggatggtggagcccgtgaggaggaggagggcccccggcggcccaagcagcggcgcccctcctcccagcggcggcaggcggcccaagcagcggcgcccctcctcccagcggcggcagcccagccggctccccaacctctaccgaggagggcacctctgagtccgccacccccgagagcggccctggcacctccaccgagcccagcgagggcagcgcacccggcagccctgccggcagccccacctccacagaggagggaaccagcaccgagcccagcgaaggcagcgccccaggcaccagcaccgagcctagtgagcaggagattaaacggatcaacaagatcagaagaagacttgtgaaagacagcaacaccaagaaggccggcaagacaggccccatgaaaaccctgctggttagagtgatgacacccgatctgagagagcggctggaaaacctgagaaagaagcctgaaaatatcccccagcccatcagcaatacatctagagccaacctgaataagctgctgaccgattacaccgaaatgaagaaggcgatcctgcatgtgtactgggaagagttccagaaggaccctgtgggcctgatgagccgggtggcccagcctgccagcaagaagatcgatcagaacaagctgaaacctgagatggacgagaagggcaacctgaccaccgccggctttgcctgctctcagtgtggccagcccctgttcgtgtacaagctggagcaggtgtctgagaagggcaaggcttacaccaactacttcggacggtgcaatgtggccgagcacgaaaagctgatcctgctggcccagctgaagcccgagaaggatagcgacgaagccgtgacatatagcctgggaaagtttgggcagagggccctggatttctacagcattcatgtgaccaaggagtccacccaccccgtgaagcccctggcccagatcgccggaaacagatacgcctccggacctgtgggaaaggccctgagcgacgcatgtatgggcacaatcgcctccttcctgtctaagtaccaggacatcatcatcgaacaccagaaggtggtgaagggcaaccagaagagactggagagcctgcgggagctggccggcaaggaaaacctggaataccctagcgtgaccctgccacctcagcctcacaccaaggagggcgttgatgcctacaacgaagtgatcgcccgggtgcgaatgtgggtgaacctgaacctgtggcagaagctgaagctaagcagagatgatgccaagcctctgctgagactgaagggattcccttcctttcctctggtcgagagacaggccaacgaagtggactggtgggacatggtgtgtaacgtgaagaagctgatcaacgagaaaaaggaggatggcaaggtgttttggcagaatctggctggctacaagagacaggaagccctgagaccatacctgagcagcgaggaagatcggaagaagggaaagaaattcgctcggtaccagctgggcgacctgctgctgcacctggaaaagaagcacggcgaggactggggaaaggtgtacgacgaggcctgggagcggattgacaagaaagtggaaggcctgagcaagcacatcaagctggaagaggaacggagaagcgaggacgcccagagcaaggccgccctgaccgactggctgcgggctaaggccagcttcgtgatcgagggcctgaaggaggccgacaaggacgagttctgcagatgcgagctgaagctgcagaagtggtacggggacctgcggggaaagcccttcgccatcgaagccgagaacagcatcctggacatcagcggcttcagcaagcagtacaactgtgccttcatctggcagaaggacggcgtgaagaagctgaacctgtacctgatcatcaactacttcaagggcggcaagctgcggttcaagaagatcaaacctgaagccttcgaagccaacagattctacaccgtgatcaacaaaaagagcggcgagatcgtgcccatggaggtgaacttcaacttcgacgaccccaacctgatcatcctgcctctggcctttggcaagagacagggcagagaattcatctggaacgacctgctgtccctggaaaccggcagcctgaagctggccaacggaagagtgatcgagaagacactgtacaacagaagaacccggcaggatgagcctgccctgttcgtggccctgaccttcgagcggcgggaggtcctggactcctccaatatcaaaccaatgaacctgatcggcgtggcaagaggcgaaaacatccccgccgtgatcgccctgaccgaccccgagggctgcccactgagccggtttaaggatagcctgggaaacccaacccacatcctgagaatcggcgagagctataaggagaagcagcggaccatccaggccaagaaggaggtggagcagcggagagccggcggctacagccggaagtacgccagcaaagccaagaatctggcagacgatatggtgagaaacaccgctagagatctgctgtactacgccgtgacccaggatgccatgctgatcttcgccaacctgagccggggcttcggccggcagggcaagcggaccttcatggccgagagacagtacacacggatggaggactggctgaccgccaagctggcctacgagggcctgagcaagacctacctgtccaagacactggcccagtacacctccaagacatgcagcaactgtgggtttaccatcaccagcgccgactacgacagggtgctggagaagctgaagaagacagcaacaggctggatgaccacaattaacggcaaggagctgaaggtggagggccagattacctactacaacagatacaagagacagaacgtagtcaaggacctgtccgtcgagctggatagactgagcgaagaatctgtgaacaacgacatctcctcctggacaaagggcagaagcggagaagctctgagcctcctgaagaaaagattctcccatagacccgtgcaggagaagttcgtgtgcctgaactgcggcttcgagacacacgcagccgagcaagccgccctgaacatcgccagatcctggctgttcctgcggagccaggagtacaagaaataccagacaaacaagacaaccggcaacaccgataagagagccttcgtcgagacctggcagtccttttaccggaagaagcttaaggaggtgtggaaacctgccgtgcggtctggcggatctggcggaggctccaccagccccaagaaaaagagaaaagtctaagctgccttctgcggggcttgccttctggccatgcccttcttctctcccttgcacctgtacctcttggtctttgaataaagcctgagtaggaaggctagcaaaaaaaaaaaaaaaaaaaaaaaaaaaaaaaaaaaaaaaaaaaaaaaaaaaaaaaaaaaaaaaaaaaaaaaaaaaaaaaagcccagccggctccccaacctctaccgaggagggcacctctgagtccgccacccccgagagcggccctggcacctccaccgagcccagcgagggcagcgcacccggcagccctgccggcagccccacctccacagaggagggaaccagcaccgagcccagcgaaggcagcgccccaggcaccagcaccgagcctagtgagcaggagattaaacggatcaacaagatcagaagaagacttgtgaaagacagcaacaccaagaaggccggcaagacaggccccatgaaaaccctgctggttagagtgatgacacccgatctgagagagcggctggaaaacctgagaaagaagcctgaaaatatcccccagcccatcagcaatacatctagagccaacctgaataagctgctgaccgattacaccgaaatgaagaaggcgatcctgcatgtgtactgggaagagttccagaaggaccctgtgggcctgatgagccgggtggcccagcctgccagcaagaagatcgatcagaacaagctgaaacctgagatggacgagaagggcaacctgaccaccgccggctttgcctgctctcagtgtggccagcccctgttcgtgtacaagctggagcaggtgtctgagaagggcaaggcttacaccaactacttcggacggtgcaatgtggccgagcacgaaaagctgatcctgctggcccagctgaagcccgagaaggatagcgacgaagccgtgacatatagcctgggaaagtttgggcagagggccctggatttctacagcattcatgtgaccaaggagtccacccaccccgtgaagcccctggcccagatcgccggaaacagatacgcctccggacctgtgggaaaggccctgagcgacgcatgtatgggcacaatcgcctccttcctgtctaagtaccaggacatcatcatcgaacaccagaaggtggtgaagggcaaccagaagagactggagagcctgcgggagctggccggcaaggaaaacctggaataccctagcgtgaccctgccacctcagcctcacaccaaggagggcgttgatgcctacaacgaagtgatcgcccgggtgcgaatgtgggtgaacctgaacctgtggcagaagctgaagctaagcagagatgatgccaagcctctgctgagactgaagggattcccttcctttcctctggtcgagagacaggccaacgaagtggactggtgggacatggtgtgtaacgtgaagaagctgatcaacgagaaaaaggaggatggcaaggtgttttggcagaatctggctggctacaagagacaggaagccctgagaccatacctgagcagcgaggaagatcggaagaagggaaagaaattcgctcggtaccagctgggcgacctgctgctgcacctggaaaagaagcacggcgaggactggggaaaggtgtacgacgaggcctgggagcggattgacaagaaagtggaaggcctgagcaagcacatcaagctggaagaggaacggagaagcgaggacgcccagagcaaggccgccctgaccgactggctgcgggctaaggccagcttcgtgatcgagggcctgaaggaggccgacaaggacgagttctgcagatgcgagctgaagctgcagaagtggtacggggacctgcggggaaagcccttcgccatcgaagccgagaacagcatcctggacatcagcggcttcagcaagcagtacaactgtgccttcatctggcagaaggacggcgtgaagaagctgaacctgtacctgatcatcaactacttcaagggcggcaagctgcggttcaagaagatcaaacctgaagccttcgaagccaacagattctacaccgtgatcaacaaaaagagcggcgagatcgtgcccatggaggtgaacttcaacttcgacgaccccaacctgatcatcctgcctctggcctttggcaagagacagggcagagaattcatctggaacgacctgctgtccctggaaaccggcagcctgaagctggccaacggaagagtgatcgagaagacactgtacaacagaagaacccggcaggatgagcctgccctgttcgtggccctgaccttcgagcggcgggaggtcctggactcctccaatatcaaaccaatgaacctgatcggcgtggcaagaggcgaaaacatccccgccgtgatcgccctgaccgaccccgagggctgcccactgagccggtttaaggatagcctgggaaacccaacccacatcctgagaatcggcgagagctataaggagaagcagcggaccatccaggccaagaaggaggtggagcagcggagagccggcggctacagccggaagtacgccagcaaagccaagaatctggcagacgatatggtgagaaacaccgctagagatctgctgtactacgccgtgacccaggatgccatgctgatcttcgccaacctgagccggggcttcggccggcagggcaagcggaccttcatggccgagagacagtacacacggatggaggactggctgaccgccaagctggcctacgagggcctgagcaagacctacctgtccaagacactggcccagtacacctccaagacatgcagcaactgtgggtttaccatcaccagcgccgactacgacagggtgctggagaagctgaagaagacagcaacaggctggatgaccacaattaacggcaaggagctgaaggtggagggccagattacctactacaacagatacaagagacagaacgtagtcaaggacctgtccgtcgagctggatagactgagcgaagaatctgtgaacaacgacatctcctcctggacaaagggcagaagcggagaagctctgagcctcctgaagaaaagattctcccatagacccgtgcaggagaagttcgtgtgcctgaactgcggcttcgagacacacgcagccgagcaagccgccctgaacatcgccagatcctggctgttcctgcggagccaggagtacaagaaataccagacaaacaagacaaccggcaacaccgataagagagccttcgtcgagacctggcagtccttttaccggaagaagcttaaggaggtgtggaaacctgccgtgcggtctggcggatctggcggaggctccaccagccccaagaaaaagagaaaagtctaagctgccttctgcggggcttgccttctggccatgcccttcttctctcccttgcacctgtacctcttggtctttgaataaagcctgagtaggaaggctagcaaaaaaaaaaaaaaaaaaaaaaaaaaaaaaaaaaaaaaaaaaaaaaaaaaaaaaaaaaaaaaaaaaaaaaaaaaaaaaaa

SEQ ID NO: 9493 - RNA, 8787 nt, synthetic construct
  source 1..8787: mol_type = other RNA
aggaaataagagagaaaagaagagtaagaagaaatataagagccaccatggcccctaagaagaagcgtaaagtgagccggatgaaccacgaccaggagttcgacccccctaaggtgtaccctcccgtccccgccgagaagagaaagcccatccgggtcctgagcctgttcgatggcatcgccaccggtctgctggtgctgaaggacctgggcatccaggtggataggtacattgcctccgaggtgtgcgaggactccatcaccgtgggaatggtgcgtcatcagggcaagatcatgtacgtgggcgacgtgcggagcgtgacacagaagcatatccaggagtggggccctttcgacctggtgatcggcggcagcccttgcaatgacctgagcatcgtgaacccagcccggaagggcctgtacgagggaaccggcagactgttcttcgagttttacagactgctgcacgacgcccggcctaaggaaggcgacgaccggcccttcttttggctgttcgagaatgtggtggccatgggagtcagcgacaagcgggatattagccggttcctggagagcaaccccgtgatgatcgatgccaaggaagtgagcgccgcccaccgggccagatacttctggggcaatctgcctggcatgaacagacccctggccagcaccgtgaacgacaagctggagctgcaggagtgcctggagcacggccggatcgccaagttcagcaaggtgagaaccatcaccacccgaagcaacagcatcaaacaaggcaaggaccagcactttcctgtgttcatgaacgagaaggaggacatcctgtggtgtaccgagatggagagagtgttcgggttcccagtccactacacagatgtcagcaacatgtctagactggccagacagagactgctgggaagaagctggtccgtccctgtgatcagacacctgttcgcccctctgaaggagtacttcgcctgcgtgagcagcggcaacagcaacgccaacagccggggccccagcttctctagcggcctggtgccactgtccctgagagggagccacatgggccccatggagatctacaaaaccgtgagcgcctggaagcggcagcctgtgcgcgtgctgagcctgtttcggaatatcgataaagtcctgaaaagcctgggattcctggagagcggctctggctccggcggtggcaccctgaagtacgtggaggatgtgacaaacgtggtcagacgggatgtggagaagtggggccccttcgatctggtgtacggcagcacccaacccctgggcagctcttgtgaccggtgccctggctggtacatgtttcagttccaccggatcctgcagtacgccctgccgagacaggagtcccagcggccattcttttggattttcatggacaacttgctgctgaccgaggatgaccaggaaactaccactcggttcctgcagaccgaagccgtgaccctgcaggacgtgagaggccgggactaccagaacgccatgcgggtgtggtccaacatccctggactgaaaagcaagcacgcacctctgacccctaaagaagaggagtacctgcaggcccaggtgcggagcagaagcaagctggacgcccctaaggtggatctgctggtgaagaattgcctcctgcccctgagagagtacttcaagtatttcagccagaatagtctgcccctgggaggcagcggcggcggcatggtgcaggagagcgtgaccttcaaggacgtggccgtgctgttcacccaggaggagtggggccagctgagccccgcccagagggccctgtacagggacgtgatgctggagaactacagcaacctggtgagcctgggcctgctgggccccaagcccgacatgttcagccagctggagaagagggaggtgtggatgcccgaggacacccccggcggcttctgcctggactggatgaccatgcccggcggcccaagcagcggcgcccctcctcccagcggcggcaggcggcccaagcagcggcgcccctcctcccagcggcggcagcccagccggctccccaacctctaccgaggagggcacctctgagtccgccacccccgagagcggccctggcacctccaccgagcccagcgagggcagcgcacccggcagccctgccggcagccccacctccacagaggagggaaccagcaccgagcccagcgaaggcagcgccccaggcaccagcaccgagcctagtgagcaggagattaaacggatcaacaagatcagaagaagacttgtgaaagacagcaacaccaagaaggccggcaagacaggccccatgaaaaccctgctggttagagtgatgacacccgatctgagagagcggctggaaaacctgagaaagaagcctgaaaatatcccccagcccatcagcaatacatctagagccaacctgaataagctgctgaccgattacaccgaaatgaagaaggcgatcctgcatgtgtactgggaagagttccagaaggaccctgtgggcctgatgagccgggtggcccagcctgccagcaagaagatcgatcagaacaagctgaaacctgagatggacgagaagggcaacctgaccaccgccggctttgcctgctctcagtgtggccagcccctgttcgtgtacaagctggagcaggtgtctgagaagggcaaggcttacaccaactacttcggacggtgcaatgtggccgagcacgaaaagctgatcctgctggcccagctgaagcccgagaaggatagcgacgaagccgtgacatatagcctgggaaagtttgggcagagggccctggatttctacagcattcatgtgaccaaggagtccacccaccccgtgaagcccctggcccagatcgccggaaacagatacgcctccggacctgtgggaaaggccctgagcgacgcatgtatgggcacaatcgcctccttcctgtctaagtaccaggacatcatcatcgaacaccagaaggtggtgaagggcaaccagaagagactggagagcctgcgggagctggccggcaaggaaaacctggaataccctagcgtgaccctgccacctcagcctcacaccaaggagggcgttgatgcctacaacgaagtgatcgcccgggtgcgaatgtgggtgaacctgaacctgtggcagaagctgaagctaagcagagatgatgccaagcctctgctgagactgaagggattcccttcctttcctctggtcgagagacaggccaacgaagtggactggtgggacatggtgtgtaacgtgaagaagctgatcaacgagaaaaaggaggatggcaaggtgttttggcagaatctggctggctacaagagacaggaagccctgagaccatacctgagcagcgaggaagatcggaagaagggaaagaaattcgctcggtaccagctgggcgacctgctgctgcacctggaaaagaagcacggcgaggactggggaaaggtgtacgacgaggcctgggagcggattgacaagaaagtggaaggcctgagcaagcacatcaagctggaagaggaacggagaagcgaggacgcccagagcaaggccgccctgaccgactggctgcgggctaaggccagcttcgtgatcgagggcctgaaggaggccgacaaggacgagttctgcagatgcgagctgaagctgcagaagtggtacggggacctgcggggaaagcccttcgccatcgaagccgagaacagcatcctggacatcagcggcttcagcaagcagtacaactgtgccttcatctggcagaaggacggcgtgaagaagctgaacctgtacctgatcatcaactacttcaagggcggcaagctgcggttcaagaagatcaaacctgaagccttcgaagccaacagattctacaccgtgatcaacaaaaagagcggcgagatcgtgcccatggaggtgaacttcaacttcgacgaccccaacctgatcatcctgcctctggcctttggcaagagacagggcagagaattcatctggaacgacctgctgtccctggaaaccggcagcctgaagctggccaacggaagagtgatcgagaagacactgtacaacagaagaacccggcaggatgagcctgccctgttcgtggccctgaccttcgagcggcgggaggtcctggactcctccaatatcaaaccaatgaacctgatcggcgtggcaagaggcgaaaacatccccgccgtgatcgccctgaccgaccccgagggctgcccactgagccggtttaaggatagcctgggaaacccaacccacatcctgagaatcggcgagagctataaggagaagcagcggaccatccaggccaagaaggaggtggagcagcggagagccggcggctacagccggaagtacgccagcaaagccaagaatctggcagacgatatggtgagaaacaccgctagagatctgctgtactacgccgtgacccaggatgccatgctgatcttcgccaacctgagccggggcttcggccggcagggcaagcggaccttcatggccgagagacagtacacacggatggaggactggctgaccgccaagctggcctacgagggcctgagcaagacctacctgtccaagacactggcccagtacacctccaagacatgcagcaactgtgggtttaccatcaccagcgccgactacgacagggtgctggagaagctgaagaagacagcaacaggctggatgaccacaattaacggcaaggagctgaaggtggagggccagattacctactacaacagatacaagagacagaacgtagtcaaggacctgtccgtcgagctggatagactgagcgaagaatctgtgaacaacgacatctcctcctggacaaagggcagaagcggagaagctctgagcctcctgaagaaaagattctcccatagacccgtgcaggagaagttcgtgtgcctgaactgcggcttcgagacacacgcagccgagcaagccgccctgaacatcgccagatcctggctgttcctgcggagccaggagtacaagaaataccagacaaacaagacaaccggcaacaccgataagagagccttcgtcgagacctggcagtccttttaccggaagaagcttaaggaggtgtggaaacctgccgtgcggtctggcggatctggcggaggctccaccagccccaagaaaaagagaaaagtctaagctgccttctgcggggcttgccttctggccatgcccttcttctctcccttgcacctgtacctcttggtctttgaataaagcctgagtaggaaggctagcaaaaaaaaaaaaaaaaaaaaaaaaaaaaaaaaaaaaaaaaaaaaaaaaaaaaaaaaaaaaaaaaaaaaaaaaaaaaaaaagcccagccggctccccaacctctaccgaggagggcacctctgagtccgccacccccgagagcggccctggcacctccaccgagcccagcgagggcagcgcacccggcagccctgccggcagccccacctccacagaggagggaaccagcaccgagcccagcgaaggcagcgccccaggcaccagcaccgagcctagtgagcaggagattaaacggatcaacaagatcagaagaagacttgtgaaagacagcaacaccaagaaggccggcaagacaggccccatgaaaaccctgctggttagagtgatgacacccgatctgagagagcggctggaaaacctgagaaagaagcctgaaaatatcccccagcccatcagcaatacatctagagccaacctgaataagctgctgaccgattacaccgaaatgaagaaggcgatcctgcatgtgtactgggaagagttccagaaggaccctgtgggcctgatgagccgggtggcccagcctgccagcaagaagatcgatcagaacaagctgaaacctgagatggacgagaagggcaacctgaccaccgccggctttgcctgctctcagtgtggccagcccctgttcgtgtacaagctggagcaggtgtctgagaagggcaaggcttacaccaactacttcggacggtgcaatgtggccgagcacgaaaagctgatcctgctggcccagctgaagcccgagaaggatagcgacgaagccgtgacatatagcctgggaaagtttgggcagagggccctggatttctacagcattcatgtgaccaaggagtccacccaccccgtgaagcccctggcccagatcgccggaaacagatacgcctccggacctgtgggaaaggccctgagcgacgcatgtatgggcacaatcgcctccttcctgtctaagtaccaggacatcatcatcgaacaccagaaggtggtgaagggcaaccagaagagactggagagcctgcgggagctggccggcaaggaaaacctggaataccctagcgtgaccctgccacctcagcctcacaccaaggagggcgttgatgcctacaacgaagtgatcgcccgggtgcgaatgtgggtgaacctgaacctgtggcagaagctgaagctaagcagagatgatgccaagcctctgctgagactgaagggattcccttcctttcctctggtcgagagacaggccaacgaagtggactggtgggacatggtgtgtaacgtgaagaagctgatcaacgagaaaaaggaggatggcaaggtgttttggcagaatctggctggctacaagagacaggaagccctgagaccatacctgagcagcgaggaagatcggaagaagggaaagaaattcgctcggtaccagctgggcgacctgctgctgcacctggaaaagaagcacggcgaggactggggaaaggtgtacgacgaggcctgggagcggattgacaagaaagtggaaggcctgagcaagcacatcaagctggaagaggaacggagaagcgaggacgcccagagcaaggccgccctgaccgactggctgcgggctaaggccagcttcgtgatcgagggcctgaaggaggccgacaaggacgagttctgcagatgcgagctgaagctgcagaagtggtacggggacctgcggggaaagcccttcgccatcgaagccgagaacagcatcctggacatcagcggcttcagcaagcagtacaactgtgccttcatctggcagaaggacggcgtgaagaagctgaacctgtacctgatcatcaactacttcaagggcggcaagctgcggttcaagaagatcaaacctgaagccttcgaagccaacagattctacaccgtgatcaacaaaaagagcggcgagatcgtgcccatggaggtgaacttcaacttcgacgaccccaacctgatcatcctgcctctggcctttggcaagagacagggcagagaattcatctggaacgacctgctgtccctggaaaccggcagcctgaagctggccaacggaagagtgatcgagaagacactgtacaacagaagaacccggcaggatgagcctgccctgttcgtggccctgaccttcgagcggcgggaggtcctggactcctccaatatcaaaccaatgaacctgatcggcgtggcaagaggcgaaaacatccccgccgtgatcgccctgaccgaccccgagggctgcccactgagccggtttaaggatagcctgggaaacccaacccacatcctgagaatcggcgagagctataaggagaagcagcggaccatccaggccaagaaggaggtggagcagcggagagccggcggctacagccggaagtacgccagcaaagccaagaatctggcagacgatatggtgagaaacaccgctagagatctgctgtactacgccgtgacccaggatgccatgctgatcttcgccaacctgagccggggcttcggccggcagggcaagcggaccttcatggccgagagacagtacacacggatggaggactggctgaccgccaagctggcctacgagggcctgagcaagacctacctgtccaagacactggcccagtacacctccaagacatgcagcaactgtgggtttaccatcaccagcgccgactacgacagggtgctggagaagctgaagaagacagcaacaggctggatgaccacaattaacggcaaggagctgaaggtggagggccagattacctactacaacagatacaagagacagaacgtagtcaaggacctgtccgtcgagctggatagactgagcgaagaatctgtgaacaacgacatctcctcctggacaaagggcagaagcggagaagctctgagcctcctgaagaaaagattctcccatagacccgtgcaggagaagttcgtgtgcctgaactgcggcttcgagacacacgcagccgagcaagccgccctgaacatcgccagatcctggctgttcctgcggagccaggagtacaagaaataccagacaaacaagacaaccggcaacaccgataagagagccttcgtcgagacctggcagtccttttaccggaagaagcttaaggaggtgtggaaacctgccgtgcggtctggcggatctggcggaggctccaccagccccaagaaaaagagaaaagtctaagctgccttctgcggggcttgccttctggccatgcccttcttctctcccttgcacctgtacctcttggtctttgaataaagcctgagtaggaaggctagcaaaaaaaaaaaaaaaaaaaaaaaaaaaaaaaaaaaaaaaaaaaaaaaaaaaaaaaaaaaaaaaaaaaaaaaaaaaaaaaa

SEQ ID NO: 9494 - RNA, 8787 nt, synthetic construct
  source 1..8787: mol_type = other RNA
aggaaataagagagaaaagaagagtaagaagaaatataagagccaccatggcccctaagaagaagcgtaaagtgagccggatgaaccacgaccaggagttcgacccccctaaggtgtaccctcccgtccccgccgagaagagaaagcccatccgggtcctgagcctgttcgatggcatcgccaccggtctgctggtgctgaaggacctgggcatccaggtggataggtacattgcctccgaggtgtgcgaggactccatcaccgtgggaatggtgcgtcatcagggcaagatcatgtacgtgggcgacgtgcggagcgtgacacagaagcatatccaggagtggggccctttcgacctggtgatcggcggcagcccttgcaatgacctgagcatcgtgaacccagcccggaagggcctgtacgagggaaccggcagactgttcttcgagttttacagactgctgcacgacgcccggcctaaggaaggcgacgaccggcccttcttttggctgttcgagaatgtggtggccatgggagtcagcgacaagcgggatattagccggttcctggagagcaaccccgtgatgatcgatgccaaggaagtgagcgccgcccaccgggccagatacttctggggcaatctgcctggcatgaacagacccctggccagcaccgtgaacgacaagctggagctgcaggagtgcctggagcacggccggatcgccaagttcagcaaggtgagaaccatcaccacccgaagcaacagcatcaaacaaggcaaggaccagcactttcctgtgttcatgaacgagaaggaggacatcctgtggtgtaccgagatggagagagtgttcgggttcccagtccactacacagatgtcagcaacatgtctagactggccagacagagactgctgggaagaagctggtccgtccctgtgatcagacacctgttcgcccctctgaaggagtacttcgcctgcgtgagcagcggcaacagcaacgccaacagccggggccccagcttctctagcggcctggtgccactgtccctgagagggagccacatgggccccatggagatctacaaaaccgtgagcgcctggaagcggcagcctgtgcgcgtgctgagcctgtttcggaatatcgataaagtcctgaaaagcctgggattcctggagagcggctctggctccggcggtggcaccctgaagtacgtggaggatgtgacaaacgtggtcagacgggatgtggagaagtggggccccttcgatctggtgtacggcagcacccaacccctgggcagctcttgtgaccggtgccctggctggtacatgtttcagttccaccggatcctgcagtacgccctgccgagacaggagtcccagcggccattcttttggattttcatggacaacttgctgctgaccgaggatgaccaggaaactaccactcggttcctgcagaccgaagccgtgaccctgcaggacgtgagaggccgggactaccagaacgccatgcgggtgtggtccaacatccctggactgaaaagcaagcacgcacctctgacccctaaagaagaggagtacctgcaggcccaggtgcggagcagaagcaagctggacgcccctaaggtggatctgctggtgaagaattgcctcctgcccctgagagagtacttcaagtatttcagccagaatagtctgcccctgggaggcagcggcggcggcaccagcgagcccgtgagcttcgccgacgtggccgtgtacttcagccaggaggagtggggctgcctgcagcccgcccagagggccctgtacagggacgtgatgagggagacctacggccacctgggcgccctgggcttcaggggcaccaagcccgccctgatcagctgggtggaggaggaggccgagctgtggggccccgacgccggcccccccgagatgggcgagtgcctgaccgaggccgacggcggcccaagcagcggcgcccctcctcccagcggcggcaggcggcccaagcagcggcgcccctcctcccagcggcggcagcccagccggctccccaacctctaccgaggagggcacctctgagtccgccacccccgagagcggccctggcacctccaccgagcccagcgagggcagcgcacccggcagccctgccggcagccccacctccacagaggagggaaccagcaccgagcccagcgaaggcagcgccccaggcaccagcaccgagcctagtgagcaggagattaaacggatcaacaagatcagaagaagacttgtgaaagacagcaacaccaagaaggccggcaagacaggccccatgaaaaccctgctggttagagtgatgacacccgatctgagagagcggctggaaaacctgagaaagaagcctgaaaatatcccccagcccatcagcaatacatctagagccaacctgaataagctgctgaccgattacaccgaaatgaagaaggcgatcctgcatgtgtactgggaagagttccagaaggaccctgtgggcctgatgagccgggtggcccagcctgccagcaagaagatcgatcagaacaagctgaaacctgagatggacgagaagggcaacctgaccaccgccggctttgcctgctctcagtgtggccagcccctgttcgtgtacaagctggagcaggtgtctgagaagggcaaggcttacaccaactacttcggacggtgcaatgtggccgagcacgaaaagctgatcctgctggcccagctgaagcccgagaaggatagcgacgaagccgtgacatatagcctgggaaagtttgggcagagggccctggatttctacagcattcatgtgaccaaggagtccacccaccccgtgaagcccctggcccagatcgccggaaacagatacgcctccggacctgtgggaaaggccctgagcgacgcatgtatgggcacaatcgcctccttcctgtctaagtaccaggacatcatcatcgaacaccagaaggtggtgaagggcaaccagaagagactggagagcctgcgggagctggccggcaaggaaaacctggaataccctagcgtgaccctgccacctcagcctcacaccaaggagggcgttgatgcctacaacgaagtgatcgcccgggtgcgaatgtgggtgaacctgaacctgtggcagaagctgaagctaagcagagatgatgccaagcctctgctgagactgaagggattcccttcctttcctctggtcgagagacaggccaacgaagtggactggtgggacatggtgtgtaacgtgaagaagctgatcaacgagaaaaaggaggatggcaaggtgttttggcagaatctggctggctacaagagacaggaagccctgagaccatacctgagcagcgaggaagatcggaagaagggaaagaaattcgctcggtaccagctgggcgacctgctgctgcacctggaaaagaagcacggcgaggactggggaaaggtgtacgacgaggcctgggagcggattgacaagaaagtggaaggcctgagcaagcacatcaagctggaagaggaacggagaagcgaggacgcccagagcaaggccgccctgaccgactggctgcgggctaaggccagcttcgtgatcgagggcctgaaggaggccgacaaggacgagttctgcagatgcgagctgaagctgcagaagtggtacggggacctgcggggaaagcccttcgccatcgaagccgagaacagcatcctggacatcagcggcttcagcaagcagtacaactgtgccttcatctggcagaaggacggcgtgaagaagctgaacctgtacctgatcatcaactacttcaagggcggcaagctgcggttcaagaagatcaaacctgaagccttcgaagccaacagattctacaccgtgatcaacaaaaagagcggcgagatcgtgcccatggaggtgaacttcaacttcgacgaccccaacctgatcatcctgcctctggcctttggcaagagacagggcagagaattcatctggaacgacctgctgtccctggaaaccggcagcctgaagctggccaacggaagagtgatcgagaagacactgtacaacagaagaacccggcaggatgagcctgccctgttcgtggccctgaccttcgagcggcgggaggtcctggactcctccaatatcaaaccaatgaacctgatcggcgtggcaagaggcgaaaacatccccgccgtgatcgccctgaccgaccccgagggctgcccactgagccggtttaaggatagcctgggaaacccaacccacatcctgagaatcggcgagagctataaggagaagcagcggaccatccaggccaagaaggaggtggagcagcggagagccggcggctacagccggaagtacgccagcaaagccaagaatctggcagacgatatggtgagaaacaccgctagagatctgctgtactacgccgtgacccaggatgccatgctgatcttcgccaacctgagccggggcttcggccggcagggcaagcggaccttcatggccgagagacagtacacacggatggaggactggctgaccgccaagctggcctacgagggcctgagcaagacctacctgtccaagacactggcccagtacacctccaagacatgcagcaactgtgggtttaccatcaccagcgccgactacgacagggtgctggagaagctgaagaagacagcaacaggctggatgaccacaattaacggcaaggagctgaaggtggagggccagattacctactacaacagatacaagagacagaacgtagtcaaggacctgtccgtcgagctggatagactgagcgaagaatctgtgaacaacgacatctcctcctggacaaagggcagaagcggagaagctctgagcctcctgaagaaaagattctcccatagacccgtgcaggagaagttcgtgtgcctgaactgcggcttcgagacacacgcagccgagcaagccgccctgaacatcgccagatcctggctgttcctgcggagccaggagtacaagaaataccagacaaacaagacaaccggcaacaccgataagagagccttcgtcgagacctggcagtccttttaccggaagaagcttaaggaggtgtggaaacctgccgtgcggtctggcggatctggcggaggctccaccagccccaagaaaaagagaaaagtctaagctgccttctgcggggcttgccttctggccatgcccttcttctctcccttgcacctgtacctcttggtctttgaataaagcctgagtaggaaggctagcaaaaaaaaaaaaaaaaaaaaaaaaaaaaaaaaaaaaaaaaaaaaaaaaaaaaaaaaaaaaaaaaaaaaaaaaaaaaaaaagcccagccggctccccaacctctaccgaggagggcacctctgagtccgccacccccgagagcggccctggcacctccaccgagcccagcgagggcagcgcacccggcagccctgccggcagccccacctccacagaggagggaaccagcaccgagcccagcgaaggcagcgccccaggcaccagcaccgagcctagtgagcaggagattaaacggatcaacaagatcagaagaagacttgtgaaagacagcaacaccaagaaggccggcaagacaggccccatgaaaaccctgctggttagagtgatgacacccgatctgagagagcggctggaaaacctgagaaagaagcctgaaaatatcccccagcccatcagcaatacatctagagccaacctgaataagctgctgaccgattacaccgaaatgaagaaggcgatcctgcatgtgtactgggaagagttccagaaggaccctgtgggcctgatgagccgggtggcccagcctgccagcaagaagatcgatcagaacaagctgaaacctgagatggacgagaagggcaacctgaccaccgccggctttgcctgctctcagtgtggccagcccctgttcgtgtacaagctggagcaggtgtctgagaagggcaaggcttacaccaactacttcggacggtgcaatgtggccgagcacgaaaagctgatcctgctggcccagctgaagcccgagaaggatagcgacgaagccgtgacatatagcctgggaaagtttgggcagagggccctggatttctacagcattcatgtgaccaaggagtccacccaccccgtgaagcccctggcccagatcgccggaaacagatacgcctccggacctgtgggaaaggccctgagcgacgcatgtatgggcacaatcgcctccttcctgtctaagtaccaggacatcatcatcgaacaccagaaggtggtgaagggcaaccagaagagactggagagcctgcgggagctggccggcaaggaaaacctggaataccctagcgtgaccctgccacctcagcctcacaccaaggagggcgttgatgcctacaacgaagtgatcgcccgggtgcgaatgtgggtgaacctgaacctgtggcagaagctgaagctaagcagagatgatgccaagcctctgctgagactgaagggattcccttcctttcctctggtcgagagacaggccaacgaagtggactggtgggacatggtgtgtaacgtgaagaagctgatcaacgagaaaaaggaggatggcaaggtgttttggcagaatctggctggctacaagagacaggaagccctgagaccatacctgagcagcgaggaagatcggaagaagggaaagaaattcgctcggtaccagctgggcgacctgctgctgcacctggaaaagaagcacggcgaggactggggaaaggtgtacgacgaggcctgggagcggattgacaagaaagtggaaggcctgagcaagcacatcaagctggaagaggaacggagaagcgaggacgcccagagcaaggccgccctgaccgactggctgcgggctaaggccagcttcgtgatcgagggcctgaaggaggccgacaaggacgagttctgcagatgcgagctgaagctgcagaagtggtacggggacctgcggggaaagcccttcgccatcgaagccgagaacagcatcctggacatcagcggcttcagcaagcagtacaactgtgccttcatctggcagaaggacggcgtgaagaagctgaacctgtacctgatcatcaactacttcaagggcggcaagctgcggttcaagaagatcaaacctgaagccttcgaagccaacagattctacaccgtgatcaacaaaaagagcggcgagatcgtgcccatggaggtgaacttcaacttcgacgaccccaacctgatcatcctgcctctggcctttggcaagagacagggcagagaattcatctggaacgacctgctgtccctggaaaccggcagcctgaagctggccaacggaagagtgatcgagaagacactgtacaacagaagaacccggcaggatgagcctgccctgttcgtggccctgaccttcgagcggcgggaggtcctggactcctccaatatcaaaccaatgaacctgatcggcgtggcaagaggcgaaaacatccccgccgtgatcgccctgaccgaccccgagggctgcccactgagccggtttaaggatagcctgggaaacccaacccacatcctgagaatcggcgagagctataaggagaagcagcggaccatccaggccaagaaggaggtggagcagcggagagccggcggctacagccggaagtacgccagcaaagccaagaatctggcagacgatatggtgagaaacaccgctagagatctgctgtactacgccgtgacccaggatgccatgctgatcttcgccaacctgagccggggcttcggccggcagggcaagcggaccttcatggccgagagacagtacacacggatggaggactggctgaccgccaagctggcctacgagggcctgagcaagacctacctgtccaagacactggcccagtacacctccaagacatgcagcaactgtgggtttaccatcaccagcgccgactacgacagggtgctggagaagctgaagaagacagcaacaggctggatgaccacaattaacggcaaggagctgaaggtggagggccagattacctactacaacagatacaagagacagaacgtagtcaaggacctgtccgtcgagctggatagactgagcgaagaatctgtgaacaacgacatctcctcctggacaaagggcagaagcggagaagctctgagcctcctgaagaaaagattctcccatagacccgtgcaggagaagttcgtgtgcctgaactgcggcttcgagacacacgcagccgagcaagccgccctgaacatcgccagatcctggctgttcctgcggagccaggagtacaagaaataccagacaaacaagacaaccggcaacaccgataagagagccttcgtcgagacctggcagtccttttaccggaagaagcttaaggaggtgtggaaacctgccgtgcggtctggcggatctggcggaggctccaccagccccaagaaaaagagaaaagtctaagctgccttctgcggggcttgccttctggccatgcccttcttctctcccttgcacctgtacctcttggtctttgaataaagcctgagtaggaaggctagcaaaaaaaaaaaaaaaaaaaaaaaaaaaaaaaaaaaaaaaaaaaaaaaaaaaaaaaaaaaaaaaaaaaaaaaaaaaaaaaa

SEQ ID NO: 9495 - RNA, 8787 nt, synthetic construct
  source 1..8787: mol_type = other RNA
aggaaataagagagaaaagaagagtaagaagaaatataagagccaccatggcccctaagaagaagcgtaaagtgagccggatgaaccacgaccaggagttcgacccccctaaggtgtaccctcccgtccccgccgagaagagaaagcccatccgggtcctgagcctgttcgatggcatcgccaccggtctgctggtgctgaaggacctgggcatccaggtggataggtacattgcctccgaggtgtgcgaggactccatcaccgtgggaatggtgcgtcatcagggcaagatcatgtacgtgggcgacgtgcggagcgtgacacagaagcatatccaggagtggggccctttcgacctggtgatcggcggcagcccttgcaatgacctgagcatcgtgaacccagcccggaagggcctgtacgagggaaccggcagactgttcttcgagttttacagactgctgcacgacgcccggcctaaggaaggcgacgaccggcccttcttttggctgttcgagaatgtggtggccatgggagtcagcgacaagcgggatattagccggttcctggagagcaaccccgtgatgatcgatgccaaggaagtgagcgccgcccaccgggccagatacttctggggcaatctgcctggcatgaacagacccctggccagcaccgtgaacgacaagctggagctgcaggagtgcctggagcacggccggatcgccaagttcagcaaggtgagaaccatcaccacccgaagcaacagcatcaaacaaggcaaggaccagcactttcctgtgttcatgaacgagaaggaggacatcctgtggtgtaccgagatggagagagtgttcgggttcccagtccactacacagatgtcagcaacatgtctagactggccagacagagactgctgggaagaagctggtccgtccctgtgatcagacacctgttcgcccctctgaaggagtacttcgcctgcgtgagcagcggcaacagcaacgccaacagccggggccccagcttctctagcggcctggtgccactgtccctgagagggagccacatgggccccatggagatctacaaaaccgtgagcgcctggaagcggcagcctgtgcgcgtgctgagcctgtttcggaatatcgataaagtcctgaaaagcctgggattcctggagagcggctctggctccggcggtggcaccctgaagtacgtggaggatgtgacaaacgtggtcagacgggatgtggagaagtggggccccttcgatctggtgtacggcagcacccaacccctgggcagctcttgtgaccggtgccctggctggtacatgtttcagttccaccggatcctgcagtacgccctgccgagacaggagtcccagcggccattcttttggattttcatggacaacttgctgctgaccgaggatgaccaggaaactaccactcggttcctgcagaccgaagccgtgaccctgcaggacgtgagaggccgggactaccagaacgccatgcgggtgtggtccaacatccctggactgaaaagcaagcacgcacctctgacccctaaagaagaggagtacctgcaggcccaggtgcggagcagaagcaagctggacgcccctaaggtggatctgctggtgaagaattgcctcctgcccctgagagagtacttcaagtatttcagccagaatagtctgcccctgggaggcagcggcggcggcgcccagaccctgctgaccttcagggacgtggccatcgagttcagcctggaggagtggaagtgcctggacctggcccagcagaacctgtacagggacgtgatgctggagaactacaggaacctgttcagcgtgggcctgaccgtgagcaagcccggcctgatcacctgcctggagcagaggaaggagccctggaacgtgaagaggcaggaggccgccgacggccaccccgccatgagcagctgcggcggcccaagcagcggcgcccctcctcccagcggcggcaggcggcccaagcagcggcgcccctcctcccagcggcggcagcccagccggctccccaacctctaccgaggagggcacctctgagtccgccacccccgagagcggccctggcacctccaccgagcccagcgagggcagcgcacccggcagccctgccggcagccccacctccacagaggagggaaccagcaccgagcccagcgaaggcagcgccccaggcaccagcaccgagcctagtgagcaggagattaaacggatcaacaagatcagaagaagacttgtgaaagacagcaacaccaagaaggccggcaagacaggccccatgaaaaccctgctggttagagtgatgacacccgatctgagagagcggctggaaaacctgagaaagaagcctgaaaatatcccccagcccatcagcaatacatctagagccaacctgaataagctgctgaccgattacaccgaaatgaagaaggcgatcctgcatgtgtactgggaagagttccagaaggaccctgtgggcctgatgagccgggtggcccagcctgccagcaagaagatcgatcagaacaagctgaaacctgagatggacgagaagggcaacctgaccaccgccggctttgcctgctctcagtgtggccagcccctgttcgtgtacaagctggagcaggtgtctgagaagggcaaggcttacaccaactacttcggacggtgcaatgtggccgagcacgaaaagctgatcctgctggcccagctgaagcccgagaaggatagcgacgaagccgtgacatatagcctgggaaagtttgggcagagggccctggatttctacagcattcatgtgaccaaggagtccacccaccccgtgaagcccctggcccagatcgccggaaacagatacgcctccggacctgtgggaaaggccctgagcgacgcatgtatgggcacaatcgcctccttcctgtctaagtaccaggacatcatcatcgaacaccagaaggtggtgaagggcaaccagaagagactggagagcctgcgggagctggccggcaaggaaaacctggaataccctagcgtgaccctgccacctcagcctcacaccaaggagggcgttgatgcctacaacgaagtgatcgcccgggtgcgaatgtgggtgaacctgaacctgtggcagaagctgaagctaagcagagatgatgccaagcctctgctgagactgaagggattcccttcctttcctctggtcgagagacaggccaacgaagtggactggtgggacatggtgtgtaacgtgaagaagctgatcaacgagaaaaaggaggatggcaaggtgttttggcagaatctggctggctacaagagacaggaagccctgagaccatacctgagcagcgaggaagatcggaagaagggaaagaaattcgctcggtaccagctgggcgacctgctgctgcacctggaaaagaagcacggcgaggactggggaaaggtgtacgacgaggcctgggagcggattgacaagaaagtggaaggcctgagcaagcacatcaagctggaagaggaacggagaagcgaggacgcccagagcaaggccgccctgaccgactggctgcgggctaaggccagcttcgtgatcgagggcctgaaggaggccgacaaggacgagttctgcagatgcgagctgaagctgcagaagtggtacggggacctgcggggaaagcccttcgccatcgaagccgagaacagcatcctggacatcagcggcttcagcaagcagtacaactgtgccttcatctggcagaaggacggcgtgaagaagctgaacctgtacctgatcatcaactacttcaagggcggcaagctgcggttcaagaagatcaaacctgaagccttcgaagccaacagattctacaccgtgatcaacaaaaagagcggcgagatcgtgcccatggaggtgaacttcaacttcgacgaccccaacctgatcatcctgcctctggcctttggcaagagacagggcagagaattcatctggaacgacctgctgtccctggaaaccggcagcctgaagctggccaacggaagagtgatcgagaagacactgtacaacagaagaacccggcaggatgagcctgccctgttcgtggccctgaccttcgagcggcgggaggtcctggactcctccaatatcaaaccaatgaacctgatcggcgtggcaagaggcgaaaacatccccgccgtgatcgccctgaccgaccccgagggctgcccactgagccggtttaaggatagcctgggaaacccaacccacatcctgagaatcggcgagagctataaggagaagcagcggaccatccaggccaagaaggaggtggagcagcggagagccggcggctacagccggaagtacgccagcaaagccaagaatctggcagacgatatggtgagaaacaccgctagagatctgctgtactacgccgtgacccaggatgccatgctgatcttcgccaacctgagccggggcttcggccggcagggcaagcggaccttcatggccgagagacagtacacacggatggaggactggctgaccgccaagctggcctacgagggcctgagcaagacctacctgtccaagacactggcccagtacacctccaagacatgcagcaactgtgggtttaccatcaccagcgccgactacgacagggtgctggagaagctgaagaagacagcaacaggctggatgaccacaattaacggcaaggagctgaaggtggagggccagattacctactacaacagatacaagagacagaacgtagtcaaggacctgtccgtcgagctggatagactgagcgaagaatctgtgaacaacgacatctcctcctggacaaagggcagaagcggagaagctctgagcctcctgaagaaaagattctcccatagacccgtgcaggagaagttcgtgtgcctgaactgcggcttcgagacacacgcagccgagcaagccgccctgaacatcgccagatcctggctgttcctgcggagccaggagtacaagaaataccagacaaacaagacaaccggcaacaccgataagagagccttcgtcgagacctggcagtccttttaccggaagaagcttaaggaggtgtggaaacctgccgtgcggtctggcggatctggcggaggctccaccagccccaagaaaaagagaaaagtctaagctgccttctgcggggcttgccttctggccatgcccttcttctctcccttgcacctgtacctcttggtctttgaataaagcctgagtaggaaggctagcaaaaaaaaaaaaaaaaaaaaaaaaaaaaaaaaaaaaaaaaaaaaaaaaaaaaaaaaaaaaaaaaaaaaaaaaaaaaaaaagcccagccggctccccaacctctaccgaggagggcacctctgagtccgccacccccgagagcggccctggcacctccaccgagcccagcgagggcagcgcacccggcagccctgccggcagccccacctccacagaggagggaaccagcaccgagcccagcgaaggcagcgccccaggcaccagcaccgagcctagtgagcaggagattaaacggatcaacaagatcagaagaagacttgtgaaagacagcaacaccaagaaggccggcaagacaggccccatgaaaaccctgctggttagagtgatgacacccgatctgagagagcggctggaaaacctgagaaagaagcctgaaaatatcccccagcccatcagcaatacatctagagccaacctgaataagctgctgaccgattacaccgaaatgaagaaggcgatcctgcatgtgtactgggaagagttccagaaggaccctgtgggcctgatgagccgggtggcccagcctgccagcaagaagatcgatcagaacaagctgaaacctgagatggacgagaagggcaacctgaccaccgccggctttgcctgctctcagtgtggccagcccctgttcgtgtacaagctggagcaggtgtctgagaagggcaaggcttacaccaactacttcggacggtgcaatgtggccgagcacgaaaagctgatcctgctggcccagctgaagcccgagaaggatagcgacgaagccgtgacatatagcctgggaaagtttgggcagagggccctggatttctacagcattcatgtgaccaaggagtccacccaccccgtgaagcccctggcccagatcgccggaaacagatacgcctccggacctgtgggaaaggccctgagcgacgcatgtatgggcacaatcgcctccttcctgtctaagtaccaggacatcatcatcgaacaccagaaggtggtgaagggcaaccagaagagactggagagcctgcgggagctggccggcaaggaaaacctggaataccctagcgtgaccctgccacctcagcctcacaccaaggagggcgttgatgcctacaacgaagtgatcgcccgggtgcgaatgtgggtgaacctgaacctgtggcagaagctgaagctaagcagagatgatgccaagcctctgctgagactgaagggattcccttcctttcctctggtcgagagacaggccaacgaagtggactggtgggacatggtgtgtaacgtgaagaagctgatcaacgagaaaaaggaggatggcaaggtgttttggcagaatctggctggctacaagagacaggaagccctgagaccatacctgagcagcgaggaagatcggaagaagggaaagaaattcgctcggtaccagctgggcgacctgctgctgcacctggaaaagaagcacggcgaggactggggaaaggtgtacgacgaggcctgggagcggattgacaagaaagtggaaggcctgagcaagcacatcaagctggaagaggaacggagaagcgaggacgcccagagcaaggccgccctgaccgactggctgcgggctaaggccagcttcgtgatcgagggcctgaaggaggccgacaaggacgagttctgcagatgcgagctgaagctgcagaagtggtacggggacctgcggggaaagcccttcgccatcgaagccgagaacagcatcctggacatcagcggcttcagcaagcagtacaactgtgccttcatctggcagaaggacggcgtgaagaagctgaacctgtacctgatcatcaactacttcaagggcggcaagctgcggttcaagaagatcaaacctgaagccttcgaagccaacagattctacaccgtgatcaacaaaaagagcggcgagatcgtgcccatggaggtgaacttcaacttcgacgaccccaacctgatcatcctgcctctggcctttggcaagagacagggcagagaattcatctggaacgacctgctgtccctggaaaccggcagcctgaagctggccaacggaagagtgatcgagaagacactgtacaacagaagaacccggcaggatgagcctgccctgttcgtggccctgaccttcgagcggcgggaggtcctggactcctccaatatcaaaccaatgaacctgatcggcgtggcaagaggcgaaaacatccccgccgtgatcgccctgaccgaccccgagggctgcccactgagccggtttaaggatagcctgggaaacccaacccacatcctgagaatcggcgagagctataaggagaagcagcggaccatccaggccaagaaggaggtggagcagcggagagccggcggctacagccggaagtacgccagcaaagccaagaatctggcagacgatatggtgagaaacaccgctagagatctgctgtactacgccgtgacccaggatgccatgctgatcttcgccaacctgagccggggcttcggccggcagggcaagcggaccttcatggccgagagacagtacacacggatggaggactggctgaccgccaagctggcctacgagggcctgagcaagacctacctgtccaagacactggcccagtacacctccaagacatgcagcaactgtgggtttaccatcaccagcgccgactacgacagggtgctggagaagctgaagaagacagcaacaggctggatgaccacaattaacggcaaggagctgaaggtggagggccagattacctactacaacagatacaagagacagaacgtagtcaaggacctgtccgtcgagctggatagactgagcgaagaatctgtgaacaacgacatctcctcctggacaaagggcagaagcggagaagctctgagcctcctgaagaaaagattctcccatagacccgtgcaggagaagttcgtgtgcctgaactgcggcttcgagacacacgcagccgagcaagccgccctgaacatcgccagatcctggctgttcctgcggagccaggagtacaagaaataccagacaaacaagacaaccggcaacaccgataagagagccttcgtcgagacctggcagtccttttaccggaagaagcttaaggaggtgtggaaacctgccgtgcggtctggcggatctggcggaggctccaccagccccaagaaaaagagaaaagtctaagctgccttctgcggggcttgccttctggccatgcccttcttctctcccttgcacctgtacctcttggtctttgaataaagcctgagtaggaaggctagcaaaaaaaaaaaaaaaaaaaaaaaaaaaaaaaaaaaaaaaaaaaaaaaaaaaaaaaaaaaaaaaaaaaaaaaaaaaaaaaa

SEQ ID NO: 9496 - RNA, 8787 nt, synthetic construct
  source 1..8787: mol_type = other RNA
aggaaataagagagaaaagaagagtaagaagaaatataagagccaccatggcccctaagaagaagcgtaaagtgagccggatgaaccacgaccaggagttcgacccccctaaggtgtaccctcccgtccccgccgagaagagaaagcccatccgggtcctgagcctgttcgatggcatcgccaccggtctgctggtgctgaaggacctgggcatccaggtggataggtacattgcctccgaggtgtgcgaggactccatcaccgtgggaatggtgcgtcatcagggcaagatcatgtacgtgggcgacgtgcggagcgtgacacagaagcatatccaggagtggggccctttcgacctggtgatcggcggcagcccttgcaatgacctgagcatcgtgaacccagcccggaagggcctgtacgagggaaccggcagactgttcttcgagttttacagactgctgcacgacgcccggcctaaggaaggcgacgaccggcccttcttttggctgttcgagaatgtggtggccatgggagtcagcgacaagcgggatattagccggttcctggagagcaaccccgtgatgatcgatgccaaggaagtgagcgccgcccaccgggccagatacttctggggcaatctgcctggcatgaacagacccctggccagcaccgtgaacgacaagctggagctgcaggagtgcctggagcacggccggatcgccaagttcagcaaggtgagaaccatcaccacccgaagcaacagcatcaaacaaggcaaggaccagcactttcctgtgttcatgaacgagaaggaggacatcctgtggtgtaccgagatggagagagtgttcgggttcccagtccactacacagatgtcagcaacatgtctagactggccagacagagactgctgggaagaagctggtccgtccctgtgatcagacacctgttcgcccctctgaaggagtacttcgcctgcgtgagcagcggcaacagcaacgccaacagccggggccccagcttctctagcggcctggtgccactgtccctgagagggagccacatgggccccatggagatctacaaaaccgtgagcgcctggaagcggcagcctgtgcgcgtgctgagcctgtttcggaatatcgataaagtcctgaaaagcctgggattcctggagagcggctctggctccggcggtggcaccctgaagtacgtggaggatgtgacaaacgtggtcagacgggatgtggagaagtggggccccttcgatctggtgtacggcagcacccaacccctgggcagctcttgtgaccggtgccctggctggtacatgtttcagttccaccggatcctgcagtacgccctgccgagacaggagtcccagcggccattcttttggattttcatggacaacttgctgctgaccgaggatgaccaggaaactaccactcggttcctgcagaccgaagccgtgaccctgcaggacgtgagaggccgggactaccagaacgccatgcgggtgtggtccaacatccctggactgaaaagcaagcacgcacctctgacccctaaagaagaggagtacctgcaggcccaggtgcggagcagaagcaagctggacgcccctaaggtggatctgctggtgaagaattgcctcctgcccctgagagagtacttcaagtatttcagccagaatagtctgcccctgggaggcagcggcggcggctgccaggagcccgtgagcttcgcccaggtggccgtgtacttcagcagggaggagtgggccctgctggaccccgcccagagggccctgtacagggacgtgatgctggagacctaccagtgcgtggccagcctggcccccctgcccgcccccaagcccgtgctgatcagccagctggagggcgaggaggacccctgcatcagcgacgtgaggagccccgaggccgtgcccggcgacctgagccccggcggcccaagcagcggcgcccctcctcccagcggcggcaggcggcccaagcagcggcgcccctcctcccagcggcggcagcccagccggctccccaacctctaccgaggagggcacctctgagtccgccacccccgagagcggccctggcacctccaccgagcccagcgagggcagcgcacccggcagccctgccggcagccccacctccacagaggagggaaccagcaccgagcccagcgaaggcagcgccccaggcaccagcaccgagcctagtgagcaggagattaaacggatcaacaagatcagaagaagacttgtgaaagacagcaacaccaagaaggccggcaagacaggccccatgaaaaccctgctggttagagtgatgacacccgatctgagagagcggctggaaaacctgagaaagaagcctgaaaatatcccccagcccatcagcaatacatctagagccaacctgaataagctgctgaccgattacaccgaaatgaagaaggcgatcctgcatgtgtactgggaagagttccagaaggaccctgtgggcctgatgagccgggtggcccagcctgccagcaagaagatcgatcagaacaagctgaaacctgagatggacgagaagggcaacctgaccaccgccggctttgcctgctctcagtgtggccagcccctgttcgtgtacaagctggagcaggtgtctgagaagggcaaggcttacaccaactacttcggacggtgcaatgtggccgagcacgaaaagctgatcctgctggcccagctgaagcccgagaaggatagcgacgaagccgtgacatatagcctgggaaagtttgggcagagggccctggatttctacagcattcatgtgaccaaggagtccacccaccccgtgaagcccctggcccagatcgccggaaacagatacgcctccggacctgtgggaaaggccctgagcgacgcatgtatgggcacaatcgcctccttcctgtctaagtaccaggacatcatcatcgaacaccagaaggtggtgaagggcaaccagaagagactggagagcctgcgggagctggccggcaaggaaaacctggaataccctagcgtgaccctgccacctcagcctcacaccaaggagggcgttgatgcctacaacgaagtgatcgcccgggtgcgaatgtgggtgaacctgaacctgtggcagaagctgaagctaagcagagatgatgccaagcctctgctgagactgaagggattcccttcctttcctctggtcgagagacaggccaacgaagtggactggtgggacatggtgtgtaacgtgaagaagctgatcaacgagaaaaaggaggatggcaaggtgttttggcagaatctggctggctacaagagacaggaagccctgagaccatacctgagcagcgaggaagatcggaagaagggaaagaaattcgctcggtaccagctgggcgacctgctgctgcacctggaaaagaagcacggcgaggactggggaaaggtgtacgacgaggcctgggagcggattgacaagaaagtggaaggcctgagcaagcacatcaagctggaagaggaacggagaagcgaggacgcccagagcaaggccgccctgaccgactggctgcgggctaaggccagcttcgtgatcgagggcctgaaggaggccgacaaggacgagttctgcagatgcgagctgaagctgcagaagtggtacggggacctgcggggaaagcccttcgccatcgaagccgagaacagcatcctggacatcagcggcttcagcaagcagtacaactgtgccttcatctggcagaaggacggcgtgaagaagctgaacctgtacctgatcatcaactacttcaagggcggcaagctgcggttcaagaagatcaaacctgaagccttcgaagccaacagattctacaccgtgatcaacaaaaagagcggcgagatcgtgcccatggaggtgaacttcaacttcgacgaccccaacctgatcatcctgcctctggcctttggcaagagacagggcagagaattcatctggaacgacctgctgtccctggaaaccggcagcctgaagctggccaacggaagagtgatcgagaagacactgtacaacagaagaacccggcaggatgagcctgccctgttcgtggccctgaccttcgagcggcgggaggtcctggactcctccaatatcaaaccaatgaacctgatcggcgtggcaagaggcgaaaacatccccgccgtgatcgccctgaccgaccccgagggctgcccactgagccggtttaaggatagcctgggaaacccaacccacatcctgagaatcggcgagagctataaggagaagcagcggaccatccaggccaagaaggaggtggagcagcggagagccggcggctacagccggaagtacgccagcaaagccaagaatctggcagacgatatggtgagaaacaccgctagagatctgctgtactacgccgtgacccaggatgccatgctgatcttcgccaacctgagccggggcttcggccggcagggcaagcggaccttcatggccgagagacagtacacacggatggaggactggctgaccgccaagctggcctacgagggcctgagcaagacctacctgtccaagacactggcccagtacacctccaagacatgcagcaactgtgggtttaccatcaccagcgccgactacgacagggtgctggagaagctgaagaagacagcaacaggctggatgaccacaattaacggcaaggagctgaaggtggagggccagattacctactacaacagatacaagagacagaacgtagtcaaggacctgtccgtcgagctggatagactgagcgaagaatctgtgaacaacgacatctcctcctggacaaagggcagaagcggagaagctctgagcctcctgaagaaaagattctcccatagacccgtgcaggagaagttcgtgtgcctgaactgcggcttcgagacacacgcagccgagcaagccgccctgaacatcgccagatcctggctgttcctgcggagccaggagtacaagaaataccagacaaacaagacaaccggcaacaccgataagagagccttcgtcgagacctggcagtccttttaccggaagaagcttaaggaggtgtggaaacctgccgtgcggtctggcggatctggcggaggctccaccagccccaagaaaaagagaaaagtctaagctgccttctgcggggcttgccttctggccatgcccttcttctctcccttgcacctgtacctcttggtctttgaataaagcctgagtaggaaggctagcaaaaaaaaaaaaaaaaaaaaaaaaaaaaaaaaaaaaaaaaaaaaaaaaaaaaaaaaaaaaaaaaaaaaaaaaaaaaaaaagcccagccggctccccaacctctaccgaggagggcacctctgagtccgccacccccgagagcggccctggcacctccaccgagcccagcgagggcagcgcacccggcagccctgccggcagccccacctccacagaggagggaaccagcaccgagcccagcgaaggcagcgccccaggcaccagcaccgagcctagtgagcaggagattaaacggatcaacaagatcagaagaagacttgtgaaagacagcaacaccaagaaggccggcaagacaggccccatgaaaaccctgctggttagagtgatgacacccgatctgagagagcggctggaaaacctgagaaagaagcctgaaaatatcccccagcccatcagcaatacatctagagccaacctgaataagctgctgaccgattacaccgaaatgaagaaggcgatcctgcatgtgtactgggaagagttccagaaggaccctgtgggcctgatgagccgggtggcccagcctgccagcaagaagatcgatcagaacaagctgaaacctgagatggacgagaagggcaacctgaccaccgccggctttgcctgctctcagtgtggccagcccctgttcgtgtacaagctggagcaggtgtctgagaagggcaaggcttacaccaactacttcggacggtgcaatgtggccgagcacgaaaagctgatcctgctggcccagctgaagcccgagaaggatagcgacgaagccgtgacatatagcctgggaaagtttgggcagagggccctggatttctacagcattcatgtgaccaaggagtccacccaccccgtgaagcccctggcccagatcgccggaaacagatacgcctccggacctgtgggaaaggccctgagcgacgcatgtatgggcacaatcgcctccttcctgtctaagtaccaggacatcatcatcgaacaccagaaggtggtgaagggcaaccagaagagactggagagcctgcgggagctggccggcaaggaaaacctggaataccctagcgtgaccctgccacctcagcctcacaccaaggagggcgttgatgcctacaacgaagtgatcgcccgggtgcgaatgtgggtgaacctgaacctgtggcagaagctgaagctaagcagagatgatgccaagcctctgctgagactgaagggattcccttcctttcctctggtcgagagacaggccaacgaagtggactggtgggacatggtgtgtaacgtgaagaagctgatcaacgagaaaaaggaggatggcaaggtgttttggcagaatctggctggctacaagagacaggaagccctgagaccatacctgagcagcgaggaagatcggaagaagggaaagaaattcgctcggtaccagctgggcgacctgctgctgcacctggaaaagaagcacggcgaggactggggaaaggtgtacgacgaggcctgggagcggattgacaagaaagtggaaggcctgagcaagcacatcaagctggaagaggaacggagaagcgaggacgcccagagcaaggccgccctgaccgactggctgcgggctaaggccagcttcgtgatcgagggcctgaaggaggccgacaaggacgagttctgcagatgcgagctgaagctgcagaagtggtacggggacctgcggggaaagcccttcgccatcgaagccgagaacagcatcctggacatcagcggcttcagcaagcagtacaactgtgccttcatctggcagaaggacggcgtgaagaagctgaacctgtacctgatcatcaactacttcaagggcggcaagctgcggttcaagaagatcaaacctgaagccttcgaagccaacagattctacaccgtgatcaacaaaaagagcggcgagatcgtgcccatggaggtgaacttcaacttcgacgaccccaacctgatcatcctgcctctggcctttggcaagagacagggcagagaattcatctggaacgacctgctgtccctggaaaccggcagcctgaagctggccaacggaagagtgatcgagaagacactgtacaacagaagaacccggcaggatgagcctgccctgttcgtggccctgaccttcgagcggcgggaggtcctggactcctccaatatcaaaccaatgaacctgatcggcgtggcaagaggcgaaaacatccccgccgtgatcgccctgaccgaccccgagggctgcccactgagccggtttaaggatagcctgggaaacccaacccacatcctgagaatcggcgagagctataaggagaagcagcggaccatccaggccaagaaggaggtggagcagcggagagccggcggctacagccggaagtacgccagcaaagccaagaatctggcagacgatatggtgagaaacaccgctagagatctgctgtactacgccgtgacccaggatgccatgctgatcttcgccaacctgagccggggcttcggccggcagggcaagcggaccttcatggccgagagacagtacacacggatggaggactggctgaccgccaagctggcctacgagggcctgagcaagacctacctgtccaagacactggcccagtacacctccaagacatgcagcaactgtgggtttaccatcaccagcgccgactacgacagggtgctggagaagctgaagaagacagcaacaggctggatgaccacaattaacggcaaggagctgaaggtggagggccagattacctactacaacagatacaagagacagaacgtagtcaaggacctgtccgtcgagctggatagactgagcgaagaatctgtgaacaacgacatctcctcctggacaaagggcagaagcggagaagctctgagcctcctgaagaaaagattctcccatagacccgtgcaggagaagttcgtgtgcctgaactgcggcttcgagacacacgcagccgagcaagccgccctgaacatcgccagatcctggctgttcctgcggagccaggagtacaagaaataccagacaaacaagacaaccggcaacaccgataagagagccttcgtcgagacctggcagtccttttaccggaagaagcttaaggaggtgtggaaacctgccgtgcggtctggcggatctggcggaggctccaccagccccaagaaaaagagaaaagtctaagctgccttctgcggggcttgccttctggccatgcccttcttctctcccttgcacctgtacctcttggtctttgaataaagcctgagtaggaaggctagcaaaaaaaaaaaaaaaaaaaaaaaaaaaaaaaaaaaaaaaaaaaaaaaaaaaaaaaaaaaaaaaaaaaaaaaaaaaaaaaa

SEQ ID NO: 9497 - RNA, 8820 nt, synthetic construct
  source 1..8820: mol_type = other RNA
aggaaataagagagaaaagaagagtaagaagaaatataagagccaccatggcccctaagaagaagcgtaaagtgagccggatgaaccacgaccaggagttcgacccccctaaggtgtaccctcccgtccccgccgagaagagaaagcccatccgggtcctgagcctgttcgatggcatcgccaccggtctgctggtgctgaaggacctgggcatccaggtggataggtacattgcctccgaggtgtgcgaggactccatcaccgtgggaatggtgcgtcatcagggcaagatcatgtacgtgggcgacgtgcggagcgtgacacagaagcatatccaggagtggggccctttcgacctggtgatcggcggcagcccttgcaatgacctgagcatcgtgaacccagcccggaagggcctgtacgagggaaccggcagactgttcttcgagttttacagactgctgcacgacgcccggcctaaggaaggcgacgaccggcccttcttttggctgttcgagaatgtggtggccatgggagtcagcgacaagcgggatattagccggttcctggagagcaaccccgtgatgatcgatgccaaggaagtgagcgccgcccaccgggccagatacttctggggcaatctgcctggcatgaacagacccctggccagcaccgtgaacgacaagctggagctgcaggagtgcctggagcacggccggatcgccaagttcagcaaggtgagaaccatcaccacccgaagcaacagcatcaaacaaggcaaggaccagcactttcctgtgttcatgaacgagaaggaggacatcctgtggtgtaccgagatggagagagtgttcgggttcccagtccactacacagatgtcagcaacatgtctagactggccagacagagactgctgggaagaagctggtccgtccctgtgatcagacacctgttcgcccctctgaaggagtacttcgcctgcgtgagcagcggcaacagcaacgccaacagccggggccccagcttctctagcggcctggtgccactgtccctgagagggagccacatgggccccatggagatctacaaaaccgtgagcgcctggaagcggcagcctgtgcgcgtgctgagcctgtttcggaatatcgataaagtcctgaaaagcctgggattcctggagagcggctctggctccggcggtggcaccctgaagtacgtggaggatgtgacaaacgtggtcagacgggatgtggagaagtggggccccttcgatctggtgtacggcagcacccaacccctgggcagctcttgtgaccggtgccctggctggtacatgtttcagttccaccggatcctgcagtacgccctgccgagacaggagtcccagcggccattcttttggattttcatggacaacttgctgctgaccgaggatgaccaggaaactaccactcggttcctgcagaccgaagccgtgaccctgcaggacgtgagaggccgggactaccagaacgccatgcgggtgtggtccaacatccctggactgaaaagcaagcacgcacctctgacccctaaagaagaggagtacctgcaggcccaggtgcggagcagaagcaagctggacgcccctaaggtggatctgctggtgaagaattgcctcctgcccctgagagagtacttcaagtatttcagccagaatagtctgcccctgggaggcagcggcggcggcgtgaagttcgacgaggtggccgtggtgttcagcgaggacgagtggaacctgctgaccgaccagcagaggggcctgtacatggaggtgatgaaggagaactacgagcacctgatctacctgggcttcgaggtgcccgtgatcctgagcctgctgcaggacggcggcggcatcggcagcgacaccgtgacccagagcaagagccagcaggtggccggcgccgaggagagcaagagcagcgtgaccctggagggccccatccccgagaccctgcccagcggcggcccaagcagcggcgcccctcctcccagcggcggcaggcggcccaagcagcggcgcccctcctcccagcggcggcagcccagccggctccccaacctctaccgaggagggcacctctgagtccgccacccccgagagcggccctggcacctccaccgagcccagcgagggcagcgcacccggcagccctgccggcagccccacctccacagaggagggaaccagcaccgagcccagcgaaggcagcgccccaggcaccagcaccgagcctagtgagcaggagattaaacggatcaacaagatcagaagaagacttgtgaaagacagcaacaccaagaaggccggcaagacaggccccatgaaaaccctgctggttagagtgatgacacccgatctgagagagcggctggaaaacctgagaaagaagcctgaaaatatcccccagcccatcagcaatacatctagagccaacctgaataagctgctgaccgattacaccgaaatgaagaaggcgatcctgcatgtgtactgggaagagttccagaaggaccctgtgggcctgatgagccgggtggcccagcctgccagcaagaagatcgatcagaacaagctgaaacctgagatggacgagaagggcaacctgaccaccgccggctttgcctgctctcagtgtggccagcccctgttcgtgtacaagctggagcaggtgtctgagaagggcaaggcttacaccaactacttcggacggtgcaatgtggccgagcacgaaaagctgatcctgctggcccagctgaagcccgagaaggatagcgacgaagccgtgacatatagcctgggaaagtttgggcagagggccctggatttctacagcattcatgtgaccaaggagtccacccaccccgtgaagcccctggcccagatcgccggaaacagatacgcctccggacctgtgggaaaggccctgagcgacgcatgtatgggcacaatcgcctccttcctgtctaagtaccaggacatcatcatcgaacaccagaaggtggtgaagggcaaccagaagagactggagagcctgcgggagctggccggcaaggaaaacctggaataccctagcgtgaccctgccacctcagcctcacaccaaggagggcgttgatgcctacaacgaagtgatcgcccgggtgcgaatgtgggtgaacctgaacctgtggcagaagctgaagctaagcagagatgatgccaagcctctgctgagactgaagggattcccttcctttcctctggtcgagagacaggccaacgaagtggactggtgggacatggtgtgtaacgtgaagaagctgatcaacgagaaaaaggaggatggcaaggtgttttggcagaatctggctggctacaagagacaggaagccctgagaccatacctgagcagcgaggaagatcggaagaagggaaagaaattcgctcggtaccagctgggcgacctgctgctgcacctggaaaagaagcacggcgaggactggggaaaggtgtacgacgaggcctgggagcggattgacaagaaagtggaaggcctgagcaagcacatcaagctggaagaggaacggagaagcgaggacgcccagagcaaggccgccctgaccgactggctgcgggctaaggccagcttcgtgatcgagggcctgaaggaggccgacaaggacgagttctgcagatgcgagctgaagctgcagaagtggtacggggacctgcggggaaagcccttcgccatcgaagccgagaacagcatcctggacatcagcggcttcagcaagcagtacaactgtgccttcatctggcagaaggacggcgtgaagaagctgaacctgtacctgatcatcaactacttcaagggcggcaagctgcggttcaagaagatcaaacctgaagccttcgaagccaacagattctacaccgtgatcaacaaaaagagcggcgagatcgtgcccatggaggtgaacttcaacttcgacgaccccaacctgatcatcctgcctctggcctttggcaagagacagggcagagaattcatctggaacgacctgctgtccctggaaaccggcagcctgaagctggccaacggaagagtgatcgagaagacactgtacaacagaagaacccggcaggatgagcctgccctgttcgtggccctgaccttcgagcggcgggaggtcctggactcctccaatatcaaaccaatgaacctgatcggcgtggcaagaggcgaaaacatccccgccgtgatcgccctgaccgaccccgagggctgcccactgagccggtttaaggatagcctgggaaacccaacccacatcctgagaatcggcgagagctataaggagaagcagcggaccatccaggccaagaaggaggtggagcagcggagagccggcggctacagccggaagtacgccagcaaagccaagaatctggcagacgatatggtgagaaacaccgctagagatctgctgtactacgccgtgacccaggatgccatgctgatcttcgccaacctgagccggggcttcggccggcagggcaagcggaccttcatggccgagagacagtacacacggatggaggactggctgaccgccaagctggcctacgagggcctgagcaagacctacctgtccaagacactggcccagtacacctccaagacatgcagcaactgtgggtttaccatcaccagcgccgactacgacagggtgctggagaagctgaagaagacagcaacaggctggatgaccacaattaacggcaaggagctgaaggtggagggccagattacctactacaacagatacaagagacagaacgtagtcaaggacctgtccgtcgagctggatagactgagcgaagaatctgtgaacaacgacatctcctcctggacaaagggcagaagcggagaagctctgagcctcctgaagaaaagattctcccatagacccgtgcaggagaagttcgtgtgcctgaactgcggcttcgagacacacgcagccgagcaagccgccctgaacatcgccagatcctggctgttcctgcggagccaggagtacaagaaataccagacaaacaagacaaccggcaacaccgataagagagccttcgtcgagacctggcagtccttttaccggaagaagcttaaggaggtgtggaaacctgccgtgcggtctggcggatctggcggaggctccaccagccccaagaaaaagagaaaagtctaagctgccttctgcggggcttgccttctggccatgcccttcttctctcccttgcacctgtacctcttggtctttgaataaagcctgagtaggaaggctagcaaaaaaaaaaaaaaaaaaaaaaaaaaaaaaaaaaaaaaaaaaaaaaaaaaaaaaaaaaaaaaaaaaaaaaaaaaaaaaaagcccagccggctccccaacctctaccgaggagggcacctctgagtccgccacccccgagagcggccctggcacctccaccgagcccagcgagggcagcgcacccggcagccctgccggcagccccacctccacagaggagggaaccagcaccgagcccagcgaaggcagcgccccaggcaccagcaccgagcctagtgagcaggagattaaacggatcaacaagatcagaagaagacttgtgaaagacagcaacaccaagaaggccggcaagacaggccccatgaaaaccctgctggttagagtgatgacacccgatctgagagagcggctggaaaacctgagaaagaagcctgaaaatatcccccagcccatcagcaatacatctagagccaacctgaataagctgctgaccgattacaccgaaatgaagaaggcgatcctgcatgtgtactgggaagagttccagaaggaccctgtgggcctgatgagccgggtggcccagcctgccagcaagaagatcgatcagaacaagctgaaacctgagatggacgagaagggcaacctgaccaccgccggctttgcctgctctcagtgtggccagcccctgttcgtgtacaagctggagcaggtgtctgagaagggcaaggcttacaccaactacttcggacggtgcaatgtggccgagcacgaaaagctgatcctgctggcccagctgaagcccgagaaggatagcgacgaagccgtgacatatagcctgggaaagtttgggcagagggccctggatttctacagcattcatgtgaccaaggagtccacccaccccgtgaagcccctggcccagatcgccggaaacagatacgcctccggacctgtgggaaaggccctgagcgacgcatgtatgggcacaatcgcctccttcctgtctaagtaccaggacatcatcatcgaacaccagaaggtggtgaagggcaaccagaagagactggagagcctgcgggagctggccggcaaggaaaacctggaataccctagcgtgaccctgccacctcagcctcacaccaaggagggcgttgatgcctacaacgaagtgatcgcccgggtgcgaatgtgggtgaacctgaacctgtggcagaagctgaagctaagcagagatgatgccaagcctctgctgagactgaagggattcccttcctttcctctggtcgagagacaggccaacgaagtggactggtgggacatggtgtgtaacgtgaagaagctgatcaacgagaaaaaggaggatggcaaggtgttttggcagaatctggctggctacaagagacaggaagccctgagaccatacctgagcagcgaggaagatcggaagaagggaaagaaattcgctcggtaccagctgggcgacctgctgctgcacctggaaaagaagcacggcgaggactggggaaaggtgtacgacgaggcctgggagcggattgacaagaaagtggaaggcctgagcaagcacatcaagctggaagaggaacggagaagcgaggacgcccagagcaaggccgccctgaccgactggctgcgggctaaggccagcttcgtgatcgagggcctgaaggaggccgacaaggacgagttctgcagatgcgagctgaagctgcagaagtggtacggggacctgcggggaaagcccttcgccatcgaagccgagaacagcatcctggacatcagcggcttcagcaagcagtacaactgtgccttcatctggcagaaggacggcgtgaagaagctgaacctgtacctgatcatcaactacttcaagggcggcaagctgcggttcaagaagatcaaacctgaagccttcgaagccaacagattctacaccgtgatcaacaaaaagagcggcgagatcgtgcccatggaggtgaacttcaacttcgacgaccccaacctgatcatcctgcctctggcctttggcaagagacagggcagagaattcatctggaacgacctgctgtccctggaaaccggcagcctgaagctggccaacggaagagtgatcgagaagacactgtacaacagaagaacccggcaggatgagcctgccctgttcgtggccctgaccttcgagcggcgggaggtcctggactcctccaatatcaaaccaatgaacctgatcggcgtggcaagaggcgaaaacatccccgccgtgatcgccctgaccgaccccgagggctgcccactgagccggtttaaggatagcctgggaaacccaacccacatcctgagaatcggcgagagctataaggagaagcagcggaccatccaggccaagaaggaggtggagcagcggagagccggcggctacagccggaagtacgccagcaaagccaagaatctggcagacgatatggtgagaaacaccgctagagatctgctgtactacgccgtgacccaggatgccatgctgatcttcgccaacctgagccggggcttcggccggcagggcaagcggaccttcatggccgagagacagtacacacggatggaggactggctgaccgccaagctggcctacgagggcctgagcaagacctacctgtccaagacactggcccagtacacctccaagacatgcagcaactgtgggtttaccatcaccagcgccgactacgacagggtgctggagaagctgaagaagacagcaacaggctggatgaccacaattaacggcaaggagctgaaggtggagggccagattacctactacaacagatacaagagacagaacgtagtcaaggacctgtccgtcgagctggatagactgagcgaagaatctgtgaacaacgacatctcctcctggacaaagggcagaagcggagaagctctgagcctcctgaagaaaagattctcccatagacccgtgcaggagaagttcgtgtgcctgaactgcggcttcgagacacacgcagccgagcaagccgccctgaacatcgccagatcctggctgttcctgcggagccaggagtacaagaaataccagacaaacaagacaaccggcaacaccgataagagagccttcgtcgagacctggcagtccttttaccggaagaagcttaaggaggtgtggaaacctgccgtgcggtctggcggatctggcggaggctccaccagccccaagaaaaagagaaaagtctaagctgccttctgcggggcttgccttctggccatgcccttcttctctcccttgcacctgtacctcttggtctttgaataaagcctgagtaggaaggctagcaaaaaaaaaaaaaaaaaaaaaaaaaaaaaaaaaaaaaaaaaaaaaaaaaaaaaaaaaaaaaaaaaaaaaaaaaaaaaaaa

SEQ ID NO: 9498 - RNA, 8787 nt, synthetic construct
  source 1..8787: mol_type = other RNA
aggaaataagagagaaaagaagagtaagaagaaatataagagccaccatggcccctaagaagaagcgtaaagtgagccggatgaaccacgaccaggagttcgacccccctaaggtgtaccctcccgtccccgccgagaagagaaagcccatccgggtcctgagcctgttcgatggcatcgccaccggtctgctggtgctgaaggacctgggcatccaggtggataggtacattgcctccgaggtgtgcgaggactccatcaccgtgggaatggtgcgtcatcagggcaagatcatgtacgtgggcgacgtgcggagcgtgacacagaagcatatccaggagtggggccctttcgacctggtgatcggcggcagcccttgcaatgacctgagcatcgtgaacccagcccggaagggcctgtacgagggaaccggcagactgttcttcgagttttacagactgctgcacgacgcccggcctaaggaaggcgacgaccggcccttcttttggctgttcgagaatgtggtggccatgggagtcagcgacaagcgggatattagccggttcctggagagcaaccccgtgatgatcgatgccaaggaagtgagcgccgcccaccgggccagatacttctggggcaatctgcctggcatgaacagacccctggccagcaccgtgaacgacaagctggagctgcaggagtgcctggagcacggccggatcgccaagttcagcaaggtgagaaccatcaccacccgaagcaacagcatcaaacaaggcaaggaccagcactttcctgtgttcatgaacgagaaggaggacatcctgtggtgtaccgagatggagagagtgttcgggttcccagtccactacacagatgtcagcaacatgtctagactggccagacagagactgctgggaagaagctggtccgtccctgtgatcagacacctgttcgcccctctgaaggagtacttcgcctgcgtgagcagcggcaacagcaacgccaacagccggggccccagcttctctagcggcctggtgccactgtccctgagagggagccacatgggccccatggagatctacaaaaccgtgagcgcctggaagcggcagcctgtgcgcgtgctgagcctgtttcggaatatcgataaagtcctgaaaagcctgggattcctggagagcggctctggctccggcggtggcaccctgaagtacgtggaggatgtgacaaacgtggtcagacgggatgtggagaagtggggccccttcgatctggtgtacggcagcacccaacccctgggcagctcttgtgaccggtgccctggctggtacatgtttcagttccaccggatcctgcagtacgccctgccgagacaggagtcccagcggccattcttttggattttcatggacaacttgctgctgaccgaggatgaccaggaaactaccactcggttcctgcagaccgaagccgtgaccctgcaggacgtgagaggccgggactaccagaacgccatgcgggtgtggtccaacatccctggactgaaaagcaagcacgcacctctgacccctaaagaagaggagtacctgcaggcccaggtgcggagcagaagcaagctggacgcccctaaggtggatctgctggtgaagaattgcctcctgcccctgagagagtacttcaagtatttcagccagaatagtctgcccctgggaggcagcggcggcggcgcccaggccggcgtgagcttcgaggaggtggccgtgcacttcagccccggcgagtggagcctgctgcagcccgcccagagggccctgtacaaggaggtgatgctggagaacttcggccacgtggccagcctgggcccccccggcgccacccccgacctgatcgcctggctgcaggagggcctgttcctgctgggcggcgacgaggaggccggcagcgccggcgacgcctggaggagcgccaccggcggcccaagcagcggcgcccctcctcccagcggcggcaggcggcccaagcagcggcgcccctcctcccagcggcggcagcccagccggctccccaacctctaccgaggagggcacctctgagtccgccacccccgagagcggccctggcacctccaccgagcccagcgagggcagcgcacccggcagccctgccggcagccccacctccacagaggagggaaccagcaccgagcccagcgaaggcagcgccccaggcaccagcaccgagcctagtgagcaggagattaaacggatcaacaagatcagaagaagacttgtgaaagacagcaacaccaagaaggccggcaagacaggccccatgaaaaccctgctggttagagtgatgacacccgatctgagagagcggctggaaaacctgagaaagaagcctgaaaatatcccccagcccatcagcaatacatctagagccaacctgaataagctgctgaccgattacaccgaaatgaagaaggcgatcctgcatgtgtactgggaagagttccagaaggaccctgtgggcctgatgagccgggtggcccagcctgccagcaagaagatcgatcagaacaagctgaaacctgagatggacgagaagggcaacctgaccaccgccggctttgcctgctctcagtgtggccagcccctgttcgtgtacaagctggagcaggtgtctgagaagggcaaggcttacaccaactacttcggacggtgcaatgtggccgagcacgaaaagctgatcctgctggcccagctgaagcccgagaaggatagcgacgaagccgtgacatatagcctgggaaagtttgggcagagggccctggatttctacagcattcatgtgaccaaggagtccacccaccccgtgaagcccctggcccagatcgccggaaacagatacgcctccggacctgtgggaaaggccctgagcgacgcatgtatgggcacaatcgcctccttcctgtctaagtaccaggacatcatcatcgaacaccagaaggtggtgaagggcaaccagaagagactggagagcctgcgggagctggccggcaaggaaaacctggaataccctagcgtgaccctgccacctcagcctcacaccaaggagggcgttgatgcctacaacgaagtgatcgcccgggtgcgaatgtgggtgaacctgaacctgtggcagaagctgaagctaagcagagatgatgccaagcctctgctgagactgaagggattcccttcctttcctctggtcgagagacaggccaacgaagtggactggtgggacatggtgtgtaacgtgaagaagctgatcaacgagaaaaaggaggatggcaaggtgttttggcagaatctggctggctacaagagacaggaagccctgagaccatacctgagcagcgaggaagatcggaagaagggaaagaaattcgctcggtaccagctgggcgacctgctgctgcacctggaaaagaagcacggcgaggactggggaaaggtgtacgacgaggcctgggagcggattgacaagaaagtggaaggcctgagcaagcacatcaagctggaagaggaacggagaagcgaggacgcccagagcaaggccgccctgaccgactggctgcgggctaaggccagcttcgtgatcgagggcctgaaggaggccgacaaggacgagttctgcagatgcgagctgaagctgcagaagtggtacggggacctgcggggaaagcccttcgccatcgaagccgagaacagcatcctggacatcagcggcttcagcaagcagtacaactgtgccttcatctggcagaaggacggcgtgaagaagctgaacctgtacctgatcatcaactacttcaagggcggcaagctgcggttcaagaagatcaaacctgaagccttcgaagccaacagattctacaccgtgatcaacaaaaagagcggcgagatcgtgcccatggaggtgaacttcaacttcgacgaccccaacctgatcatcctgcctctggcctttggcaagagacagggcagagaattcatctggaacgacctgctgtccctggaaaccggcagcctgaagctggccaacggaagagtgatcgagaagacactgtacaacagaagaacccggcaggatgagcctgccctgttcgtggccctgaccttcgagcggcgggaggtcctggactcctccaatatcaaaccaatgaacctgatcggcgtggcaagaggcgaaaacatccccgccgtgatcgccctgaccgaccccgagggctgcccactgagccggtttaaggatagcctgggaaacccaacccacatcctgagaatcggcgagagctataaggagaagcagcggaccatccaggccaagaaggaggtggagcagcggagagccggcggctacagccggaagtacgccagcaaagccaagaatctggcagacgatatggtgagaaacaccgctagagatctgctgtactacgccgtgacccaggatgccatgctgatcttcgccaacctgagccggggcttcggccggcagggcaagcggaccttcatggccgagagacagtacacacggatggaggactggctgaccgccaagctggcctacgagggcctgagcaagacctacctgtccaagacactggcccagtacacctccaagacatgcagcaactgtgggtttaccatcaccagcgccgactacgacagggtgctggagaagctgaagaagacagcaacaggctggatgaccacaattaacggcaaggagctgaaggtggagggccagattacctactacaacagatacaagagacagaacgtagtcaaggacctgtccgtcgagctggatagactgagcgaagaatctgtgaacaacgacatctcctcctggacaaagggcagaagcggagaagctctgagcctcctgaagaaaagattctcccatagacccgtgcaggagaagttcgtgtgcctgaactgcggcttcgagacacacgcagccgagcaagccgccctgaacatcgccagatcctggctgttcctgcggagccaggagtacaagaaataccagacaaacaagacaaccggcaacaccgataagagagccttcgtcgagacctggcagtccttttaccggaagaagcttaaggaggtgtggaaacctgccgtgcggtctggcggatctggcggaggctccaccagccccaagaaaaagagaaaagtctaagctgccttctgcggggcttgccttctggccatgcccttcttctctcccttgcacctgtacctcttggtctttgaataaagcctgagtaggaaggctagcaaaaaaaaaaaaaaaaaaaaaaaaaaaaaaaaaaaaaaaaaaaaaaaaaaaaaaaaaaaaaaaaaaaaaaaaaaaaaaaagcccagccggctccccaacctctaccgaggagggcacctctgagtccgccacccccgagagcggccctggcacctccaccgagcccagcgagggcagcgcacccggcagccctgccggcagccccacctccacagaggagggaaccagcaccgagcccagcgaaggcagcgccccaggcaccagcaccgagcctagtgagcaggagattaaacggatcaacaagatcagaagaagacttgtgaaagacagcaacaccaagaaggccggcaagacaggccccatgaaaaccctgctggttagagtgatgacacccgatctgagagagcggctggaaaacctgagaaagaagcctgaaaatatcccccagcccatcagcaatacatctagagccaacctgaataagctgctgaccgattacaccgaaatgaagaaggcgatcctgcatgtgtactgggaagagttccagaaggaccctgtgggcctgatgagccgggtggcccagcctgccagcaagaagatcgatcagaacaagctgaaacctgagatggacgagaagggcaacctgaccaccgccggctttgcctgctctcagtgtggccagcccctgttcgtgtacaagctggagcaggtgtctgagaagggcaaggcttacaccaactacttcggacggtgcaatgtggccgagcacgaaaagctgatcctgctggcccagctgaagcccgagaaggatagcgacgaagccgtgacatatagcctgggaaagtttgggcagagggccctggatttctacagcattcatgtgaccaaggagtccacccaccccgtgaagcccctggcccagatcgccggaaacagatacgcctccggacctgtgggaaaggccctgagcgacgcatgtatgggcacaatcgcctccttcctgtctaagtaccaggacatcatcatcgaacaccagaaggtggtgaagggcaaccagaagagactggagagcctgcgggagctggccggcaaggaaaacctggaataccctagcgtgaccctgccacctcagcctcacaccaaggagggcgttgatgcctacaacgaagtgatcgcccgggtgcgaatgtgggtgaacctgaacctgtggcagaagctgaagctaagcagagatgatgccaagcctctgctgagactgaagggattcccttcctttcctctggtcgagagacaggccaacgaagtggactggtgggacatggtgtgtaacgtgaagaagctgatcaacgagaaaaaggaggatggcaaggtgttttggcagaatctggctggctacaagagacaggaagccctgagaccatacctgagcagcgaggaagatcggaagaagggaaagaaattcgctcggtaccagctgggcgacctgctgctgcacctggaaaagaagcacggcgaggactggggaaaggtgtacgacgaggcctgggagcggattgacaagaaagtggaaggcctgagcaagcacatcaagctggaagaggaacggagaagcgaggacgcccagagcaaggccgccctgaccgactggctgcgggctaaggccagcttcgtgatcgagggcctgaaggaggccgacaaggacgagttctgcagatgcgagctgaagctgcagaagtggtacggggacctgcggggaaagcccttcgccatcgaagccgagaacagcatcctggacatcagcggcttcagcaagcagtacaactgtgccttcatctggcagaaggacggcgtgaagaagctgaacctgtacctgatcatcaactacttcaagggcggcaagctgcggttcaagaagatcaaacctgaagccttcgaagccaacagattctacaccgtgatcaacaaaaagagcggcgagatcgtgcccatggaggtgaacttcaacttcgacgaccccaacctgatcatcctgcctctggcctttggcaagagacagggcagagaattcatctggaacgacctgctgtccctggaaaccggcagcctgaagctggccaacggaagagtgatcgagaagacactgtacaacagaagaacccggcaggatgagcctgccctgttcgtggccctgaccttcgagcggcgggaggtcctggactcctccaatatcaaaccaatgaacctgatcggcgtggcaagaggcgaaaacatccccgccgtgatcgccctgaccgaccccgagggctgcccactgagccggtttaaggatagcctgggaaacccaacccacatcctgagaatcggcgagagctataaggagaagcagcggaccatccaggccaagaaggaggtggagcagcggagagccggcggctacagccggaagtacgccagcaaagccaagaatctggcagacgatatggtgagaaacaccgctagagatctgctgtactacgccgtgacccaggatgccatgctgatcttcgccaacctgagccggggcttcggccggcagggcaagcggaccttcatggccgagagacagtacacacggatggaggactggctgaccgccaagctggcctacgagggcctgagcaagacctacctgtccaagacactggcccagtacacctccaagacatgcagcaactgtgggtttaccatcaccagcgccgactacgacagggtgctggagaagctgaagaagacagcaacaggctggatgaccacaattaacggcaaggagctgaaggtggagggccagattacctactacaacagatacaagagacagaacgtagtcaaggacctgtccgtcgagctggatagactgagcgaagaatctgtgaacaacgacatctcctcctggacaaagggcagaagcggagaagctctgagcctcctgaagaaaagattctcccatagacccgtgcaggagaagttcgtgtgcctgaactgcggcttcgagacacacgcagccgagcaagccgccctgaacatcgccagatcctggctgttcctgcggagccaggagtacaagaaataccagacaaacaagacaaccggcaacaccgataagagagccttcgtcgagacctggcagtccttttaccggaagaagcttaaggaggtgtggaaacctgccgtgcggtctggcggatctggcggaggctccaccagccccaagaaaaagagaaaagtctaagctgccttctgcggggcttgccttctggccatgcccttcttctctcccttgcacctgtacctcttggtctttgaataaagcctgagtaggaaggctagcaaaaaaaaaaaaaaaaaaaaaaaaaaaaaaaaaaaaaaaaaaaaaaaaaaaaaaaaaaaaaaaaaaaaaaaaaaaaaaaa

SEQ ID NO: 9499 - RNA, 8787 nt, synthetic construct
  source 1..8787: mol_type = other RNA
aggaaataagagagaaaagaagagtaagaagaaatataagagccaccatggcccctaagaagaagcgtaaagtgagccggatgaaccacgaccaggagttcgacccccctaaggtgtaccctcccgtccccgccgagaagagaaagcccatccgggtcctgagcctgttcgatggcatcgccaccggtctgctggtgctgaaggacctgggcatccaggtggataggtacattgcctccgaggtgtgcgaggactccatcaccgtgggaatggtgcgtcatcagggcaagatcatgtacgtgggcgacgtgcggagcgtgacacagaagcatatccaggagtggggccctttcgacctggtgatcggcggcagcccttgcaatgacctgagcatcgtgaacccagcccggaagggcctgtacgagggaaccggcagactgttcttcgagttttacagactgctgcacgacgcccggcctaaggaaggcgacgaccggcccttcttttggctgttcgagaatgtggtggccatgggagtcagcgacaagcgggatattagccggttcctggagagcaaccccgtgatgatcgatgccaaggaagtgagcgccgcccaccgggccagatacttctggggcaatctgcctggcatgaacagacccctggccagcaccgtgaacgacaagctggagctgcaggagtgcctggagcacggccggatcgccaagttcagcaaggtgagaaccatcaccacccgaagcaacagcatcaaacaaggcaaggaccagcactttcctgtgttcatgaacgagaaggaggacatcctgtggtgtaccgagatggagagagtgttcgggttcccagtccactacacagatgtcagcaacatgtctagactggccagacagagactgctgggaagaagctggtccgtccctgtgatcagacacctgttcgcccctctgaaggagtacttcgcctgcgtgagcagcggcaacagcaacgccaacagccggggccccagcttctctagcggcctggtgccactgtccctgagagggagccacatgggccccatggagatctacaaaaccgtgagcgcctggaagcggcagcctgtgcgcgtgctgagcctgtttcggaatatcgataaagtcctgaaaagcctgggattcctggagagcggctctggctccggcggtggcaccctgaagtacgtggaggatgtgacaaacgtggtcagacgggatgtggagaagtggggccccttcgatctggtgtacggcagcacccaacccctgggcagctcttgtgaccggtgccctggctggtacatgtttcagttccaccggatcctgcagtacgccctgccgagacaggagtcccagcggccattcttttggattttcatggacaacttgctgctgaccgaggatgaccaggaaactaccactcggttcctgcagaccgaagccgtgaccctgcaggacgtgagaggccgggactaccagaacgccatgcgggtgtggtccaacatccctggactgaaaagcaagcacgcacctctgacccctaaagaagaggagtacctgcaggcccaggtgcggagcagaagcaagctggacgcccctaaggtggatctgctggtgaagaattgcctcctgcccctgagagagtacttcaagtatttcagccagaatagtctgcccctgggaggcagcggcggcggcagccagggcagcgtgagcttcaaggacgtgaccgtggacttcacccaggaggagtggcagcagctggaccccgcccagaaggccctgtacagggacgtgatgctggagaactactgccacttcatcgccgtgggcttccacatgaccaagcccgacatgatcaggaagctggagcagggcgaggagctgtggacccagaggatcttccccagctacagctacctggaggaggacggcaagaccggcggcccaagcagcggcgcccctcctcccagcggcggcaggcggcccaagcagcggcgcccctcctcccagcggcggcagcccagccggctccccaacctctaccgaggagggcacctctgagtccgccacccccgagagcggccctggcacctccaccgagcccagcgagggcagcgcacccggcagccctgccggcagccccacctccacagaggagggaaccagcaccgagcccagcgaaggcagcgccccaggcaccagcaccgagcctagtgagcaggagattaaacggatcaacaagatcagaagaagacttgtgaaagacagcaacaccaagaaggccggcaagacaggccccatgaaaaccctgctggttagagtgatgacacccgatctgagagagcggctggaaaacctgagaaagaagcctgaaaatatcccccagcccatcagcaatacatctagagccaacctgaataagctgctgaccgattacaccgaaatgaagaaggcgatcctgcatgtgtactgggaagagttccagaaggaccctgtgggcctgatgagccgggtggcccagcctgccagcaagaagatcgatcagaacaagctgaaacctgagatggacgagaagggcaacctgaccaccgccggctttgcctgctctcagtgtggccagcccctgttcgtgtacaagctggagcaggtgtctgagaagggcaaggcttacaccaactacttcggacggtgcaatgtggccgagcacgaaaagctgatcctgctggcccagctgaagcccgagaaggatagcgacgaagccgtgacatatagcctgggaaagtttgggcagagggccctggatttctacagcattcatgtgaccaaggagtccacccaccccgtgaagcccctggcccagatcgccggaaacagatacgcctccggacctgtgggaaaggccctgagcgacgcatgtatgggcacaatcgcctccttcctgtctaagtaccaggacatcatcatcgaacaccagaaggtggtgaagggcaaccagaagagactggagagcctgcgggagctggccggcaaggaaaacctggaataccctagcgtgaccctgccacctcagcctcacaccaaggagggcgttgatgcctacaacgaagtgatcgcccgggtgcgaatgtgggtgaacctgaacctgtggcagaagctgaagctaagcagagatgatgccaagcctctgctgagactgaagggattcccttcctttcctctggtcgagagacaggccaacgaagtggactggtgggacatggtgtgtaacgtgaagaagctgatcaacgagaaaaaggaggatggcaaggtgttttggcagaatctggctggctacaagagacaggaagccctgagaccatacctgagcagcgaggaagatcggaagaagggaaagaaattcgctcggtaccagctgggcgacctgctgctgcacctggaaaagaagcacggcgaggactggggaaaggtgtacgacgaggcctgggagcggattgacaagaaagtggaaggcctgagcaagcacatcaagctggaagaggaacggagaagcgaggacgcccagagcaaggccgccctgaccgactggctgcgggctaaggccagcttcgtgatcgagggcctgaaggaggccgacaaggacgagttctgcagatgcgagctgaagctgcagaagtggtacggggacctgcggggaaagcccttcgccatcgaagccgagaacagcatcctggacatcagcggcttcagcaagcagtacaactgtgccttcatctggcagaaggacggcgtgaagaagctgaacctgtacctgatcatcaactacttcaagggcggcaagctgcggttcaagaagatcaaacctgaagccttcgaagccaacagattctacaccgtgatcaacaaaaagagcggcgagatcgtgcccatggaggtgaacttcaacttcgacgaccccaacctgatcatcctgcctctggcctttggcaagagacagggcagagaattcatctggaacgacctgctgtccctggaaaccggcagcctgaagctggccaacggaagagtgatcgagaagacactgtacaacagaagaacccggcaggatgagcctgccctgttcgtggccctgaccttcgagcggcgggaggtcctggactcctccaatatcaaaccaatgaacctgatcggcgtggcaagaggcgaaaacatccccgccgtgatcgccctgaccgaccccgagggctgcccactgagccggtttaaggatagcctgggaaacccaacccacatcctgagaatcggcgagagctataaggagaagcagcggaccatccaggccaagaaggaggtggagcagcggagagccggcggctacagccggaagtacgccagcaaagccaagaatctggcagacgatatggtgagaaacaccgctagagatctgctgtactacgccgtgacccaggatgccatgctgatcttcgccaacctgagccggggcttcggccggcagggcaagcggaccttcatggccgagagacagtacacacggatggaggactggctgaccgccaagctggcctacgagggcctgagcaagacctacctgtccaagacactggcccagtacacctccaagacatgcagcaactgtgggtttaccatcaccagcgccgactacgacagggtgctggagaagctgaagaagacagcaacaggctggatgaccacaattaacggcaaggagctgaaggtggagggccagattacctactacaacagatacaagagacagaacgtagtcaaggacctgtccgtcgagctggatagactgagcgaagaatctgtgaacaacgacatctcctcctggacaaagggcagaagcggagaagctctgagcctcctgaagaaaagattctcccatagacccgtgcaggagaagttcgtgtgcctgaactgcggcttcgagacacacgcagccgagcaagccgccctgaacatcgccagatcctggctgttcctgcggagccaggagtacaagaaataccagacaaacaagacaaccggcaacaccgataagagagccttcgtcgagacctggcagtccttttaccggaagaagcttaaggaggtgtggaaacctgccgtgcggtctggcggatctggcggaggctccaccagccccaagaaaaagagaaaagtctaagctgccttctgcggggcttgccttctggccatgcccttcttctctcccttgcacctgtacctcttggtctttgaataaagcctgagtaggaaggctagcaaaaaaaaaaaaaaaaaaaaaaaaaaaaaaaaaaaaaaaaaaaaaaaaaaaaaaaaaaaaaaaaaaaaaaaaaaaaaaaagcccagccggctccccaacctctaccgaggagggcacctctgagtccgccacccccgagagcggccctggcacctccaccgagcccagcgagggcagcgcacccggcagccctgccggcagccccacctccacagaggagggaaccagcaccgagcccagcgaaggcagcgccccaggcaccagcaccgagcctagtgagcaggagattaaacggatcaacaagatcagaagaagacttgtgaaagacagcaacaccaagaaggccggcaagacaggccccatgaaaaccctgctggttagagtgatgacacccgatctgagagagcggctggaaaacctgagaaagaagcctgaaaatatcccccagcccatcagcaatacatctagagccaacctgaataagctgctgaccgattacaccgaaatgaagaaggcgatcctgcatgtgtactgggaagagttccagaaggaccctgtgggcctgatgagccgggtggcccagcctgccagcaagaagatcgatcagaacaagctgaaacctgagatggacgagaagggcaacctgaccaccgccggctttgcctgctctcagtgtggccagcccctgttcgtgtacaagctggagcaggtgtctgagaagggcaaggcttacaccaactacttcggacggtgcaatgtggccgagcacgaaaagctgatcctgctggcccagctgaagcccgagaaggatagcgacgaagccgtgacatatagcctgggaaagtttgggcagagggccctggatttctacagcattcatgtgaccaaggagtccacccaccccgtgaagcccctggcccagatcgccggaaacagatacgcctccggacctgtgggaaaggccctgagcgacgcatgtatgggcacaatcgcctccttcctgtctaagtaccaggacatcatcatcgaacaccagaaggtggtgaagggcaaccagaagagactggagagcctgcgggagctggccggcaaggaaaacctggaataccctagcgtgaccctgccacctcagcctcacaccaaggagggcgttgatgcctacaacgaagtgatcgcccgggtgcgaatgtgggtgaacctgaacctgtggcagaagctgaagctaagcagagatgatgccaagcctctgctgagactgaagggattcccttcctttcctctggtcgagagacaggccaacgaagtggactggtgggacatggtgtgtaacgtgaagaagctgatcaacgagaaaaaggaggatggcaaggtgttttggcagaatctggctggctacaagagacaggaagccctgagaccatacctgagcagcgaggaagatcggaagaagggaaagaaattcgctcggtaccagctgggcgacctgctgctgcacctggaaaagaagcacggcgaggactggggaaaggtgtacgacgaggcctgggagcggattgacaagaaagtggaaggcctgagcaagcacatcaagctggaagaggaacggagaagcgaggacgcccagagcaaggccgccctgaccgactggctgcgggctaaggccagcttcgtgatcgagggcctgaaggaggccgacaaggacgagttctgcagatgcgagctgaagctgcagaagtggtacggggacctgcggggaaagcccttcgccatcgaagccgagaacagcatcctggacatcagcggcttcagcaagcagtacaactgtgccttcatctggcagaaggacggcgtgaagaagctgaacctgtacctgatcatcaactacttcaagggcggcaagctgcggttcaagaagatcaaacctgaagccttcgaagccaacagattctacaccgtgatcaacaaaaagagcggcgagatcgtgcccatggaggtgaacttcaacttcgacgaccccaacctgatcatcctgcctctggcctttggcaagagacagggcagagaattcatctggaacgacctgctgtccctggaaaccggcagcctgaagctggccaacggaagagtgatcgagaagacactgtacaacagaagaacccggcaggatgagcctgccctgttcgtggccctgaccttcgagcggcgggaggtcctggactcctccaatatcaaaccaatgaacctgatcggcgtggcaagaggcgaaaacatccccgccgtgatcgccctgaccgaccccgagggctgcccactgagccggtttaaggatagcctgggaaacccaacccacatcctgagaatcggcgagagctataaggagaagcagcggaccatccaggccaagaaggaggtggagcagcggagagccggcggctacagccggaagtacgccagcaaagccaagaatctggcagacgatatggtgagaaacaccgctagagatctgctgtactacgccgtgacccaggatgccatgctgatcttcgccaacctgagccggggcttcggccggcagggcaagcggaccttcatggccgagagacagtacacacggatggaggactggctgaccgccaagctggcctacgagggcctgagcaagacctacctgtccaagacactggcccagtacacctccaagacatgcagcaactgtgggtttaccatcaccagcgccgactacgacagggtgctggagaagctgaagaagacagcaacaggctggatgaccacaattaacggcaaggagctgaaggtggagggccagattacctactacaacagatacaagagacagaacgtagtcaaggacctgtccgtcgagctggatagactgagcgaagaatctgtgaacaacgacatctcctcctggacaaagggcagaagcggagaagctctgagcctcctgaagaaaagattctcccatagacccgtgcaggagaagttcgtgtgcctgaactgcggcttcgagacacacgcagccgagcaagccgccctgaacatcgccagatcctggctgttcctgcggagccaggagtacaagaaataccagacaaacaagacaaccggcaacaccgataagagagccttcgtcgagacctggcagtccttttaccggaagaagcttaaggaggtgtggaaacctgccgtgcggtctggcggatctggcggaggctccaccagccccaagaaaaagagaaaagtctaagctgccttctgcggggcttgccttctggccatgcccttcttctctcccttgcacctgtacctcttggtctttgaataaagcctgagtaggaaggctagcaaaaaaaaaaaaaaaaaaaaaaaaaaaaaaaaaaaaaaaaaaaaaaaaaaaaaaaaaaaaaaaaaaaaaaaaaaaaaaaa

SEQ ID NO: 9500 - RNA, 8787 nt, synthetic construct
  source 1..8787: mol_type = other RNA
aggaaataagagagaaaagaagagtaagaagaaatataagagccaccatggcccctaagaagaagcgtaaagtgagccggatgaaccacgaccaggagttcgacccccctaaggtgtaccctcccgtccccgccgagaagagaaagcccatccgggtcctgagcctgttcgatggcatcgccaccggtctgctggtgctgaaggacctgggcatccaggtggataggtacattgcctccgaggtgtgcgaggactccatcaccgtgggaatggtgcgtcatcagggcaagatcatgtacgtgggcgacgtgcggagcgtgacacagaagcatatccaggagtggggccctttcgacctggtgatcggcggcagcccttgcaatgacctgagcatcgtgaacccagcccggaagggcctgtacgagggaaccggcagactgttcttcgagttttacagactgctgcacgacgcccggcctaaggaaggcgacgaccggcccttcttttggctgttcgagaatgtggtggccatgggagtcagcgacaagcgggatattagccggttcctggagagcaaccccgtgatgatcgatgccaaggaagtgagcgccgcccaccgggccagatacttctggggcaatctgcctggcatgaacagacccctggccagcaccgtgaacgacaagctggagctgcaggagtgcctggagcacggccggatcgccaagttcagcaaggtgagaaccatcaccacccgaagcaacagcatcaaacaaggcaaggaccagcactttcctgtgttcatgaacgagaaggaggacatcctgtggtgtaccgagatggagagagtgttcgggttcccagtccactacacagatgtcagcaacatgtctagactggccagacagagactgctgggaagaagctggtccgtccctgtgatcagacacctgttcgcccctctgaaggagtacttcgcctgcgtgagcagcggcaacagcaacgccaacagccggggccccagcttctctagcggcctggtgccactgtccctgagagggagccacatgggccccatggagatctacaaaaccgtgagcgcctggaagcggcagcctgtgcgcgtgctgagcctgtttcggaatatcgataaagtcctgaaaagcctgggattcctggagagcggctctggctccggcggtggcaccctgaagtacgtggaggatgtgacaaacgtggtcagacgggatgtggagaagtggggccccttcgatctggtgtacggcagcacccaacccctgggcagctcttgtgaccggtgccctggctggtacatgtttcagttccaccggatcctgcagtacgccctgccgagacaggagtcccagcggccattcttttggattttcatggacaacttgctgctgaccgaggatgaccaggaaactaccactcggttcctgcagaccgaagccgtgaccctgcaggacgtgagaggccgggactaccagaacgccatgcgggtgtggtccaacatccctggactgaaaagcaagcacgcacctctgacccctaaagaagaggagtacctgcaggcccaggtgcggagcagaagcaagctggacgcccctaaggtggatctgctggtgaagaattgcctcctgcccctgagagagtacttcaagtatttcagccagaatagtctgcccctgggaggcagcggcggcggcaagcccgccgccgtgagcttcgccgacgtggccgtgtacttcagccccgaggagtggggctgcctgaggcccgcccagagggccctgtacagggaggtgatgagggagacctacggcctgctgggcgccctgggcggcggcggcaccaagcccgccctgatctgctgggtggagagggacgccgagctgtggggccccgacgcccaggaccccgccgccgccgccgccaggggctacggcaccggcggcccaagcagcggcgcccctcctcccagcggcggcaggcggcccaagcagcggcgcccctcctcccagcggcggcagcccagccggctccccaacctctaccgaggagggcacctctgagtccgccacccccgagagcggccctggcacctccaccgagcccagcgagggcagcgcacccggcagccctgccggcagccccacctccacagaggagggaaccagcaccgagcccagcgaaggcagcgccccaggcaccagcaccgagcctagtgagcaggagattaaacggatcaacaagatcagaagaagacttgtgaaagacagcaacaccaagaaggccggcaagacaggccccatgaaaaccctgctggttagagtgatgacacccgatctgagagagcggctggaaaacctgagaaagaagcctgaaaatatcccccagcccatcagcaatacatctagagccaacctgaataagctgctgaccgattacaccgaaatgaagaaggcgatcctgcatgtgtactgggaagagttccagaaggaccctgtgggcctgatgagccgggtggcccagcctgccagcaagaagatcgatcagaacaagctgaaacctgagatggacgagaagggcaacctgaccaccgccggctttgcctgctctcagtgtggccagcccctgttcgtgtacaagctggagcaggtgtctgagaagggcaaggcttacaccaactacttcggacggtgcaatgtggccgagcacgaaaagctgatcctgctggcccagctgaagcccgagaaggatagcgacgaagccgtgacatatagcctgggaaagtttgggcagagggccctggatttctacagcattcatgtgaccaaggagtccacccaccccgtgaagcccctggcccagatcgccggaaacagatacgcctccggacctgtgggaaaggccctgagcgacgcatgtatgggcacaatcgcctccttcctgtctaagtaccaggacatcatcatcgaacaccagaaggtggtgaagggcaaccagaagagactggagagcctgcgggagctggccggcaaggaaaacctggaataccctagcgtgaccctgccacctcagcctcacaccaaggagggcgttgatgcctacaacgaagtgatcgcccgggtgcgaatgtgggtgaacctgaacctgtggcagaagctgaagctaagcagagatgatgccaagcctctgctgagactgaagggattcccttcctttcctctggtcgagagacaggccaacgaagtggactggtgggacatggtgtgtaacgtgaagaagctgatcaacgagaaaaaggaggatggcaaggtgttttggcagaatctggctggctacaagagacaggaagccctgagaccatacctgagcagcgaggaagatcggaagaagggaaagaaattcgctcggtaccagctgggcgacctgctgctgcacctggaaaagaagcacggcgaggactggggaaaggtgtacgacgaggcctgggagcggattgacaagaaagtggaaggcctgagcaagcacatcaagctggaagaggaacggagaagcgaggacgcccagagcaaggccgccctgaccgactggctgcgggctaaggccagcttcgtgatcgagggcctgaaggaggccgacaaggacgagttctgcagatgcgagctgaagctgcagaagtggtacggggacctgcggggaaagcccttcgccatcgaagccgagaacagcatcctggacatcagcggcttcagcaagcagtacaactgtgccttcatctggcagaaggacggcgtgaagaagctgaacctgtacctgatcatcaactacttcaagggcggcaagctgcggttcaagaagatcaaacctgaagccttcgaagccaacagattctacaccgtgatcaacaaaaagagcggcgagatcgtgcccatggaggtgaacttcaacttcgacgaccccaacctgatcatcctgcctctggcctttggcaagagacagggcagagaattcatctggaacgacctgctgtccctggaaaccggcagcctgaagctggccaacggaagagtgatcgagaagacactgtacaacagaagaacccggcaggatgagcctgccctgttcgtggccctgaccttcgagcggcgggaggtcctggactcctccaatatcaaaccaatgaacctgatcggcgtggcaagaggcgaaaacatccccgccgtgatcgccctgaccgaccccgagggctgcccactgagccggtttaaggatagcctgggaaacccaacccacatcctgagaatcggcgagagctataaggagaagcagcggaccatccaggccaagaaggaggtggagcagcggagagccggcggctacagccggaagtacgccagcaaagccaagaatctggcagacgatatggtgagaaacaccgctagagatctgctgtactacgccgtgacccaggatgccatgctgatcttcgccaacctgagccggggcttcggccggcagggcaagcggaccttcatggccgagagacagtacacacggatggaggactggctgaccgccaagctggcctacgagggcctgagcaagacctacctgtccaagacactggcccagtacacctccaagacatgcagcaactgtgggtttaccatcaccagcgccgactacgacagggtgctggagaagctgaagaagacagcaacaggctggatgaccacaattaacggcaaggagctgaaggtggagggccagattacctactacaacagatacaagagacagaacgtagtcaaggacctgtccgtcgagctggatagactgagcgaagaatctgtgaacaacgacatctcctcctggacaaagggcagaagcggagaagctctgagcctcctgaagaaaagattctcccatagacccgtgcaggagaagttcgtgtgcctgaactgcggcttcgagacacacgcagccgagcaagccgccctgaacatcgccagatcctggctgttcctgcggagccaggagtacaagaaataccagacaaacaagacaaccggcaacaccgataagagagccttcgtcgagacctggcagtccttttaccggaagaagcttaaggaggtgtggaaacctgccgtgcggtctggcggatctggcggaggctccaccagccccaagaaaaagagaaaagtctaagctgccttctgcggggcttgccttctggccatgcccttcttctctcccttgcacctgtacctcttggtctttgaataaagcctgagtaggaaggctagcaaaaaaaaaaaaaaaaaaaaaaaaaaaaaaaaaaaaaaaaaaaaaaaaaaaaaaaaaaaaaaaaaaaaaaaaaaaaaaaagcccagccggctccccaacctctaccgaggagggcacctctgagtccgccacccccgagagcggccctggcacctccaccgagcccagcgagggcagcgcacccggcagccctgccggcagccccacctccacagaggagggaaccagcaccgagcccagcgaaggcagcgccccaggcaccagcaccgagcctagtgagcaggagattaaacggatcaacaagatcagaagaagacttgtgaaagacagcaacaccaagaaggccggcaagacaggccccatgaaaaccctgctggttagagtgatgacacccgatctgagagagcggctggaaaacctgagaaagaagcctgaaaatatcccccagcccatcagcaatacatctagagccaacctgaataagctgctgaccgattacaccgaaatgaagaaggcgatcctgcatgtgtactgggaagagttccagaaggaccctgtgggcctgatgagccgggtggcccagcctgccagcaagaagatcgatcagaacaagctgaaacctgagatggacgagaagggcaacctgaccaccgccggctttgcctgctctcagtgtggccagcccctgttcgtgtacaagctggagcaggtgtctgagaagggcaaggcttacaccaactacttcggacggtgcaatgtggccgagcacgaaaagctgatcctgctggcccagctgaagcccgagaaggatagcgacgaagccgtgacatatagcctgggaaagtttgggcagagggccctggatttctacagcattcatgtgaccaaggagtccacccaccccgtgaagcccctggcccagatcgccggaaacagatacgcctccggacctgtgggaaaggccctgagcgacgcatgtatgggcacaatcgcctccttcctgtctaagtaccaggacatcatcatcgaacaccagaaggtggtgaagggcaaccagaagagactggagagcctgcgggagctggccggcaaggaaaacctggaataccctagcgtgaccctgccacctcagcctcacaccaaggagggcgttgatgcctacaacgaagtgatcgcccgggtgcgaatgtgggtgaacctgaacctgtggcagaagctgaagctaagcagagatgatgccaagcctctgctgagactgaagggattcccttcctttcctctggtcgagagacaggccaacgaagtggactggtgggacatggtgtgtaacgtgaagaagctgatcaacgagaaaaaggaggatggcaaggtgttttggcagaatctggctggctacaagagacaggaagccctgagaccatacctgagcagcgaggaagatcggaagaagggaaagaaattcgctcggtaccagctgggcgacctgctgctgcacctggaaaagaagcacggcgaggactggggaaaggtgtacgacgaggcctgggagcggattgacaagaaagtggaaggcctgagcaagcacatcaagctggaagaggaacggagaagcgaggacgcccagagcaaggccgccctgaccgactggctgcgggctaaggccagcttcgtgatcgagggcctgaaggaggccgacaaggacgagttctgcagatgcgagctgaagctgcagaagtggtacggggacctgcggggaaagcccttcgccatcgaagccgagaacagcatcctggacatcagcggcttcagcaagcagtacaactgtgccttcatctggcagaaggacggcgtgaagaagctgaacctgtacctgatcatcaactacttcaagggcggcaagctgcggttcaagaagatcaaacctgaagccttcgaagccaacagattctacaccgtgatcaacaaaaagagcggcgagatcgtgcccatggaggtgaacttcaacttcgacgaccccaacctgatcatcctgcctctggcctttggcaagagacagggcagagaattcatctggaacgacctgctgtccctggaaaccggcagcctgaagctggccaacggaagagtgatcgagaagacactgtacaacagaagaacccggcaggatgagcctgccctgttcgtggccctgaccttcgagcggcgggaggtcctggactcctccaatatcaaaccaatgaacctgatcggcgtggcaagaggcgaaaacatccccgccgtgatcgccctgaccgaccccgagggctgcccactgagccggtttaaggatagcctgggaaacccaacccacatcctgagaatcggcgagagctataaggagaagcagcggaccatccaggccaagaaggaggtggagcagcggagagccggcggctacagccggaagtacgccagcaaagccaagaatctggcagacgatatggtgagaaacaccgctagagatctgctgtactacgccgtgacccaggatgccatgctgatcttcgccaacctgagccggggcttcggccggcagggcaagcggaccttcatggccgagagacagtacacacggatggaggactggctgaccgccaagctggcctacgagggcctgagcaagacctacctgtccaagacactggcccagtacacctccaagacatgcagcaactgtgggtttaccatcaccagcgccgactacgacagggtgctggagaagctgaagaagacagcaacaggctggatgaccacaattaacggcaaggagctgaaggtggagggccagattacctactacaacagatacaagagacagaacgtagtcaaggacctgtccgtcgagctggatagactgagcgaagaatctgtgaacaacgacatctcctcctggacaaagggcagaagcggagaagctctgagcctcctgaagaaaagattctcccatagacccgtgcaggagaagttcgtgtgcctgaactgcggcttcgagacacacgcagccgagcaagccgccctgaacatcgccagatcctggctgttcctgcggagccaggagtacaagaaataccagacaaacaagacaaccggcaacaccgataagagagccttcgtcgagacctggcagtccttttaccggaagaagcttaaggaggtgtggaaacctgccgtgcggtctggcggatctggcggaggctccaccagccccaagaaaaagagaaaagtctaagctgccttctgcggggcttgccttctggccatgcccttcttctctcccttgcacctgtacctcttggtctttgaataaagcctgagtaggaaggctagcaaaaaaaaaaaaaaaaaaaaaaaaaaaaaaaaaaaaaaaaaaaaaaaaaaaaaaaaaaaaaaaaaaaaaaaaaaaaaaaa

SEQ ID NO: 9501 - RNA, 8787 nt, synthetic construct
  source 1..8787: mol_type = other RNA
aggaaataagagagaaaagaagagtaagaagaaatataagagccaccatggcccctaagaagaagcgtaaagtgagccggatgaaccacgaccaggagttcgacccccctaaggtgtaccctcccgtccccgccgagaagagaaagcccatccgggtcctgagcctgttcgatggcatcgccaccggtctgctggtgctgaaggacctgggcatccaggtggataggtacattgcctccgaggtgtgcgaggactccatcaccgtgggaatggtgcgtcatcagggcaagatcatgtacgtgggcgacgtgcggagcgtgacacagaagcatatccaggagtggggccctttcgacctggtgatcggcggcagcccttgcaatgacctgagcatcgtgaacccagcccggaagggcctgtacgagggaaccggcagactgttcttcgagttttacagactgctgcacgacgcccggcctaaggaaggcgacgaccggcccttcttttggctgttcgagaatgtggtggccatgggagtcagcgacaagcgggatattagccggttcctggagagcaaccccgtgatgatcgatgccaaggaagtgagcgccgcccaccgggccagatacttctggggcaatctgcctggcatgaacagacccctggccagcaccgtgaacgacaagctggagctgcaggagtgcctggagcacggccggatcgccaagttcagcaaggtgagaaccatcaccacccgaagcaacagcatcaaacaaggcaaggaccagcactttcctgtgttcatgaacgagaaggaggacatcctgtggtgtaccgagatggagagagtgttcgggttcccagtccactacacagatgtcagcaacatgtctagactggccagacagagactgctgggaagaagctggtccgtccctgtgatcagacacctgttcgcccctctgaaggagtacttcgcctgcgtgagcagcggcaacagcaacgccaacagccggggccccagcttctctagcggcctggtgccactgtccctgagagggagccacatgggccccatggagatctacaaaaccgtgagcgcctggaagcggcagcctgtgcgcgtgctgagcctgtttcggaatatcgataaagtcctgaaaagcctgggattcctggagagcggctctggctccggcggtggcaccctgaagtacgtggaggatgtgacaaacgtggtcagacgggatgtggagaagtggggccccttcgatctggtgtacggcagcacccaacccctgggcagctcttgtgaccggtgccctggctggtacatgtttcagttccaccggatcctgcagtacgccctgccgagacaggagtcccagcggccattcttttggattttcatggacaacttgctgctgaccgaggatgaccaggaaactaccactcggttcctgcagaccgaagccgtgaccctgcaggacgtgagaggccgggactaccagaacgccatgcgggtgtggtccaacatccctggactgaaaagcaagcacgcacctctgacccctaaagaagaggagtacctgcaggcccaggtgcggagcagaagcaagctggacgcccctaaggtggatctgctggtgaagaattgcctcctgcccctgagagagtacttcaagtatttcagccagaatagtctgcccctgggaggcagcggcggcggcctgctgaccttcgaggacgtggccgtgagcttcagcgaggaggagtggaggctgctggaccccgcccagaagagcctgtacaacgacgtgatgcaggagaactacgagaccatcgtgagcctgggcctgaagctgaagaacgacaccggcaacgaccagcccatcagcctgagcgccctggagatccaggccagcggctgcagggtgctgaggaaggccaggatgaaggtggcccagaagaccggcggcccaagcagcggcgcccctcctcccagcggcggcaggcggcccaagcagcggcgcccctcctcccagcggcggcagcccagccggctccccaacctctaccgaggagggcacctctgagtccgccacccccgagagcggccctggcacctccaccgagcccagcgagggcagcgcacccggcagccctgccggcagccccacctccacagaggagggaaccagcaccgagcccagcgaaggcagcgccccaggcaccagcaccgagcctagtgagcaggagattaaacggatcaacaagatcagaagaagacttgtgaaagacagcaacaccaagaaggccggcaagacaggccccatgaaaaccctgctggttagagtgatgacacccgatctgagagagcggctggaaaacctgagaaagaagcctgaaaatatcccccagcccatcagcaatacatctagagccaacctgaataagctgctgaccgattacaccgaaatgaagaaggcgatcctgcatgtgtactgggaagagttccagaaggaccctgtgggcctgatgagccgggtggcccagcctgccagcaagaagatcgatcagaacaagctgaaacctgagatggacgagaagggcaacctgaccaccgccggctttgcctgctctcagtgtggccagcccctgttcgtgtacaagctggagcaggtgtctgagaagggcaaggcttacaccaactacttcggacggtgcaatgtggccgagcacgaaaagctgatcctgctggcccagctgaagcccgagaaggatagcgacgaagccgtgacatatagcctgggaaagtttgggcagagggccctggatttctacagcattcatgtgaccaaggagtccacccaccccgtgaagcccctggcccagatcgccggaaacagatacgcctccggacctgtgggaaaggccctgagcgacgcatgtatgggcacaatcgcctccttcctgtctaagtaccaggacatcatcatcgaacaccagaaggtggtgaagggcaaccagaagagactggagagcctgcgggagctggccggcaaggaaaacctggaataccctagcgtgaccctgccacctcagcctcacaccaaggagggcgttgatgcctacaacgaagtgatcgcccgggtgcgaatgtgggtgaacctgaacctgtggcagaagctgaagctaagcagagatgatgccaagcctctgctgagactgaagggattcccttcctttcctctggtcgagagacaggccaacgaagtggactggtgggacatggtgtgtaacgtgaagaagctgatcaacgagaaaaaggaggatggcaaggtgttttggcagaatctggctggctacaagagacaggaagccctgagaccatacctgagcagcgaggaagatcggaagaagggaaagaaattcgctcggtaccagctgggcgacctgctgctgcacctggaaaagaagcacggcgaggactggggaaaggtgtacgacgaggcctgggagcggattgacaagaaagtggaaggcctgagcaagcacatcaagctggaagaggaacggagaagcgaggacgcccagagcaaggccgccctgaccgactggctgcgggctaaggccagcttcgtgatcgagggcctgaaggaggccgacaaggacgagttctgcagatgcgagctgaagctgcagaagtggtacggggacctgcggggaaagcccttcgccatcgaagccgagaacagcatcctggacatcagcggcttcagcaagcagtacaactgtgccttcatctggcagaaggacggcgtgaagaagctgaacctgtacctgatcatcaactacttcaagggcggcaagctgcggttcaagaagatcaaacctgaagccttcgaagccaacagattctacaccgtgatcaacaaaaagagcggcgagatcgtgcccatggaggtgaacttcaacttcgacgaccccaacctgatcatcctgcctctggcctttggcaagagacagggcagagaattcatctggaacgacctgctgtccctggaaaccggcagcctgaagctggccaacggaagagtgatcgagaagacactgtacaacagaagaacccggcaggatgagcctgccctgttcgtggccctgaccttcgagcggcgggaggtcctggactcctccaatatcaaaccaatgaacctgatcggcgtggcaagaggcgaaaacatccccgccgtgatcgccctgaccgaccccgagggctgcccactgagccggtttaaggatagcctgggaaacccaacccacatcctgagaatcggcgagagctataaggagaagcagcggaccatccaggccaagaaggaggtggagcagcggagagccggcggctacagccggaagtacgccagcaaagccaagaatctggcagacgatatggtgagaaacaccgctagagatctgctgtactacgccgtgacccaggatgccatgctgatcttcgccaacctgagccggggcttcggccggcagggcaagcggaccttcatggccgagagacagtacacacggatggaggactggctgaccgccaagctggcctacgagggcctgagcaagacctacctgtccaagacactggcccagtacacctccaagacatgcagcaactgtgggtttaccatcaccagcgccgactacgacagggtgctggagaagctgaagaagacagcaacaggctggatgaccacaattaacggcaaggagctgaaggtggagggccagattacctactacaacagatacaagagacagaacgtagtcaaggacctgtccgtcgagctggatagactgagcgaagaatctgtgaacaacgacatctcctcctggacaaagggcagaagcggagaagctctgagcctcctgaagaaaagattctcccatagacccgtgcaggagaagttcgtgtgcctgaactgcggcttcgagacacacgcagccgagcaagccgccctgaacatcgccagatcctggctgttcctgcggagccaggagtacaagaaataccagacaaacaagacaaccggcaacaccgataagagagccttcgtcgagacctggcagtccttttaccggaagaagcttaaggaggtgtggaaacctgccgtgcggtctggcggatctggcggaggctccaccagccccaagaaaaagagaaaagtctaagctgccttctgcggggcttgccttctggccatgcccttcttctctcccttgcacctgtacctcttggtctttgaataaagcctgagtaggaaggctagcaaaaaaaaaaaaaaaaaaaaaaaaaaaaaaaaaaaaaaaaaaaaaaaaaaaaaaaaaaaaaaaaaaaaaaaaaaaaaaaagcccagccggctccccaacctctaccgaggagggcacctctgagtccgccacccccgagagcggccctggcacctccaccgagcccagcgagggcagcgcacccggcagccctgccggcagccccacctccacagaggagggaaccagcaccgagcccagcgaaggcagcgccccaggcaccagcaccgagcctagtgagcaggagattaaacggatcaacaagatcagaagaagacttgtgaaagacagcaacaccaagaaggccggcaagacaggccccatgaaaaccctgctggttagagtgatgacacccgatctgagagagcggctggaaaacctgagaaagaagcctgaaaatatcccccagcccatcagcaatacatctagagccaacctgaataagctgctgaccgattacaccgaaatgaagaaggcgatcctgcatgtgtactgggaagagttccagaaggaccctgtgggcctgatgagccgggtggcccagcctgccagcaagaagatcgatcagaacaagctgaaacctgagatggacgagaagggcaacctgaccaccgccggctttgcctgctctcagtgtggccagcccctgttcgtgtacaagctggagcaggtgtctgagaagggcaaggcttacaccaactacttcggacggtgcaatgtggccgagcacgaaaagctgatcctgctggcccagctgaagcccgagaaggatagcgacgaagccgtgacatatagcctgggaaagtttgggcagagggccctggatttctacagcattcatgtgaccaaggagtccacccaccccgtgaagcccctggcccagatcgccggaaacagatacgcctccggacctgtgggaaaggccctgagcgacgcatgtatgggcacaatcgcctccttcctgtctaagtaccaggacatcatcatcgaacaccagaaggtggtgaagggcaaccagaagagactggagagcctgcgggagctggccggcaaggaaaacctggaataccctagcgtgaccctgccacctcagcctcacaccaaggagggcgttgatgcctacaacgaagtgatcgcccgggtgcgaatgtgggtgaacctgaacctgtggcagaagctgaagctaagcagagatgatgccaagcctctgctgagactgaagggattcccttcctttcctctggtcgagagacaggccaacgaagtggactggtgggacatggtgtgtaacgtgaagaagctgatcaacgagaaaaaggaggatggcaaggtgttttggcagaatctggctggctacaagagacaggaagccctgagaccatacctgagcagcgaggaagatcggaagaagggaaagaaattcgctcggtaccagctgggcgacctgctgctgcacctggaaaagaagcacggcgaggactggggaaaggtgtacgacgaggcctgggagcggattgacaagaaagtggaaggcctgagcaagcacatcaagctggaagaggaacggagaagcgaggacgcccagagcaaggccgccctgaccgactggctgcgggctaaggccagcttcgtgatcgagggcctgaaggaggccgacaaggacgagttctgcagatgcgagctgaagctgcagaagtggtacggggacctgcggggaaagcccttcgccatcgaagccgagaacagcatcctggacatcagcggcttcagcaagcagtacaactgtgccttcatctggcagaaggacggcgtgaagaagctgaacctgtacctgatcatcaactacttcaagggcggcaagctgcggttcaagaagatcaaacctgaagccttcgaagccaacagattctacaccgtgatcaacaaaaagagcggcgagatcgtgcccatggaggtgaacttcaacttcgacgaccccaacctgatcatcctgcctctggcctttggcaagagacagggcagagaattcatctggaacgacctgctgtccctggaaaccggcagcctgaagctggccaacggaagagtgatcgagaagacactgtacaacagaagaacccggcaggatgagcctgccctgttcgtggccctgaccttcgagcggcgggaggtcctggactcctccaatatcaaaccaatgaacctgatcggcgtggcaagaggcgaaaacatccccgccgtgatcgccctgaccgaccccgagggctgcccactgagccggtttaaggatagcctgggaaacccaacccacatcctgagaatcggcgagagctataaggagaagcagcggaccatccaggccaagaaggaggtggagcagcggagagccggcggctacagccggaagtacgccagcaaagccaagaatctggcagacgatatggtgagaaacaccgctagagatctgctgtactacgccgtgacccaggatgccatgctgatcttcgccaacctgagccggggcttcggccggcagggcaagcggaccttcatggccgagagacagtacacacggatggaggactggctgaccgccaagctggcctacgagggcctgagcaagacctacctgtccaagacactggcccagtacacctccaagacatgcagcaactgtgggtttaccatcaccagcgccgactacgacagggtgctggagaagctgaagaagacagcaacaggctggatgaccacaattaacggcaaggagctgaaggtggagggccagattacctactacaacagatacaagagacagaacgtagtcaaggacctgtccgtcgagctggatagactgagcgaagaatctgtgaacaacgacatctcctcctggacaaagggcagaagcggagaagctctgagcctcctgaagaaaagattctcccatagacccgtgcaggagaagttcgtgtgcctgaactgcggcttcgagacacacgcagccgagcaagccgccctgaacatcgccagatcctggctgttcctgcggagccaggagtacaagaaataccagacaaacaagacaaccggcaacaccgataagagagccttcgtcgagacctggcagtccttttaccggaagaagcttaaggaggtgtggaaacctgccgtgcggtctggcggatctggcggaggctccaccagccccaagaaaaagagaaaagtctaagctgccttctgcggggcttgccttctggccatgcccttcttctctcccttgcacctgtacctcttggtctttgaataaagcctgagtaggaaggctagcaaaaaaaaaaaaaaaaaaaaaaaaaaaaaaaaaaaaaaaaaaaaaaaaaaaaaaaaaaaaaaaaaaaaaaaaaaaaaaaa

SEQ ID NO: 9502 - RNA, 8787 nt, synthetic construct
  source 1..8787: mol_type = other RNA
aggaaataagagagaaaagaagagtaagaagaaatataagagccaccatggcccctaagaagaagcgtaaagtgagccggatgaaccacgaccaggagttcgacccccctaaggtgtaccctcccgtccccgccgagaagagaaagcccatccgggtcctgagcctgttcgatggcatcgccaccggtctgctggtgctgaaggacctgggcatccaggtggataggtacattgcctccgaggtgtgcgaggactccatcaccgtgggaatggtgcgtcatcagggcaagatcatgtacgtgggcgacgtgcggagcgtgacacagaagcatatccaggagtggggccctttcgacctggtgatcggcggcagcccttgcaatgacctgagcatcgtgaacccagcccggaagggcctgtacgagggaaccggcagactgttcttcgagttttacagactgctgcacgacgcccggcctaaggaaggcgacgaccggcccttcttttggctgttcgagaatgtggtggccatgggagtcagcgacaagcgggatattagccggttcctggagagcaaccccgtgatgatcgatgccaaggaagtgagcgccgcccaccgggccagatacttctggggcaatctgcctggcatgaacagacccctggccagcaccgtgaacgacaagctggagctgcaggagtgcctggagcacggccggatcgccaagttcagcaaggtgagaaccatcaccacccgaagcaacagcatcaaacaaggcaaggaccagcactttcctgtgttcatgaacgagaaggaggacatcctgtggtgtaccgagatggagagagtgttcgggttcccagtccactacacagatgtcagcaacatgtctagactggccagacagagactgctgggaagaagctggtccgtccctgtgatcagacacctgttcgcccctctgaaggagtacttcgcctgcgtgagcagcggcaacagcaacgccaacagccggggccccagcttctctagcggcctggtgccactgtccctgagagggagccacatgggccccatggagatctacaaaaccgtgagcgcctggaagcggcagcctgtgcgcgtgctgagcctgtttcggaatatcgataaagtcctgaaaagcctgggattcctggagagcggctctggctccggcggtggcaccctgaagtacgtggaggatgtgacaaacgtggtcagacgggatgtggagaagtggggccccttcgatctggtgtacggcagcacccaacccctgggcagctcttgtgaccggtgccctggctggtacatgtttcagttccaccggatcctgcagtacgccctgccgagacaggagtcccagcggccattcttttggattttcatggacaacttgctgctgaccgaggatgaccaggaaactaccactcggttcctgcagaccgaagccgtgaccctgcaggacgtgagaggccgggactaccagaacgccatgcgggtgtggtccaacatccctggactgaaaagcaagcacgcacctctgacccctaaagaagaggagtacctgcaggcccaggtgcggagcagaagcaagctggacgcccctaaggtggatctgctggtgaagaattgcctcctgcccctgagagagtacttcaagtatttcagccagaatagtctgcccctgggaggcagcggcggcggcagccacaccctggtgaccttcaaggacatcctggtgaacttcaccagggaggagtggaagctgctggacaccgcccagcagatcatgtacaaggacgtgatgctggagaactacaggaacctggtgagcctgggccaccagctgcccaagcccgacgtgatcctgaggctggagaagggcgaggagccctggctggtggagaaggagatccaccaggagacccaccccgacctggagacccccggcggcccaagcagcggcgcccctcctcccagcggcggcaggcggcccaagcagcggcgcccctcctcccagcggcggcagcccagccggctccccaacctctaccgaggagggcacctctgagtccgccacccccgagagcggccctggcacctccaccgagcccagcgagggcagcgcacccggcagccctgccggcagccccacctccacagaggagggaaccagcaccgagcccagcgaaggcagcgccccaggcaccagcaccgagcctagtgagcaggagattaaacggatcaacaagatcagaagaagacttgtgaaagacagcaacaccaagaaggccggcaagacaggccccatgaaaaccctgctggttagagtgatgacacccgatctgagagagcggctggaaaacctgagaaagaagcctgaaaatatcccccagcccatcagcaatacatctagagccaacctgaataagctgctgaccgattacaccgaaatgaagaaggcgatcctgcatgtgtactgggaagagttccagaaggaccctgtgggcctgatgagccgggtggcccagcctgccagcaagaagatcgatcagaacaagctgaaacctgagatggacgagaagggcaacctgaccaccgccggctttgcctgctctcagtgtggccagcccctgttcgtgtacaagctggagcaggtgtctgagaagggcaaggcttacaccaactacttcggacggtgcaatgtggccgagcacgaaaagctgatcctgctggcccagctgaagcccgagaaggatagcgacgaagccgtgacatatagcctgggaaagtttgggcagagggccctggatttctacagcattcatgtgaccaaggagtccacccaccccgtgaagcccctggcccagatcgccggaaacagatacgcctccggacctgtgggaaaggccctgagcgacgcatgtatgggcacaatcgcctccttcctgtctaagtaccaggacatcatcatcgaacaccagaaggtggtgaagggcaaccagaagagactggagagcctgcgggagctggccggcaaggaaaacctggaataccctagcgtgaccctgccacctcagcctcacaccaaggagggcgttgatgcctacaacgaagtgatcgcccgggtgcgaatgtgggtgaacctgaacctgtggcagaagctgaagctaagcagagatgatgccaagcctctgctgagactgaagggattcccttcctttcctctggtcgagagacaggccaacgaagtggactggtgggacatggtgtgtaacgtgaagaagctgatcaacgagaaaaaggaggatggcaaggtgttttggcagaatctggctggctacaagagacaggaagccctgagaccatacctgagcagcgaggaagatcggaagaagggaaagaaattcgctcggtaccagctgggcgacctgctgctgcacctggaaaagaagcacggcgaggactggggaaaggtgtacgacgaggcctgggagcggattgacaagaaagtggaaggcctgagcaagcacatcaagctggaagaggaacggagaagcgaggacgcccagagcaaggccgccctgaccgactggctgcgggctaaggccagcttcgtgatcgagggcctgaaggaggccgacaaggacgagttctgcagatgcgagctgaagctgcagaagtggtacggggacctgcggggaaagcccttcgccatcgaagccgagaacagcatcctggacatcagcggcttcagcaagcagtacaactgtgccttcatctggcagaaggacggcgtgaagaagctgaacctgtacctgatcatcaactacttcaagggcggcaagctgcggttcaagaagatcaaacctgaagccttcgaagccaacagattctacaccgtgatcaacaaaaagagcggcgagatcgtgcccatggaggtgaacttcaacttcgacgaccccaacctgatcatcctgcctctggcctttggcaagagacagggcagagaattcatctggaacgacctgctgtccctggaaaccggcagcctgaagctggccaacggaagagtgatcgagaagacactgtacaacagaagaacccggcaggatgagcctgccctgttcgtggccctgaccttcgagcggcgggaggtcctggactcctccaatatcaaaccaatgaacctgatcggcgtggcaagaggcgaaaacatccccgccgtgatcgccctgaccgaccccgagggctgcccactgagccggtttaaggatagcctgggaaacccaacccacatcctgagaatcggcgagagctataaggagaagcagcggaccatccaggccaagaaggaggtggagcagcggagagccggcggctacagccggaagtacgccagcaaagccaagaatctggcagacgatatggtgagaaacaccgctagagatctgctgtactacgccgtgacccaggatgccatgctgatcttcgccaacctgagccggggcttcggccggcagggcaagcggaccttcatggccgagagacagtacacacggatggaggactggctgaccgccaagctggcctacgagggcctgagcaagacctacctgtccaagacactggcccagtacacctccaagacatgcagcaactgtgggtttaccatcaccagcgccgactacgacagggtgctggagaagctgaagaagacagcaacaggctggatgaccacaattaacggcaaggagctgaaggtggagggccagattacctactacaacagatacaagagacagaacgtagtcaaggacctgtccgtcgagctggatagactgagcgaagaatctgtgaacaacgacatctcctcctggacaaagggcagaagcggagaagctctgagcctcctgaagaaaagattctcccatagacccgtgcaggagaagttcgtgtgcctgaactgcggcttcgagacacacgcagccgagcaagccgccctgaacatcgccagatcctggctgttcctgcggagccaggagtacaagaaataccagacaaacaagacaaccggcaacaccgataagagagccttcgtcgagacctggcagtccttttaccggaagaagcttaaggaggtgtggaaacctgccgtgcggtctggcggatctggcggaggctccaccagccccaagaaaaagagaaaagtctaagctgccttctgcggggcttgccttctggccatgcccttcttctctcccttgcacctgtacctcttggtctttgaataaagcctgagtaggaaggctagcaaaaaaaaaaaaaaaaaaaaaaaaaaaaaaaaaaaaaaaaaaaaaaaaaaaaaaaaaaaaaaaaaaaaaaaaaaaaaaaagcccagccggctccccaacctctaccgaggagggcacctctgagtccgccacccccgagagcggccctggcacctccaccgagcccagcgagggcagcgcacccggcagccctgccggcagccccacctccacagaggagggaaccagcaccgagcccagcgaaggcagcgccccaggcaccagcaccgagcctagtgagcaggagattaaacggatcaacaagatcagaagaagacttgtgaaagacagcaacaccaagaaggccggcaagacaggccccatgaaaaccctgctggttagagtgatgacacccgatctgagagagcggctggaaaacctgagaaagaagcctgaaaatatcccccagcccatcagcaatacatctagagccaacctgaataagctgctgaccgattacaccgaaatgaagaaggcgatcctgcatgtgtactgggaagagttccagaaggaccctgtgggcctgatgagccgggtggcccagcctgccagcaagaagatcgatcagaacaagctgaaacctgagatggacgagaagggcaacctgaccaccgccggctttgcctgctctcagtgtggccagcccctgttcgtgtacaagctggagcaggtgtctgagaagggcaaggcttacaccaactacttcggacggtgcaatgtggccgagcacgaaaagctgatcctgctggcccagctgaagcccgagaaggatagcgacgaagccgtgacatatagcctgggaaagtttgggcagagggccctggatttctacagcattcatgtgaccaaggagtccacccaccccgtgaagcccctggcccagatcgccggaaacagatacgcctccggacctgtgggaaaggccctgagcgacgcatgtatgggcacaatcgcctccttcctgtctaagtaccaggacatcatcatcgaacaccagaaggtggtgaagggcaaccagaagagactggagagcctgcgggagctggccggcaaggaaaacctggaataccctagcgtgaccctgccacctcagcctcacaccaaggagggcgttgatgcctacaacgaagtgatcgcccgggtgcgaatgtgggtgaacctgaacctgtggcagaagctgaagctaagcagagatgatgccaagcctctgctgagactgaagggattcccttcctttcctctggtcgagagacaggccaacgaagtggactggtgggacatggtgtgtaacgtgaagaagctgatcaacgagaaaaaggaggatggcaaggtgttttggcagaatctggctggctacaagagacaggaagccctgagaccatacctgagcagcgaggaagatcggaagaagggaaagaaattcgctcggtaccagctgggcgacctgctgctgcacctggaaaagaagcacggcgaggactggggaaaggtgtacgacgaggcctgggagcggattgacaagaaagtggaaggcctgagcaagcacatcaagctggaagaggaacggagaagcgaggacgcccagagcaaggccgccctgaccgactggctgcgggctaaggccagcttcgtgatcgagggcctgaaggaggccgacaaggacgagttctgcagatgcgagctgaagctgcagaagtggtacggggacctgcggggaaagcccttcgccatcgaagccgagaacagcatcctggacatcagcggcttcagcaagcagtacaactgtgccttcatctggcagaaggacggcgtgaagaagctgaacctgtacctgatcatcaactacttcaagggcggcaagctgcggttcaagaagatcaaacctgaagccttcgaagccaacagattctacaccgtgatcaacaaaaagagcggcgagatcgtgcccatggaggtgaacttcaacttcgacgaccccaacctgatcatcctgcctctggcctttggcaagagacagggcagagaattcatctggaacgacctgctgtccctggaaaccggcagcctgaagctggccaacggaagagtgatcgagaagacactgtacaacagaagaacccggcaggatgagcctgccctgttcgtggccctgaccttcgagcggcgggaggtcctggactcctccaatatcaaaccaatgaacctgatcggcgtggcaagaggcgaaaacatccccgccgtgatcgccctgaccgaccccgagggctgcccactgagccggtttaaggatagcctgggaaacccaacccacatcctgagaatcggcgagagctataaggagaagcagcggaccatccaggccaagaaggaggtggagcagcggagagccggcggctacagccggaagtacgccagcaaagccaagaatctggcagacgatatggtgagaaacaccgctagagatctgctgtactacgccgtgacccaggatgccatgctgatcttcgccaacctgagccggggcttcggccggcagggcaagcggaccttcatggccgagagacagtacacacggatggaggactggctgaccgccaagctggcctacgagggcctgagcaagacctacctgtccaagacactggcccagtacacctccaagacatgcagcaactgtgggtttaccatcaccagcgccgactacgacagggtgctggagaagctgaagaagacagcaacaggctggatgaccacaattaacggcaaggagctgaaggtggagggccagattacctactacaacagatacaagagacagaacgtagtcaaggacctgtccgtcgagctggatagactgagcgaagaatctgtgaacaacgacatctcctcctggacaaagggcagaagcggagaagctctgagcctcctgaagaaaagattctcccatagacccgtgcaggagaagttcgtgtgcctgaactgcggcttcgagacacacgcagccgagcaagccgccctgaacatcgccagatcctggctgttcctgcggagccaggagtacaagaaataccagacaaacaagacaaccggcaacaccgataagagagccttcgtcgagacctggcagtccttttaccggaagaagcttaaggaggtgtggaaacctgccgtgcggtctggcggatctggcggaggctccaccagccccaagaaaaagagaaaagtctaagctgccttctgcggggcttgccttctggccatgcccttcttctctcccttgcacctgtacctcttggtctttgaataaagcctgagtaggaaggctagcaaaaaaaaaaaaaaaaaaaaaaaaaaaaaaaaaaaaaaaaaaaaaaaaaaaaaaaaaaaaaaaaaaaaaaaaaaaaaaaa

SEQ ID NO: 9503 - RNA, 8787 nt, synthetic construct
  source 1..8787: mol_type = other RNA
aggaaataagagagaaaagaagagtaagaagaaatataagagccaccatggcccctaagaagaagcgtaaagtgagccggatgaaccacgaccaggagttcgacccccctaaggtgtaccctcccgtccccgccgagaagagaaagcccatccgggtcctgagcctgttcgatggcatcgccaccggtctgctggtgctgaaggacctgggcatccaggtggataggtacattgcctccgaggtgtgcgaggactccatcaccgtgggaatggtgcgtcatcagggcaagatcatgtacgtgggcgacgtgcggagcgtgacacagaagcatatccaggagtggggccctttcgacctggtgatcggcggcagcccttgcaatgacctgagcatcgtgaacccagcccggaagggcctgtacgagggaaccggcagactgttcttcgagttttacagactgctgcacgacgcccggcctaaggaaggcgacgaccggcccttcttttggctgttcgagaatgtggtggccatgggagtcagcgacaagcgggatattagccggttcctggagagcaaccccgtgatgatcgatgccaaggaagtgagcgccgcccaccgggccagatacttctggggcaatctgcctggcatgaacagacccctggccagcaccgtgaacgacaagctggagctgcaggagtgcctggagcacggccggatcgccaagttcagcaaggtgagaaccatcaccacccgaagcaacagcatcaaacaaggcaaggaccagcactttcctgtgttcatgaacgagaaggaggacatcctgtggtgtaccgagatggagagagtgttcgggttcccagtccactacacagatgtcagcaacatgtctagactggccagacagagactgctgggaagaagctggtccgtccctgtgatcagacacctgttcgcccctctgaaggagtacttcgcctgcgtgagcagcggcaacagcaacgccaacagccggggccccagcttctctagcggcctggtgccactgtccctgagagggagccacatgggccccatggagatctacaaaaccgtgagcgcctggaagcggcagcctgtgcgcgtgctgagcctgtttcggaatatcgataaagtcctgaaaagcctgggattcctggagagcggctctggctccggcggtggcaccctgaagtacgtggaggatgtgacaaacgtggtcagacgggatgtggagaagtggggccccttcgatctggtgtacggcagcacccaacccctgggcagctcttgtgaccggtgccctggctggtacatgtttcagttccaccggatcctgcagtacgccctgccgagacaggagtcccagcggccattcttttggattttcatggacaacttgctgctgaccgaggatgaccaggaaactaccactcggttcctgcagaccgaagccgtgaccctgcaggacgtgagaggccgggactaccagaacgccatgcgggtgtggtccaacatccctggactgaaaagcaagcacgcacctctgacccctaaagaagaggagtacctgcaggcccaggtgcggagcagaagcaagctggacgcccctaaggtggatctgctggtgaagaattgcctcctgcccctgagagagtacttcaagtatttcagccagaatagtctgcccctgggaggcagcggcggcggcatgaacatggagggcctggtgatgttccaggacctgagcatcgacttcagccaggaggagtgggagtgcctgaaccccgcccagaaggacctgtacagggacgtgatgatggagaactacagcagcctgctgagcctgggcctgagcatccccaagcccgacgtgatcagcctgctggagcagggcaaggagccctggatggtgagcagggacatcctgggcggctggtgccccgacaggctgggcggcccaagcagcggcgcccctcctcccagcggcggcaggcggcccaagcagcggcgcccctcctcccagcggcggcagcccagccggctccccaacctctaccgaggagggcacctctgagtccgccacccccgagagcggccctggcacctccaccgagcccagcgagggcagcgcacccggcagccctgccggcagccccacctccacagaggagggaaccagcaccgagcccagcgaaggcagcgccccaggcaccagcaccgagcctagtgagcaggagattaaacggatcaacaagatcagaagaagacttgtgaaagacagcaacaccaagaaggccggcaagacaggccccatgaaaaccctgctggttagagtgatgacacccgatctgagagagcggctggaaaacctgagaaagaagcctgaaaatatcccccagcccatcagcaatacatctagagccaacctgaataagctgctgaccgattacaccgaaatgaagaaggcgatcctgcatgtgtactgggaagagttccagaaggaccctgtgggcctgatgagccgggtggcccagcctgccagcaagaagatcgatcagaacaagctgaaacctgagatggacgagaagggcaacctgaccaccgccggctttgcctgctctcagtgtggccagcccctgttcgtgtacaagctggagcaggtgtctgagaagggcaaggcttacaccaactacttcggacggtgcaatgtggccgagcacgaaaagctgatcctgctggcccagctgaagcccgagaaggatagcgacgaagccgtgacatatagcctgggaaagtttgggcagagggccctggatttctacagcattcatgtgaccaaggagtccacccaccccgtgaagcccctggcccagatcgccggaaacagatacgcctccggacctgtgggaaaggccctgagcgacgcatgtatgggcacaatcgcctccttcctgtctaagtaccaggacatcatcatcgaacaccagaaggtggtgaagggcaaccagaagagactggagagcctgcgggagctggccggcaaggaaaacctggaataccctagcgtgaccctgccacctcagcctcacaccaaggagggcgttgatgcctacaacgaagtgatcgcccgggtgcgaatgtgggtgaacctgaacctgtggcagaagctgaagctaagcagagatgatgccaagcctctgctgagactgaagggattcccttcctttcctctggtcgagagacaggccaacgaagtggactggtgggacatggtgtgtaacgtgaagaagctgatcaacgagaaaaaggaggatggcaaggtgttttggcagaatctggctggctacaagagacaggaagccctgagaccatacctgagcagcgaggaagatcggaagaagggaaagaaattcgctcggtaccagctgggcgacctgctgctgcacctggaaaagaagcacggcgaggactggggaaaggtgtacgacgaggcctgggagcggattgacaagaaagtggaaggcctgagcaagcacatcaagctggaagaggaacggagaagcgaggacgcccagagcaaggccgccctgaccgactggctgcgggctaaggccagcttcgtgatcgagggcctgaaggaggccgacaaggacgagttctgcagatgcgagctgaagctgcagaagtggtacggggacctgcggggaaagcccttcgccatcgaagccgagaacagcatcctggacatcagcggcttcagcaagcagtacaactgtgccttcatctggcagaaggacggcgtgaagaagctgaacctgtacctgatcatcaactacttcaagggcggcaagctgcggttcaagaagatcaaacctgaagccttcgaagccaacagattctacaccgtgatcaacaaaaagagcggcgagatcgtgcccatggaggtgaacttcaacttcgacgaccccaacctgatcatcctgcctctggcctttggcaagagacagggcagagaattcatctggaacgacctgctgtccctggaaaccggcagcctgaagctggccaacggaagagtgatcgagaagacactgtacaacagaagaacccggcaggatgagcctgccctgttcgtggccctgaccttcgagcggcgggaggtcctggactcctccaatatcaaaccaatgaacctgatcggcgtggcaagaggcgaaaacatccccgccgtgatcgccctgaccgaccccgagggctgcccactgagccggtttaaggatagcctgggaaacccaacccacatcctgagaatcggcgagagctataaggagaagcagcggaccatccaggccaagaaggaggtggagcagcggagagccggcggctacagccggaagtacgccagcaaagccaagaatctggcagacgatatggtgagaaacaccgctagagatctgctgtactacgccgtgacccaggatgccatgctgatcttcgccaacctgagccggggcttcggccggcagggcaagcggaccttcatggccgagagacagtacacacggatggaggactggctgaccgccaagctggcctacgagggcctgagcaagacctacctgtccaagacactggcccagtacacctccaagacatgcagcaactgtgggtttaccatcaccagcgccgactacgacagggtgctggagaagctgaagaagacagcaacaggctggatgaccacaattaacggcaaggagctgaaggtggagggccagattacctactacaacagatacaagagacagaacgtagtcaaggacctgtccgtcgagctggatagactgagcgaagaatctgtgaacaacgacatctcctcctggacaaagggcagaagcggagaagctctgagcctcctgaagaaaagattctcccatagacccgtgcaggagaagttcgtgtgcctgaactgcggcttcgagacacacgcagccgagcaagccgccctgaacatcgccagatcctggctgttcctgcggagccaggagtacaagaaataccagacaaacaagacaaccggcaacaccgataagagagccttcgtcgagacctggcagtccttttaccggaagaagcttaaggaggtgtggaaacctgccgtgcggtctggcggatctggcggaggctccaccagccccaagaaaaagagaaaagtctaagctgccttctgcggggcttgccttctggccatgcccttcttctctcccttgcacctgtacctcttggtctttgaataaagcctgagtaggaaggctagcaaaaaaaaaaaaaaaaaaaaaaaaaaaaaaaaaaaaaaaaaaaaaaaaaaaaaaaaaaaaaaaaaaaaaaaaaaaaaaaagcccagccggctccccaacctctaccgaggagggcacctctgagtccgccacccccgagagcggccctggcacctccaccgagcccagcgagggcagcgcacccggcagccctgccggcagccccacctccacagaggagggaaccagcaccgagcccagcgaaggcagcgccccaggcaccagcaccgagcctagtgagcaggagattaaacggatcaacaagatcagaagaagacttgtgaaagacagcaacaccaagaaggccggcaagacaggccccatgaaaaccctgctggttagagtgatgacacccgatctgagagagcggctggaaaacctgagaaagaagcctgaaaatatcccccagcccatcagcaatacatctagagccaacctgaataagctgctgaccgattacaccgaaatgaagaaggcgatcctgcatgtgtactgggaagagttccagaaggaccctgtgggcctgatgagccgggtggcccagcctgccagcaagaagatcgatcagaacaagctgaaacctgagatggacgagaagggcaacctgaccaccgccggctttgcctgctctcagtgtggccagcccctgttcgtgtacaagctggagcaggtgtctgagaagggcaaggcttacaccaactacttcggacggtgcaatgtggccgagcacgaaaagctgatcctgctggcccagctgaagcccgagaaggatagcgacgaagccgtgacatatagcctgggaaagtttgggcagagggccctggatttctacagcattcatgtgaccaaggagtccacccaccccgtgaagcccctggcccagatcgccggaaacagatacgcctccggacctgtgggaaaggccctgagcgacgcatgtatgggcacaatcgcctccttcctgtctaagtaccaggacatcatcatcgaacaccagaaggtggtgaagggcaaccagaagagactggagagcctgcgggagctggccggcaaggaaaacctggaataccctagcgtgaccctgccacctcagcctcacaccaaggagggcgttgatgcctacaacgaagtgatcgcccgggtgcgaatgtgggtgaacctgaacctgtggcagaagctgaagctaagcagagatgatgccaagcctctgctgagactgaagggattcccttcctttcctctggtcgagagacaggccaacgaagtggactggtgggacatggtgtgtaacgtgaagaagctgatcaacgagaaaaaggaggatggcaaggtgttttggcagaatctggctggctacaagagacaggaagccctgagaccatacctgagcagcgaggaagatcggaagaagggaaagaaattcgctcggtaccagctgggcgacctgctgctgcacctggaaaagaagcacggcgaggactggggaaaggtgtacgacgaggcctgggagcggattgacaagaaagtggaaggcctgagcaagcacatcaagctggaagaggaacggagaagcgaggacgcccagagcaaggccgccctgaccgactggctgcgggctaaggccagcttcgtgatcgagggcctgaaggaggccgacaaggacgagttctgcagatgcgagctgaagctgcagaagtggtacggggacctgcggggaaagcccttcgccatcgaagccgagaacagcatcctggacatcagcggcttcagcaagcagtacaactgtgccttcatctggcagaaggacggcgtgaagaagctgaacctgtacctgatcatcaactacttcaagggcggcaagctgcggttcaagaagatcaaacctgaagccttcgaagccaacagattctacaccgtgatcaacaaaaagagcggcgagatcgtgcccatggaggtgaacttcaacttcgacgaccccaacctgatcatcctgcctctggcctttggcaagagacagggcagagaattcatctggaacgacctgctgtccctggaaaccggcagcctgaagctggccaacggaagagtgatcgagaagacactgtacaacagaagaacccggcaggatgagcctgccctgttcgtggccctgaccttcgagcggcgggaggtcctggactcctccaatatcaaaccaatgaacctgatcggcgtggcaagaggcgaaaacatccccgccgtgatcgccctgaccgaccccgagggctgcccactgagccggtttaaggatagcctgggaaacccaacccacatcctgagaatcggcgagagctataaggagaagcagcggaccatccaggccaagaaggaggtggagcagcggagagccggcggctacagccggaagtacgccagcaaagccaagaatctggcagacgatatggtgagaaacaccgctagagatctgctgtactacgccgtgacccaggatgccatgctgatcttcgccaacctgagccggggcttcggccggcagggcaagcggaccttcatggccgagagacagtacacacggatggaggactggctgaccgccaagctggcctacgagggcctgagcaagacctacctgtccaagacactggcccagtacacctccaagacatgcagcaactgtgggtttaccatcaccagcgccgactacgacagggtgctggagaagctgaagaagacagcaacaggctggatgaccacaattaacggcaaggagctgaaggtggagggccagattacctactacaacagatacaagagacagaacgtagtcaaggacctgtccgtcgagctggatagactgagcgaagaatctgtgaacaacgacatctcctcctggacaaagggcagaagcggagaagctctgagcctcctgaagaaaagattctcccatagacccgtgcaggagaagttcgtgtgcctgaactgcggcttcgagacacacgcagccgagcaagccgccctgaacatcgccagatcctggctgttcctgcggagccaggagtacaagaaataccagacaaacaagacaaccggcaacaccgataagagagccttcgtcgagacctggcagtccttttaccggaagaagcttaaggaggtgtggaaacctgccgtgcggtctggcggatctggcggaggctccaccagccccaagaaaaagagaaaagtctaagctgccttctgcggggcttgccttctggccatgcccttcttctctcccttgcacctgtacctcttggtctttgaataaagcctgagtaggaaggctagcaaaaaaaaaaaaaaaaaaaaaaaaaaaaaaaaaaaaaaaaaaaaaaaaaaaaaaaaaaaaaaaaaaaaaaaaaaaaaaaa

SEQ ID NO: 9504 - RNA, 8787 nt, synthetic construct
  source 1..8787: mol_type = other RNA
aggaaataagagagaaaagaagagtaagaagaaatataagagccaccatggcccctaagaagaagcgtaaagtgagccggatgaaccacgaccaggagttcgacccccctaaggtgtaccctcccgtccccgccgagaagagaaagcccatccgggtcctgagcctgttcgatggcatcgccaccggtctgctggtgctgaaggacctgggcatccaggtggataggtacattgcctccgaggtgtgcgaggactccatcaccgtgggaatggtgcgtcatcagggcaagatcatgtacgtgggcgacgtgcggagcgtgacacagaagcatatccaggagtggggccctttcgacctggtgatcggcggcagcccttgcaatgacctgagcatcgtgaacccagcccggaagggcctgtacgagggaaccggcagactgttcttcgagttttacagactgctgcacgacgcccggcctaaggaaggcgacgaccggcccttcttttggctgttcgagaatgtggtggccatgggagtcagcgacaagcgggatattagccggttcctggagagcaaccccgtgatgatcgatgccaaggaagtgagcgccgcccaccgggccagatacttctggggcaatctgcctggcatgaacagacccctggccagcaccgtgaacgacaagctggagctgcaggagtgcctggagcacggccggatcgccaagttcagcaaggtgagaaccatcaccacccgaagcaacagcatcaaacaaggcaaggaccagcactttcctgtgttcatgaacgagaaggaggacatcctgtggtgtaccgagatggagagagtgttcgggttcccagtccactacacagatgtcagcaacatgtctagactggccagacagagactgctgggaagaagctggtccgtccctgtgatcagacacctgttcgcccctctgaaggagtacttcgcctgcgtgagcagcggcaacagcaacgccaacagccggggccccagcttctctagcggcctggtgccactgtccctgagagggagccacatgggccccatggagatctacaaaaccgtgagcgcctggaagcggcagcctgtgcgcgtgctgagcctgtttcggaatatcgataaagtcctgaaaagcctgggattcctggagagcggctctggctccggcggtggcaccctgaagtacgtggaggatgtgacaaacgtggtcagacgggatgtggagaagtggggccccttcgatctggtgtacggcagcacccaacccctgggcagctcttgtgaccggtgccctggctggtacatgtttcagttccaccggatcctgcagtacgccctgccgagacaggagtcccagcggccattcttttggattttcatggacaacttgctgctgaccgaggatgaccaggaaactaccactcggttcctgcagaccgaagccgtgaccctgcaggacgtgagaggccgggactaccagaacgccatgcgggtgtggtccaacatccctggactgaaaagcaagcacgcacctctgacccctaaagaagaggagtacctgcaggcccaggtgcggagcagaagcaagctggacgcccctaaggtggatctgctggtgaagaattgcctcctgcccctgagagagtacttcaagtatttcagccagaatagtctgcccctgggaggcagcggcggcggcaggcaggagcccgtgaccttcgaggacgtggccgtgtacttcacccagaacgagtgggccagcctggacagcgtgcagagggccctgtacagggaggtgatgctggagaactacgccaacgtggccagcctggccttccccttcaccacccccgtgctggtgagccagctggagcagggcgagctgccctggggcctggacccctgggagcccatgggcagggaggccctgaggggcatctgcggcggcccaagcagcggcgcccctcctcccagcggcggcaggcggcccaagcagcggcgcccctcctcccagcggcggcagcccagccggctccccaacctctaccgaggagggcacctctgagtccgccacccccgagagcggccctggcacctccaccgagcccagcgagggcagcgcacccggcagccctgccggcagccccacctccacagaggagggaaccagcaccgagcccagcgaaggcagcgccccaggcaccagcaccgagcctagtgagcaggagattaaacggatcaacaagatcagaagaagacttgtgaaagacagcaacaccaagaaggccggcaagacaggccccatgaaaaccctgctggttagagtgatgacacccgatctgagagagcggctggaaaacctgagaaagaagcctgaaaatatcccccagcccatcagcaatacatctagagccaacctgaataagctgctgaccgattacaccgaaatgaagaaggcgatcctgcatgtgtactgggaagagttccagaaggaccctgtgggcctgatgagccgggtggcccagcctgccagcaagaagatcgatcagaacaagctgaaacctgagatggacgagaagggcaacctgaccaccgccggctttgcctgctctcagtgtggccagcccctgttcgtgtacaagctggagcaggtgtctgagaagggcaaggcttacaccaactacttcggacggtgcaatgtggccgagcacgaaaagctgatcctgctggcccagctgaagcccgagaaggatagcgacgaagccgtgacatatagcctgggaaagtttgggcagagggccctggatttctacagcattcatgtgaccaaggagtccacccaccccgtgaagcccctggcccagatcgccggaaacagatacgcctccggacctgtgggaaaggccctgagcgacgcatgtatgggcacaatcgcctccttcctgtctaagtaccaggacatcatcatcgaacaccagaaggtggtgaagggcaaccagaagagactggagagcctgcgggagctggccggcaaggaaaacctggaataccctagcgtgaccctgccacctcagcctcacaccaaggagggcgttgatgcctacaacgaagtgatcgcccgggtgcgaatgtgggtgaacctgaacctgtggcagaagctgaagctaagcagagatgatgccaagcctctgctgagactgaagggattcccttcctttcctctggtcgagagacaggccaacgaagtggactggtgggacatggtgtgtaacgtgaagaagctgatcaacgagaaaaaggaggatggcaaggtgttttggcagaatctggctggctacaagagacaggaagccctgagaccatacctgagcagcgaggaagatcggaagaagggaaagaaattcgctcggtaccagctgggcgacctgctgctgcacctggaaaagaagcacggcgaggactggggaaaggtgtacgacgaggcctgggagcggattgacaagaaagtggaaggcctgagcaagcacatcaagctggaagaggaacggagaagcgaggacgcccagagcaaggccgccctgaccgactggctgcgggctaaggccagcttcgtgatcgagggcctgaaggaggccgacaaggacgagttctgcagatgcgagctgaagctgcagaagtggtacggggacctgcggggaaagcccttcgccatcgaagccgagaacagcatcctggacatcagcggcttcagcaagcagtacaactgtgccttcatctggcagaaggacggcgtgaagaagctgaacctgtacctgatcatcaactacttcaagggcggcaagctgcggttcaagaagatcaaacctgaagccttcgaagccaacagattctacaccgtgatcaacaaaaagagcggcgagatcgtgcccatggaggtgaacttcaacttcgacgaccccaacctgatcatcctgcctctggcctttggcaagagacagggcagagaattcatctggaacgacctgctgtccctggaaaccggcagcctgaagctggccaacggaagagtgatcgagaagacactgtacaacagaagaacccggcaggatgagcctgccctgttcgtggccctgaccttcgagcggcgggaggtcctggactcctccaatatcaaaccaatgaacctgatcggcgtggcaagaggcgaaaacatccccgccgtgatcgccctgaccgaccccgagggctgcccactgagccggtttaaggatagcctgggaaacccaacccacatcctgagaatcggcgagagctataaggagaagcagcggaccatccaggccaagaaggaggtggagcagcggagagccggcggctacagccggaagtacgccagcaaagccaagaatctggcagacgatatggtgagaaacaccgctagagatctgctgtactacgccgtgacccaggatgccatgctgatcttcgccaacctgagccggggcttcggccggcagggcaagcggaccttcatggccgagagacagtacacacggatggaggactggctgaccgccaagctggcctacgagggcctgagcaagacctacctgtccaagacactggcccagtacacctccaagacatgcagcaactgtgggtttaccatcaccagcgccgactacgacagggtgctggagaagctgaagaagacagcaacaggctggatgaccacaattaacggcaaggagctgaaggtggagggccagattacctactacaacagatacaagagacagaacgtagtcaaggacctgtccgtcgagctggatagactgagcgaagaatctgtgaacaacgacatctcctcctggacaaagggcagaagcggagaagctctgagcctcctgaagaaaagattctcccatagacccgtgcaggagaagttcgtgtgcctgaactgcggcttcgagacacacgcagccgagcaagccgccctgaacatcgccagatcctggctgttcctgcggagccaggagtacaagaaataccagacaaacaagacaaccggcaacaccgataagagagccttcgtcgagacctggcagtccttttaccggaagaagcttaaggaggtgtggaaacctgccgtgcggtctggcggatctggcggaggctccaccagccccaagaaaaagagaaaagtctaagctgccttctgcggggcttgccttctggccatgcccttcttctctcccttgcacctgtacctcttggtctttgaataaagcctgagtaggaaggctagcaaaaaaaaaaaaaaaaaaaaaaaaaaaaaaaaaaaaaaaaaaaaaaaaaaaaaaaaaaaaaaaaaaaaaaaaaaaaaaaagcccagccggctccccaacctctaccgaggagggcacctctgagtccgccacccccgagagcggccctggcacctccaccgagcccagcgagggcagcgcacccggcagccctgccggcagccccacctccacagaggagggaaccagcaccgagcccagcgaaggcagcgccccaggcaccagcaccgagcctagtgagcaggagattaaacggatcaacaagatcagaagaagacttgtgaaagacagcaacaccaagaaggccggcaagacaggccccatgaaaaccctgctggttagagtgatgacacccgatctgagagagcggctggaaaacctgagaaagaagcctgaaaatatcccccagcccatcagcaatacatctagagccaacctgaataagctgctgaccgattacaccgaaatgaagaaggcgatcctgcatgtgtactgggaagagttccagaaggaccctgtgggcctgatgagccgggtggcccagcctgccagcaagaagatcgatcagaacaagctgaaacctgagatggacgagaagggcaacctgaccaccgccggctttgcctgctctcagtgtggccagcccctgttcgtgtacaagctggagcaggtgtctgagaagggcaaggcttacaccaactacttcggacggtgcaatgtggccgagcacgaaaagctgatcctgctggcccagctgaagcccgagaaggatagcgacgaagccgtgacatatagcctgggaaagtttgggcagagggccctggatttctacagcattcatgtgaccaaggagtccacccaccccgtgaagcccctggcccagatcgccggaaacagatacgcctccggacctgtgggaaaggccctgagcgacgcatgtatgggcacaatcgcctccttcctgtctaagtaccaggacatcatcatcgaacaccagaaggtggtgaagggcaaccagaagagactggagagcctgcgggagctggccggcaaggaaaacctggaataccctagcgtgaccctgccacctcagcctcacaccaaggagggcgttgatgcctacaacgaagtgatcgcccgggtgcgaatgtgggtgaacctgaacctgtggcagaagctgaagctaagcagagatgatgccaagcctctgctgagactgaagggattcccttcctttcctctggtcgagagacaggccaacgaagtggactggtgggacatggtgtgtaacgtgaagaagctgatcaacgagaaaaaggaggatggcaaggtgttttggcagaatctggctggctacaagagacaggaagccctgagaccatacctgagcagcgaggaagatcggaagaagggaaagaaattcgctcggtaccagctgggcgacctgctgctgcacctggaaaagaagcacggcgaggactggggaaaggtgtacgacgaggcctgggagcggattgacaagaaagtggaaggcctgagcaagcacatcaagctggaagaggaacggagaagcgaggacgcccagagcaaggccgccctgaccgactggctgcgggctaaggccagcttcgtgatcgagggcctgaaggaggccgacaaggacgagttctgcagatgcgagctgaagctgcagaagtggtacggggacctgcggggaaagcccttcgccatcgaagccgagaacagcatcctggacatcagcggcttcagcaagcagtacaactgtgccttcatctggcagaaggacggcgtgaagaagctgaacctgtacctgatcatcaactacttcaagggcggcaagctgcggttcaagaagatcaaacctgaagccttcgaagccaacagattctacaccgtgatcaacaaaaagagcggcgagatcgtgcccatggaggtgaacttcaacttcgacgaccccaacctgatcatcctgcctctggcctttggcaagagacagggcagagaattcatctggaacgacctgctgtccctggaaaccggcagcctgaagctggccaacggaagagtgatcgagaagacactgtacaacagaagaacccggcaggatgagcctgccctgttcgtggccctgaccttcgagcggcgggaggtcctggactcctccaatatcaaaccaatgaacctgatcggcgtggcaagaggcgaaaacatccccgccgtgatcgccctgaccgaccccgagggctgcccactgagccggtttaaggatagcctgggaaacccaacccacatcctgagaatcggcgagagctataaggagaagcagcggaccatccaggccaagaaggaggtggagcagcggagagccggcggctacagccggaagtacgccagcaaagccaagaatctggcagacgatatggtgagaaacaccgctagagatctgctgtactacgccgtgacccaggatgccatgctgatcttcgccaacctgagccggggcttcggccggcagggcaagcggaccttcatggccgagagacagtacacacggatggaggactggctgaccgccaagctggcctacgagggcctgagcaagacctacctgtccaagacactggcccagtacacctccaagacatgcagcaactgtgggtttaccatcaccagcgccgactacgacagggtgctggagaagctgaagaagacagcaacaggctggatgaccacaattaacggcaaggagctgaaggtggagggccagattacctactacaacagatacaagagacagaacgtagtcaaggacctgtccgtcgagctggatagactgagcgaagaatctgtgaacaacgacatctcctcctggacaaagggcagaagcggagaagctctgagcctcctgaagaaaagattctcccatagacccgtgcaggagaagttcgtgtgcctgaactgcggcttcgagacacacgcagccgagcaagccgccctgaacatcgccagatcctggctgttcctgcggagccaggagtacaagaaataccagacaaacaagacaaccggcaacaccgataagagagccttcgtcgagacctggcagtccttttaccggaagaagcttaaggaggtgtggaaacctgccgtgcggtctggcggatctggcggaggctccaccagccccaagaaaaagagaaaagtctaagctgccttctgcggggcttgccttctggccatgcccttcttctctcccttgcacctgtacctcttggtctttgaataaagcctgagtaggaaggctagcaaaaaaaaaaaaaaaaaaaaaaaaaaaaaaaaaaaaaaaaaaaaaaaaaaaaaaaaaaaaaaaaaaaaaaaaaaaaaaaa

SEQ ID NO: 9505 - RNA, 8787 nt, synthetic construct
  source 1..8787: mol_type = other RNA
aggaaataagagagaaaagaagagtaagaagaaatataagagccaccatggcccctaagaagaagcgtaaagtgagccggatgaaccacgaccaggagttcgacccccctaaggtgtaccctcccgtccccgccgagaagagaaagcccatccgggtcctgagcctgttcgatggcatcgccaccggtctgctggtgctgaaggacctgggcatccaggtggataggtacattgcctccgaggtgtgcgaggactccatcaccgtgggaatggtgcgtcatcagggcaagatcatgtacgtgggcgacgtgcggagcgtgacacagaagcatatccaggagtggggccctttcgacctggtgatcggcggcagcccttgcaatgacctgagcatcgtgaacccagcccggaagggcctgtacgagggaaccggcagactgttcttcgagttttacagactgctgcacgacgcccggcctaaggaaggcgacgaccggcccttcttttggctgttcgagaatgtggtggccatgggagtcagcgacaagcgggatattagccggttcctggagagcaaccccgtgatgatcgatgccaaggaagtgagcgccgcccaccgggccagatacttctggggcaatctgcctggcatgaacagacccctggccagcaccgtgaacgacaagctggagctgcaggagtgcctggagcacggccggatcgccaagttcagcaaggtgagaaccatcaccacccgaagcaacagcatcaaacaaggcaaggaccagcactttcctgtgttcatgaacgagaaggaggacatcctgtggtgtaccgagatggagagagtgttcgggttcccagtccactacacagatgtcagcaacatgtctagactggccagacagagactgctgggaagaagctggtccgtccctgtgatcagacacctgttcgcccctctgaaggagtacttcgcctgcgtgagcagcggcaacagcaacgccaacagccggggccccagcttctctagcggcctggtgccactgtccctgagagggagccacatgggccccatggagatctacaaaaccgtgagcgcctggaagcggcagcctgtgcgcgtgctgagcctgtttcggaatatcgataaagtcctgaaaagcctgggattcctggagagcggctctggctccggcggtggcaccctgaagtacgtggaggatgtgacaaacgtggtcagacgggatgtggagaagtggggccccttcgatctggtgtacggcagcacccaacccctgggcagctcttgtgaccggtgccctggctggtacatgtttcagttccaccggatcctgcagtacgccctgccgagacaggagtcccagcggccattcttttggattttcatggacaacttgctgctgaccgaggatgaccaggaaactaccactcggttcctgcagaccgaagccgtgaccctgcaggacgtgagaggccgggactaccagaacgccatgcgggtgtggtccaacatccctggactgaaaagcaagcacgcacctctgacccctaaagaagaggagtacctgcaggcccaggtgcggagcagaagcaagctggacgcccctaaggtggatctgctggtgaagaattgcctcctgcccctgagagagtacttcaagtatttcagccagaatagtctgcccctgggaggcagcggcggcggcgtgaccttcgaggaggtggccgtgtacttcagcgccgaggagtgggccctgctgggccccgcccagagggccctgtacagggaggtgatgagggagaactacgaggccgtgaccagcctggcctgggccggcctgcccatcagcaagcccgacctgatcagctgcatggagaggggcgaggagccctgggtggcccacctgcagagccagaggaggagggagctgcccaggggcaggaacagcggcggcccaagcagcggcgcccctcctcccagcggcggcaggcggcccaagcagcggcgcccctcctcccagcggcggcagcccagccggctccccaacctctaccgaggagggcacctctgagtccgccacccccgagagcggccctggcacctccaccgagcccagcgagggcagcgcacccggcagccctgccggcagccccacctccacagaggagggaaccagcaccgagcccagcgaaggcagcgccccaggcaccagcaccgagcctagtgagcaggagattaaacggatcaacaagatcagaagaagacttgtgaaagacagcaacaccaagaaggccggcaagacaggccccatgaaaaccctgctggttagagtgatgacacccgatctgagagagcggctggaaaacctgagaaagaagcctgaaaatatcccccagcccatcagcaatacatctagagccaacctgaataagctgctgaccgattacaccgaaatgaagaaggcgatcctgcatgtgtactgggaagagttccagaaggaccctgtgggcctgatgagccgggtggcccagcctgccagcaagaagatcgatcagaacaagctgaaacctgagatggacgagaagggcaacctgaccaccgccggctttgcctgctctcagtgtggccagcccctgttcgtgtacaagctggagcaggtgtctgagaagggcaaggcttacaccaactacttcggacggtgcaatgtggccgagcacgaaaagctgatcctgctggcccagctgaagcccgagaaggatagcgacgaagccgtgacatatagcctgggaaagtttgggcagagggccctggatttctacagcattcatgtgaccaaggagtccacccaccccgtgaagcccctggcccagatcgccggaaacagatacgcctccggacctgtgggaaaggccctgagcgacgcatgtatgggcacaatcgcctccttcctgtctaagtaccaggacatcatcatcgaacaccagaaggtggtgaagggcaaccagaagagactggagagcctgcgggagctggccggcaaggaaaacctggaataccctagcgtgaccctgccacctcagcctcacaccaaggagggcgttgatgcctacaacgaagtgatcgcccgggtgcgaatgtgggtgaacctgaacctgtggcagaagctgaagctaagcagagatgatgccaagcctctgctgagactgaagggattcccttcctttcctctggtcgagagacaggccaacgaagtggactggtgggacatggtgtgtaacgtgaagaagctgatcaacgagaaaaaggaggatggcaaggtgttttggcagaatctggctggctacaagagacaggaagccctgagaccatacctgagcagcgaggaagatcggaagaagggaaagaaattcgctcggtaccagctgggcgacctgctgctgcacctggaaaagaagcacggcgaggactggggaaaggtgtacgacgaggcctgggagcggattgacaagaaagtggaaggcctgagcaagcacatcaagctggaagaggaacggagaagcgaggacgcccagagcaaggccgccctgaccgactggctgcgggctaaggccagcttcgtgatcgagggcctgaaggaggccgacaaggacgagttctgcagatgcgagctgaagctgcagaagtggtacggggacctgcggggaaagcccttcgccatcgaagccgagaacagcatcctggacatcagcggcttcagcaagcagtacaactgtgccttcatctggcagaaggacggcgtgaagaagctgaacctgtacctgatcatcaactacttcaagggcggcaagctgcggttcaagaagatcaaacctgaagccttcgaagccaacagattctacaccgtgatcaacaaaaagagcggcgagatcgtgcccatggaggtgaacttcaacttcgacgaccccaacctgatcatcctgcctctggcctttggcaagagacagggcagagaattcatctggaacgacctgctgtccctggaaaccggcagcctgaagctggccaacggaagagtgatcgagaagacactgtacaacagaagaacccggcaggatgagcctgccctgttcgtggccctgaccttcgagcggcgggaggtcctggactcctccaatatcaaaccaatgaacctgatcggcgtggcaagaggcgaaaacatccccgccgtgatcgccctgaccgaccccgagggctgcccactgagccggtttaaggatagcctgggaaacccaacccacatcctgagaatcggcgagagctataaggagaagcagcggaccatccaggccaagaaggaggtggagcagcggagagccggcggctacagccggaagtacgccagcaaagccaagaatctggcagacgatatggtgagaaacaccgctagagatctgctgtactacgccgtgacccaggatgccatgctgatcttcgccaacctgagccggggcttcggccggcagggcaagcggaccttcatggccgagagacagtacacacggatggaggactggctgaccgccaagctggcctacgagggcctgagcaagacctacctgtccaagacactggcccagtacacctccaagacatgcagcaactgtgggtttaccatcaccagcgccgactacgacagggtgctggagaagctgaagaagacagcaacaggctggatgaccacaattaacggcaaggagctgaaggtggagggccagattacctactacaacagatacaagagacagaacgtagtcaaggacctgtccgtcgagctggatagactgagcgaagaatctgtgaacaacgacatctcctcctggacaaagggcagaagcggagaagctctgagcctcctgaagaaaagattctcccatagacccgtgcaggagaagttcgtgtgcctgaactgcggcttcgagacacacgcagccgagcaagccgccctgaacatcgccagatcctggctgttcctgcggagccaggagtacaagaaataccagacaaacaagacaaccggcaacaccgataagagagccttcgtcgagacctggcagtccttttaccggaagaagcttaaggaggtgtggaaacctgccgtgcggtctggcggatctggcggaggctccaccagccccaagaaaaagagaaaagtctaagctgccttctgcggggcttgccttctggccatgcccttcttctctcccttgcacctgtacctcttggtctttgaataaagcctgagtaggaaggctagcaaaaaaaaaaaaaaaaaaaaaaaaaaaaaaaaaaaaaaaaaaaaaaaaaaaaaaaaaaaaaaaaaaaaaaaaaaaaaaaagcccagccggctccccaacctctaccgaggagggcacctctgagtccgccacccccgagagcggccctggcacctccaccgagcccagcgagggcagcgcacccggcagccctgccggcagccccacctccacagaggagggaaccagcaccgagcccagcgaaggcagcgccccaggcaccagcaccgagcctagtgagcaggagattaaacggatcaacaagatcagaagaagacttgtgaaagacagcaacaccaagaaggccggcaagacaggccccatgaaaaccctgctggttagagtgatgacacccgatctgagagagcggctggaaaacctgagaaagaagcctgaaaatatcccccagcccatcagcaatacatctagagccaacctgaataagctgctgaccgattacaccgaaatgaagaaggcgatcctgcatgtgtactgggaagagttccagaaggaccctgtgggcctgatgagccgggtggcccagcctgccagcaagaagatcgatcagaacaagctgaaacctgagatggacgagaagggcaacctgaccaccgccggctttgcctgctctcagtgtggccagcccctgttcgtgtacaagctggagcaggtgtctgagaagggcaaggcttacaccaactacttcggacggtgcaatgtggccgagcacgaaaagctgatcctgctggcccagctgaagcccgagaaggatagcgacgaagccgtgacatatagcctgggaaagtttgggcagagggccctggatttctacagcattcatgtgaccaaggagtccacccaccccgtgaagcccctggcccagatcgccggaaacagatacgcctccggacctgtgggaaaggccctgagcgacgcatgtatgggcacaatcgcctccttcctgtctaagtaccaggacatcatcatcgaacaccagaaggtggtgaagggcaaccagaagagactggagagcctgcgggagctggccggcaaggaaaacctggaataccctagcgtgaccctgccacctcagcctcacaccaaggagggcgttgatgcctacaacgaagtgatcgcccgggtgcgaatgtgggtgaacctgaacctgtggcagaagctgaagctaagcagagatgatgccaagcctctgctgagactgaagggattcccttcctttcctctggtcgagagacaggccaacgaagtggactggtgggacatggtgtgtaacgtgaagaagctgatcaacgagaaaaaggaggatggcaaggtgttttggcagaatctggctggctacaagagacaggaagccctgagaccatacctgagcagcgaggaagatcggaagaagggaaagaaattcgctcggtaccagctgggcgacctgctgctgcacctggaaaagaagcacggcgaggactggggaaaggtgtacgacgaggcctgggagcggattgacaagaaagtggaaggcctgagcaagcacatcaagctggaagaggaacggagaagcgaggacgcccagagcaaggccgccctgaccgactggctgcgggctaaggccagcttcgtgatcgagggcctgaaggaggccgacaaggacgagttctgcagatgcgagctgaagctgcagaagtggtacggggacctgcggggaaagcccttcgccatcgaagccgagaacagcatcctggacatcagcggcttcagcaagcagtacaactgtgccttcatctggcagaaggacggcgtgaagaagctgaacctgtacctgatcatcaactacttcaagggcggcaagctgcggttcaagaagatcaaacctgaagccttcgaagccaacagattctacaccgtgatcaacaaaaagagcggcgagatcgtgcccatggaggtgaacttcaacttcgacgaccccaacctgatcatcctgcctctggcctttggcaagagacagggcagagaattcatctggaacgacctgctgtccctggaaaccggcagcctgaagctggccaacggaagagtgatcgagaagacactgtacaacagaagaacccggcaggatgagcctgccctgttcgtggccctgaccttcgagcggcgggaggtcctggactcctccaatatcaaaccaatgaacctgatcggcgtggcaagaggcgaaaacatccccgccgtgatcgccctgaccgaccccgagggctgcccactgagccggtttaaggatagcctgggaaacccaacccacatcctgagaatcggcgagagctataaggagaagcagcggaccatccaggccaagaaggaggtggagcagcggagagccggcggctacagccggaagtacgccagcaaagccaagaatctggcagacgatatggtgagaaacaccgctagagatctgctgtactacgccgtgacccaggatgccatgctgatcttcgccaacctgagccggggcttcggccggcagggcaagcggaccttcatggccgagagacagtacacacggatggaggactggctgaccgccaagctggcctacgagggcctgagcaagacctacctgtccaagacactggcccagtacacctccaagacatgcagcaactgtgggtttaccatcaccagcgccgactacgacagggtgctggagaagctgaagaagacagcaacaggctggatgaccacaattaacggcaaggagctgaaggtggagggccagattacctactacaacagatacaagagacagaacgtagtcaaggacctgtccgtcgagctggatagactgagcgaagaatctgtgaacaacgacatctcctcctggacaaagggcagaagcggagaagctctgagcctcctgaagaaaagattctcccatagacccgtgcaggagaagttcgtgtgcctgaactgcggcttcgagacacacgcagccgagcaagccgccctgaacatcgccagatcctggctgttcctgcggagccaggagtacaagaaataccagacaaacaagacaaccggcaacaccgataagagagccttcgtcgagacctggcagtccttttaccggaagaagcttaaggaggtgtggaaacctgccgtgcggtctggcggatctggcggaggctccaccagccccaagaaaaagagaaaagtctaagctgccttctgcggggcttgccttctggccatgcccttcttctctcccttgcacctgtacctcttggtctttgaataaagcctgagtaggaaggctagcaaaaaaaaaaaaaaaaaaaaaaaaaaaaaaaaaaaaaaaaaaaaaaaaaaaaaaaaaaaaaaaaaaaaaaaaaaaaaaaa

SEQ ID NO: 9506 - RNA, 8787 nt, synthetic construct
  source 1..8787: mol_type = other RNA
aggaaataagagagaaaagaagagtaagaagaaatataagagccaccatggcccctaagaagaagcgtaaagtgagccggatgaaccacgaccaggagttcgacccccctaaggtgtaccctcccgtccccgccgagaagagaaagcccatccgggtcctgagcctgttcgatggcatcgccaccggtctgctggtgctgaaggacctgggcatccaggtggataggtacattgcctccgaggtgtgcgaggactccatcaccgtgggaatggtgcgtcatcagggcaagatcatgtacgtgggcgacgtgcggagcgtgacacagaagcatatccaggagtggggccctttcgacctggtgatcggcggcagcccttgcaatgacctgagcatcgtgaacccagcccggaagggcctgtacgagggaaccggcagactgttcttcgagttttacagactgctgcacgacgcccggcctaaggaaggcgacgaccggcccttcttttggctgttcgagaatgtggtggccatgggagtcagcgacaagcgggatattagccggttcctggagagcaaccccgtgatgatcgatgccaaggaagtgagcgccgcccaccgggccagatacttctggggcaatctgcctggcatgaacagacccctggccagcaccgtgaacgacaagctggagctgcaggagtgcctggagcacggccggatcgccaagttcagcaaggtgagaaccatcaccacccgaagcaacagcatcaaacaaggcaaggaccagcactttcctgtgttcatgaacgagaaggaggacatcctgtggtgtaccgagatggagagagtgttcgggttcccagtccactacacagatgtcagcaacatgtctagactggccagacagagactgctgggaagaagctggtccgtccctgtgatcagacacctgttcgcccctctgaaggagtacttcgcctgcgtgagcagcggcaacagcaacgccaacagccggggccccagcttctctagcggcctggtgccactgtccctgagagggagccacatgggccccatggagatctacaaaaccgtgagcgcctggaagcggcagcctgtgcgcgtgctgagcctgtttcggaatatcgataaagtcctgaaaagcctgggattcctggagagcggctctggctccggcggtggcaccctgaagtacgtggaggatgtgacaaacgtggtcagacgggatgtggagaagtggggccccttcgatctggtgtacggcagcacccaacccctgggcagctcttgtgaccggtgccctggctggtacatgtttcagttccaccggatcctgcagtacgccctgccgagacaggagtcccagcggccattcttttggattttcatggacaacttgctgctgaccgaggatgaccaggaaactaccactcggttcctgcagaccgaagccgtgaccctgcaggacgtgagaggccgggactaccagaacgccatgcgggtgtggtccaacatccctggactgaaaagcaagcacgcacctctgacccctaaagaagaggagtacctgcaggcccaggtgcggagcagaagcaagctggacgcccctaaggtggatctgctggtgaagaattgcctcctgcccctgagagagtacttcaagtatttcagccagaatagtctgcccctgggaggcagcggcggcggcgtgcagggcagcatgagcttcgaggacgtgatcgtggagttcacccaggacgagtggcagtacatgagccccgcccagaggatcctgtacagggacgtgatgctggagaactacagccacctgatcagcgtgggctactgcaccaccaagcccgagatgatcttcaagctggagcagggcgaggagccctggagcctggaggaggagttcctgaaccagaggtaccccggctacttcagcgtgggcggcccaagcagcggcgcccctcctcccagcggcggcaggcggcccaagcagcggcgcccctcctcccagcggcggcagcccagccggctccccaacctctaccgaggagggcacctctgagtccgccacccccgagagcggccctggcacctccaccgagcccagcgagggcagcgcacccggcagccctgccggcagccccacctccacagaggagggaaccagcaccgagcccagcgaaggcagcgccccaggcaccagcaccgagcctagtgagcaggagattaaacggatcaacaagatcagaagaagacttgtgaaagacagcaacaccaagaaggccggcaagacaggccccatgaaaaccctgctggttagagtgatgacacccgatctgagagagcggctggaaaacctgagaaagaagcctgaaaatatcccccagcccatcagcaatacatctagagccaacctgaataagctgctgaccgattacaccgaaatgaagaaggcgatcctgcatgtgtactgggaagagttccagaaggaccctgtgggcctgatgagccgggtggcccagcctgccagcaagaagatcgatcagaacaagctgaaacctgagatggacgagaagggcaacctgaccaccgccggctttgcctgctctcagtgtggccagcccctgttcgtgtacaagctggagcaggtgtctgagaagggcaaggcttacaccaactacttcggacggtgcaatgtggccgagcacgaaaagctgatcctgctggcccagctgaagcccgagaaggatagcgacgaagccgtgacatatagcctgggaaagtttgggcagagggccctggatttctacagcattcatgtgaccaaggagtccacccaccccgtgaagcccctggcccagatcgccggaaacagatacgcctccggacctgtgggaaaggccctgagcgacgcatgtatgggcacaatcgcctccttcctgtctaagtaccaggacatcatcatcgaacaccagaaggtggtgaagggcaaccagaagagactggagagcctgcgggagctggccggcaaggaaaacctggaataccctagcgtgaccctgccacctcagcctcacaccaaggagggcgttgatgcctacaacgaagtgatcgcccgggtgcgaatgtgggtgaacctgaacctgtggcagaagctgaagctaagcagagatgatgccaagcctctgctgagactgaagggattcccttcctttcctctggtcgagagacaggccaacgaagtggactggtgggacatggtgtgtaacgtgaagaagctgatcaacgagaaaaaggaggatggcaaggtgttttggcagaatctggctggctacaagagacaggaagccctgagaccatacctgagcagcgaggaagatcggaagaagggaaagaaattcgctcggtaccagctgggcgacctgctgctgcacctggaaaagaagcacggcgaggactggggaaaggtgtacgacgaggcctgggagcggattgacaagaaagtggaaggcctgagcaagcacatcaagctggaagaggaacggagaagcgaggacgcccagagcaaggccgccctgaccgactggctgcgggctaaggccagcttcgtgatcgagggcctgaaggaggccgacaaggacgagttctgcagatgcgagctgaagctgcagaagtggtacggggacctgcggggaaagcccttcgccatcgaagccgagaacagcatcctggacatcagcggcttcagcaagcagtacaactgtgccttcatctggcagaaggacggcgtgaagaagctgaacctgtacctgatcatcaactacttcaagggcggcaagctgcggttcaagaagatcaaacctgaagccttcgaagccaacagattctacaccgtgatcaacaaaaagagcggcgagatcgtgcccatggaggtgaacttcaacttcgacgaccccaacctgatcatcctgcctctggcctttggcaagagacagggcagagaattcatctggaacgacctgctgtccctggaaaccggcagcctgaagctggccaacggaagagtgatcgagaagacactgtacaacagaagaacccggcaggatgagcctgccctgttcgtggccctgaccttcgagcggcgggaggtcctggactcctccaatatcaaaccaatgaacctgatcggcgtggcaagaggcgaaaacatccccgccgtgatcgccctgaccgaccccgagggctgcccactgagccggtttaaggatagcctgggaaacccaacccacatcctgagaatcggcgagagctataaggagaagcagcggaccatccaggccaagaaggaggtggagcagcggagagccggcggctacagccggaagtacgccagcaaagccaagaatctggcagacgatatggtgagaaacaccgctagagatctgctgtactacgccgtgacccaggatgccatgctgatcttcgccaacctgagccggggcttcggccggcagggcaagcggaccttcatggccgagagacagtacacacggatggaggactggctgaccgccaagctggcctacgagggcctgagcaagacctacctgtccaagacactggcccagtacacctccaagacatgcagcaactgtgggtttaccatcaccagcgccgactacgacagggtgctggagaagctgaagaagacagcaacaggctggatgaccacaattaacggcaaggagctgaaggtggagggccagattacctactacaacagatacaagagacagaacgtagtcaaggacctgtccgtcgagctggatagactgagcgaagaatctgtgaacaacgacatctcctcctggacaaagggcagaagcggagaagctctgagcctcctgaagaaaagattctcccatagacccgtgcaggagaagttcgtgtgcctgaactgcggcttcgagacacacgcagccgagcaagccgccctgaacatcgccagatcctggctgttcctgcggagccaggagtacaagaaataccagacaaacaagacaaccggcaacaccgataagagagccttcgtcgagacctggcagtccttttaccggaagaagcttaaggaggtgtggaaacctgccgtgcggtctggcggatctggcggaggctccaccagccccaagaaaaagagaaaagtctaagctgccttctgcggggcttgccttctggccatgcccttcttctctcccttgcacctgtacctcttggtctttgaataaagcctgagtaggaaggctagcaaaaaaaaaaaaaaaaaaaaaaaaaaaaaaaaaaaaaaaaaaaaaaaaaaaaaaaaaaaaaaaaaaaaaaaaaaaaaaaagcccagccggctccccaacctctaccgaggagggcacctctgagtccgccacccccgagagcggccctggcacctccaccgagcccagcgagggcagcgcacccggcagccctgccggcagccccacctccacagaggagggaaccagcaccgagcccagcgaaggcagcgccccaggcaccagcaccgagcctagtgagcaggagattaaacggatcaacaagatcagaagaagacttgtgaaagacagcaacaccaagaaggccggcaagacaggccccatgaaaaccctgctggttagagtgatgacacccgatctgagagagcggctggaaaacctgagaaagaagcctgaaaatatcccccagcccatcagcaatacatctagagccaacctgaataagctgctgaccgattacaccgaaatgaagaaggcgatcctgcatgtgtactgggaagagttccagaaggaccctgtgggcctgatgagccgggtggcccagcctgccagcaagaagatcgatcagaacaagctgaaacctgagatggacgagaagggcaacctgaccaccgccggctttgcctgctctcagtgtggccagcccctgttcgtgtacaagctggagcaggtgtctgagaagggcaaggcttacaccaactacttcggacggtgcaatgtggccgagcacgaaaagctgatcctgctggcccagctgaagcccgagaaggatagcgacgaagccgtgacatatagcctgggaaagtttgggcagagggccctggatttctacagcattcatgtgaccaaggagtccacccaccccgtgaagcccctggcccagatcgccggaaacagatacgcctccggacctgtgggaaaggccctgagcgacgcatgtatgggcacaatcgcctccttcctgtctaagtaccaggacatcatcatcgaacaccagaaggtggtgaagggcaaccagaagagactggagagcctgcgggagctggccggcaaggaaaacctggaataccctagcgtgaccctgccacctcagcctcacaccaaggagggcgttgatgcctacaacgaagtgatcgcccgggtgcgaatgtgggtgaacctgaacctgtggcagaagctgaagctaagcagagatgatgccaagcctctgctgagactgaagggattcccttcctttcctctggtcgagagacaggccaacgaagtggactggtgggacatggtgtgtaacgtgaagaagctgatcaacgagaaaaaggaggatggcaaggtgttttggcagaatctggctggctacaagagacaggaagccctgagaccatacctgagcagcgaggaagatcggaagaagggaaagaaattcgctcggtaccagctgggcgacctgctgctgcacctggaaaagaagcacggcgaggactggggaaaggtgtacgacgaggcctgggagcggattgacaagaaagtggaaggcctgagcaagcacatcaagctggaagaggaacggagaagcgaggacgcccagagcaaggccgccctgaccgactggctgcgggctaaggccagcttcgtgatcgagggcctgaaggaggccgacaaggacgagttctgcagatgcgagctgaagctgcagaagtggtacggggacctgcggggaaagcccttcgccatcgaagccgagaacagcatcctggacatcagcggcttcagcaagcagtacaactgtgccttcatctggcagaaggacggcgtgaagaagctgaacctgtacctgatcatcaactacttcaagggcggcaagctgcggttcaagaagatcaaacctgaagccttcgaagccaacagattctacaccgtgatcaacaaaaagagcggcgagatcgtgcccatggaggtgaacttcaacttcgacgaccccaacctgatcatcctgcctctggcctttggcaagagacagggcagagaattcatctggaacgacctgctgtccctggaaaccggcagcctgaagctggccaacggaagagtgatcgagaagacactgtacaacagaagaacccggcaggatgagcctgccctgttcgtggccctgaccttcgagcggcgggaggtcctggactcctccaatatcaaaccaatgaacctgatcggcgtggcaagaggcgaaaacatccccgccgtgatcgccctgaccgaccccgagggctgcccactgagccggtttaaggatagcctgggaaacccaacccacatcctgagaatcggcgagagctataaggagaagcagcggaccatccaggccaagaaggaggtggagcagcggagagccggcggctacagccggaagtacgccagcaaagccaagaatctggcagacgatatggtgagaaacaccgctagagatctgctgtactacgccgtgacccaggatgccatgctgatcttcgccaacctgagccggggcttcggccggcagggcaagcggaccttcatggccgagagacagtacacacggatggaggactggctgaccgccaagctggcctacgagggcctgagcaagacctacctgtccaagacactggcccagtacacctccaagacatgcagcaactgtgggtttaccatcaccagcgccgactacgacagggtgctggagaagctgaagaagacagcaacaggctggatgaccacaattaacggcaaggagctgaaggtggagggccagattacctactacaacagatacaagagacagaacgtagtcaaggacctgtccgtcgagctggatagactgagcgaagaatctgtgaacaacgacatctcctcctggacaaagggcagaagcggagaagctctgagcctcctgaagaaaagattctcccatagacccgtgcaggagaagttcgtgtgcctgaactgcggcttcgagacacacgcagccgagcaagccgccctgaacatcgccagatcctggctgttcctgcggagccaggagtacaagaaataccagacaaacaagacaaccggcaacaccgataagagagccttcgtcgagacctggcagtccttttaccggaagaagcttaaggaggtgtggaaacctgccgtgcggtctggcggatctggcggaggctccaccagccccaagaaaaagagaaaagtctaagctgccttctgcggggcttgccttctggccatgcccttcttctctcccttgcacctgtacctcttggtctttgaataaagcctgagtaggaaggctagcaaaaaaaaaaaaaaaaaaaaaaaaaaaaaaaaaaaaaaaaaaaaaaaaaaaaaaaaaaaaaaaaaaaaaaaaaaaaaaaa

SEQ ID NO: 9507 - RNA, 8787 nt, synthetic construct
  source 1..8787: mol_type = other RNA
aggaaataagagagaaaagaagagtaagaagaaatataagagccaccatggcccctaagaagaagcgtaaagtgagccggatgaaccacgaccaggagttcgacccccctaaggtgtaccctcccgtccccgccgagaagagaaagcccatccgggtcctgagcctgttcgatggcatcgccaccggtctgctggtgctgaaggacctgggcatccaggtggataggtacattgcctccgaggtgtgcgaggactccatcaccgtgggaatggtgcgtcatcagggcaagatcatgtacgtgggcgacgtgcggagcgtgacacagaagcatatccaggagtggggccctttcgacctggtgatcggcggcagcccttgcaatgacctgagcatcgtgaacccagcccggaagggcctgtacgagggaaccggcagactgttcttcgagttttacagactgctgcacgacgcccggcctaaggaaggcgacgaccggcccttcttttggctgttcgagaatgtggtggccatgggagtcagcgacaagcgggatattagccggttcctggagagcaaccccgtgatgatcgatgccaaggaagtgagcgccgcccaccgggccagatacttctggggcaatctgcctggcatgaacagacccctggccagcaccgtgaacgacaagctggagctgcaggagtgcctggagcacggccggatcgccaagttcagcaaggtgagaaccatcaccacccgaagcaacagcatcaaacaaggcaaggaccagcactttcctgtgttcatgaacgagaaggaggacatcctgtggtgtaccgagatggagagagtgttcgggttcccagtccactacacagatgtcagcaacatgtctagactggccagacagagactgctgggaagaagctggtccgtccctgtgatcagacacctgttcgcccctctgaaggagtacttcgcctgcgtgagcagcggcaacagcaacgccaacagccggggccccagcttctctagcggcctggtgccactgtccctgagagggagccacatgggccccatggagatctacaaaaccgtgagcgcctggaagcggcagcctgtgcgcgtgctgagcctgtttcggaatatcgataaagtcctgaaaagcctgggattcctggagagcggctctggctccggcggtggcaccctgaagtacgtggaggatgtgacaaacgtggtcagacgggatgtggagaagtggggccccttcgatctggtgtacggcagcacccaacccctgggcagctcttgtgaccggtgccctggctggtacatgtttcagttccaccggatcctgcagtacgccctgccgagacaggagtcccagcggccattcttttggattttcatggacaacttgctgctgaccgaggatgaccaggaaactaccactcggttcctgcagaccgaagccgtgaccctgcaggacgtgagaggccgggactaccagaacgccatgcgggtgtggtccaacatccctggactgaaaagcaagcacgcacctctgacccctaaagaagaggagtacctgcaggcccaggtgcggagcagaagcaagctggacgcccctaaggtggatctgctggtgaagaattgcctcctgcccctgagagagtacttcaagtatttcagccagaatagtctgcccctgggaggcagcggcggcggcatggcccacctgatgttcagggacgtggccatcgacttcagccaggaggagtgggagggcctggacctgaagcagagggacctgtacagggacgtgatgctggagaactacagcaacatggtgagcctgggcctgtgcatctaccagcccgacgtgttcagcctgctggagaagggcaaggagccctggaagatcctgagggacgagaccaggggcccctgccccgacatgcagagcaggtgcggcggcccaagcagcggcgcccctcctcccagcggcggcaggcggcccaagcagcggcgcccctcctcccagcggcggcagcccagccggctccccaacctctaccgaggagggcacctctgagtccgccacccccgagagcggccctggcacctccaccgagcccagcgagggcagcgcacccggcagccctgccggcagccccacctccacagaggagggaaccagcaccgagcccagcgaaggcagcgccccaggcaccagcaccgagcctagtgagcaggagattaaacggatcaacaagatcagaagaagacttgtgaaagacagcaacaccaagaaggccggcaagacaggccccatgaaaaccctgctggttagagtgatgacacccgatctgagagagcggctggaaaacctgagaaagaagcctgaaaatatcccccagcccatcagcaatacatctagagccaacctgaataagctgctgaccgattacaccgaaatgaagaaggcgatcctgcatgtgtactgggaagagttccagaaggaccctgtgggcctgatgagccgggtggcccagcctgccagcaagaagatcgatcagaacaagctgaaacctgagatggacgagaagggcaacctgaccaccgccggctttgcctgctctcagtgtggccagcccctgttcgtgtacaagctggagcaggtgtctgagaagggcaaggcttacaccaactacttcggacggtgcaatgtggccgagcacgaaaagctgatcctgctggcccagctgaagcccgagaaggatagcgacgaagccgtgacatatagcctgggaaagtttgggcagagggccctggatttctacagcattcatgtgaccaaggagtccacccaccccgtgaagcccctggcccagatcgccggaaacagatacgcctccggacctgtgggaaaggccctgagcgacgcatgtatgggcacaatcgcctccttcctgtctaagtaccaggacatcatcatcgaacaccagaaggtggtgaagggcaaccagaagagactggagagcctgcgggagctggccggcaaggaaaacctggaataccctagcgtgaccctgccacctcagcctcacaccaaggagggcgttgatgcctacaacgaagtgatcgcccgggtgcgaatgtgggtgaacctgaacctgtggcagaagctgaagctaagcagagatgatgccaagcctctgctgagactgaagggattcccttcctttcctctggtcgagagacaggccaacgaagtggactggtgggacatggtgtgtaacgtgaagaagctgatcaacgagaaaaaggaggatggcaaggtgttttggcagaatctggctggctacaagagacaggaagccctgagaccatacctgagcagcgaggaagatcggaagaagggaaagaaattcgctcggtaccagctgggcgacctgctgctgcacctggaaaagaagcacggcgaggactggggaaaggtgtacgacgaggcctgggagcggattgacaagaaagtggaaggcctgagcaagcacatcaagctggaagaggaacggagaagcgaggacgcccagagcaaggccgccctgaccgactggctgcgggctaaggccagcttcgtgatcgagggcctgaaggaggccgacaaggacgagttctgcagatgcgagctgaagctgcagaagtggtacggggacctgcggggaaagcccttcgccatcgaagccgagaacagcatcctggacatcagcggcttcagcaagcagtacaactgtgccttcatctggcagaaggacggcgtgaagaagctgaacctgtacctgatcatcaactacttcaagggcggcaagctgcggttcaagaagatcaaacctgaagccttcgaagccaacagattctacaccgtgatcaacaaaaagagcggcgagatcgtgcccatggaggtgaacttcaacttcgacgaccccaacctgatcatcctgcctctggcctttggcaagagacagggcagagaattcatctggaacgacctgctgtccctggaaaccggcagcctgaagctggccaacggaagagtgatcgagaagacactgtacaacagaagaacccggcaggatgagcctgccctgttcgtggccctgaccttcgagcggcgggaggtcctggactcctccaatatcaaaccaatgaacctgatcggcgtggcaagaggcgaaaacatccccgccgtgatcgccctgaccgaccccgagggctgcccactgagccggtttaaggatagcctgggaaacccaacccacatcctgagaatcggcgagagctataaggagaagcagcggaccatccaggccaagaaggaggtggagcagcggagagccggcggctacagccggaagtacgccagcaaagccaagaatctggcagacgatatggtgagaaacaccgctagagatctgctgtactacgccgtgacccaggatgccatgctgatcttcgccaacctgagccggggcttcggccggcagggcaagcggaccttcatggccgagagacagtacacacggatggaggactggctgaccgccaagctggcctacgagggcctgagcaagacctacctgtccaagacactggcccagtacacctccaagacatgcagcaactgtgggtttaccatcaccagcgccgactacgacagggtgctggagaagctgaagaagacagcaacaggctggatgaccacaattaacggcaaggagctgaaggtggagggccagattacctactacaacagatacaagagacagaacgtagtcaaggacctgtccgtcgagctggatagactgagcgaagaatctgtgaacaacgacatctcctcctggacaaagggcagaagcggagaagctctgagcctcctgaagaaaagattctcccatagacccgtgcaggagaagttcgtgtgcctgaactgcggcttcgagacacacgcagccgagcaagccgccctgaacatcgccagatcctggctgttcctgcggagccaggagtacaagaaataccagacaaacaagacaaccggcaacaccgataagagagccttcgtcgagacctggcagtccttttaccggaagaagcttaaggaggtgtggaaacctgccgtgcggtctggcggatctggcggaggctccaccagccccaagaaaaagagaaaagtctaagctgccttctgcggggcttgccttctggccatgcccttcttctctcccttgcacctgtacctcttggtctttgaataaagcctgagtaggaaggctagcaaaaaaaaaaaaaaaaaaaaaaaaaaaaaaaaaaaaaaaaaaaaaaaaaaaaaaaaaaaaaaaaaaaaaaaaaaaaaaaagcccagccggctccccaacctctaccgaggagggcacctctgagtccgccacccccgagagcggccctggcacctccaccgagcccagcgagggcagcgcacccggcagccctgccggcagccccacctccacagaggagggaaccagcaccgagcccagcgaaggcagcgccccaggcaccagcaccgagcctagtgagcaggagattaaacggatcaacaagatcagaagaagacttgtgaaagacagcaacaccaagaaggccggcaagacaggccccatgaaaaccctgctggttagagtgatgacacccgatctgagagagcggctggaaaacctgagaaagaagcctgaaaatatcccccagcccatcagcaatacatctagagccaacctgaataagctgctgaccgattacaccgaaatgaagaaggcgatcctgcatgtgtactgggaagagttccagaaggaccctgtgggcctgatgagccgggtggcccagcctgccagcaagaagatcgatcagaacaagctgaaacctgagatggacgagaagggcaacctgaccaccgccggctttgcctgctctcagtgtggccagcccctgttcgtgtacaagctggagcaggtgtctgagaagggcaaggcttacaccaactacttcggacggtgcaatgtggccgagcacgaaaagctgatcctgctggcccagctgaagcccgagaaggatagcgacgaagccgtgacatatagcctgggaaagtttgggcagagggccctggatttctacagcattcatgtgaccaaggagtccacccaccccgtgaagcccctggcccagatcgccggaaacagatacgcctccggacctgtgggaaaggccctgagcgacgcatgtatgggcacaatcgcctccttcctgtctaagtaccaggacatcatcatcgaacaccagaaggtggtgaagggcaaccagaagagactggagagcctgcgggagctggccggcaaggaaaacctggaataccctagcgtgaccctgccacctcagcctcacaccaaggagggcgttgatgcctacaacgaagtgatcgcccgggtgcgaatgtgggtgaacctgaacctgtggcagaagctgaagctaagcagagatgatgccaagcctctgctgagactgaagggattcccttcctttcctctggtcgagagacaggccaacgaagtggactggtgggacatggtgtgtaacgtgaagaagctgatcaacgagaaaaaggaggatggcaaggtgttttggcagaatctggctggctacaagagacaggaagccctgagaccatacctgagcagcgaggaagatcggaagaagggaaagaaattcgctcggtaccagctgggcgacctgctgctgcacctggaaaagaagcacggcgaggactggggaaaggtgtacgacgaggcctgggagcggattgacaagaaagtggaaggcctgagcaagcacatcaagctggaagaggaacggagaagcgaggacgcccagagcaaggccgccctgaccgactggctgcgggctaaggccagcttcgtgatcgagggcctgaaggaggccgacaaggacgagttctgcagatgcgagctgaagctgcagaagtggtacggggacctgcggggaaagcccttcgccatcgaagccgagaacagcatcctggacatcagcggcttcagcaagcagtacaactgtgccttcatctggcagaaggacggcgtgaagaagctgaacctgtacctgatcatcaactacttcaagggcggcaagctgcggttcaagaagatcaaacctgaagccttcgaagccaacagattctacaccgtgatcaacaaaaagagcggcgagatcgtgcccatggaggtgaacttcaacttcgacgaccccaacctgatcatcctgcctctggcctttggcaagagacagggcagagaattcatctggaacgacctgctgtccctggaaaccggcagcctgaagctggccaacggaagagtgatcgagaagacactgtacaacagaagaacccggcaggatgagcctgccctgttcgtggccctgaccttcgagcggcgggaggtcctggactcctccaatatcaaaccaatgaacctgatcggcgtggcaagaggcgaaaacatccccgccgtgatcgccctgaccgaccccgagggctgcccactgagccggtttaaggatagcctgggaaacccaacccacatcctgagaatcggcgagagctataaggagaagcagcggaccatccaggccaagaaggaggtggagcagcggagagccggcggctacagccggaagtacgccagcaaagccaagaatctggcagacgatatggtgagaaacaccgctagagatctgctgtactacgccgtgacccaggatgccatgctgatcttcgccaacctgagccggggcttcggccggcagggcaagcggaccttcatggccgagagacagtacacacggatggaggactggctgaccgccaagctggcctacgagggcctgagcaagacctacctgtccaagacactggcccagtacacctccaagacatgcagcaactgtgggtttaccatcaccagcgccgactacgacagggtgctggagaagctgaagaagacagcaacaggctggatgaccacaattaacggcaaggagctgaaggtggagggccagattacctactacaacagatacaagagacagaacgtagtcaaggacctgtccgtcgagctggatagactgagcgaagaatctgtgaacaacgacatctcctcctggacaaagggcagaagcggagaagctctgagcctcctgaagaaaagattctcccatagacccgtgcaggagaagttcgtgtgcctgaactgcggcttcgagacacacgcagccgagcaagccgccctgaacatcgccagatcctggctgttcctgcggagccaggagtacaagaaataccagacaaacaagacaaccggcaacaccgataagagagccttcgtcgagacctggcagtccttttaccggaagaagcttaaggaggtgtggaaacctgccgtgcggtctggcggatctggcggaggctccaccagccccaagaaaaagagaaaagtctaagctgccttctgcggggcttgccttctggccatgcccttcttctctcccttgcacctgtacctcttggtctttgaataaagcctgagtaggaaggctagcaaaaaaaaaaaaaaaaaaaaaaaaaaaaaaaaaaaaaaaaaaaaaaaaaaaaaaaaaaaaaaaaaaaaaaaaaaaaaaaa

SEQ ID NO: 9508 - RNA, 8787 nt, synthetic construct
  source 1..8787: mol_type = other RNA
aggaaataagagagaaaagaagagtaagaagaaatataagagccaccatggcccctaagaagaagcgtaaagtgagccggatgaaccacgaccaggagttcgacccccctaaggtgtaccctcccgtccccgccgagaagagaaagcccatccgggtcctgagcctgttcgatggcatcgccaccggtctgctggtgctgaaggacctgggcatccaggtggataggtacattgcctccgaggtgtgcgaggactccatcaccgtgggaatggtgcgtcatcagggcaagatcatgtacgtgggcgacgtgcggagcgtgacacagaagcatatccaggagtggggccctttcgacctggtgatcggcggcagcccttgcaatgacctgagcatcgtgaacccagcccggaagggcctgtacgagggaaccggcagactgttcttcgagttttacagactgctgcacgacgcccggcctaaggaaggcgacgaccggcccttcttttggctgttcgagaatgtggtggccatgggagtcagcgacaagcgggatattagccggttcctggagagcaaccccgtgatgatcgatgccaaggaagtgagcgccgcccaccgggccagatacttctggggcaatctgcctggcatgaacagacccctggccagcaccgtgaacgacaagctggagctgcaggagtgcctggagcacggccggatcgccaagttcagcaaggtgagaaccatcaccacccgaagcaacagcatcaaacaaggcaaggaccagcactttcctgtgttcatgaacgagaaggaggacatcctgtggtgtaccgagatggagagagtgttcgggttcccagtccactacacagatgtcagcaacatgtctagactggccagacagagactgctgggaagaagctggtccgtccctgtgatcagacacctgttcgcccctctgaaggagtacttcgcctgcgtgagcagcggcaacagcaacgccaacagccggggccccagcttctctagcggcctggtgccactgtccctgagagggagccacatgggccccatggagatctacaaaaccgtgagcgcctggaagcggcagcctgtgcgcgtgctgagcctgtttcggaatatcgataaagtcctgaaaagcctgggattcctggagagcggctctggctccggcggtggcaccctgaagtacgtggaggatgtgacaaacgtggtcagacgggatgtggagaagtggggccccttcgatctggtgtacggcagcacccaacccctgggcagctcttgtgaccggtgccctggctggtacatgtttcagttccaccggatcctgcagtacgccctgccgagacaggagtcccagcggccattcttttggattttcatggacaacttgctgctgaccgaggatgaccaggaaactaccactcggttcctgcagaccgaagccgtgaccctgcaggacgtgagaggccgggactaccagaacgccatgcgggtgtggtccaacatccctggactgaaaagcaagcacgcacctctgacccctaaagaagaggagtacctgcaggcccaggtgcggagcagaagcaagctggacgcccctaaggtggatctgctggtgaagaattgcctcctgcccctgagagagtacttcaagtatttcagccagaatagtctgcccctgggaggcagcggcggcggcgcccacggcctggtgatgttcaaggacgtggccatcgacgtgagccaggaggagtgggagtgcctgaaccccacccagaggagcctgtacaaggacgtgatgctggagaactacagcaacctggtgagcctgggcctgagcatcagcaagcccgccgtgatcagcagcctggagcagggcaaggagccctggatggtggtgagggaggtgaccggcgagcagtgccccgacctggtgagcaggggcggcccaagcagcggcgcccctcctcccagcggcggcaggcggcccaagcagcggcgcccctcctcccagcggcggcagcccagccggctccccaacctctaccgaggagggcacctctgagtccgccacccccgagagcggccctggcacctccaccgagcccagcgagggcagcgcacccggcagccctgccggcagccccacctccacagaggagggaaccagcaccgagcccagcgaaggcagcgccccaggcaccagcaccgagcctagtgagcaggagattaaacggatcaacaagatcagaagaagacttgtgaaagacagcaacaccaagaaggccggcaagacaggccccatgaaaaccctgctggttagagtgatgacacccgatctgagagagcggctggaaaacctgagaaagaagcctgaaaatatcccccagcccatcagcaatacatctagagccaacctgaataagctgctgaccgattacaccgaaatgaagaaggcgatcctgcatgtgtactgggaagagttccagaaggaccctgtgggcctgatgagccgggtggcccagcctgccagcaagaagatcgatcagaacaagctgaaacctgagatggacgagaagggcaacctgaccaccgccggctttgcctgctctcagtgtggccagcccctgttcgtgtacaagctggagcaggtgtctgagaagggcaaggcttacaccaactacttcggacggtgcaatgtggccgagcacgaaaagctgatcctgctggcccagctgaagcccgagaaggatagcgacgaagccgtgacatatagcctgggaaagtttgggcagagggccctggatttctacagcattcatgtgaccaaggagtccacccaccccgtgaagcccctggcccagatcgccggaaacagatacgcctccggacctgtgggaaaggccctgagcgacgcatgtatgggcacaatcgcctccttcctgtctaagtaccaggacatcatcatcgaacaccagaaggtggtgaagggcaaccagaagagactggagagcctgcgggagctggccggcaaggaaaacctggaataccctagcgtgaccctgccacctcagcctcacaccaaggagggcgttgatgcctacaacgaagtgatcgcccgggtgcgaatgtgggtgaacctgaacctgtggcagaagctgaagctaagcagagatgatgccaagcctctgctgagactgaagggattcccttcctttcctctggtcgagagacaggccaacgaagtggactggtgggacatggtgtgtaacgtgaagaagctgatcaacgagaaaaaggaggatggcaaggtgttttggcagaatctggctggctacaagagacaggaagccctgagaccatacctgagcagcgaggaagatcggaagaagggaaagaaattcgctcggtaccagctgggcgacctgctgctgcacctggaaaagaagcacggcgaggactggggaaaggtgtacgacgaggcctgggagcggattgacaagaaagtggaaggcctgagcaagcacatcaagctggaagaggaacggagaagcgaggacgcccagagcaaggccgccctgaccgactggctgcgggctaaggccagcttcgtgatcgagggcctgaaggaggccgacaaggacgagttctgcagatgcgagctgaagctgcagaagtggtacggggacctgcggggaaagcccttcgccatcgaagccgagaacagcatcctggacatcagcggcttcagcaagcagtacaactgtgccttcatctggcagaaggacggcgtgaagaagctgaacctgtacctgatcatcaactacttcaagggcggcaagctgcggttcaagaagatcaaacctgaagccttcgaagccaacagattctacaccgtgatcaacaaaaagagcggcgagatcgtgcccatggaggtgaacttcaacttcgacgaccccaacctgatcatcctgcctctggcctttggcaagagacagggcagagaattcatctggaacgacctgctgtccctggaaaccggcagcctgaagctggccaacggaagagtgatcgagaagacactgtacaacagaagaacccggcaggatgagcctgccctgttcgtggccctgaccttcgagcggcgggaggtcctggactcctccaatatcaaaccaatgaacctgatcggcgtggcaagaggcgaaaacatccccgccgtgatcgccctgaccgaccccgagggctgcccactgagccggtttaaggatagcctgggaaacccaacccacatcctgagaatcggcgagagctataaggagaagcagcggaccatccaggccaagaaggaggtggagcagcggagagccggcggctacagccggaagtacgccagcaaagccaagaatctggcagacgatatggtgagaaacaccgctagagatctgctgtactacgccgtgacccaggatgccatgctgatcttcgccaacctgagccggggcttcggccggcagggcaagcggaccttcatggccgagagacagtacacacggatggaggactggctgaccgccaagctggcctacgagggcctgagcaagacctacctgtccaagacactggcccagtacacctccaagacatgcagcaactgtgggtttaccatcaccagcgccgactacgacagggtgctggagaagctgaagaagacagcaacaggctggatgaccacaattaacggcaaggagctgaaggtggagggccagattacctactacaacagatacaagagacagaacgtagtcaaggacctgtccgtcgagctggatagactgagcgaagaatctgtgaacaacgacatctcctcctggacaaagggcagaagcggagaagctctgagcctcctgaagaaaagattctcccatagacccgtgcaggagaagttcgtgtgcctgaactgcggcttcgagacacacgcagccgagcaagccgccctgaacatcgccagatcctggctgttcctgcggagccaggagtacaagaaataccagacaaacaagacaaccggcaacaccgataagagagccttcgtcgagacctggcagtccttttaccggaagaagcttaaggaggtgtggaaacctgccgtgcggtctggcggatctggcggaggctccaccagccccaagaaaaagagaaaagtctaagctgccttctgcggggcttgccttctggccatgcccttcttctctcccttgcacctgtacctcttggtctttgaataaagcctgagtaggaaggctagcaaaaaaaaaaaaaaaaaaaaaaaaaaaaaaaaaaaaaaaaaaaaaaaaaaaaaaaaaaaaaaaaaaaaaaaaaaaaaaaagcccagccggctccccaacctctaccgaggagggcacctctgagtccgccacccccgagagcggccctggcacctccaccgagcccagcgagggcagcgcacccggcagccctgccggcagccccacctccacagaggagggaaccagcaccgagcccagcgaaggcagcgccccaggcaccagcaccgagcctagtgagcaggagattaaacggatcaacaagatcagaagaagacttgtgaaagacagcaacaccaagaaggccggcaagacaggccccatgaaaaccctgctggttagagtgatgacacccgatctgagagagcggctggaaaacctgagaaagaagcctgaaaatatcccccagcccatcagcaatacatctagagccaacctgaataagctgctgaccgattacaccgaaatgaagaaggcgatcctgcatgtgtactgggaagagttccagaaggaccctgtgggcctgatgagccgggtggcccagcctgccagcaagaagatcgatcagaacaagctgaaacctgagatggacgagaagggcaacctgaccaccgccggctttgcctgctctcagtgtggccagcccctgttcgtgtacaagctggagcaggtgtctgagaagggcaaggcttacaccaactacttcggacggtgcaatgtggccgagcacgaaaagctgatcctgctggcccagctgaagcccgagaaggatagcgacgaagccgtgacatatagcctgggaaagtttgggcagagggccctggatttctacagcattcatgtgaccaaggagtccacccaccccgtgaagcccctggcccagatcgccggaaacagatacgcctccggacctgtgggaaaggccctgagcgacgcatgtatgggcacaatcgcctccttcctgtctaagtaccaggacatcatcatcgaacaccagaaggtggtgaagggcaaccagaagagactggagagcctgcgggagctggccggcaaggaaaacctggaataccctagcgtgaccctgccacctcagcctcacaccaaggagggcgttgatgcctacaacgaagtgatcgcccgggtgcgaatgtgggtgaacctgaacctgtggcagaagctgaagctaagcagagatgatgccaagcctctgctgagactgaagggattcccttcctttcctctggtcgagagacaggccaacgaagtggactggtgggacatggtgtgtaacgtgaagaagctgatcaacgagaaaaaggaggatggcaaggtgttttggcagaatctggctggctacaagagacaggaagccctgagaccatacctgagcagcgaggaagatcggaagaagggaaagaaattcgctcggtaccagctgggcgacctgctgctgcacctggaaaagaagcacggcgaggactggggaaaggtgtacgacgaggcctgggagcggattgacaagaaagtggaaggcctgagcaagcacatcaagctggaagaggaacggagaagcgaggacgcccagagcaaggccgccctgaccgactggctgcgggctaaggccagcttcgtgatcgagggcctgaaggaggccgacaaggacgagttctgcagatgcgagctgaagctgcagaagtggtacggggacctgcggggaaagcccttcgccatcgaagccgagaacagcatcctggacatcagcggcttcagcaagcagtacaactgtgccttcatctggcagaaggacggcgtgaagaagctgaacctgtacctgatcatcaactacttcaagggcggcaagctgcggttcaagaagatcaaacctgaagccttcgaagccaacagattctacaccgtgatcaacaaaaagagcggcgagatcgtgcccatggaggtgaacttcaacttcgacgaccccaacctgatcatcctgcctctggcctttggcaagagacagggcagagaattcatctggaacgacctgctgtccctggaaaccggcagcctgaagctggccaacggaagagtgatcgagaagacactgtacaacagaagaacccggcaggatgagcctgccctgttcgtggccctgaccttcgagcggcgggaggtcctggactcctccaatatcaaaccaatgaacctgatcggcgtggcaagaggcgaaaacatccccgccgtgatcgccctgaccgaccccgagggctgcccactgagccggtttaaggatagcctgggaaacccaacccacatcctgagaatcggcgagagctataaggagaagcagcggaccatccaggccaagaaggaggtggagcagcggagagccggcggctacagccggaagtacgccagcaaagccaagaatctggcagacgatatggtgagaaacaccgctagagatctgctgtactacgccgtgacccaggatgccatgctgatcttcgccaacctgagccggggcttcggccggcagggcaagcggaccttcatggccgagagacagtacacacggatggaggactggctgaccgccaagctggcctacgagggcctgagcaagacctacctgtccaagacactggcccagtacacctccaagacatgcagcaactgtgggtttaccatcaccagcgccgactacgacagggtgctggagaagctgaagaagacagcaacaggctggatgaccacaattaacggcaaggagctgaaggtggagggccagattacctactacaacagatacaagagacagaacgtagtcaaggacctgtccgtcgagctggatagactgagcgaagaatctgtgaacaacgacatctcctcctggacaaagggcagaagcggagaagctctgagcctcctgaagaaaagattctcccatagacccgtgcaggagaagttcgtgtgcctgaactgcggcttcgagacacacgcagccgagcaagccgccctgaacatcgccagatcctggctgttcctgcggagccaggagtacaagaaataccagacaaacaagacaaccggcaacaccgataagagagccttcgtcgagacctggcagtccttttaccggaagaagcttaaggaggtgtggaaacctgccgtgcggtctggcggatctggcggaggctccaccagccccaagaaaaagagaaaagtctaagctgccttctgcggggcttgccttctggccatgcccttcttctctcccttgcacctgtacctcttggtctttgaataaagcctgagtaggaaggctagcaaaaaaaaaaaaaaaaaaaaaaaaaaaaaaaaaaaaaaaaaaaaaaaaaaaaaaaaaaaaaaaaaaaaaaaaaaaaaaaa

SEQ ID NO: 9509 - RNA, 8787 nt, synthetic construct
  source 1..8787: mol_type = other RNA
aggaaataagagagaaaagaagagtaagaagaaatataagagccaccatggcccctaagaagaagcgtaaagtgagccggatgaaccacgaccaggagttcgacccccctaaggtgtaccctcccgtccccgccgagaagagaaagcccatccgggtcctgagcctgttcgatggcatcgccaccggtctgctggtgctgaaggacctgggcatccaggtggataggtacattgcctccgaggtgtgcgaggactccatcaccgtgggaatggtgcgtcatcagggcaagatcatgtacgtgggcgacgtgcggagcgtgacacagaagcatatccaggagtggggccctttcgacctggtgatcggcggcagcccttgcaatgacctgagcatcgtgaacccagcccggaagggcctgtacgagggaaccggcagactgttcttcgagttttacagactgctgcacgacgcccggcctaaggaaggcgacgaccggcccttcttttggctgttcgagaatgtggtggccatgggagtcagcgacaagcgggatattagccggttcctggagagcaaccccgtgatgatcgatgccaaggaagtgagcgccgcccaccgggccagatacttctggggcaatctgcctggcatgaacagacccctggccagcaccgtgaacgacaagctggagctgcaggagtgcctggagcacggccggatcgccaagttcagcaaggtgagaaccatcaccacccgaagcaacagcatcaaacaaggcaaggaccagcactttcctgtgttcatgaacgagaaggaggacatcctgtggtgtaccgagatggagagagtgttcgggttcccagtccactacacagatgtcagcaacatgtctagactggccagacagagactgctgggaagaagctggtccgtccctgtgatcagacacctgttcgcccctctgaaggagtacttcgcctgcgtgagcagcggcaacagcaacgccaacagccggggccccagcttctctagcggcctggtgccactgtccctgagagggagccacatgggccccatggagatctacaaaaccgtgagcgcctggaagcggcagcctgtgcgcgtgctgagcctgtttcggaatatcgataaagtcctgaaaagcctgggattcctggagagcggctctggctccggcggtggcaccctgaagtacgtggaggatgtgacaaacgtggtcagacgggatgtggagaagtggggccccttcgatctggtgtacggcagcacccaacccctgggcagctcttgtgaccggtgccctggctggtacatgtttcagttccaccggatcctgcagtacgccctgccgagacaggagtcccagcggccattcttttggattttcatggacaacttgctgctgaccgaggatgaccaggaaactaccactcggttcctgcagaccgaagccgtgaccctgcaggacgtgagaggccgggactaccagaacgccatgcgggtgtggtccaacatccctggactgaaaagcaagcacgcacctctgacccctaaagaagaggagtacctgcaggcccaggtgcggagcagaagcaagctggacgcccctaaggtggatctgctggtgaagaattgcctcctgcccctgagagagtacttcaagtatttcagccagaatagtctgcccctgggaggcagcggcggcggccaggagcaggtgagcttcaaggacgtgtgcgtggacttcacccaggaggagtggtacctgctggaccccgcccagaagatcctgtacagggacgtgatcctggagaactacagccacctggtgagcgtgggcaactgcatcaccaagcccgaggtgatcttcaagatcgagcagggcgaggagccctggatcctggaggagaggttccccaagcagtggcacagcggcaagagctacaagtacggcggcccaagcagcggcgcccctcctcccagcggcggcaggcggcccaagcagcggcgcccctcctcccagcggcggcagcccagccggctccccaacctctaccgaggagggcacctctgagtccgccacccccgagagcggccctggcacctccaccgagcccagcgagggcagcgcacccggcagccctgccggcagccccacctccacagaggagggaaccagcaccgagcccagcgaaggcagcgccccaggcaccagcaccgagcctagtgagcaggagattaaacggatcaacaagatcagaagaagacttgtgaaagacagcaacaccaagaaggccggcaagacaggccccatgaaaaccctgctggttagagtgatgacacccgatctgagagagcggctggaaaacctgagaaagaagcctgaaaatatcccccagcccatcagcaatacatctagagccaacctgaataagctgctgaccgattacaccgaaatgaagaaggcgatcctgcatgtgtactgggaagagttccagaaggaccctgtgggcctgatgagccgggtggcccagcctgccagcaagaagatcgatcagaacaagctgaaacctgagatggacgagaagggcaacctgaccaccgccggctttgcctgctctcagtgtggccagcccctgttcgtgtacaagctggagcaggtgtctgagaagggcaaggcttacaccaactacttcggacggtgcaatgtggccgagcacgaaaagctgatcctgctggcccagctgaagcccgagaaggatagcgacgaagccgtgacatatagcctgggaaagtttgggcagagggccctggatttctacagcattcatgtgaccaaggagtccacccaccccgtgaagcccctggcccagatcgccggaaacagatacgcctccggacctgtgggaaaggccctgagcgacgcatgtatgggcacaatcgcctccttcctgtctaagtaccaggacatcatcatcgaacaccagaaggtggtgaagggcaaccagaagagactggagagcctgcgggagctggccggcaaggaaaacctggaataccctagcgtgaccctgccacctcagcctcacaccaaggagggcgttgatgcctacaacgaagtgatcgcccgggtgcgaatgtgggtgaacctgaacctgtggcagaagctgaagctaagcagagatgatgccaagcctctgctgagactgaagggattcccttcctttcctctggtcgagagacaggccaacgaagtggactggtgggacatggtgtgtaacgtgaagaagctgatcaacgagaaaaaggaggatggcaaggtgttttggcagaatctggctggctacaagagacaggaagccctgagaccatacctgagcagcgaggaagatcggaagaagggaaagaaattcgctcggtaccagctgggcgacctgctgctgcacctggaaaagaagcacggcgaggactggggaaaggtgtacgacgaggcctgggagcggattgacaagaaagtggaaggcctgagcaagcacatcaagctggaagaggaacggagaagcgaggacgcccagagcaaggccgccctgaccgactggctgcgggctaaggccagcttcgtgatcgagggcctgaaggaggccgacaaggacgagttctgcagatgcgagctgaagctgcagaagtggtacggggacctgcggggaaagcccttcgccatcgaagccgagaacagcatcctggacatcagcggcttcagcaagcagtacaactgtgccttcatctggcagaaggacggcgtgaagaagctgaacctgtacctgatcatcaactacttcaagggcggcaagctgcggttcaagaagatcaaacctgaagccttcgaagccaacagattctacaccgtgatcaacaaaaagagcggcgagatcgtgcccatggaggtgaacttcaacttcgacgaccccaacctgatcatcctgcctctggcctttggcaagagacagggcagagaattcatctggaacgacctgctgtccctggaaaccggcagcctgaagctggccaacggaagagtgatcgagaagacactgtacaacagaagaacccggcaggatgagcctgccctgttcgtggccctgaccttcgagcggcgggaggtcctggactcctccaatatcaaaccaatgaacctgatcggcgtggcaagaggcgaaaacatccccgccgtgatcgccctgaccgaccccgagggctgcccactgagccggtttaaggatagcctgggaaacccaacccacatcctgagaatcggcgagagctataaggagaagcagcggaccatccaggccaagaaggaggtggagcagcggagagccggcggctacagccggaagtacgccagcaaagccaagaatctggcagacgatatggtgagaaacaccgctagagatctgctgtactacgccgtgacccaggatgccatgctgatcttcgccaacctgagccggggcttcggccggcagggcaagcggaccttcatggccgagagacagtacacacggatggaggactggctgaccgccaagctggcctacgagggcctgagcaagacctacctgtccaagacactggcccagtacacctccaagacatgcagcaactgtgggtttaccatcaccagcgccgactacgacagggtgctggagaagctgaagaagacagcaacaggctggatgaccacaattaacggcaaggagctgaaggtggagggccagattacctactacaacagatacaagagacagaacgtagtcaaggacctgtccgtcgagctggatagactgagcgaagaatctgtgaacaacgacatctcctcctggacaaagggcagaagcggagaagctctgagcctcctgaagaaaagattctcccatagacccgtgcaggagaagttcgtgtgcctgaactgcggcttcgagacacacgcagccgagcaagccgccctgaacatcgccagatcctggctgttcctgcggagccaggagtacaagaaataccagacaaacaagacaaccggcaacaccgataagagagccttcgtcgagacctggcagtccttttaccggaagaagcttaaggaggtgtggaaacctgccgtgcggtctggcggatctggcggaggctccaccagccccaagaaaaagagaaaagtctaagctgccttctgcggggcttgccttctggccatgcccttcttctctcccttgcacctgtacctcttggtctttgaataaagcctgagtaggaaggctagcaaaaaaaaaaaaaaaaaaaaaaaaaaaaaaaaaaaaaaaaaaaaaaaaaaaaaaaaaaaaaaaaaaaaaaaaaaaaaaaagcccagccggctccccaacctctaccgaggagggcacctctgagtccgccacccccgagagcggccctggcacctccaccgagcccagcgagggcagcgcacccggcagccctgccggcagccccacctccacagaggagggaaccagcaccgagcccagcgaaggcagcgccccaggcaccagcaccgagcctagtgagcaggagattaaacggatcaacaagatcagaagaagacttgtgaaagacagcaacaccaagaaggccggcaagacaggccccatgaaaaccctgctggttagagtgatgacacccgatctgagagagcggctggaaaacctgagaaagaagcctgaaaatatcccccagcccatcagcaatacatctagagccaacctgaataagctgctgaccgattacaccgaaatgaagaaggcgatcctgcatgtgtactgggaagagttccagaaggaccctgtgggcctgatgagccgggtggcccagcctgccagcaagaagatcgatcagaacaagctgaaacctgagatggacgagaagggcaacctgaccaccgccggctttgcctgctctcagtgtggccagcccctgttcgtgtacaagctggagcaggtgtctgagaagggcaaggcttacaccaactacttcggacggtgcaatgtggccgagcacgaaaagctgatcctgctggcccagctgaagcccgagaaggatagcgacgaagccgtgacatatagcctgggaaagtttgggcagagggccctggatttctacagcattcatgtgaccaaggagtccacccaccccgtgaagcccctggcccagatcgccggaaacagatacgcctccggacctgtgggaaaggccctgagcgacgcatgtatgggcacaatcgcctccttcctgtctaagtaccaggacatcatcatcgaacaccagaaggtggtgaagggcaaccagaagagactggagagcctgcgggagctggccggcaaggaaaacctggaataccctagcgtgaccctgccacctcagcctcacaccaaggagggcgttgatgcctacaacgaagtgatcgcccgggtgcgaatgtgggtgaacctgaacctgtggcagaagctgaagctaagcagagatgatgccaagcctctgctgagactgaagggattcccttcctttcctctggtcgagagacaggccaacgaagtggactggtgggacatggtgtgtaacgtgaagaagctgatcaacgagaaaaaggaggatggcaaggtgttttggcagaatctggctggctacaagagacaggaagccctgagaccatacctgagcagcgaggaagatcggaagaagggaaagaaattcgctcggtaccagctgggcgacctgctgctgcacctggaaaagaagcacggcgaggactggggaaaggtgtacgacgaggcctgggagcggattgacaagaaagtggaaggcctgagcaagcacatcaagctggaagaggaacggagaagcgaggacgcccagagcaaggccgccctgaccgactggctgcgggctaaggccagcttcgtgatcgagggcctgaaggaggccgacaaggacgagttctgcagatgcgagctgaagctgcagaagtggtacggggacctgcggggaaagcccttcgccatcgaagccgagaacagcatcctggacatcagcggcttcagcaagcagtacaactgtgccttcatctggcagaaggacggcgtgaagaagctgaacctgtacctgatcatcaactacttcaagggcggcaagctgcggttcaagaagatcaaacctgaagccttcgaagccaacagattctacaccgtgatcaacaaaaagagcggcgagatcgtgcccatggaggtgaacttcaacttcgacgaccccaacctgatcatcctgcctctggcctttggcaagagacagggcagagaattcatctggaacgacctgctgtccctggaaaccggcagcctgaagctggccaacggaagagtgatcgagaagacactgtacaacagaagaacccggcaggatgagcctgccctgttcgtggccctgaccttcgagcggcgggaggtcctggactcctccaatatcaaaccaatgaacctgatcggcgtggcaagaggcgaaaacatccccgccgtgatcgccctgaccgaccccgagggctgcccactgagccggtttaaggatagcctgggaaacccaacccacatcctgagaatcggcgagagctataaggagaagcagcggaccatccaggccaagaaggaggtggagcagcggagagccggcggctacagccggaagtacgccagcaaagccaagaatctggcagacgatatggtgagaaacaccgctagagatctgctgtactacgccgtgacccaggatgccatgctgatcttcgccaacctgagccggggcttcggccggcagggcaagcggaccttcatggccgagagacagtacacacggatggaggactggctgaccgccaagctggcctacgagggcctgagcaagacctacctgtccaagacactggcccagtacacctccaagacatgcagcaactgtgggtttaccatcaccagcgccgactacgacagggtgctggagaagctgaagaagacagcaacaggctggatgaccacaattaacggcaaggagctgaaggtggagggccagattacctactacaacagatacaagagacagaacgtagtcaaggacctgtccgtcgagctggatagactgagcgaagaatctgtgaacaacgacatctcctcctggacaaagggcagaagcggagaagctctgagcctcctgaagaaaagattctcccatagacccgtgcaggagaagttcgtgtgcctgaactgcggcttcgagacacacgcagccgagcaagccgccctgaacatcgccagatcctggctgttcctgcggagccaggagtacaagaaataccagacaaacaagacaaccggcaacaccgataagagagccttcgtcgagacctggcagtccttttaccggaagaagcttaaggaggtgtggaaacctgccgtgcggtctggcggatctggcggaggctccaccagccccaagaaaaagagaaaagtctaagctgccttctgcggggcttgccttctggccatgcccttcttctctcccttgcacctgtacctcttggtctttgaataaagcctgagtaggaaggctagcaaaaaaaaaaaaaaaaaaaaaaaaaaaaaaaaaaaaaaaaaaaaaaaaaaaaaaaaaaaaaaaaaaaaaaaaaaaaaaaa

SEQ ID NO: 9510 - RNA, 8787 nt, synthetic construct
  source 1..8787: mol_type = other RNA
aggaaataagagagaaaagaagagtaagaagaaatataagagccaccatggcccctaagaagaagcgtaaagtgagccggatgaaccacgaccaggagttcgacccccctaaggtgtaccctcccgtccccgccgagaagagaaagcccatccgggtcctgagcctgttcgatggcatcgccaccggtctgctggtgctgaaggacctgggcatccaggtggataggtacattgcctccgaggtgtgcgaggactccatcaccgtgggaatggtgcgtcatcagggcaagatcatgtacgtgggcgacgtgcggagcgtgacacagaagcatatccaggagtggggccctttcgacctggtgatcggcggcagcccttgcaatgacctgagcatcgtgaacccagcccggaagggcctgtacgagggaaccggcagactgttcttcgagttttacagactgctgcacgacgcccggcctaaggaaggcgacgaccggcccttcttttggctgttcgagaatgtggtggccatgggagtcagcgacaagcgggatattagccggttcctggagagcaaccccgtgatgatcgatgccaaggaagtgagcgccgcccaccgggccagatacttctggggcaatctgcctggcatgaacagacccctggccagcaccgtgaacgacaagctggagctgcaggagtgcctggagcacggccggatcgccaagttcagcaaggtgagaaccatcaccacccgaagcaacagcatcaaacaaggcaaggaccagcactttcctgtgttcatgaacgagaaggaggacatcctgtggtgtaccgagatggagagagtgttcgggttcccagtccactacacagatgtcagcaacatgtctagactggccagacagagactgctgggaagaagctggtccgtccctgtgatcagacacctgttcgcccctctgaaggagtacttcgcctgcgtgagcagcggcaacagcaacgccaacagccggggccccagcttctctagcggcctggtgccactgtccctgagagggagccacatgggccccatggagatctacaaaaccgtgagcgcctggaagcggcagcctgtgcgcgtgctgagcctgtttcggaatatcgataaagtcctgaaaagcctgggattcctggagagcggctctggctccggcggtggcaccctgaagtacgtggaggatgtgacaaacgtggtcagacgggatgtggagaagtggggccccttcgatctggtgtacggcagcacccaacccctgggcagctcttgtgaccggtgccctggctggtacatgtttcagttccaccggatcctgcagtacgccctgccgagacaggagtcccagcggccattcttttggattttcatggacaacttgctgctgaccgaggatgaccaggaaactaccactcggttcctgcagaccgaagccgtgaccctgcaggacgtgagaggccgggactaccagaacgccatgcgggtgtggtccaacatccctggactgaaaagcaagcacgcacctctgacccctaaagaagaggagtacctgcaggcccaggtgcggagcagaagcaagctggacgcccctaaggtggatctgctggtgaagaattgcctcctgcccctgagagagtacttcaagtatttcagccagaatagtctgcccctgggaggcagcggcggcggcttcctgccccaggtgaccttcgaggacgtggccatctacttcagcagggaggagtgggacgagctgagcgagtggcagagggagctgtaccaggccgtgatgatggagaactacgaggccgtgctgagcctgggcaagaacgacttcatcgcccagtgcacctggggcctgagggagggcgagaagagggccagcggcaagagcgagaaggccaggaacaggcccgtgagcaacctgtggaggggcggcccaagcagcggcgcccctcctcccagcggcggcaggcggcccaagcagcggcgcccctcctcccagcggcggcagcccagccggctccccaacctctaccgaggagggcacctctgagtccgccacccccgagagcggccctggcacctccaccgagcccagcgagggcagcgcacccggcagccctgccggcagccccacctccacagaggagggaaccagcaccgagcccagcgaaggcagcgccccaggcaccagcaccgagcctagtgagcaggagattaaacggatcaacaagatcagaagaagacttgtgaaagacagcaacaccaagaaggccggcaagacaggccccatgaaaaccctgctggttagagtgatgacacccgatctgagagagcggctggaaaacctgagaaagaagcctgaaaatatcccccagcccatcagcaatacatctagagccaacctgaataagctgctgaccgattacaccgaaatgaagaaggcgatcctgcatgtgtactgggaagagttccagaaggaccctgtgggcctgatgagccgggtggcccagcctgccagcaagaagatcgatcagaacaagctgaaacctgagatggacgagaagggcaacctgaccaccgccggctttgcctgctctcagtgtggccagcccctgttcgtgtacaagctggagcaggtgtctgagaagggcaaggcttacaccaactacttcggacggtgcaatgtggccgagcacgaaaagctgatcctgctggcccagctgaagcccgagaaggatagcgacgaagccgtgacatatagcctgggaaagtttgggcagagggccctggatttctacagcattcatgtgaccaaggagtccacccaccccgtgaagcccctggcccagatcgccggaaacagatacgcctccggacctgtgggaaaggccctgagcgacgcatgtatgggcacaatcgcctccttcctgtctaagtaccaggacatcatcatcgaacaccagaaggtggtgaagggcaaccagaagagactggagagcctgcgggagctggccggcaaggaaaacctggaataccctagcgtgaccctgccacctcagcctcacaccaaggagggcgttgatgcctacaacgaagtgatcgcccgggtgcgaatgtgggtgaacctgaacctgtggcagaagctgaagctaagcagagatgatgccaagcctctgctgagactgaagggattcccttcctttcctctggtcgagagacaggccaacgaagtggactggtgggacatggtgtgtaacgtgaagaagctgatcaacgagaaaaaggaggatggcaaggtgttttggcagaatctggctggctacaagagacaggaagccctgagaccatacctgagcagcgaggaagatcggaagaagggaaagaaattcgctcggtaccagctgggcgacctgctgctgcacctggaaaagaagcacggcgaggactggggaaaggtgtacgacgaggcctgggagcggattgacaagaaagtggaaggcctgagcaagcacatcaagctggaagaggaacggagaagcgaggacgcccagagcaaggccgccctgaccgactggctgcgggctaaggccagcttcgtgatcgagggcctgaaggaggccgacaaggacgagttctgcagatgcgagctgaagctgcagaagtggtacggggacctgcggggaaagcccttcgccatcgaagccgagaacagcatcctggacatcagcggcttcagcaagcagtacaactgtgccttcatctggcagaaggacggcgtgaagaagctgaacctgtacctgatcatcaactacttcaagggcggcaagctgcggttcaagaagatcaaacctgaagccttcgaagccaacagattctacaccgtgatcaacaaaaagagcggcgagatcgtgcccatggaggtgaacttcaacttcgacgaccccaacctgatcatcctgcctctggcctttggcaagagacagggcagagaattcatctggaacgacctgctgtccctggaaaccggcagcctgaagctggccaacggaagagtgatcgagaagacactgtacaacagaagaacccggcaggatgagcctgccctgttcgtggccctgaccttcgagcggcgggaggtcctggactcctccaatatcaaaccaatgaacctgatcggcgtggcaagaggcgaaaacatccccgccgtgatcgccctgaccgaccccgagggctgcccactgagccggtttaaggatagcctgggaaacccaacccacatcctgagaatcggcgagagctataaggagaagcagcggaccatccaggccaagaaggaggtggagcagcggagagccggcggctacagccggaagtacgccagcaaagccaagaatctggcagacgatatggtgagaaacaccgctagagatctgctgtactacgccgtgacccaggatgccatgctgatcttcgccaacctgagccggggcttcggccggcagggcaagcggaccttcatggccgagagacagtacacacggatggaggactggctgaccgccaagctggcctacgagggcctgagcaagacctacctgtccaagacactggcccagtacacctccaagacatgcagcaactgtgggtttaccatcaccagcgccgactacgacagggtgctggagaagctgaagaagacagcaacaggctggatgaccacaattaacggcaaggagctgaaggtggagggccagattacctactacaacagatacaagagacagaacgtagtcaaggacctgtccgtcgagctggatagactgagcgaagaatctgtgaacaacgacatctcctcctggacaaagggcagaagcggagaagctctgagcctcctgaagaaaagattctcccatagacccgtgcaggagaagttcgtgtgcctgaactgcggcttcgagacacacgcagccgagcaagccgccctgaacatcgccagatcctggctgttcctgcggagccaggagtacaagaaataccagacaaacaagacaaccggcaacaccgataagagagccttcgtcgagacctggcagtccttttaccggaagaagcttaaggaggtgtggaaacctgccgtgcggtctggcggatctggcggaggctccaccagccccaagaaaaagagaaaagtctaagctgccttctgcggggcttgccttctggccatgcccttcttctctcccttgcacctgtacctcttggtctttgaataaagcctgagtaggaaggctagcaaaaaaaaaaaaaaaaaaaaaaaaaaaaaaaaaaaaaaaaaaaaaaaaaaaaaaaaaaaaaaaaaaaaaaaaaaaaaaaagcccagccggctccccaacctctaccgaggagggcacctctgagtccgccacccccgagagcggccctggcacctccaccgagcccagcgagggcagcgcacccggcagccctgccggcagccccacctccacagaggagggaaccagcaccgagcccagcgaaggcagcgccccaggcaccagcaccgagcctagtgagcaggagattaaacggatcaacaagatcagaagaagacttgtgaaagacagcaacaccaagaaggccggcaagacaggccccatgaaaaccctgctggttagagtgatgacacccgatctgagagagcggctggaaaacctgagaaagaagcctgaaaatatcccccagcccatcagcaatacatctagagccaacctgaataagctgctgaccgattacaccgaaatgaagaaggcgatcctgcatgtgtactgggaagagttccagaaggaccctgtgggcctgatgagccgggtggcccagcctgccagcaagaagatcgatcagaacaagctgaaacctgagatggacgagaagggcaacctgaccaccgccggctttgcctgctctcagtgtggccagcccctgttcgtgtacaagctggagcaggtgtctgagaagggcaaggcttacaccaactacttcggacggtgcaatgtggccgagcacgaaaagctgatcctgctggcccagctgaagcccgagaaggatagcgacgaagccgtgacatatagcctgggaaagtttgggcagagggccctggatttctacagcattcatgtgaccaaggagtccacccaccccgtgaagcccctggcccagatcgccggaaacagatacgcctccggacctgtgggaaaggccctgagcgacgcatgtatgggcacaatcgcctccttcctgtctaagtaccaggacatcatcatcgaacaccagaaggtggtgaagggcaaccagaagagactggagagcctgcgggagctggccggcaaggaaaacctggaataccctagcgtgaccctgccacctcagcctcacaccaaggagggcgttgatgcctacaacgaagtgatcgcccgggtgcgaatgtgggtgaacctgaacctgtggcagaagctgaagctaagcagagatgatgccaagcctctgctgagactgaagggattcccttcctttcctctggtcgagagacaggccaacgaagtggactggtgggacatggtgtgtaacgtgaagaagctgatcaacgagaaaaaggaggatggcaaggtgttttggcagaatctggctggctacaagagacaggaagccctgagaccatacctgagcagcgaggaagatcggaagaagggaaagaaattcgctcggtaccagctgggcgacctgctgctgcacctggaaaagaagcacggcgaggactggggaaaggtgtacgacgaggcctgggagcggattgacaagaaagtggaaggcctgagcaagcacatcaagctggaagaggaacggagaagcgaggacgcccagagcaaggccgccctgaccgactggctgcgggctaaggccagcttcgtgatcgagggcctgaaggaggccgacaaggacgagttctgcagatgcgagctgaagctgcagaagtggtacggggacctgcggggaaagcccttcgccatcgaagccgagaacagcatcctggacatcagcggcttcagcaagcagtacaactgtgccttcatctggcagaaggacggcgtgaagaagctgaacctgtacctgatcatcaactacttcaagggcggcaagctgcggttcaagaagatcaaacctgaagccttcgaagccaacagattctacaccgtgatcaacaaaaagagcggcgagatcgtgcccatggaggtgaacttcaacttcgacgaccccaacctgatcatcctgcctctggcctttggcaagagacagggcagagaattcatctggaacgacctgctgtccctggaaaccggcagcctgaagctggccaacggaagagtgatcgagaagacactgtacaacagaagaacccggcaggatgagcctgccctgttcgtggccctgaccttcgagcggcgggaggtcctggactcctccaatatcaaaccaatgaacctgatcggcgtggcaagaggcgaaaacatccccgccgtgatcgccctgaccgaccccgagggctgcccactgagccggtttaaggatagcctgggaaacccaacccacatcctgagaatcggcgagagctataaggagaagcagcggaccatccaggccaagaaggaggtggagcagcggagagccggcggctacagccggaagtacgccagcaaagccaagaatctggcagacgatatggtgagaaacaccgctagagatctgctgtactacgccgtgacccaggatgccatgctgatcttcgccaacctgagccggggcttcggccggcagggcaagcggaccttcatggccgagagacagtacacacggatggaggactggctgaccgccaagctggcctacgagggcctgagcaagacctacctgtccaagacactggcccagtacacctccaagacatgcagcaactgtgggtttaccatcaccagcgccgactacgacagggtgctggagaagctgaagaagacagcaacaggctggatgaccacaattaacggcaaggagctgaaggtggagggccagattacctactacaacagatacaagagacagaacgtagtcaaggacctgtccgtcgagctggatagactgagcgaagaatctgtgaacaacgacatctcctcctggacaaagggcagaagcggagaagctctgagcctcctgaagaaaagattctcccatagacccgtgcaggagaagttcgtgtgcctgaactgcggcttcgagacacacgcagccgagcaagccgccctgaacatcgccagatcctggctgttcctgcggagccaggagtacaagaaataccagacaaacaagacaaccggcaacaccgataagagagccttcgtcgagacctggcagtccttttaccggaagaagcttaaggaggtgtggaaacctgccgtgcggtctggcggatctggcggaggctccaccagccccaagaaaaagagaaaagtctaagctgccttctgcggggcttgccttctggccatgcccttcttctctcccttgcacctgtacctcttggtctttgaataaagcctgagtaggaaggctagcaaaaaaaaaaaaaaaaaaaaaaaaaaaaaaaaaaaaaaaaaaaaaaaaaaaaaaaaaaaaaaaaaaaaaaaaaaaaaaaa

SEQ ID NO: 9511 - RNA, 8787 nt, synthetic construct
  source 1..8787: mol_type = other RNA
aggaaataagagagaaaagaagagtaagaagaaatataagagccaccatggcccctaagaagaagcgtaaagtgagccggatgaaccacgaccaggagttcgacccccctaaggtgtaccctcccgtccccgccgagaagagaaagcccatccgggtcctgagcctgttcgatggcatcgccaccggtctgctggtgctgaaggacctgggcatccaggtggataggtacattgcctccgaggtgtgcgaggactccatcaccgtgggaatggtgcgtcatcagggcaagatcatgtacgtgggcgacgtgcggagcgtgacacagaagcatatccaggagtggggccctttcgacctggtgatcggcggcagcccttgcaatgacctgagcatcgtgaacccagcccggaagggcctgtacgagggaaccggcagactgttcttcgagttttacagactgctgcacgacgcccggcctaaggaaggcgacgaccggcccttcttttggctgttcgagaatgtggtggccatgggagtcagcgacaagcgggatattagccggttcctggagagcaaccccgtgatgatcgatgccaaggaagtgagcgccgcccaccgggccagatacttctggggcaatctgcctggcatgaacagacccctggccagcaccgtgaacgacaagctggagctgcaggagtgcctggagcacggccggatcgccaagttcagcaaggtgagaaccatcaccacccgaagcaacagcatcaaacaaggcaaggaccagcactttcctgtgttcatgaacgagaaggaggacatcctgtggtgtaccgagatggagagagtgttcgggttcccagtccactacacagatgtcagcaacatgtctagactggccagacagagactgctgggaagaagctggtccgtccctgtgatcagacacctgttcgcccctctgaaggagtacttcgcctgcgtgagcagcggcaacagcaacgccaacagccggggccccagcttctctagcggcctggtgccactgtccctgagagggagccacatgggccccatggagatctacaaaaccgtgagcgcctggaagcggcagcctgtgcgcgtgctgagcctgtttcggaatatcgataaagtcctgaaaagcctgggattcctggagagcggctctggctccggcggtggcaccctgaagtacgtggaggatgtgacaaacgtggtcagacgggatgtggagaagtggggccccttcgatctggtgtacggcagcacccaacccctgggcagctcttgtgaccggtgccctggctggtacatgtttcagttccaccggatcctgcagtacgccctgccgagacaggagtcccagcggccattcttttggattttcatggacaacttgctgctgaccgaggatgaccaggaaactaccactcggttcctgcagaccgaagccgtgaccctgcaggacgtgagaggccgggactaccagaacgccatgcgggtgtggtccaacatccctggactgaaaagcaagcacgcacctctgacccctaaagaagaggagtacctgcaggcccaggtgcggagcagaagcaagctggacgcccctaaggtggatctgctggtgaagaattgcctcctgcccctgagagagtacttcaagtatttcagccagaatagtctgcccctgggaggcagcggcggcggcagccaggagcccgtgaccttcgccgacgtggccgtggtgttcacccccgaggagtgggtgttcctggacagcacccagaggagcctgtacagggacgtgatgctggagaactacaggaacctggccagcgtggccgaccagctgtgcaagcccaacgccctgagctacctggaggagaggggcgagcagtggaccaccgacaggggcgtgctgcccgacacctgcgccgagccccagtgccagggcggcccaagcagcggcgcccctcctcccagcggcggcaggcggcccaagcagcggcgcccctcctcccagcggcggcagcccagccggctccccaacctctaccgaggagggcacctctgagtccgccacccccgagagcggccctggcacctccaccgagcccagcgagggcagcgcacccggcagccctgccggcagccccacctccacagaggagggaaccagcaccgagcccagcgaaggcagcgccccaggcaccagcaccgagcctagtgagcaggagattaaacggatcaacaagatcagaagaagacttgtgaaagacagcaacaccaagaaggccggcaagacaggccccatgaaaaccctgctggttagagtgatgacacccgatctgagagagcggctggaaaacctgagaaagaagcctgaaaatatcccccagcccatcagcaatacatctagagccaacctgaataagctgctgaccgattacaccgaaatgaagaaggcgatcctgcatgtgtactgggaagagttccagaaggaccctgtgggcctgatgagccgggtggcccagcctgccagcaagaagatcgatcagaacaagctgaaacctgagatggacgagaagggcaacctgaccaccgccggctttgcctgctctcagtgtggccagcccctgttcgtgtacaagctggagcaggtgtctgagaagggcaaggcttacaccaactacttcggacggtgcaatgtggccgagcacgaaaagctgatcctgctggcccagctgaagcccgagaaggatagcgacgaagccgtgacatatagcctgggaaagtttgggcagagggccctggatttctacagcattcatgtgaccaaggagtccacccaccccgtgaagcccctggcccagatcgccggaaacagatacgcctccggacctgtgggaaaggccctgagcgacgcatgtatgggcacaatcgcctccttcctgtctaagtaccaggacatcatcatcgaacaccagaaggtggtgaagggcaaccagaagagactggagagcctgcgggagctggccggcaaggaaaacctggaataccctagcgtgaccctgccacctcagcctcacaccaaggagggcgttgatgcctacaacgaagtgatcgcccgggtgcgaatgtgggtgaacctgaacctgtggcagaagctgaagctaagcagagatgatgccaagcctctgctgagactgaagggattcccttcctttcctctggtcgagagacaggccaacgaagtggactggtgggacatggtgtgtaacgtgaagaagctgatcaacgagaaaaaggaggatggcaaggtgttttggcagaatctggctggctacaagagacaggaagccctgagaccatacctgagcagcgaggaagatcggaagaagggaaagaaattcgctcggtaccagctgggcgacctgctgctgcacctggaaaagaagcacggcgaggactggggaaaggtgtacgacgaggcctgggagcggattgacaagaaagtggaaggcctgagcaagcacatcaagctggaagaggaacggagaagcgaggacgcccagagcaaggccgccctgaccgactggctgcgggctaaggccagcttcgtgatcgagggcctgaaggaggccgacaaggacgagttctgcagatgcgagctgaagctgcagaagtggtacggggacctgcggggaaagcccttcgccatcgaagccgagaacagcatcctggacatcagcggcttcagcaagcagtacaactgtgccttcatctggcagaaggacggcgtgaagaagctgaacctgtacctgatcatcaactacttcaagggcggcaagctgcggttcaagaagatcaaacctgaagccttcgaagccaacagattctacaccgtgatcaacaaaaagagcggcgagatcgtgcccatggaggtgaacttcaacttcgacgaccccaacctgatcatcctgcctctggcctttggcaagagacagggcagagaattcatctggaacgacctgctgtccctggaaaccggcagcctgaagctggccaacggaagagtgatcgagaagacactgtacaacagaagaacccggcaggatgagcctgccctgttcgtggccctgaccttcgagcggcgggaggtcctggactcctccaatatcaaaccaatgaacctgatcggcgtggcaagaggcgaaaacatccccgccgtgatcgccctgaccgaccccgagggctgcccactgagccggtttaaggatagcctgggaaacccaacccacatcctgagaatcggcgagagctataaggagaagcagcggaccatccaggccaagaaggaggtggagcagcggagagccggcggctacagccggaagtacgccagcaaagccaagaatctggcagacgatatggtgagaaacaccgctagagatctgctgtactacgccgtgacccaggatgccatgctgatcttcgccaacctgagccggggcttcggccggcagggcaagcggaccttcatggccgagagacagtacacacggatggaggactggctgaccgccaagctggcctacgagggcctgagcaagacctacctgtccaagacactggcccagtacacctccaagacatgcagcaactgtgggtttaccatcaccagcgccgactacgacagggtgctggagaagctgaagaagacagcaacaggctggatgaccacaattaacggcaaggagctgaaggtggagggccagattacctactacaacagatacaagagacagaacgtagtcaaggacctgtccgtcgagctggatagactgagcgaagaatctgtgaacaacgacatctcctcctggacaaagggcagaagcggagaagctctgagcctcctgaagaaaagattctcccatagacccgtgcaggagaagttcgtgtgcctgaactgcggcttcgagacacacgcagccgagcaagccgccctgaacatcgccagatcctggctgttcctgcggagccaggagtacaagaaataccagacaaacaagacaaccggcaacaccgataagagagccttcgtcgagacctggcagtccttttaccggaagaagcttaaggaggtgtggaaacctgccgtgcggtctggcggatctggcggaggctccaccagccccaagaaaaagagaaaagtctaagctgccttctgcggggcttgccttctggccatgcccttcttctctcccttgcacctgtacctcttggtctttgaataaagcctgagtaggaaggctagcaaaaaaaaaaaaaaaaaaaaaaaaaaaaaaaaaaaaaaaaaaaaaaaaaaaaaaaaaaaaaaaaaaaaaaaaaaaaaaaagcccagccggctccccaacctctaccgaggagggcacctctgagtccgccacccccgagagcggccctggcacctccaccgagcccagcgagggcagcgcacccggcagccctgccggcagccccacctccacagaggagggaaccagcaccgagcccagcgaaggcagcgccccaggcaccagcaccgagcctagtgagcaggagattaaacggatcaacaagatcagaagaagacttgtgaaagacagcaacaccaagaaggccggcaagacaggccccatgaaaaccctgctggttagagtgatgacacccgatctgagagagcggctggaaaacctgagaaagaagcctgaaaatatcccccagcccatcagcaatacatctagagccaacctgaataagctgctgaccgattacaccgaaatgaagaaggcgatcctgcatgtgtactgggaagagttccagaaggaccctgtgggcctgatgagccgggtggcccagcctgccagcaagaagatcgatcagaacaagctgaaacctgagatggacgagaagggcaacctgaccaccgccggctttgcctgctctcagtgtggccagcccctgttcgtgtacaagctggagcaggtgtctgagaagggcaaggcttacaccaactacttcggacggtgcaatgtggccgagcacgaaaagctgatcctgctggcccagctgaagcccgagaaggatagcgacgaagccgtgacatatagcctgggaaagtttgggcagagggccctggatttctacagcattcatgtgaccaaggagtccacccaccccgtgaagcccctggcccagatcgccggaaacagatacgcctccggacctgtgggaaaggccctgagcgacgcatgtatgggcacaatcgcctccttcctgtctaagtaccaggacatcatcatcgaacaccagaaggtggtgaagggcaaccagaagagactggagagcctgcgggagctggccggcaaggaaaacctggaataccctagcgtgaccctgccacctcagcctcacaccaaggagggcgttgatgcctacaacgaagtgatcgcccgggtgcgaatgtgggtgaacctgaacctgtggcagaagctgaagctaagcagagatgatgccaagcctctgctgagactgaagggattcccttcctttcctctggtcgagagacaggccaacgaagtggactggtgggacatggtgtgtaacgtgaagaagctgatcaacgagaaaaaggaggatggcaaggtgttttggcagaatctggctggctacaagagacaggaagccctgagaccatacctgagcagcgaggaagatcggaagaagggaaagaaattcgctcggtaccagctgggcgacctgctgctgcacctggaaaagaagcacggcgaggactggggaaaggtgtacgacgaggcctgggagcggattgacaagaaagtggaaggcctgagcaagcacatcaagctggaagaggaacggagaagcgaggacgcccagagcaaggccgccctgaccgactggctgcgggctaaggccagcttcgtgatcgagggcctgaaggaggccgacaaggacgagttctgcagatgcgagctgaagctgcagaagtggtacggggacctgcggggaaagcccttcgccatcgaagccgagaacagcatcctggacatcagcggcttcagcaagcagtacaactgtgccttcatctggcagaaggacggcgtgaagaagctgaacctgtacctgatcatcaactacttcaagggcggcaagctgcggttcaagaagatcaaacctgaagccttcgaagccaacagattctacaccgtgatcaacaaaaagagcggcgagatcgtgcccatggaggtgaacttcaacttcgacgaccccaacctgatcatcctgcctctggcctttggcaagagacagggcagagaattcatctggaacgacctgctgtccctggaaaccggcagcctgaagctggccaacggaagagtgatcgagaagacactgtacaacagaagaacccggcaggatgagcctgccctgttcgtggccctgaccttcgagcggcgggaggtcctggactcctccaatatcaaaccaatgaacctgatcggcgtggcaagaggcgaaaacatccccgccgtgatcgccctgaccgaccccgagggctgcccactgagccggtttaaggatagcctgggaaacccaacccacatcctgagaatcggcgagagctataaggagaagcagcggaccatccaggccaagaaggaggtggagcagcggagagccggcggctacagccggaagtacgccagcaaagccaagaatctggcagacgatatggtgagaaacaccgctagagatctgctgtactacgccgtgacccaggatgccatgctgatcttcgccaacctgagccggggcttcggccggcagggcaagcggaccttcatggccgagagacagtacacacggatggaggactggctgaccgccaagctggcctacgagggcctgagcaagacctacctgtccaagacactggcccagtacacctccaagacatgcagcaactgtgggtttaccatcaccagcgccgactacgacagggtgctggagaagctgaagaagacagcaacaggctggatgaccacaattaacggcaaggagctgaaggtggagggccagattacctactacaacagatacaagagacagaacgtagtcaaggacctgtccgtcgagctggatagactgagcgaagaatctgtgaacaacgacatctcctcctggacaaagggcagaagcggagaagctctgagcctcctgaagaaaagattctcccatagacccgtgcaggagaagttcgtgtgcctgaactgcggcttcgagacacacgcagccgagcaagccgccctgaacatcgccagatcctggctgttcctgcggagccaggagtacaagaaataccagacaaacaagacaaccggcaacaccgataagagagccttcgtcgagacctggcagtccttttaccggaagaagcttaaggaggtgtggaaacctgccgtgcggtctggcggatctggcggaggctccaccagccccaagaaaaagagaaaagtctaagctgccttctgcggggcttgccttctggccatgcccttcttctctcccttgcacctgtacctcttggtctttgaataaagcctgagtaggaaggctagcaaaaaaaaaaaaaaaaaaaaaaaaaaaaaaaaaaaaaaaaaaaaaaaaaaaaaaaaaaaaaaaaaaaaaaaaaaaaaaaa

SEQ ID NO: 9512 - RNA, 8787 nt, synthetic construct
  source 1..8787: mol_type = other RNA
aggaaataagagagaaaagaagagtaagaagaaatataagagccaccatggcccctaagaagaagcgtaaagtgagccggatgaaccacgaccaggagttcgacccccctaaggtgtaccctcccgtccccgccgagaagagaaagcccatccgggtcctgagcctgttcgatggcatcgccaccggtctgctggtgctgaaggacctgggcatccaggtggataggtacattgcctccgaggtgtgcgaggactccatcaccgtgggaatggtgcgtcatcagggcaagatcatgtacgtgggcgacgtgcggagcgtgacacagaagcatatccaggagtggggccctttcgacctggtgatcggcggcagcccttgcaatgacctgagcatcgtgaacccagcccggaagggcctgtacgagggaaccggcagactgttcttcgagttttacagactgctgcacgacgcccggcctaaggaaggcgacgaccggcccttcttttggctgttcgagaatgtggtggccatgggagtcagcgacaagcgggatattagccggttcctggagagcaaccccgtgatgatcgatgccaaggaagtgagcgccgcccaccgggccagatacttctggggcaatctgcctggcatgaacagacccctggccagcaccgtgaacgacaagctggagctgcaggagtgcctggagcacggccggatcgccaagttcagcaaggtgagaaccatcaccacccgaagcaacagcatcaaacaaggcaaggaccagcactttcctgtgttcatgaacgagaaggaggacatcctgtggtgtaccgagatggagagagtgttcgggttcccagtccactacacagatgtcagcaacatgtctagactggccagacagagactgctgggaagaagctggtccgtccctgtgatcagacacctgttcgcccctctgaaggagtacttcgcctgcgtgagcagcggcaacagcaacgccaacagccggggccccagcttctctagcggcctggtgccactgtccctgagagggagccacatgggccccatggagatctacaaaaccgtgagcgcctggaagcggcagcctgtgcgcgtgctgagcctgtttcggaatatcgataaagtcctgaaaagcctgggattcctggagagcggctctggctccggcggtggcaccctgaagtacgtggaggatgtgacaaacgtggtcagacgggatgtggagaagtggggccccttcgatctggtgtacggcagcacccaacccctgggcagctcttgtgaccggtgccctggctggtacatgtttcagttccaccggatcctgcagtacgccctgccgagacaggagtcccagcggccattcttttggattttcatggacaacttgctgctgaccgaggatgaccaggaaactaccactcggttcctgcagaccgaagccgtgaccctgcaggacgtgagaggccgggactaccagaacgccatgcgggtgtggtccaacatccctggactgaaaagcaagcacgcacctctgacccctaaagaagaggagtacctgcaggcccaggtgcggagcagaagcaagctggacgcccctaaggtggatctgctggtgaagaattgcctcctgcccctgagagagtacttcaagtatttcagccagaatagtctgcccctgggaggcagcggcggcggcttccagatgcccgtgaccttcgaggaggtggccgtgtacttcacccagggccagggcgccctgctggaccccgcccagagggccctgtacagggacgtgatgcaggagaactacgagatggtgaccagcctgggcttccccatccccaagcccgagctgatcgccaggctggagaggggcgaggagccctgggtgcccgacctgcaggcctgcaaggagaggaggctgcccaggtgcaccaggggcggcccaagcagcggcgcccctcctcccagcggcggcaggcggcccaagcagcggcgcccctcctcccagcggcggcagcccagccggctccccaacctctaccgaggagggcacctctgagtccgccacccccgagagcggccctggcacctccaccgagcccagcgagggcagcgcacccggcagccctgccggcagccccacctccacagaggagggaaccagcaccgagcccagcgaaggcagcgccccaggcaccagcaccgagcctagtgagcaggagattaaacggatcaacaagatcagaagaagacttgtgaaagacagcaacaccaagaaggccggcaagacaggccccatgaaaaccctgctggttagagtgatgacacccgatctgagagagcggctggaaaacctgagaaagaagcctgaaaatatcccccagcccatcagcaatacatctagagccaacctgaataagctgctgaccgattacaccgaaatgaagaaggcgatcctgcatgtgtactgggaagagttccagaaggaccctgtgggcctgatgagccgggtggcccagcctgccagcaagaagatcgatcagaacaagctgaaacctgagatggacgagaagggcaacctgaccaccgccggctttgcctgctctcagtgtggccagcccctgttcgtgtacaagctggagcaggtgtctgagaagggcaaggcttacaccaactacttcggacggtgcaatgtggccgagcacgaaaagctgatcctgctggcccagctgaagcccgagaaggatagcgacgaagccgtgacatatagcctgggaaagtttgggcagagggccctggatttctacagcattcatgtgaccaaggagtccacccaccccgtgaagcccctggcccagatcgccggaaacagatacgcctccggacctgtgggaaaggccctgagcgacgcatgtatgggcacaatcgcctccttcctgtctaagtaccaggacatcatcatcgaacaccagaaggtggtgaagggcaaccagaagagactggagagcctgcgggagctggccggcaaggaaaacctggaataccctagcgtgaccctgccacctcagcctcacaccaaggagggcgttgatgcctacaacgaagtgatcgcccgggtgcgaatgtgggtgaacctgaacctgtggcagaagctgaagctaagcagagatgatgccaagcctctgctgagactgaagggattcccttcctttcctctggtcgagagacaggccaacgaagtggactggtgggacatggtgtgtaacgtgaagaagctgatcaacgagaaaaaggaggatggcaaggtgttttggcagaatctggctggctacaagagacaggaagccctgagaccatacctgagcagcgaggaagatcggaagaagggaaagaaattcgctcggtaccagctgggcgacctgctgctgcacctggaaaagaagcacggcgaggactggggaaaggtgtacgacgaggcctgggagcggattgacaagaaagtggaaggcctgagcaagcacatcaagctggaagaggaacggagaagcgaggacgcccagagcaaggccgccctgaccgactggctgcgggctaaggccagcttcgtgatcgagggcctgaaggaggccgacaaggacgagttctgcagatgcgagctgaagctgcagaagtggtacggggacctgcggggaaagcccttcgccatcgaagccgagaacagcatcctggacatcagcggcttcagcaagcagtacaactgtgccttcatctggcagaaggacggcgtgaagaagctgaacctgtacctgatcatcaactacttcaagggcggcaagctgcggttcaagaagatcaaacctgaagccttcgaagccaacagattctacaccgtgatcaacaaaaagagcggcgagatcgtgcccatggaggtgaacttcaacttcgacgaccccaacctgatcatcctgcctctggcctttggcaagagacagggcagagaattcatctggaacgacctgctgtccctggaaaccggcagcctgaagctggccaacggaagagtgatcgagaagacactgtacaacagaagaacccggcaggatgagcctgccctgttcgtggccctgaccttcgagcggcgggaggtcctggactcctccaatatcaaaccaatgaacctgatcggcgtggcaagaggcgaaaacatccccgccgtgatcgccctgaccgaccccgagggctgcccactgagccggtttaaggatagcctgggaaacccaacccacatcctgagaatcggcgagagctataaggagaagcagcggaccatccaggccaagaaggaggtggagcagcggagagccggcggctacagccggaagtacgccagcaaagccaagaatctggcagacgatatggtgagaaacaccgctagagatctgctgtactacgccgtgacccaggatgccatgctgatcttcgccaacctgagccggggcttcggccggcagggcaagcggaccttcatggccgagagacagtacacacggatggaggactggctgaccgccaagctggcctacgagggcctgagcaagacctacctgtccaagacactggcccagtacacctccaagacatgcagcaactgtgggtttaccatcaccagcgccgactacgacagggtgctggagaagctgaagaagacagcaacaggctggatgaccacaattaacggcaaggagctgaaggtggagggccagattacctactacaacagatacaagagacagaacgtagtcaaggacctgtccgtcgagctggatagactgagcgaagaatctgtgaacaacgacatctcctcctggacaaagggcagaagcggagaagctctgagcctcctgaagaaaagattctcccatagacccgtgcaggagaagttcgtgtgcctgaactgcggcttcgagacacacgcagccgagcaagccgccctgaacatcgccagatcctggctgttcctgcggagccaggagtacaagaaataccagacaaacaagacaaccggcaacaccgataagagagccttcgtcgagacctggcagtccttttaccggaagaagcttaaggaggtgtggaaacctgccgtgcggtctggcggatctggcggaggctccaccagccccaagaaaaagagaaaagtctaagctgccttctgcggggcttgccttctggccatgcccttcttctctcccttgcacctgtacctcttggtctttgaataaagcctgagtaggaaggctagcaaaaaaaaaaaaaaaaaaaaaaaaaaaaaaaaaaaaaaaaaaaaaaaaaaaaaaaaaaaaaaaaaaaaaaaaaaaaaaaagcccagccggctccccaacctctaccgaggagggcacctctgagtccgccacccccgagagcggccctggcacctccaccgagcccagcgagggcagcgcacccggcagccctgccggcagccccacctccacagaggagggaaccagcaccgagcccagcgaaggcagcgccccaggcaccagcaccgagcctagtgagcaggagattaaacggatcaacaagatcagaagaagacttgtgaaagacagcaacaccaagaaggccggcaagacaggccccatgaaaaccctgctggttagagtgatgacacccgatctgagagagcggctggaaaacctgagaaagaagcctgaaaatatcccccagcccatcagcaatacatctagagccaacctgaataagctgctgaccgattacaccgaaatgaagaaggcgatcctgcatgtgtactgggaagagttccagaaggaccctgtgggcctgatgagccgggtggcccagcctgccagcaagaagatcgatcagaacaagctgaaacctgagatggacgagaagggcaacctgaccaccgccggctttgcctgctctcagtgtggccagcccctgttcgtgtacaagctggagcaggtgtctgagaagggcaaggcttacaccaactacttcggacggtgcaatgtggccgagcacgaaaagctgatcctgctggcccagctgaagcccgagaaggatagcgacgaagccgtgacatatagcctgggaaagtttgggcagagggccctggatttctacagcattcatgtgaccaaggagtccacccaccccgtgaagcccctggcccagatcgccggaaacagatacgcctccggacctgtgggaaaggccctgagcgacgcatgtatgggcacaatcgcctccttcctgtctaagtaccaggacatcatcatcgaacaccagaaggtggtgaagggcaaccagaagagactggagagcctgcgggagctggccggcaaggaaaacctggaataccctagcgtgaccctgccacctcagcctcacaccaaggagggcgttgatgcctacaacgaagtgatcgcccgggtgcgaatgtgggtgaacctgaacctgtggcagaagctgaagctaagcagagatgatgccaagcctctgctgagactgaagggattcccttcctttcctctggtcgagagacaggccaacgaagtggactggtgggacatggtgtgtaacgtgaagaagctgatcaacgagaaaaaggaggatggcaaggtgttttggcagaatctggctggctacaagagacaggaagccctgagaccatacctgagcagcgaggaagatcggaagaagggaaagaaattcgctcggtaccagctgggcgacctgctgctgcacctggaaaagaagcacggcgaggactggggaaaggtgtacgacgaggcctgggagcggattgacaagaaagtggaaggcctgagcaagcacatcaagctggaagaggaacggagaagcgaggacgcccagagcaaggccgccctgaccgactggctgcgggctaaggccagcttcgtgatcgagggcctgaaggaggccgacaaggacgagttctgcagatgcgagctgaagctgcagaagtggtacggggacctgcggggaaagcccttcgccatcgaagccgagaacagcatcctggacatcagcggcttcagcaagcagtacaactgtgccttcatctggcagaaggacggcgtgaagaagctgaacctgtacctgatcatcaactacttcaagggcggcaagctgcggttcaagaagatcaaacctgaagccttcgaagccaacagattctacaccgtgatcaacaaaaagagcggcgagatcgtgcccatggaggtgaacttcaacttcgacgaccccaacctgatcatcctgcctctggcctttggcaagagacagggcagagaattcatctggaacgacctgctgtccctggaaaccggcagcctgaagctggccaacggaagagtgatcgagaagacactgtacaacagaagaacccggcaggatgagcctgccctgttcgtggccctgaccttcgagcggcgggaggtcctggactcctccaatatcaaaccaatgaacctgatcggcgtggcaagaggcgaaaacatccccgccgtgatcgccctgaccgaccccgagggctgcccactgagccggtttaaggatagcctgggaaacccaacccacatcctgagaatcggcgagagctataaggagaagcagcggaccatccaggccaagaaggaggtggagcagcggagagccggcggctacagccggaagtacgccagcaaagccaagaatctggcagacgatatggtgagaaacaccgctagagatctgctgtactacgccgtgacccaggatgccatgctgatcttcgccaacctgagccggggcttcggccggcagggcaagcggaccttcatggccgagagacagtacacacggatggaggactggctgaccgccaagctggcctacgagggcctgagcaagacctacctgtccaagacactggcccagtacacctccaagacatgcagcaactgtgggtttaccatcaccagcgccgactacgacagggtgctggagaagctgaagaagacagcaacaggctggatgaccacaattaacggcaaggagctgaaggtggagggccagattacctactacaacagatacaagagacagaacgtagtcaaggacctgtccgtcgagctggatagactgagcgaagaatctgtgaacaacgacatctcctcctggacaaagggcagaagcggagaagctctgagcctcctgaagaaaagattctcccatagacccgtgcaggagaagttcgtgtgcctgaactgcggcttcgagacacacgcagccgagcaagccgccctgaacatcgccagatcctggctgttcctgcggagccaggagtacaagaaataccagacaaacaagacaaccggcaacaccgataagagagccttcgtcgagacctggcagtccttttaccggaagaagcttaaggaggtgtggaaacctgccgtgcggtctggcggatctggcggaggctccaccagccccaagaaaaagagaaaagtctaagctgccttctgcggggcttgccttctggccatgcccttcttctctcccttgcacctgtacctcttggtctttgaataaagcctgagtaggaaggctagcaaaaaaaaaaaaaaaaaaaaaaaaaaaaaaaaaaaaaaaaaaaaaaaaaaaaaaaaaaaaaaaaaaaaaaaaaaaaaaaa

SEQ ID NO: 9513 - RNA, 8787 nt, synthetic construct
  source 1..8787: mol_type = other RNA
aggaaataagagagaaaagaagagtaagaagaaatataagagccaccatggcccctaagaagaagcgtaaagtgagccggatgaaccacgaccaggagttcgacccccctaaggtgtaccctcccgtccccgccgagaagagaaagcccatccgggtcctgagcctgttcgatggcatcgccaccggtctgctggtgctgaaggacctgggcatccaggtggataggtacattgcctccgaggtgtgcgaggactccatcaccgtgggaatggtgcgtcatcagggcaagatcatgtacgtgggcgacgtgcggagcgtgacacagaagcatatccaggagtggggccctttcgacctggtgatcggcggcagcccttgcaatgacctgagcatcgtgaacccagcccggaagggcctgtacgagggaaccggcagactgttcttcgagttttacagactgctgcacgacgcccggcctaaggaaggcgacgaccggcccttcttttggctgttcgagaatgtggtggccatgggagtcagcgacaagcgggatattagccggttcctggagagcaaccccgtgatgatcgatgccaaggaagtgagcgccgcccaccgggccagatacttctggggcaatctgcctggcatgaacagacccctggccagcaccgtgaacgacaagctggagctgcaggagtgcctggagcacggccggatcgccaagttcagcaaggtgagaaccatcaccacccgaagcaacagcatcaaacaaggcaaggaccagcactttcctgtgttcatgaacgagaaggaggacatcctgtggtgtaccgagatggagagagtgttcgggttcccagtccactacacagatgtcagcaacatgtctagactggccagacagagactgctgggaagaagctggtccgtccctgtgatcagacacctgttcgcccctctgaaggagtacttcgcctgcgtgagcagcggcaacagcaacgccaacagccggggccccagcttctctagcggcctggtgccactgtccctgagagggagccacatgggccccatggagatctacaaaaccgtgagcgcctggaagcggcagcctgtgcgcgtgctgagcctgtttcggaatatcgataaagtcctgaaaagcctgggattcctggagagcggctctggctccggcggtggcaccctgaagtacgtggaggatgtgacaaacgtggtcagacgggatgtggagaagtggggccccttcgatctggtgtacggcagcacccaacccctgggcagctcttgtgaccggtgccctggctggtacatgtttcagttccaccggatcctgcagtacgccctgccgagacaggagtcccagcggccattcttttggattttcatggacaacttgctgctgaccgaggatgaccaggaaactaccactcggttcctgcagaccgaagccgtgaccctgcaggacgtgagaggccgggactaccagaacgccatgcgggtgtggtccaacatccctggactgaaaagcaagcacgcacctctgacccctaaagaagaggagtacctgcaggcccaggtgcggagcagaagcaagctggacgcccctaaggtggatctgctggtgaagaattgcctcctgcccctgagagagtacttcaagtatttcagccagaatagtctgcccctgggaggcagcggcggcggcttccaggagcccgtgaccttcgaggacgtggccgtgtacttcacccagaacgagtgggccagcctgcaccccatgcagagggccctgcacagggaggtgatgctggagaactacgccaacgtgaccagcctgagcgccttccccttccccaagcccgacctgatcttccagctggagcagggcgaggccgcctggggccccgacccctggaccctggccggcggcgagaccctgaggggcatgggcggcccaagcagcggcgcccctcctcccagcggcggcaggcggcccaagcagcggcgcccctcctcccagcggcggcagcccagccggctccccaacctctaccgaggagggcacctctgagtccgccacccccgagagcggccctggcacctccaccgagcccagcgagggcagcgcacccggcagccctgccggcagccccacctccacagaggagggaaccagcaccgagcccagcgaaggcagcgccccaggcaccagcaccgagcctagtgagcaggagattaaacggatcaacaagatcagaagaagacttgtgaaagacagcaacaccaagaaggccggcaagacaggccccatgaaaaccctgctggttagagtgatgacacccgatctgagagagcggctggaaaacctgagaaagaagcctgaaaatatcccccagcccatcagcaatacatctagagccaacctgaataagctgctgaccgattacaccgaaatgaagaaggcgatcctgcatgtgtactgggaagagttccagaaggaccctgtgggcctgatgagccgggtggcccagcctgccagcaagaagatcgatcagaacaagctgaaacctgagatggacgagaagggcaacctgaccaccgccggctttgcctgctctcagtgtggccagcccctgttcgtgtacaagctggagcaggtgtctgagaagggcaaggcttacaccaactacttcggacggtgcaatgtggccgagcacgaaaagctgatcctgctggcccagctgaagcccgagaaggatagcgacgaagccgtgacatatagcctgggaaagtttgggcagagggccctggatttctacagcattcatgtgaccaaggagtccacccaccccgtgaagcccctggcccagatcgccggaaacagatacgcctccggacctgtgggaaaggccctgagcgacgcatgtatgggcacaatcgcctccttcctgtctaagtaccaggacatcatcatcgaacaccagaaggtggtgaagggcaaccagaagagactggagagcctgcgggagctggccggcaaggaaaacctggaataccctagcgtgaccctgccacctcagcctcacaccaaggagggcgttgatgcctacaacgaagtgatcgcccgggtgcgaatgtgggtgaacctgaacctgtggcagaagctgaagctaagcagagatgatgccaagcctctgctgagactgaagggattcccttcctttcctctggtcgagagacaggccaacgaagtggactggtgggacatggtgtgtaacgtgaagaagctgatcaacgagaaaaaggaggatggcaaggtgttttggcagaatctggctggctacaagagacaggaagccctgagaccatacctgagcagcgaggaagatcggaagaagggaaagaaattcgctcggtaccagctgggcgacctgctgctgcacctggaaaagaagcacggcgaggactggggaaaggtgtacgacgaggcctgggagcggattgacaagaaagtggaaggcctgagcaagcacatcaagctggaagaggaacggagaagcgaggacgcccagagcaaggccgccctgaccgactggctgcgggctaaggccagcttcgtgatcgagggcctgaaggaggccgacaaggacgagttctgcagatgcgagctgaagctgcagaagtggtacggggacctgcggggaaagcccttcgccatcgaagccgagaacagcatcctggacatcagcggcttcagcaagcagtacaactgtgccttcatctggcagaaggacggcgtgaagaagctgaacctgtacctgatcatcaactacttcaagggcggcaagctgcggttcaagaagatcaaacctgaagccttcgaagccaacagattctacaccgtgatcaacaaaaagagcggcgagatcgtgcccatggaggtgaacttcaacttcgacgaccccaacctgatcatcctgcctctggcctttggcaagagacagggcagagaattcatctggaacgacctgctgtccctggaaaccggcagcctgaagctggccaacggaagagtgatcgagaagacactgtacaacagaagaacccggcaggatgagcctgccctgttcgtggccctgaccttcgagcggcgggaggtcctggactcctccaatatcaaaccaatgaacctgatcggcgtggcaagaggcgaaaacatccccgccgtgatcgccctgaccgaccccgagggctgcccactgagccggtttaaggatagcctgggaaacccaacccacatcctgagaatcggcgagagctataaggagaagcagcggaccatccaggccaagaaggaggtggagcagcggagagccggcggctacagccggaagtacgccagcaaagccaagaatctggcagacgatatggtgagaaacaccgctagagatctgctgtactacgccgtgacccaggatgccatgctgatcttcgccaacctgagccggggcttcggccggcagggcaagcggaccttcatggccgagagacagtacacacggatggaggactggctgaccgccaagctggcctacgagggcctgagcaagacctacctgtccaagacactggcccagtacacctccaagacatgcagcaactgtgggtttaccatcaccagcgccgactacgacagggtgctggagaagctgaagaagacagcaacaggctggatgaccacaattaacggcaaggagctgaaggtggagggccagattacctactacaacagatacaagagacagaacgtagtcaaggacctgtccgtcgagctggatagactgagcgaagaatctgtgaacaacgacatctcctcctggacaaagggcagaagcggagaagctctgagcctcctgaagaaaagattctcccatagacccgtgcaggagaagttcgtgtgcctgaactgcggcttcgagacacacgcagccgagcaagccgccctgaacatcgccagatcctggctgttcctgcggagccaggagtacaagaaataccagacaaacaagacaaccggcaacaccgataagagagccttcgtcgagacctggcagtccttttaccggaagaagcttaaggaggtgtggaaacctgccgtgcggtctggcggatctggcggaggctccaccagccccaagaaaaagagaaaagtctaagctgccttctgcggggcttgccttctggccatgcccttcttctctcccttgcacctgtacctcttggtctttgaataaagcctgagtaggaaggctagcaaaaaaaaaaaaaaaaaaaaaaaaaaaaaaaaaaaaaaaaaaaaaaaaaaaaaaaaaaaaaaaaaaaaaaaaaaaaaaaagcccagccggctccccaacctctaccgaggagggcacctctgagtccgccacccccgagagcggccctggcacctccaccgagcccagcgagggcagcgcacccggcagccctgccggcagccccacctccacagaggagggaaccagcaccgagcccagcgaaggcagcgccccaggcaccagcaccgagcctagtgagcaggagattaaacggatcaacaagatcagaagaagacttgtgaaagacagcaacaccaagaaggccggcaagacaggccccatgaaaaccctgctggttagagtgatgacacccgatctgagagagcggctggaaaacctgagaaagaagcctgaaaatatcccccagcccatcagcaatacatctagagccaacctgaataagctgctgaccgattacaccgaaatgaagaaggcgatcctgcatgtgtactgggaagagttccagaaggaccctgtgggcctgatgagccgggtggcccagcctgccagcaagaagatcgatcagaacaagctgaaacctgagatggacgagaagggcaacctgaccaccgccggctttgcctgctctcagtgtggccagcccctgttcgtgtacaagctggagcaggtgtctgagaagggcaaggcttacaccaactacttcggacggtgcaatgtggccgagcacgaaaagctgatcctgctggcccagctgaagcccgagaaggatagcgacgaagccgtgacatatagcctgggaaagtttgggcagagggccctggatttctacagcattcatgtgaccaaggagtccacccaccccgtgaagcccctggcccagatcgccggaaacagatacgcctccggacctgtgggaaaggccctgagcgacgcatgtatgggcacaatcgcctccttcctgtctaagtaccaggacatcatcatcgaacaccagaaggtggtgaagggcaaccagaagagactggagagcctgcgggagctggccggcaaggaaaacctggaataccctagcgtgaccctgccacctcagcctcacaccaaggagggcgttgatgcctacaacgaagtgatcgcccgggtgcgaatgtgggtgaacctgaacctgtggcagaagctgaagctaagcagagatgatgccaagcctctgctgagactgaagggattcccttcctttcctctggtcgagagacaggccaacgaagtggactggtgggacatggtgtgtaacgtgaagaagctgatcaacgagaaaaaggaggatggcaaggtgttttggcagaatctggctggctacaagagacaggaagccctgagaccatacctgagcagcgaggaagatcggaagaagggaaagaaattcgctcggtaccagctgggcgacctgctgctgcacctggaaaagaagcacggcgaggactggggaaaggtgtacgacgaggcctgggagcggattgacaagaaagtggaaggcctgagcaagcacatcaagctggaagaggaacggagaagcgaggacgcccagagcaaggccgccctgaccgactggctgcgggctaaggccagcttcgtgatcgagggcctgaaggaggccgacaaggacgagttctgcagatgcgagctgaagctgcagaagtggtacggggacctgcggggaaagcccttcgccatcgaagccgagaacagcatcctggacatcagcggcttcagcaagcagtacaactgtgccttcatctggcagaaggacggcgtgaagaagctgaacctgtacctgatcatcaactacttcaagggcggcaagctgcggttcaagaagatcaaacctgaagccttcgaagccaacagattctacaccgtgatcaacaaaaagagcggcgagatcgtgcccatggaggtgaacttcaacttcgacgaccccaacctgatcatcctgcctctggcctttggcaagagacagggcagagaattcatctggaacgacctgctgtccctggaaaccggcagcctgaagctggccaacggaagagtgatcgagaagacactgtacaacagaagaacccggcaggatgagcctgccctgttcgtggccctgaccttcgagcggcgggaggtcctggactcctccaatatcaaaccaatgaacctgatcggcgtggcaagaggcgaaaacatccccgccgtgatcgccctgaccgaccccgagggctgcccactgagccggtttaaggatagcctgggaaacccaacccacatcctgagaatcggcgagagctataaggagaagcagcggaccatccaggccaagaaggaggtggagcagcggagagccggcggctacagccggaagtacgccagcaaagccaagaatctggcagacgatatggtgagaaacaccgctagagatctgctgtactacgccgtgacccaggatgccatgctgatcttcgccaacctgagccggggcttcggccggcagggcaagcggaccttcatggccgagagacagtacacacggatggaggactggctgaccgccaagctggcctacgagggcctgagcaagacctacctgtccaagacactggcccagtacacctccaagacatgcagcaactgtgggtttaccatcaccagcgccgactacgacagggtgctggagaagctgaagaagacagcaacaggctggatgaccacaattaacggcaaggagctgaaggtggagggccagattacctactacaacagatacaagagacagaacgtagtcaaggacctgtccgtcgagctggatagactgagcgaagaatctgtgaacaacgacatctcctcctggacaaagggcagaagcggagaagctctgagcctcctgaagaaaagattctcccatagacccgtgcaggagaagttcgtgtgcctgaactgcggcttcgagacacacgcagccgagcaagccgccctgaacatcgccagatcctggctgttcctgcggagccaggagtacaagaaataccagacaaacaagacaaccggcaacaccgataagagagccttcgtcgagacctggcagtccttttaccggaagaagcttaaggaggtgtggaaacctgccgtgcggtctggcggatctggcggaggctccaccagccccaagaaaaagagaaaagtctaagctgccttctgcggggcttgccttctggccatgcccttcttctctcccttgcacctgtacctcttggtctttgaataaagcctgagtaggaaggctagcaaaaaaaaaaaaaaaaaaaaaaaaaaaaaaaaaaaaaaaaaaaaaaaaaaaaaaaaaaaaaaaaaaaaaaaaaaaaaaaa

SEQ ID NO: 9514 - RNA, 8787 nt, synthetic construct
  source 1..8787: mol_type = other RNA
aggaaataagagagaaaagaagagtaagaagaaatataagagccaccatggcccctaagaagaagcgtaaagtgagccggatgaaccacgaccaggagttcgacccccctaaggtgtaccctcccgtccccgccgagaagagaaagcccatccgggtcctgagcctgttcgatggcatcgccaccggtctgctggtgctgaaggacctgggcatccaggtggataggtacattgcctccgaggtgtgcgaggactccatcaccgtgggaatggtgcgtcatcagggcaagatcatgtacgtgggcgacgtgcggagcgtgacacagaagcatatccaggagtggggccctttcgacctggtgatcggcggcagcccttgcaatgacctgagcatcgtgaacccagcccggaagggcctgtacgagggaaccggcagactgttcttcgagttttacagactgctgcacgacgcccggcctaaggaaggcgacgaccggcccttcttttggctgttcgagaatgtggtggccatgggagtcagcgacaagcgggatattagccggttcctggagagcaaccccgtgatgatcgatgccaaggaagtgagcgccgcccaccgggccagatacttctggggcaatctgcctggcatgaacagacccctggccagcaccgtgaacgacaagctggagctgcaggagtgcctggagcacggccggatcgccaagttcagcaaggtgagaaccatcaccacccgaagcaacagcatcaaacaaggcaaggaccagcactttcctgtgttcatgaacgagaaggaggacatcctgtggtgtaccgagatggagagagtgttcgggttcccagtccactacacagatgtcagcaacatgtctagactggccagacagagactgctgggaagaagctggtccgtccctgtgatcagacacctgttcgcccctctgaaggagtacttcgcctgcgtgagcagcggcaacagcaacgccaacagccggggccccagcttctctagcggcctggtgccactgtccctgagagggagccacatgggccccatggagatctacaaaaccgtgagcgcctggaagcggcagcctgtgcgcgtgctgagcctgtttcggaatatcgataaagtcctgaaaagcctgggattcctggagagcggctctggctccggcggtggcaccctgaagtacgtggaggatgtgacaaacgtggtcagacgggatgtggagaagtggggccccttcgatctggtgtacggcagcacccaacccctgggcagctcttgtgaccggtgccctggctggtacatgtttcagttccaccggatcctgcagtacgccctgccgagacaggagtcccagcggccattcttttggattttcatggacaacttgctgctgaccgaggatgaccaggaaactaccactcggttcctgcagaccgaagccgtgaccctgcaggacgtgagaggccgggactaccagaacgccatgcgggtgtggtccaacatccctggactgaaaagcaagcacgcacctctgacccctaaagaagaggagtacctgcaggcccaggtgcggagcagaagcaagctggacgcccctaaggtggatctgctggtgaagaattgcctcctgcccctgagagagtacttcaagtatttcagccagaatagtctgcccctgggaggcagcggcggcggcatggccctgacccagggccagctgagcttcagcgacgtggccatcgagttcagccaggaggagtggaagtgcctggaccccggccagaaggccctgtacagggacgtgatgctggagaactacaggaacctgatcagcctgggcatctgcctgcccgacctgagcgtgaccagcatcttcttcaccagcggcctgggcagggccaggctgcagggcggcagcctggccagggtgagcagggtgggcggcccaagcagcggcgcccctcctcccagcggcggcaggcggcccaagcagcggcgcccctcctcccagcggcggcagcccagccggctccccaacctctaccgaggagggcacctctgagtccgccacccccgagagcggccctggcacctccaccgagcccagcgagggcagcgcacccggcagccctgccggcagccccacctccacagaggagggaaccagcaccgagcccagcgaaggcagcgccccaggcaccagcaccgagcctagtgagcaggagattaaacggatcaacaagatcagaagaagacttgtgaaagacagcaacaccaagaaggccggcaagacaggccccatgaaaaccctgctggttagagtgatgacacccgatctgagagagcggctggaaaacctgagaaagaagcctgaaaatatcccccagcccatcagcaatacatctagagccaacctgaataagctgctgaccgattacaccgaaatgaagaaggcgatcctgcatgtgtactgggaagagttccagaaggaccctgtgggcctgatgagccgggtggcccagcctgccagcaagaagatcgatcagaacaagctgaaacctgagatggacgagaagggcaacctgaccaccgccggctttgcctgctctcagtgtggccagcccctgttcgtgtacaagctggagcaggtgtctgagaagggcaaggcttacaccaactacttcggacggtgcaatgtggccgagcacgaaaagctgatcctgctggcccagctgaagcccgagaaggatagcgacgaagccgtgacatatagcctgggaaagtttgggcagagggccctggatttctacagcattcatgtgaccaaggagtccacccaccccgtgaagcccctggcccagatcgccggaaacagatacgcctccggacctgtgggaaaggccctgagcgacgcatgtatgggcacaatcgcctccttcctgtctaagtaccaggacatcatcatcgaacaccagaaggtggtgaagggcaaccagaagagactggagagcctgcgggagctggccggcaaggaaaacctggaataccctagcgtgaccctgccacctcagcctcacaccaaggagggcgttgatgcctacaacgaagtgatcgcccgggtgcgaatgtgggtgaacctgaacctgtggcagaagctgaagctaagcagagatgatgccaagcctctgctgagactgaagggattcccttcctttcctctggtcgagagacaggccaacgaagtggactggtgggacatggtgtgtaacgtgaagaagctgatcaacgagaaaaaggaggatggcaaggtgttttggcagaatctggctggctacaagagacaggaagccctgagaccatacctgagcagcgaggaagatcggaagaagggaaagaaattcgctcggtaccagctgggcgacctgctgctgcacctggaaaagaagcacggcgaggactggggaaaggtgtacgacgaggcctgggagcggattgacaagaaagtggaaggcctgagcaagcacatcaagctggaagaggaacggagaagcgaggacgcccagagcaaggccgccctgaccgactggctgcgggctaaggccagcttcgtgatcgagggcctgaaggaggccgacaaggacgagttctgcagatgcgagctgaagctgcagaagtggtacggggacctgcggggaaagcccttcgccatcgaagccgagaacagcatcctggacatcagcggcttcagcaagcagtacaactgtgccttcatctggcagaaggacggcgtgaagaagctgaacctgtacctgatcatcaactacttcaagggcggcaagctgcggttcaagaagatcaaacctgaagccttcgaagccaacagattctacaccgtgatcaacaaaaagagcggcgagatcgtgcccatggaggtgaacttcaacttcgacgaccccaacctgatcatcctgcctctggcctttggcaagagacagggcagagaattcatctggaacgacctgctgtccctggaaaccggcagcctgaagctggccaacggaagagtgatcgagaagacactgtacaacagaagaacccggcaggatgagcctgccctgttcgtggccctgaccttcgagcggcgggaggtcctggactcctccaatatcaaaccaatgaacctgatcggcgtggcaagaggcgaaaacatccccgccgtgatcgccctgaccgaccccgagggctgcccactgagccggtttaaggatagcctgggaaacccaacccacatcctgagaatcggcgagagctataaggagaagcagcggaccatccaggccaagaaggaggtggagcagcggagagccggcggctacagccggaagtacgccagcaaagccaagaatctggcagacgatatggtgagaaacaccgctagagatctgctgtactacgccgtgacccaggatgccatgctgatcttcgccaacctgagccggggcttcggccggcagggcaagcggaccttcatggccgagagacagtacacacggatggaggactggctgaccgccaagctggcctacgagggcctgagcaagacctacctgtccaagacactggcccagtacacctccaagacatgcagcaactgtgggtttaccatcaccagcgccgactacgacagggtgctggagaagctgaagaagacagcaacaggctggatgaccacaattaacggcaaggagctgaaggtggagggccagattacctactacaacagatacaagagacagaacgtagtcaaggacctgtccgtcgagctggatagactgagcgaagaatctgtgaacaacgacatctcctcctggacaaagggcagaagcggagaagctctgagcctcctgaagaaaagattctcccatagacccgtgcaggagaagttcgtgtgcctgaactgcggcttcgagacacacgcagccgagcaagccgccctgaacatcgccagatcctggctgttcctgcggagccaggagtacaagaaataccagacaaacaagacaaccggcaacaccgataagagagccttcgtcgagacctggcagtccttttaccggaagaagcttaaggaggtgtggaaacctgccgtgcggtctggcggatctggcggaggctccaccagccccaagaaaaagagaaaagtctaagctgccttctgcggggcttgccttctggccatgcccttcttctctcccttgcacctgtacctcttggtctttgaataaagcctgagtaggaaggctagcaaaaaaaaaaaaaaaaaaaaaaaaaaaaaaaaaaaaaaaaaaaaaaaaaaaaaaaaaaaaaaaaaaaaaaaaaaaaaaaagcccagccggctccccaacctctaccgaggagggcacctctgagtccgccacccccgagagcggccctggcacctccaccgagcccagcgagggcagcgcacccggcagccctgccggcagccccacctccacagaggagggaaccagcaccgagcccagcgaaggcagcgccccaggcaccagcaccgagcctagtgagcaggagattaaacggatcaacaagatcagaagaagacttgtgaaagacagcaacaccaagaaggccggcaagacaggccccatgaaaaccctgctggttagagtgatgacacccgatctgagagagcggctggaaaacctgagaaagaagcctgaaaatatcccccagcccatcagcaatacatctagagccaacctgaataagctgctgaccgattacaccgaaatgaagaaggcgatcctgcatgtgtactgggaagagttccagaaggaccctgtgggcctgatgagccgggtggcccagcctgccagcaagaagatcgatcagaacaagctgaaacctgagatggacgagaagggcaacctgaccaccgccggctttgcctgctctcagtgtggccagcccctgttcgtgtacaagctggagcaggtgtctgagaagggcaaggcttacaccaactacttcggacggtgcaatgtggccgagcacgaaaagctgatcctgctggcccagctgaagcccgagaaggatagcgacgaagccgtgacatatagcctgggaaagtttgggcagagggccctggatttctacagcattcatgtgaccaaggagtccacccaccccgtgaagcccctggcccagatcgccggaaacagatacgcctccggacctgtgggaaaggccctgagcgacgcatgtatgggcacaatcgcctccttcctgtctaagtaccaggacatcatcatcgaacaccagaaggtggtgaagggcaaccagaagagactggagagcctgcgggagctggccggcaaggaaaacctggaataccctagcgtgaccctgccacctcagcctcacaccaaggagggcgttgatgcctacaacgaagtgatcgcccgggtgcgaatgtgggtgaacctgaacctgtggcagaagctgaagctaagcagagatgatgccaagcctctgctgagactgaagggattcccttcctttcctctggtcgagagacaggccaacgaagtggactggtgggacatggtgtgtaacgtgaagaagctgatcaacgagaaaaaggaggatggcaaggtgttttggcagaatctggctggctacaagagacaggaagccctgagaccatacctgagcagcgaggaagatcggaagaagggaaagaaattcgctcggtaccagctgggcgacctgctgctgcacctggaaaagaagcacggcgaggactggggaaaggtgtacgacgaggcctgggagcggattgacaagaaagtggaaggcctgagcaagcacatcaagctggaagaggaacggagaagcgaggacgcccagagcaaggccgccctgaccgactggctgcgggctaaggccagcttcgtgatcgagggcctgaaggaggccgacaaggacgagttctgcagatgcgagctgaagctgcagaagtggtacggggacctgcggggaaagcccttcgccatcgaagccgagaacagcatcctggacatcagcggcttcagcaagcagtacaactgtgccttcatctggcagaaggacggcgtgaagaagctgaacctgtacctgatcatcaactacttcaagggcggcaagctgcggttcaagaagatcaaacctgaagccttcgaagccaacagattctacaccgtgatcaacaaaaagagcggcgagatcgtgcccatggaggtgaacttcaacttcgacgaccccaacctgatcatcctgcctctggcctttggcaagagacagggcagagaattcatctggaacgacctgctgtccctggaaaccggcagcctgaagctggccaacggaagagtgatcgagaagacactgtacaacagaagaacccggcaggatgagcctgccctgttcgtggccctgaccttcgagcggcgggaggtcctggactcctccaatatcaaaccaatgaacctgatcggcgtggcaagaggcgaaaacatccccgccgtgatcgccctgaccgaccccgagggctgcccactgagccggtttaaggatagcctgggaaacccaacccacatcctgagaatcggcgagagctataaggagaagcagcggaccatccaggccaagaaggaggtggagcagcggagagccggcggctacagccggaagtacgccagcaaagccaagaatctggcagacgatatggtgagaaacaccgctagagatctgctgtactacgccgtgacccaggatgccatgctgatcttcgccaacctgagccggggcttcggccggcagggcaagcggaccttcatggccgagagacagtacacacggatggaggactggctgaccgccaagctggcctacgagggcctgagcaagacctacctgtccaagacactggcccagtacacctccaagacatgcagcaactgtgggtttaccatcaccagcgccgactacgacagggtgctggagaagctgaagaagacagcaacaggctggatgaccacaattaacggcaaggagctgaaggtggagggccagattacctactacaacagatacaagagacagaacgtagtcaaggacctgtccgtcgagctggatagactgagcgaagaatctgtgaacaacgacatctcctcctggacaaagggcagaagcggagaagctctgagcctcctgaagaaaagattctcccatagacccgtgcaggagaagttcgtgtgcctgaactgcggcttcgagacacacgcagccgagcaagccgccctgaacatcgccagatcctggctgttcctgcggagccaggagtacaagaaataccagacaaacaagacaaccggcaacaccgataagagagccttcgtcgagacctggcagtccttttaccggaagaagcttaaggaggtgtggaaacctgccgtgcggtctggcggatctggcggaggctccaccagccccaagaaaaagagaaaagtctaagctgccttctgcggggcttgccttctggccatgcccttcttctctcccttgcacctgtacctcttggtctttgaataaagcctgagtaggaaggctagcaaaaaaaaaaaaaaaaaaaaaaaaaaaaaaaaaaaaaaaaaaaaaaaaaaaaaaaaaaaaaaaaaaaaaaaaaaaaaaaa

SEQ ID NO: 9515 - RNA, 8787 nt, synthetic construct
  source 1..8787: mol_type = other RNA
aggaaataagagagaaaagaagagtaagaagaaatataagagccaccatggcccctaagaagaagcgtaaagtgagccggatgaaccacgaccaggagttcgacccccctaaggtgtaccctcccgtccccgccgagaagagaaagcccatccgggtcctgagcctgttcgatggcatcgccaccggtctgctggtgctgaaggacctgggcatccaggtggataggtacattgcctccgaggtgtgcgaggactccatcaccgtgggaatggtgcgtcatcagggcaagatcatgtacgtgggcgacgtgcggagcgtgacacagaagcatatccaggagtggggccctttcgacctggtgatcggcggcagcccttgcaatgacctgagcatcgtgaacccagcccggaagggcctgtacgagggaaccggcagactgttcttcgagttttacagactgctgcacgacgcccggcctaaggaaggcgacgaccggcccttcttttggctgttcgagaatgtggtggccatgggagtcagcgacaagcgggatattagccggttcctggagagcaaccccgtgatgatcgatgccaaggaagtgagcgccgcccaccgggccagatacttctggggcaatctgcctggcatgaacagacccctggccagcaccgtgaacgacaagctggagctgcaggagtgcctggagcacggccggatcgccaagttcagcaaggtgagaaccatcaccacccgaagcaacagcatcaaacaaggcaaggaccagcactttcctgtgttcatgaacgagaaggaggacatcctgtggtgtaccgagatggagagagtgttcgggttcccagtccactacacagatgtcagcaacatgtctagactggccagacagagactgctgggaagaagctggtccgtccctgtgatcagacacctgttcgcccctctgaaggagtacttcgcctgcgtgagcagcggcaacagcaacgccaacagccggggccccagcttctctagcggcctggtgccactgtccctgagagggagccacatgggccccatggagatctacaaaaccgtgagcgcctggaagcggcagcctgtgcgcgtgctgagcctgtttcggaatatcgataaagtcctgaaaagcctgggattcctggagagcggctctggctccggcggtggcaccctgaagtacgtggaggatgtgacaaacgtggtcagacgggatgtggagaagtggggccccttcgatctggtgtacggcagcacccaacccctgggcagctcttgtgaccggtgccctggctggtacatgtttcagttccaccggatcctgcagtacgccctgccgagacaggagtcccagcggccattcttttggattttcatggacaacttgctgctgaccgaggatgaccaggaaactaccactcggttcctgcagaccgaagccgtgaccctgcaggacgtgagaggccgggactaccagaacgccatgcgggtgtggtccaacatccctggactgaaaagcaagcacgcacctctgacccctaaagaagaggagtacctgcaggcccaggtgcggagcagaagcaagctggacgcccctaaggtggatctgctggtgaagaattgcctcctgcccctgagagagtacttcaagtatttcagccagaatagtctgcccctgggaggcagcggcggcggctaccaggaggccctgaccttccaggacgtgaaggtgaccttcagccaggaggagtggggctgcctggacagcgcccagaggaacctgtacagggacgtgatgctggagaactacggcaacgtggtgagcgtggtgggcagcagccccaagcccgccctgatcagctggctggaggccaggaagcccagcaccgtgaacatctgcaaggtgcagcccaagagggacagcggcaccgcccccgagggcggcccaagcagcggcgcccctcctcccagcggcggcaggcggcccaagcagcggcgcccctcctcccagcggcggcagcccagccggctccccaacctctaccgaggagggcacctctgagtccgccacccccgagagcggccctggcacctccaccgagcccagcgagggcagcgcacccggcagccctgccggcagccccacctccacagaggagggaaccagcaccgagcccagcgaaggcagcgccccaggcaccagcaccgagcctagtgagcaggagattaaacggatcaacaagatcagaagaagacttgtgaaagacagcaacaccaagaaggccggcaagacaggccccatgaaaaccctgctggttagagtgatgacacccgatctgagagagcggctggaaaacctgagaaagaagcctgaaaatatcccccagcccatcagcaatacatctagagccaacctgaataagctgctgaccgattacaccgaaatgaagaaggcgatcctgcatgtgtactgggaagagttccagaaggaccctgtgggcctgatgagccgggtggcccagcctgccagcaagaagatcgatcagaacaagctgaaacctgagatggacgagaagggcaacctgaccaccgccggctttgcctgctctcagtgtggccagcccctgttcgtgtacaagctggagcaggtgtctgagaagggcaaggcttacaccaactacttcggacggtgcaatgtggccgagcacgaaaagctgatcctgctggcccagctgaagcccgagaaggatagcgacgaagccgtgacatatagcctgggaaagtttgggcagagggccctggatttctacagcattcatgtgaccaaggagtccacccaccccgtgaagcccctggcccagatcgccggaaacagatacgcctccggacctgtgggaaaggccctgagcgacgcatgtatgggcacaatcgcctccttcctgtctaagtaccaggacatcatcatcgaacaccagaaggtggtgaagggcaaccagaagagactggagagcctgcgggagctggccggcaaggaaaacctggaataccctagcgtgaccctgccacctcagcctcacaccaaggagggcgttgatgcctacaacgaagtgatcgcccgggtgcgaatgtgggtgaacctgaacctgtggcagaagctgaagctaagcagagatgatgccaagcctctgctgagactgaagggattcccttcctttcctctggtcgagagacaggccaacgaagtggactggtgggacatggtgtgtaacgtgaagaagctgatcaacgagaaaaaggaggatggcaaggtgttttggcagaatctggctggctacaagagacaggaagccctgagaccatacctgagcagcgaggaagatcggaagaagggaaagaaattcgctcggtaccagctgggcgacctgctgctgcacctggaaaagaagcacggcgaggactggggaaaggtgtacgacgaggcctgggagcggattgacaagaaagtggaaggcctgagcaagcacatcaagctggaagaggaacggagaagcgaggacgcccagagcaaggccgccctgaccgactggctgcgggctaaggccagcttcgtgatcgagggcctgaaggaggccgacaaggacgagttctgcagatgcgagctgaagctgcagaagtggtacggggacctgcggggaaagcccttcgccatcgaagccgagaacagcatcctggacatcagcggcttcagcaagcagtacaactgtgccttcatctggcagaaggacggcgtgaagaagctgaacctgtacctgatcatcaactacttcaagggcggcaagctgcggttcaagaagatcaaacctgaagccttcgaagccaacagattctacaccgtgatcaacaaaaagagcggcgagatcgtgcccatggaggtgaacttcaacttcgacgaccccaacctgatcatcctgcctctggcctttggcaagagacagggcagagaattcatctggaacgacctgctgtccctggaaaccggcagcctgaagctggccaacggaagagtgatcgagaagacactgtacaacagaagaacccggcaggatgagcctgccctgttcgtggccctgaccttcgagcggcgggaggtcctggactcctccaatatcaaaccaatgaacctgatcggcgtggcaagaggcgaaaacatccccgccgtgatcgccctgaccgaccccgagggctgcccactgagccggtttaaggatagcctgggaaacccaacccacatcctgagaatcggcgagagctataaggagaagcagcggaccatccaggccaagaaggaggtggagcagcggagagccggcggctacagccggaagtacgccagcaaagccaagaatctggcagacgatatggtgagaaacaccgctagagatctgctgtactacgccgtgacccaggatgccatgctgatcttcgccaacctgagccggggcttcggccggcagggcaagcggaccttcatggccgagagacagtacacacggatggaggactggctgaccgccaagctggcctacgagggcctgagcaagacctacctgtccaagacactggcccagtacacctccaagacatgcagcaactgtgggtttaccatcaccagcgccgactacgacagggtgctggagaagctgaagaagacagcaacaggctggatgaccacaattaacggcaaggagctgaaggtggagggccagattacctactacaacagatacaagagacagaacgtagtcaaggacctgtccgtcgagctggatagactgagcgaagaatctgtgaacaacgacatctcctcctggacaaagggcagaagcggagaagctctgagcctcctgaagaaaagattctcccatagacccgtgcaggagaagttcgtgtgcctgaactgcggcttcgagacacacgcagccgagcaagccgccctgaacatcgccagatcctggctgttcctgcggagccaggagtacaagaaataccagacaaacaagacaaccggcaacaccgataagagagccttcgtcgagacctggcagtccttttaccggaagaagcttaaggaggtgtggaaacctgccgtgcggtctggcggatctggcggaggctccaccagccccaagaaaaagagaaaagtctaagctgccttctgcggggcttgccttctggccatgcccttcttctctcccttgcacctgtacctcttggtctttgaataaagcctgagtaggaaggctagcaaaaaaaaaaaaaaaaaaaaaaaaaaaaaaaaaaaaaaaaaaaaaaaaaaaaaaaaaaaaaaaaaaaaaaaaaaaaaaaagcccagccggctccccaacctctaccgaggagggcacctctgagtccgccacccccgagagcggccctggcacctccaccgagcccagcgagggcagcgcacccggcagccctgccggcagccccacctccacagaggagggaaccagcaccgagcccagcgaaggcagcgccccaggcaccagcaccgagcctagtgagcaggagattaaacggatcaacaagatcagaagaagacttgtgaaagacagcaacaccaagaaggccggcaagacaggccccatgaaaaccctgctggttagagtgatgacacccgatctgagagagcggctggaaaacctgagaaagaagcctgaaaatatcccccagcccatcagcaatacatctagagccaacctgaataagctgctgaccgattacaccgaaatgaagaaggcgatcctgcatgtgtactgggaagagttccagaaggaccctgtgggcctgatgagccgggtggcccagcctgccagcaagaagatcgatcagaacaagctgaaacctgagatggacgagaagggcaacctgaccaccgccggctttgcctgctctcagtgtggccagcccctgttcgtgtacaagctggagcaggtgtctgagaagggcaaggcttacaccaactacttcggacggtgcaatgtggccgagcacgaaaagctgatcctgctggcccagctgaagcccgagaaggatagcgacgaagccgtgacatatagcctgggaaagtttgggcagagggccctggatttctacagcattcatgtgaccaaggagtccacccaccccgtgaagcccctggcccagatcgccggaaacagatacgcctccggacctgtgggaaaggccctgagcgacgcatgtatgggcacaatcgcctccttcctgtctaagtaccaggacatcatcatcgaacaccagaaggtggtgaagggcaaccagaagagactggagagcctgcgggagctggccggcaaggaaaacctggaataccctagcgtgaccctgccacctcagcctcacaccaaggagggcgttgatgcctacaacgaagtgatcgcccgggtgcgaatgtgggtgaacctgaacctgtggcagaagctgaagctaagcagagatgatgccaagcctctgctgagactgaagggattcccttcctttcctctggtcgagagacaggccaacgaagtggactggtgggacatggtgtgtaacgtgaagaagctgatcaacgagaaaaaggaggatggcaaggtgttttggcagaatctggctggctacaagagacaggaagccctgagaccatacctgagcagcgaggaagatcggaagaagggaaagaaattcgctcggtaccagctgggcgacctgctgctgcacctggaaaagaagcacggcgaggactggggaaaggtgtacgacgaggcctgggagcggattgacaagaaagtggaaggcctgagcaagcacatcaagctggaagaggaacggagaagcgaggacgcccagagcaaggccgccctgaccgactggctgcgggctaaggccagcttcgtgatcgagggcctgaaggaggccgacaaggacgagttctgcagatgcgagctgaagctgcagaagtggtacggggacctgcggggaaagcccttcgccatcgaagccgagaacagcatcctggacatcagcggcttcagcaagcagtacaactgtgccttcatctggcagaaggacggcgtgaagaagctgaacctgtacctgatcatcaactacttcaagggcggcaagctgcggttcaagaagatcaaacctgaagccttcgaagccaacagattctacaccgtgatcaacaaaaagagcggcgagatcgtgcccatggaggtgaacttcaacttcgacgaccccaacctgatcatcctgcctctggcctttggcaagagacagggcagagaattcatctggaacgacctgctgtccctggaaaccggcagcctgaagctggccaacggaagagtgatcgagaagacactgtacaacagaagaacccggcaggatgagcctgccctgttcgtggccctgaccttcgagcggcgggaggtcctggactcctccaatatcaaaccaatgaacctgatcggcgtggcaagaggcgaaaacatccccgccgtgatcgccctgaccgaccccgagggctgcccactgagccggtttaaggatagcctgggaaacccaacccacatcctgagaatcggcgagagctataaggagaagcagcggaccatccaggccaagaaggaggtggagcagcggagagccggcggctacagccggaagtacgccagcaaagccaagaatctggcagacgatatggtgagaaacaccgctagagatctgctgtactacgccgtgacccaggatgccatgctgatcttcgccaacctgagccggggcttcggccggcagggcaagcggaccttcatggccgagagacagtacacacggatggaggactggctgaccgccaagctggcctacgagggcctgagcaagacctacctgtccaagacactggcccagtacacctccaagacatgcagcaactgtgggtttaccatcaccagcgccgactacgacagggtgctggagaagctgaagaagacagcaacaggctggatgaccacaattaacggcaaggagctgaaggtggagggccagattacctactacaacagatacaagagacagaacgtagtcaaggacctgtccgtcgagctggatagactgagcgaagaatctgtgaacaacgacatctcctcctggacaaagggcagaagcggagaagctctgagcctcctgaagaaaagattctcccatagacccgtgcaggagaagttcgtgtgcctgaactgcggcttcgagacacacgcagccgagcaagccgccctgaacatcgccagatcctggctgttcctgcggagccaggagtacaagaaataccagacaaacaagacaaccggcaacaccgataagagagccttcgtcgagacctggcagtccttttaccggaagaagcttaaggaggtgtggaaacctgccgtgcggtctggcggatctggcggaggctccaccagccccaagaaaaagagaaaagtctaagctgccttctgcggggcttgccttctggccatgcccttcttctctcccttgcacctgtacctcttggtctttgaataaagcctgagtaggaaggctagcaaaaaaaaaaaaaaaaaaaaaaaaaaaaaaaaaaaaaaaaaaaaaaaaaaaaaaaaaaaaaaaaaaaaaaaaaaaaaaaa

SEQ ID NO: 9516 - RNA, 8787 nt, synthetic construct
  source 1..8787: mol_type = other RNA
aggaaataagagagaaaagaagagtaagaagaaatataagagccaccatggcccctaagaagaagcgtaaagtgagccggatgaaccacgaccaggagttcgacccccctaaggtgtaccctcccgtccccgccgagaagagaaagcccatccgggtcctgagcctgttcgatggcatcgccaccggtctgctggtgctgaaggacctgggcatccaggtggataggtacattgcctccgaggtgtgcgaggactccatcaccgtgggaatggtgcgtcatcagggcaagatcatgtacgtgggcgacgtgcggagcgtgacacagaagcatatccaggagtggggccctttcgacctggtgatcggcggcagcccttgcaatgacctgagcatcgtgaacccagcccggaagggcctgtacgagggaaccggcagactgttcttcgagttttacagactgctgcacgacgcccggcctaaggaaggcgacgaccggcccttcttttggctgttcgagaatgtggtggccatgggagtcagcgacaagcgggatattagccggttcctggagagcaaccccgtgatgatcgatgccaaggaagtgagcgccgcccaccgggccagatacttctggggcaatctgcctggcatgaacagacccctggccagcaccgtgaacgacaagctggagctgcaggagtgcctggagcacggccggatcgccaagttcagcaaggtgagaaccatcaccacccgaagcaacagcatcaaacaaggcaaggaccagcactttcctgtgttcatgaacgagaaggaggacatcctgtggtgtaccgagatggagagagtgttcgggttcccagtccactacacagatgtcagcaacatgtctagactggccagacagagactgctgggaagaagctggtccgtccctgtgatcagacacctgttcgcccctctgaaggagtacttcgcctgcgtgagcagcggcaacagcaacgccaacagccggggccccagcttctctagcggcctggtgccactgtccctgagagggagccacatgggccccatggagatctacaaaaccgtgagcgcctggaagcggcagcctgtgcgcgtgctgagcctgtttcggaatatcgataaagtcctgaaaagcctgggattcctggagagcggctctggctccggcggtggcaccctgaagtacgtggaggatgtgacaaacgtggtcagacgggatgtggagaagtggggccccttcgatctggtgtacggcagcacccaacccctgggcagctcttgtgaccggtgccctggctggtacatgtttcagttccaccggatcctgcagtacgccctgccgagacaggagtcccagcggccattcttttggattttcatggacaacttgctgctgaccgaggatgaccaggaaactaccactcggttcctgcagaccgaagccgtgaccctgcaggacgtgagaggccgggactaccagaacgccatgcgggtgtggtccaacatccctggactgaaaagcaagcacgcacctctgacccctaaagaagaggagtacctgcaggcccaggtgcggagcagaagcaagctggacgcccctaaggtggatctgctggtgaagaattgcctcctgcccctgagagagtacttcaagtatttcagccagaatagtctgcccctgggaggcagcggcggcggccagggcagcgtgagcttcgaggacgtggccgtgtacttcaccgaggaggagtgggccctgctggacagcagccagagggccctgcacagggaggtgatgctggagaacagcaggaacctggccgccgtgggctacggccaggagcacaagaactaccaggagcccagcctggccctgttccagagcgaggagaggatgctgggcatccagagggtgctgcagaagaccaggaggagctgcctgggcggcccaagcagcggcgcccctcctcccagcggcggcaggcggcccaagcagcggcgcccctcctcccagcggcggcagcccagccggctccccaacctctaccgaggagggcacctctgagtccgccacccccgagagcggccctggcacctccaccgagcccagcgagggcagcgcacccggcagccctgccggcagccccacctccacagaggagggaaccagcaccgagcccagcgaaggcagcgccccaggcaccagcaccgagcctagtgagcaggagattaaacggatcaacaagatcagaagaagacttgtgaaagacagcaacaccaagaaggccggcaagacaggccccatgaaaaccctgctggttagagtgatgacacccgatctgagagagcggctggaaaacctgagaaagaagcctgaaaatatcccccagcccatcagcaatacatctagagccaacctgaataagctgctgaccgattacaccgaaatgaagaaggcgatcctgcatgtgtactgggaagagttccagaaggaccctgtgggcctgatgagccgggtggcccagcctgccagcaagaagatcgatcagaacaagctgaaacctgagatggacgagaagggcaacctgaccaccgccggctttgcctgctctcagtgtggccagcccctgttcgtgtacaagctggagcaggtgtctgagaagggcaaggcttacaccaactacttcggacggtgcaatgtggccgagcacgaaaagctgatcctgctggcccagctgaagcccgagaaggatagcgacgaagccgtgacatatagcctgggaaagtttgggcagagggccctggatttctacagcattcatgtgaccaaggagtccacccaccccgtgaagcccctggcccagatcgccggaaacagatacgcctccggacctgtgggaaaggccctgagcgacgcatgtatgggcacaatcgcctccttcctgtctaagtaccaggacatcatcatcgaacaccagaaggtggtgaagggcaaccagaagagactggagagcctgcgggagctggccggcaaggaaaacctggaataccctagcgtgaccctgccacctcagcctcacaccaaggagggcgttgatgcctacaacgaagtgatcgcccgggtgcgaatgtgggtgaacctgaacctgtggcagaagctgaagctaagcagagatgatgccaagcctctgctgagactgaagggattcccttcctttcctctggtcgagagacaggccaacgaagtggactggtgggacatggtgtgtaacgtgaagaagctgatcaacgagaaaaaggaggatggcaaggtgttttggcagaatctggctggctacaagagacaggaagccctgagaccatacctgagcagcgaggaagatcggaagaagggaaagaaattcgctcggtaccagctgggcgacctgctgctgcacctggaaaagaagcacggcgaggactggggaaaggtgtacgacgaggcctgggagcggattgacaagaaagtggaaggcctgagcaagcacatcaagctggaagaggaacggagaagcgaggacgcccagagcaaggccgccctgaccgactggctgcgggctaaggccagcttcgtgatcgagggcctgaaggaggccgacaaggacgagttctgcagatgcgagctgaagctgcagaagtggtacggggacctgcggggaaagcccttcgccatcgaagccgagaacagcatcctggacatcagcggcttcagcaagcagtacaactgtgccttcatctggcagaaggacggcgtgaagaagctgaacctgtacctgatcatcaactacttcaagggcggcaagctgcggttcaagaagatcaaacctgaagccttcgaagccaacagattctacaccgtgatcaacaaaaagagcggcgagatcgtgcccatggaggtgaacttcaacttcgacgaccccaacctgatcatcctgcctctggcctttggcaagagacagggcagagaattcatctggaacgacctgctgtccctggaaaccggcagcctgaagctggccaacggaagagtgatcgagaagacactgtacaacagaagaacccggcaggatgagcctgccctgttcgtggccctgaccttcgagcggcgggaggtcctggactcctccaatatcaaaccaatgaacctgatcggcgtggcaagaggcgaaaacatccccgccgtgatcgccctgaccgaccccgagggctgcccactgagccggtttaaggatagcctgggaaacccaacccacatcctgagaatcggcgagagctataaggagaagcagcggaccatccaggccaagaaggaggtggagcagcggagagccggcggctacagccggaagtacgccagcaaagccaagaatctggcagacgatatggtgagaaacaccgctagagatctgctgtactacgccgtgacccaggatgccatgctgatcttcgccaacctgagccggggcttcggccggcagggcaagcggaccttcatggccgagagacagtacacacggatggaggactggctgaccgccaagctggcctacgagggcctgagcaagacctacctgtccaagacactggcccagtacacctccaagacatgcagcaactgtgggtttaccatcaccagcgccgactacgacagggtgctggagaagctgaagaagacagcaacaggctggatgaccacaattaacggcaaggagctgaaggtggagggccagattacctactacaacagatacaagagacagaacgtagtcaaggacctgtccgtcgagctggatagactgagcgaagaatctgtgaacaacgacatctcctcctggacaaagggcagaagcggagaagctctgagcctcctgaagaaaagattctcccatagacccgtgcaggagaagttcgtgtgcctgaactgcggcttcgagacacacgcagccgagcaagccgccctgaacatcgccagatcctggctgttcctgcggagccaggagtacaagaaataccagacaaacaagacaaccggcaacaccgataagagagccttcgtcgagacctggcagtccttttaccggaagaagcttaaggaggtgtggaaacctgccgtgcggtctggcggatctggcggaggctccaccagccccaagaaaaagagaaaagtctaagctgccttctgcggggcttgccttctggccatgcccttcttctctcccttgcacctgtacctcttggtctttgaataaagcctgagtaggaaggctagcaaaaaaaaaaaaaaaaaaaaaaaaaaaaaaaaaaaaaaaaaaaaaaaaaaaaaaaaaaaaaaaaaaaaaaaaaaaaaaaagcccagccggctccccaacctctaccgaggagggcacctctgagtccgccacccccgagagcggccctggcacctccaccgagcccagcgagggcagcgcacccggcagccctgccggcagccccacctccacagaggagggaaccagcaccgagcccagcgaaggcagcgccccaggcaccagcaccgagcctagtgagcaggagattaaacggatcaacaagatcagaagaagacttgtgaaagacagcaacaccaagaaggccggcaagacaggccccatgaaaaccctgctggttagagtgatgacacccgatctgagagagcggctggaaaacctgagaaagaagcctgaaaatatcccccagcccatcagcaatacatctagagccaacctgaataagctgctgaccgattacaccgaaatgaagaaggcgatcctgcatgtgtactgggaagagttccagaaggaccctgtgggcctgatgagccgggtggcccagcctgccagcaagaagatcgatcagaacaagctgaaacctgagatggacgagaagggcaacctgaccaccgccggctttgcctgctctcagtgtggccagcccctgttcgtgtacaagctggagcaggtgtctgagaagggcaaggcttacaccaactacttcggacggtgcaatgtggccgagcacgaaaagctgatcctgctggcccagctgaagcccgagaaggatagcgacgaagccgtgacatatagcctgggaaagtttgggcagagggccctggatttctacagcattcatgtgaccaaggagtccacccaccccgtgaagcccctggcccagatcgccggaaacagatacgcctccggacctgtgggaaaggccctgagcgacgcatgtatgggcacaatcgcctccttcctgtctaagtaccaggacatcatcatcgaacaccagaaggtggtgaagggcaaccagaagagactggagagcctgcgggagctggccggcaaggaaaacctggaataccctagcgtgaccctgccacctcagcctcacaccaaggagggcgttgatgcctacaacgaagtgatcgcccgggtgcgaatgtgggtgaacctgaacctgtggcagaagctgaagctaagcagagatgatgccaagcctctgctgagactgaagggattcccttcctttcctctggtcgagagacaggccaacgaagtggactggtgggacatggtgtgtaacgtgaagaagctgatcaacgagaaaaaggaggatggcaaggtgttttggcagaatctggctggctacaagagacaggaagccctgagaccatacctgagcagcgaggaagatcggaagaagggaaagaaattcgctcggtaccagctgggcgacctgctgctgcacctggaaaagaagcacggcgaggactggggaaaggtgtacgacgaggcctgggagcggattgacaagaaagtggaaggcctgagcaagcacatcaagctggaagaggaacggagaagcgaggacgcccagagcaaggccgccctgaccgactggctgcgggctaaggccagcttcgtgatcgagggcctgaaggaggccgacaaggacgagttctgcagatgcgagctgaagctgcagaagtggtacggggacctgcggggaaagcccttcgccatcgaagccgagaacagcatcctggacatcagcggcttcagcaagcagtacaactgtgccttcatctggcagaaggacggcgtgaagaagctgaacctgtacctgatcatcaactacttcaagggcggcaagctgcggttcaagaagatcaaacctgaagccttcgaagccaacagattctacaccgtgatcaacaaaaagagcggcgagatcgtgcccatggaggtgaacttcaacttcgacgaccccaacctgatcatcctgcctctggcctttggcaagagacagggcagagaattcatctggaacgacctgctgtccctggaaaccggcagcctgaagctggccaacggaagagtgatcgagaagacactgtacaacagaagaacccggcaggatgagcctgccctgttcgtggccctgaccttcgagcggcgggaggtcctggactcctccaatatcaaaccaatgaacctgatcggcgtggcaagaggcgaaaacatccccgccgtgatcgccctgaccgaccccgagggctgcccactgagccggtttaaggatagcctgggaaacccaacccacatcctgagaatcggcgagagctataaggagaagcagcggaccatccaggccaagaaggaggtggagcagcggagagccggcggctacagccggaagtacgccagcaaagccaagaatctggcagacgatatggtgagaaacaccgctagagatctgctgtactacgccgtgacccaggatgccatgctgatcttcgccaacctgagccggggcttcggccggcagggcaagcggaccttcatggccgagagacagtacacacggatggaggactggctgaccgccaagctggcctacgagggcctgagcaagacctacctgtccaagacactggcccagtacacctccaagacatgcagcaactgtgggtttaccatcaccagcgccgactacgacagggtgctggagaagctgaagaagacagcaacaggctggatgaccacaattaacggcaaggagctgaaggtggagggccagattacctactacaacagatacaagagacagaacgtagtcaaggacctgtccgtcgagctggatagactgagcgaagaatctgtgaacaacgacatctcctcctggacaaagggcagaagcggagaagctctgagcctcctgaagaaaagattctcccatagacccgtgcaggagaagttcgtgtgcctgaactgcggcttcgagacacacgcagccgagcaagccgccctgaacatcgccagatcctggctgttcctgcggagccaggagtacaagaaataccagacaaacaagacaaccggcaacaccgataagagagccttcgtcgagacctggcagtccttttaccggaagaagcttaaggaggtgtggaaacctgccgtgcggtctggcggatctggcggaggctccaccagccccaagaaaaagagaaaagtctaagctgccttctgcggggcttgccttctggccatgcccttcttctctcccttgcacctgtacctcttggtctttgaataaagcctgagtaggaaggctagcaaaaaaaaaaaaaaaaaaaaaaaaaaaaaaaaaaaaaaaaaaaaaaaaaaaaaaaaaaaaaaaaaaaaaaaaaaaaaaaa

SEQ ID NO: 9517 - RNA, 8787 nt, synthetic construct
  source 1..8787: mol_type = other RNA
aggaaataagagagaaaagaagagtaagaagaaatataagagccaccatggcccctaagaagaagcgtaaagtgagccggatgaaccacgaccaggagttcgacccccctaaggtgtaccctcccgtccccgccgagaagagaaagcccatccgggtcctgagcctgttcgatggcatcgccaccggtctgctggtgctgaaggacctgggcatccaggtggataggtacattgcctccgaggtgtgcgaggactccatcaccgtgggaatggtgcgtcatcagggcaagatcatgtacgtgggcgacgtgcggagcgtgacacagaagcatatccaggagtggggccctttcgacctggtgatcggcggcagcccttgcaatgacctgagcatcgtgaacccagcccggaagggcctgtacgagggaaccggcagactgttcttcgagttttacagactgctgcacgacgcccggcctaaggaaggcgacgaccggcccttcttttggctgttcgagaatgtggtggccatgggagtcagcgacaagcgggatattagccggttcctggagagcaaccccgtgatgatcgatgccaaggaagtgagcgccgcccaccgggccagatacttctggggcaatctgcctggcatgaacagacccctggccagcaccgtgaacgacaagctggagctgcaggagtgcctggagcacggccggatcgccaagttcagcaaggtgagaaccatcaccacccgaagcaacagcatcaaacaaggcaaggaccagcactttcctgtgttcatgaacgagaaggaggacatcctgtggtgtaccgagatggagagagtgttcgggttcccagtccactacacagatgtcagcaacatgtctagactggccagacagagactgctgggaagaagctggtccgtccctgtgatcagacacctgttcgcccctctgaaggagtacttcgcctgcgtgagcagcggcaacagcaacgccaacagccggggccccagcttctctagcggcctggtgccactgtccctgagagggagccacatgggccccatggagatctacaaaaccgtgagcgcctggaagcggcagcctgtgcgcgtgctgagcctgtttcggaatatcgataaagtcctgaaaagcctgggattcctggagagcggctctggctccggcggtggcaccctgaagtacgtggaggatgtgacaaacgtggtcagacgggatgtggagaagtggggccccttcgatctggtgtacggcagcacccaacccctgggcagctcttgtgaccggtgccctggctggtacatgtttcagttccaccggatcctgcagtacgccctgccgagacaggagtcccagcggccattcttttggattttcatggacaacttgctgctgaccgaggatgaccaggaaactaccactcggttcctgcagaccgaagccgtgaccctgcaggacgtgagaggccgggactaccagaacgccatgcgggtgtggtccaacatccctggactgaaaagcaagcacgcacctctgacccctaaagaagaggagtacctgcaggcccaggtgcggagcagaagcaagctggacgcccctaaggtggatctgctggtgaagaattgcctcctgcccctgagagagtacttcaagtatttcagccagaatagtctgcccctgggaggcagcggcggcggcggccaggaggaggtgaccttcaaggacgtggccgtggacttcaccagggaggagtggaggctgctgagccccccccagaaggagctgtacaaggaggtgatggtggagaacgccaggaacctgctgagcgtgggcctgcccgcccccaccaaggacgtgctgagctacctgaagaagaggggcgcccccgtgatgctggagcaggagggcctgaggaactacttccccgagggcgagatcaggggcggcccaagcagcggcgcccctcctcccagcggcggcaggcggcccaagcagcggcgcccctcctcccagcggcggcagcccagccggctccccaacctctaccgaggagggcacctctgagtccgccacccccgagagcggccctggcacctccaccgagcccagcgagggcagcgcacccggcagccctgccggcagccccacctccacagaggagggaaccagcaccgagcccagcgaaggcagcgccccaggcaccagcaccgagcctagtgagcaggagattaaacggatcaacaagatcagaagaagacttgtgaaagacagcaacaccaagaaggccggcaagacaggccccatgaaaaccctgctggttagagtgatgacacccgatctgagagagcggctggaaaacctgagaaagaagcctgaaaatatcccccagcccatcagcaatacatctagagccaacctgaataagctgctgaccgattacaccgaaatgaagaaggcgatcctgcatgtgtactgggaagagttccagaaggaccctgtgggcctgatgagccgggtggcccagcctgccagcaagaagatcgatcagaacaagctgaaacctgagatggacgagaagggcaacctgaccaccgccggctttgcctgctctcagtgtggccagcccctgttcgtgtacaagctggagcaggtgtctgagaagggcaaggcttacaccaactacttcggacggtgcaatgtggccgagcacgaaaagctgatcctgctggcccagctgaagcccgagaaggatagcgacgaagccgtgacatatagcctgggaaagtttgggcagagggccctggatttctacagcattcatgtgaccaaggagtccacccaccccgtgaagcccctggcccagatcgccggaaacagatacgcctccggacctgtgggaaaggccctgagcgacgcatgtatgggcacaatcgcctccttcctgtctaagtaccaggacatcatcatcgaacaccagaaggtggtgaagggcaaccagaagagactggagagcctgcgggagctggccggcaaggaaaacctggaataccctagcgtgaccctgccacctcagcctcacaccaaggagggcgttgatgcctacaacgaagtgatcgcccgggtgcgaatgtgggtgaacctgaacctgtggcagaagctgaagctaagcagagatgatgccaagcctctgctgagactgaagggattcccttcctttcctctggtcgagagacaggccaacgaagtggactggtgggacatggtgtgtaacgtgaagaagctgatcaacgagaaaaaggaggatggcaaggtgttttggcagaatctggctggctacaagagacaggaagccctgagaccatacctgagcagcgaggaagatcggaagaagggaaagaaattcgctcggtaccagctgggcgacctgctgctgcacctggaaaagaagcacggcgaggactggggaaaggtgtacgacgaggcctgggagcggattgacaagaaagtggaaggcctgagcaagcacatcaagctggaagaggaacggagaagcgaggacgcccagagcaaggccgccctgaccgactggctgcgggctaaggccagcttcgtgatcgagggcctgaaggaggccgacaaggacgagttctgcagatgcgagctgaagctgcagaagtggtacggggacctgcggggaaagcccttcgccatcgaagccgagaacagcatcctggacatcagcggcttcagcaagcagtacaactgtgccttcatctggcagaaggacggcgtgaagaagctgaacctgtacctgatcatcaactacttcaagggcggcaagctgcggttcaagaagatcaaacctgaagccttcgaagccaacagattctacaccgtgatcaacaaaaagagcggcgagatcgtgcccatggaggtgaacttcaacttcgacgaccccaacctgatcatcctgcctctggcctttggcaagagacagggcagagaattcatctggaacgacctgctgtccctggaaaccggcagcctgaagctggccaacggaagagtgatcgagaagacactgtacaacagaagaacccggcaggatgagcctgccctgttcgtggccctgaccttcgagcggcgggaggtcctggactcctccaatatcaaaccaatgaacctgatcggcgtggcaagaggcgaaaacatccccgccgtgatcgccctgaccgaccccgagggctgcccactgagccggtttaaggatagcctgggaaacccaacccacatcctgagaatcggcgagagctataaggagaagcagcggaccatccaggccaagaaggaggtggagcagcggagagccggcggctacagccggaagtacgccagcaaagccaagaatctggcagacgatatggtgagaaacaccgctagagatctgctgtactacgccgtgacccaggatgccatgctgatcttcgccaacctgagccggggcttcggccggcagggcaagcggaccttcatggccgagagacagtacacacggatggaggactggctgaccgccaagctggcctacgagggcctgagcaagacctacctgtccaagacactggcccagtacacctccaagacatgcagcaactgtgggtttaccatcaccagcgccgactacgacagggtgctggagaagctgaagaagacagcaacaggctggatgaccacaattaacggcaaggagctgaaggtggagggccagattacctactacaacagatacaagagacagaacgtagtcaaggacctgtccgtcgagctggatagactgagcgaagaatctgtgaacaacgacatctcctcctggacaaagggcagaagcggagaagctctgagcctcctgaagaaaagattctcccatagacccgtgcaggagaagttcgtgtgcctgaactgcggcttcgagacacacgcagccgagcaagccgccctgaacatcgccagatcctggctgttcctgcggagccaggagtacaagaaataccagacaaacaagacaaccggcaacaccgataagagagccttcgtcgagacctggcagtccttttaccggaagaagcttaaggaggtgtggaaacctgccgtgcggtctggcggatctggcggaggctccaccagccccaagaaaaagagaaaagtctaagctgccttctgcggggcttgccttctggccatgcccttcttctctcccttgcacctgtacctcttggtctttgaataaagcctgagtaggaaggctagcaaaaaaaaaaaaaaaaaaaaaaaaaaaaaaaaaaaaaaaaaaaaaaaaaaaaaaaaaaaaaaaaaaaaaaaaaaaaaaaagcccagccggctccccaacctctaccgaggagggcacctctgagtccgccacccccgagagcggccctggcacctccaccgagcccagcgagggcagcgcacccggcagccctgccggcagccccacctccacagaggagggaaccagcaccgagcccagcgaaggcagcgccccaggcaccagcaccgagcctagtgagcaggagattaaacggatcaacaagatcagaagaagacttgtgaaagacagcaacaccaagaaggccggcaagacaggccccatgaaaaccctgctggttagagtgatgacacccgatctgagagagcggctggaaaacctgagaaagaagcctgaaaatatcccccagcccatcagcaatacatctagagccaacctgaataagctgctgaccgattacaccgaaatgaagaaggcgatcctgcatgtgtactgggaagagttccagaaggaccctgtgggcctgatgagccgggtggcccagcctgccagcaagaagatcgatcagaacaagctgaaacctgagatggacgagaagggcaacctgaccaccgccggctttgcctgctctcagtgtggccagcccctgttcgtgtacaagctggagcaggtgtctgagaagggcaaggcttacaccaactacttcggacggtgcaatgtggccgagcacgaaaagctgatcctgctggcccagctgaagcccgagaaggatagcgacgaagccgtgacatatagcctgggaaagtttgggcagagggccctggatttctacagcattcatgtgaccaaggagtccacccaccccgtgaagcccctggcccagatcgccggaaacagatacgcctccggacctgtgggaaaggccctgagcgacgcatgtatgggcacaatcgcctccttcctgtctaagtaccaggacatcatcatcgaacaccagaaggtggtgaagggcaaccagaagagactggagagcctgcgggagctggccggcaaggaaaacctggaataccctagcgtgaccctgccacctcagcctcacaccaaggagggcgttgatgcctacaacgaagtgatcgcccgggtgcgaatgtgggtgaacctgaacctgtggcagaagctgaagctaagcagagatgatgccaagcctctgctgagactgaagggattcccttcctttcctctggtcgagagacaggccaacgaagtggactggtgggacatggtgtgtaacgtgaagaagctgatcaacgagaaaaaggaggatggcaaggtgttttggcagaatctggctggctacaagagacaggaagccctgagaccatacctgagcagcgaggaagatcggaagaagggaaagaaattcgctcggtaccagctgggcgacctgctgctgcacctggaaaagaagcacggcgaggactggggaaaggtgtacgacgaggcctgggagcggattgacaagaaagtggaaggcctgagcaagcacatcaagctggaagaggaacggagaagcgaggacgcccagagcaaggccgccctgaccgactggctgcgggctaaggccagcttcgtgatcgagggcctgaaggaggccgacaaggacgagttctgcagatgcgagctgaagctgcagaagtggtacggggacctgcggggaaagcccttcgccatcgaagccgagaacagcatcctggacatcagcggcttcagcaagcagtacaactgtgccttcatctggcagaaggacggcgtgaagaagctgaacctgtacctgatcatcaactacttcaagggcggcaagctgcggttcaagaagatcaaacctgaagccttcgaagccaacagattctacaccgtgatcaacaaaaagagcggcgagatcgtgcccatggaggtgaacttcaacttcgacgaccccaacctgatcatcctgcctctggcctttggcaagagacagggcagagaattcatctggaacgacctgctgtccctggaaaccggcagcctgaagctggccaacggaagagtgatcgagaagacactgtacaacagaagaacccggcaggatgagcctgccctgttcgtggccctgaccttcgagcggcgggaggtcctggactcctccaatatcaaaccaatgaacctgatcggcgtggcaagaggcgaaaacatccccgccgtgatcgccctgaccgaccccgagggctgcccactgagccggtttaaggatagcctgggaaacccaacccacatcctgagaatcggcgagagctataaggagaagcagcggaccatccaggccaagaaggaggtggagcagcggagagccggcggctacagccggaagtacgccagcaaagccaagaatctggcagacgatatggtgagaaacaccgctagagatctgctgtactacgccgtgacccaggatgccatgctgatcttcgccaacctgagccggggcttcggccggcagggcaagcggaccttcatggccgagagacagtacacacggatggaggactggctgaccgccaagctggcctacgagggcctgagcaagacctacctgtccaagacactggcccagtacacctccaagacatgcagcaactgtgggtttaccatcaccagcgccgactacgacagggtgctggagaagctgaagaagacagcaacaggctggatgaccacaattaacggcaaggagctgaaggtggagggccagattacctactacaacagatacaagagacagaacgtagtcaaggacctgtccgtcgagctggatagactgagcgaagaatctgtgaacaacgacatctcctcctggacaaagggcagaagcggagaagctctgagcctcctgaagaaaagattctcccatagacccgtgcaggagaagttcgtgtgcctgaactgcggcttcgagacacacgcagccgagcaagccgccctgaacatcgccagatcctggctgttcctgcggagccaggagtacaagaaataccagacaaacaagacaaccggcaacaccgataagagagccttcgtcgagacctggcagtccttttaccggaagaagcttaaggaggtgtggaaacctgccgtgcggtctggcggatctggcggaggctccaccagccccaagaaaaagagaaaagtctaagctgccttctgcggggcttgccttctggccatgcccttcttctctcccttgcacctgtacctcttggtctttgaataaagcctgagtaggaaggctagcaaaaaaaaaaaaaaaaaaaaaaaaaaaaaaaaaaaaaaaaaaaaaaaaaaaaaaaaaaaaaaaaaaaaaaaaaaaaaaaa

SEQ ID NO: 9518 - RNA, 8787 nt, synthetic construct
  source 1..8787: mol_type = other RNA
aggaaataagagagaaaagaagagtaagaagaaatataagagccaccatggcccctaagaagaagcgtaaagtgagccggatgaaccacgaccaggagttcgacccccctaaggtgtaccctcccgtccccgccgagaagagaaagcccatccgggtcctgagcctgttcgatggcatcgccaccggtctgctggtgctgaaggacctgggcatccaggtggataggtacattgcctccgaggtgtgcgaggactccatcaccgtgggaatggtgcgtcatcagggcaagatcatgtacgtgggcgacgtgcggagcgtgacacagaagcatatccaggagtggggccctttcgacctggtgatcggcggcagcccttgcaatgacctgagcatcgtgaacccagcccggaagggcctgtacgagggaaccggcagactgttcttcgagttttacagactgctgcacgacgcccggcctaaggaaggcgacgaccggcccttcttttggctgttcgagaatgtggtggccatgggagtcagcgacaagcgggatattagccggttcctggagagcaaccccgtgatgatcgatgccaaggaagtgagcgccgcccaccgggccagatacttctggggcaatctgcctggcatgaacagacccctggccagcaccgtgaacgacaagctggagctgcaggagtgcctggagcacggccggatcgccaagttcagcaaggtgagaaccatcaccacccgaagcaacagcatcaaacaaggcaaggaccagcactttcctgtgttcatgaacgagaaggaggacatcctgtggtgtaccgagatggagagagtgttcgggttcccagtccactacacagatgtcagcaacatgtctagactggccagacagagactgctgggaagaagctggtccgtccctgtgatcagacacctgttcgcccctctgaaggagtacttcgcctgcgtgagcagcggcaacagcaacgccaacagccggggccccagcttctctagcggcctggtgccactgtccctgagagggagccacatgggccccatggagatctacaaaaccgtgagcgcctggaagcggcagcctgtgcgcgtgctgagcctgtttcggaatatcgataaagtcctgaaaagcctgggattcctggagagcggctctggctccggcggtggcaccctgaagtacgtggaggatgtgacaaacgtggtcagacgggatgtggagaagtggggccccttcgatctggtgtacggcagcacccaacccctgggcagctcttgtgaccggtgccctggctggtacatgtttcagttccaccggatcctgcagtacgccctgccgagacaggagtcccagcggccattcttttggattttcatggacaacttgctgctgaccgaggatgaccaggaaactaccactcggttcctgcagaccgaagccgtgaccctgcaggacgtgagaggccgggactaccagaacgccatgcgggtgtggtccaacatccctggactgaaaagcaagcacgcacctctgacccctaaagaagaggagtacctgcaggcccaggtgcggagcagaagcaagctggacgcccctaaggtggatctgctggtgaagaattgcctcctgcccctgagagagtacttcaagtatttcagccagaatagtctgcccctgggaggcagcggcggcggcgagccctgggccgtgaccttcgccgacgtggccgtgtacttcagcagcgaggagtggaggtgcctgaggcccgcccagagggccctgtacagggacgtgatgagggacacctacggcctgctgagcgccctgggcggcggcggcaccaagcccgccctgatcagctgggtggagggcgaggccgagctgtgggaccccgacgcccaggaccccgaggtggtgaggtggcccgccgaggccgacggcggcccaagcagcggcgcccctcctcccagcggcggcaggcggcccaagcagcggcgcccctcctcccagcggcggcagcccagccggctccccaacctctaccgaggagggcacctctgagtccgccacccccgagagcggccctggcacctccaccgagcccagcgagggcagcgcacccggcagccctgccggcagccccacctccacagaggagggaaccagcaccgagcccagcgaaggcagcgccccaggcaccagcaccgagcctagtgagcaggagattaaacggatcaacaagatcagaagaagacttgtgaaagacagcaacaccaagaaggccggcaagacaggccccatgaaaaccctgctggttagagtgatgacacccgatctgagagagcggctggaaaacctgagaaagaagcctgaaaatatcccccagcccatcagcaatacatctagagccaacctgaataagctgctgaccgattacaccgaaatgaagaaggcgatcctgcatgtgtactgggaagagttccagaaggaccctgtgggcctgatgagccgggtggcccagcctgccagcaagaagatcgatcagaacaagctgaaacctgagatggacgagaagggcaacctgaccaccgccggctttgcctgctctcagtgtggccagcccctgttcgtgtacaagctggagcaggtgtctgagaagggcaaggcttacaccaactacttcggacggtgcaatgtggccgagcacgaaaagctgatcctgctggcccagctgaagcccgagaaggatagcgacgaagccgtgacatatagcctgggaaagtttgggcagagggccctggatttctacagcattcatgtgaccaaggagtccacccaccccgtgaagcccctggcccagatcgccggaaacagatacgcctccggacctgtgggaaaggccctgagcgacgcatgtatgggcacaatcgcctccttcctgtctaagtaccaggacatcatcatcgaacaccagaaggtggtgaagggcaaccagaagagactggagagcctgcgggagctggccggcaaggaaaacctggaataccctagcgtgaccctgccacctcagcctcacaccaaggagggcgttgatgcctacaacgaagtgatcgcccgggtgcgaatgtgggtgaacctgaacctgtggcagaagctgaagctaagcagagatgatgccaagcctctgctgagactgaagggattcccttcctttcctctggtcgagagacaggccaacgaagtggactggtgggacatggtgtgtaacgtgaagaagctgatcaacgagaaaaaggaggatggcaaggtgttttggcagaatctggctggctacaagagacaggaagccctgagaccatacctgagcagcgaggaagatcggaagaagggaaagaaattcgctcggtaccagctgggcgacctgctgctgcacctggaaaagaagcacggcgaggactggggaaaggtgtacgacgaggcctgggagcggattgacaagaaagtggaaggcctgagcaagcacatcaagctggaagaggaacggagaagcgaggacgcccagagcaaggccgccctgaccgactggctgcgggctaaggccagcttcgtgatcgagggcctgaaggaggccgacaaggacgagttctgcagatgcgagctgaagctgcagaagtggtacggggacctgcggggaaagcccttcgccatcgaagccgagaacagcatcctggacatcagcggcttcagcaagcagtacaactgtgccttcatctggcagaaggacggcgtgaagaagctgaacctgtacctgatcatcaactacttcaagggcggcaagctgcggttcaagaagatcaaacctgaagccttcgaagccaacagattctacaccgtgatcaacaaaaagagcggcgagatcgtgcccatggaggtgaacttcaacttcgacgaccccaacctgatcatcctgcctctggcctttggcaagagacagggcagagaattcatctggaacgacctgctgtccctggaaaccggcagcctgaagctggccaacggaagagtgatcgagaagacactgtacaacagaagaacccggcaggatgagcctgccctgttcgtggccctgaccttcgagcggcgggaggtcctggactcctccaatatcaaaccaatgaacctgatcggcgtggcaagaggcgaaaacatccccgccgtgatcgccctgaccgaccccgagggctgcccactgagccggtttaaggatagcctgggaaacccaacccacatcctgagaatcggcgagagctataaggagaagcagcggaccatccaggccaagaaggaggtggagcagcggagagccggcggctacagccggaagtacgccagcaaagccaagaatctggcagacgatatggtgagaaacaccgctagagatctgctgtactacgccgtgacccaggatgccatgctgatcttcgccaacctgagccggggcttcggccggcagggcaagcggaccttcatggccgagagacagtacacacggatggaggactggctgaccgccaagctggcctacgagggcctgagcaagacctacctgtccaagacactggcccagtacacctccaagacatgcagcaactgtgggtttaccatcaccagcgccgactacgacagggtgctggagaagctgaagaagacagcaacaggctggatgaccacaattaacggcaaggagctgaaggtggagggccagattacctactacaacagatacaagagacagaacgtagtcaaggacctgtccgtcgagctggatagactgagcgaagaatctgtgaacaacgacatctcctcctggacaaagggcagaagcggagaagctctgagcctcctgaagaaaagattctcccatagacccgtgcaggagaagttcgtgtgcctgaactgcggcttcgagacacacgcagccgagcaagccgccctgaacatcgccagatcctggctgttcctgcggagccaggagtacaagaaataccagacaaacaagacaaccggcaacaccgataagagagccttcgtcgagacctggcagtccttttaccggaagaagcttaaggaggtgtggaaacctgccgtgcggtctggcggatctggcggaggctccaccagccccaagaaaaagagaaaagtctaagctgccttctgcggggcttgccttctggccatgcccttcttctctcccttgcacctgtacctcttggtctttgaataaagcctgagtaggaaggctagcaaaaaaaaaaaaaaaaaaaaaaaaaaaaaaaaaaaaaaaaaaaaaaaaaaaaaaaaaaaaaaaaaaaaaaaaaaaaaaaagcccagccggctccccaacctctaccgaggagggcacctctgagtccgccacccccgagagcggccctggcacctccaccgagcccagcgagggcagcgcacccggcagccctgccggcagccccacctccacagaggagggaaccagcaccgagcccagcgaaggcagcgccccaggcaccagcaccgagcctagtgagcaggagattaaacggatcaacaagatcagaagaagacttgtgaaagacagcaacaccaagaaggccggcaagacaggccccatgaaaaccctgctggttagagtgatgacacccgatctgagagagcggctggaaaacctgagaaagaagcctgaaaatatcccccagcccatcagcaatacatctagagccaacctgaataagctgctgaccgattacaccgaaatgaagaaggcgatcctgcatgtgtactgggaagagttccagaaggaccctgtgggcctgatgagccgggtggcccagcctgccagcaagaagatcgatcagaacaagctgaaacctgagatggacgagaagggcaacctgaccaccgccggctttgcctgctctcagtgtggccagcccctgttcgtgtacaagctggagcaggtgtctgagaagggcaaggcttacaccaactacttcggacggtgcaatgtggccgagcacgaaaagctgatcctgctggcccagctgaagcccgagaaggatagcgacgaagccgtgacatatagcctgggaaagtttgggcagagggccctggatttctacagcattcatgtgaccaaggagtccacccaccccgtgaagcccctggcccagatcgccggaaacagatacgcctccggacctgtgggaaaggccctgagcgacgcatgtatgggcacaatcgcctccttcctgtctaagtaccaggacatcatcatcgaacaccagaaggtggtgaagggcaaccagaagagactggagagcctgcgggagctggccggcaaggaaaacctggaataccctagcgtgaccctgccacctcagcctcacaccaaggagggcgttgatgcctacaacgaagtgatcgcccgggtgcgaatgtgggtgaacctgaacctgtggcagaagctgaagctaagcagagatgatgccaagcctctgctgagactgaagggattcccttcctttcctctggtcgagagacaggccaacgaagtggactggtgggacatggtgtgtaacgtgaagaagctgatcaacgagaaaaaggaggatggcaaggtgttttggcagaatctggctggctacaagagacaggaagccctgagaccatacctgagcagcgaggaagatcggaagaagggaaagaaattcgctcggtaccagctgggcgacctgctgctgcacctggaaaagaagcacggcgaggactggggaaaggtgtacgacgaggcctgggagcggattgacaagaaagtggaaggcctgagcaagcacatcaagctggaagaggaacggagaagcgaggacgcccagagcaaggccgccctgaccgactggctgcgggctaaggccagcttcgtgatcgagggcctgaaggaggccgacaaggacgagttctgcagatgcgagctgaagctgcagaagtggtacggggacctgcggggaaagcccttcgccatcgaagccgagaacagcatcctggacatcagcggcttcagcaagcagtacaactgtgccttcatctggcagaaggacggcgtgaagaagctgaacctgtacctgatcatcaactacttcaagggcggcaagctgcggttcaagaagatcaaacctgaagccttcgaagccaacagattctacaccgtgatcaacaaaaagagcggcgagatcgtgcccatggaggtgaacttcaacttcgacgaccccaacctgatcatcctgcctctggcctttggcaagagacagggcagagaattcatctggaacgacctgctgtccctggaaaccggcagcctgaagctggccaacggaagagtgatcgagaagacactgtacaacagaagaacccggcaggatgagcctgccctgttcgtggccctgaccttcgagcggcgggaggtcctggactcctccaatatcaaaccaatgaacctgatcggcgtggcaagaggcgaaaacatccccgccgtgatcgccctgaccgaccccgagggctgcccactgagccggtttaaggatagcctgggaaacccaacccacatcctgagaatcggcgagagctataaggagaagcagcggaccatccaggccaagaaggaggtggagcagcggagagccggcggctacagccggaagtacgccagcaaagccaagaatctggcagacgatatggtgagaaacaccgctagagatctgctgtactacgccgtgacccaggatgccatgctgatcttcgccaacctgagccggggcttcggccggcagggcaagcggaccttcatggccgagagacagtacacacggatggaggactggctgaccgccaagctggcctacgagggcctgagcaagacctacctgtccaagacactggcccagtacacctccaagacatgcagcaactgtgggtttaccatcaccagcgccgactacgacagggtgctggagaagctgaagaagacagcaacaggctggatgaccacaattaacggcaaggagctgaaggtggagggccagattacctactacaacagatacaagagacagaacgtagtcaaggacctgtccgtcgagctggatagactgagcgaagaatctgtgaacaacgacatctcctcctggacaaagggcagaagcggagaagctctgagcctcctgaagaaaagattctcccatagacccgtgcaggagaagttcgtgtgcctgaactgcggcttcgagacacacgcagccgagcaagccgccctgaacatcgccagatcctggctgttcctgcggagccaggagtacaagaaataccagacaaacaagacaaccggcaacaccgataagagagccttcgtcgagacctggcagtccttttaccggaagaagcttaaggaggtgtggaaacctgccgtgcggtctggcggatctggcggaggctccaccagccccaagaaaaagagaaaagtctaagctgccttctgcggggcttgccttctggccatgcccttcttctctcccttgcacctgtacctcttggtctttgaataaagcctgagtaggaaggctagcaaaaaaaaaaaaaaaaaaaaaaaaaaaaaaaaaaaaaaaaaaaaaaaaaaaaaaaaaaaaaaaaaaaaaaaaaaaaaaaa

SEQ ID NO: 9519 - RNA, 8787 nt, synthetic construct
  source 1..8787: mol_type = other RNA
aggaaataagagagaaaagaagagtaagaagaaatataagagccaccatggcccctaagaagaagcgtaaagtgagccggatgaaccacgaccaggagttcgacccccctaaggtgtaccctcccgtccccgccgagaagagaaagcccatccgggtcctgagcctgttcgatggcatcgccaccggtctgctggtgctgaaggacctgggcatccaggtggataggtacattgcctccgaggtgtgcgaggactccatcaccgtgggaatggtgcgtcatcagggcaagatcatgtacgtgggcgacgtgcggagcgtgacacagaagcatatccaggagtggggccctttcgacctggtgatcggcggcagcccttgcaatgacctgagcatcgtgaacccagcccggaagggcctgtacgagggaaccggcagactgttcttcgagttttacagactgctgcacgacgcccggcctaaggaaggcgacgaccggcccttcttttggctgttcgagaatgtggtggccatgggagtcagcgacaagcgggatattagccggttcctggagagcaaccccgtgatgatcgatgccaaggaagtgagcgccgcccaccgggccagatacttctggggcaatctgcctggcatgaacagacccctggccagcaccgtgaacgacaagctggagctgcaggagtgcctggagcacggccggatcgccaagttcagcaaggtgagaaccatcaccacccgaagcaacagcatcaaacaaggcaaggaccagcactttcctgtgttcatgaacgagaaggaggacatcctgtggtgtaccgagatggagagagtgttcgggttcccagtccactacacagatgtcagcaacatgtctagactggccagacagagactgctgggaagaagctggtccgtccctgtgatcagacacctgttcgcccctctgaaggagtacttcgcctgcgtgagcagcggcaacagcaacgccaacagccggggccccagcttctctagcggcctggtgccactgtccctgagagggagccacatgggccccatggagatctacaaaaccgtgagcgcctggaagcggcagcctgtgcgcgtgctgagcctgtttcggaatatcgataaagtcctgaaaagcctgggattcctggagagcggctctggctccggcggtggcaccctgaagtacgtggaggatgtgacaaacgtggtcagacgggatgtggagaagtggggccccttcgatctggtgtacggcagcacccaacccctgggcagctcttgtgaccggtgccctggctggtacatgtttcagttccaccggatcctgcagtacgccctgccgagacaggagtcccagcggccattcttttggattttcatggacaacttgctgctgaccgaggatgaccaggaaactaccactcggttcctgcagaccgaagccgtgaccctgcaggacgtgagaggccgggactaccagaacgccatgcgggtgtggtccaacatccctggactgaaaagcaagcacgcacctctgacccctaaagaagaggagtacctgcaggcccaggtgcggagcagaagcaagctggacgcccctaaggtggatctgctggtgaagaattgcctcctgcccctgagagagtacttcaagtatttcagccagaatagtctgcccctgggaggcagcggcggcggcgtgcagagccacgtggtgttcgaggacgtggccatctacttcagccaggaggagtggggcctgctggacgaggcccagaggttcctgtaccacgccgtgatgctggagaacttcgccctgctgagcagcctgggctgctggcacggcgcccaggacgagcaggccctgagcgagcagggcgtgagcgtgggcggcagccaggtgaggacccccaagcccgcccccagcatccagaagagccagggcggcccaagcagcggcgcccctcctcccagcggcggcaggcggcccaagcagcggcgcccctcctcccagcggcggcagcccagccggctccccaacctctaccgaggagggcacctctgagtccgccacccccgagagcggccctggcacctccaccgagcccagcgagggcagcgcacccggcagccctgccggcagccccacctccacagaggagggaaccagcaccgagcccagcgaaggcagcgccccaggcaccagcaccgagcctagtgagcaggagattaaacggatcaacaagatcagaagaagacttgtgaaagacagcaacaccaagaaggccggcaagacaggccccatgaaaaccctgctggttagagtgatgacacccgatctgagagagcggctggaaaacctgagaaagaagcctgaaaatatcccccagcccatcagcaatacatctagagccaacctgaataagctgctgaccgattacaccgaaatgaagaaggcgatcctgcatgtgtactgggaagagttccagaaggaccctgtgggcctgatgagccgggtggcccagcctgccagcaagaagatcgatcagaacaagctgaaacctgagatggacgagaagggcaacctgaccaccgccggctttgcctgctctcagtgtggccagcccctgttcgtgtacaagctggagcaggtgtctgagaagggcaaggcttacaccaactacttcggacggtgcaatgtggccgagcacgaaaagctgatcctgctggcccagctgaagcccgagaaggatagcgacgaagccgtgacatatagcctgggaaagtttgggcagagggccctggatttctacagcattcatgtgaccaaggagtccacccaccccgtgaagcccctggcccagatcgccggaaacagatacgcctccggacctgtgggaaaggccctgagcgacgcatgtatgggcacaatcgcctccttcctgtctaagtaccaggacatcatcatcgaacaccagaaggtggtgaagggcaaccagaagagactggagagcctgcgggagctggccggcaaggaaaacctggaataccctagcgtgaccctgccacctcagcctcacaccaaggagggcgttgatgcctacaacgaagtgatcgcccgggtgcgaatgtgggtgaacctgaacctgtggcagaagctgaagctaagcagagatgatgccaagcctctgctgagactgaagggattcccttcctttcctctggtcgagagacaggccaacgaagtggactggtgggacatggtgtgtaacgtgaagaagctgatcaacgagaaaaaggaggatggcaaggtgttttggcagaatctggctggctacaagagacaggaagccctgagaccatacctgagcagcgaggaagatcggaagaagggaaagaaattcgctcggtaccagctgggcgacctgctgctgcacctggaaaagaagcacggcgaggactggggaaaggtgtacgacgaggcctgggagcggattgacaagaaagtggaaggcctgagcaagcacatcaagctggaagaggaacggagaagcgaggacgcccagagcaaggccgccctgaccgactggctgcgggctaaggccagcttcgtgatcgagggcctgaaggaggccgacaaggacgagttctgcagatgcgagctgaagctgcagaagtggtacggggacctgcggggaaagcccttcgccatcgaagccgagaacagcatcctggacatcagcggcttcagcaagcagtacaactgtgccttcatctggcagaaggacggcgtgaagaagctgaacctgtacctgatcatcaactacttcaagggcggcaagctgcggttcaagaagatcaaacctgaagccttcgaagccaacagattctacaccgtgatcaacaaaaagagcggcgagatcgtgcccatggaggtgaacttcaacttcgacgaccccaacctgatcatcctgcctctggcctttggcaagagacagggcagagaattcatctggaacgacctgctgtccctggaaaccggcagcctgaagctggccaacggaagagtgatcgagaagacactgtacaacagaagaacccggcaggatgagcctgccctgttcgtggccctgaccttcgagcggcgggaggtcctggactcctccaatatcaaaccaatgaacctgatcggcgtggcaagaggcgaaaacatccccgccgtgatcgccctgaccgaccccgagggctgcccactgagccggtttaaggatagcctgggaaacccaacccacatcctgagaatcggcgagagctataaggagaagcagcggaccatccaggccaagaaggaggtggagcagcggagagccggcggctacagccggaagtacgccagcaaagccaagaatctggcagacgatatggtgagaaacaccgctagagatctgctgtactacgccgtgacccaggatgccatgctgatcttcgccaacctgagccggggcttcggccggcagggcaagcggaccttcatggccgagagacagtacacacggatggaggactggctgaccgccaagctggcctacgagggcctgagcaagacctacctgtccaagacactggcccagtacacctccaagacatgcagcaactgtgggtttaccatcaccagcgccgactacgacagggtgctggagaagctgaagaagacagcaacaggctggatgaccacaattaacggcaaggagctgaaggtggagggccagattacctactacaacagatacaagagacagaacgtagtcaaggacctgtccgtcgagctggatagactgagcgaagaatctgtgaacaacgacatctcctcctggacaaagggcagaagcggagaagctctgagcctcctgaagaaaagattctcccatagacccgtgcaggagaagttcgtgtgcctgaactgcggcttcgagacacacgcagccgagcaagccgccctgaacatcgccagatcctggctgttcctgcggagccaggagtacaagaaataccagacaaacaagacaaccggcaacaccgataagagagccttcgtcgagacctggcagtccttttaccggaagaagcttaaggaggtgtggaaacctgccgtgcggtctggcggatctggcggaggctccaccagccccaagaaaaagagaaaagtctaagctgccttctgcggggcttgccttctggccatgcccttcttctctcccttgcacctgtacctcttggtctttgaataaagcctgagtaggaaggctagcaaaaaaaaaaaaaaaaaaaaaaaaaaaaaaaaaaaaaaaaaaaaaaaaaaaaaaaaaaaaaaaaaaaaaaaaaaaaaaaagcccagccggctccccaacctctaccgaggagggcacctctgagtccgccacccccgagagcggccctggcacctccaccgagcccagcgagggcagcgcacccggcagccctgccggcagccccacctccacagaggagggaaccagcaccgagcccagcgaaggcagcgccccaggcaccagcaccgagcctagtgagcaggagattaaacggatcaacaagatcagaagaagacttgtgaaagacagcaacaccaagaaggccggcaagacaggccccatgaaaaccctgctggttagagtgatgacacccgatctgagagagcggctggaaaacctgagaaagaagcctgaaaatatcccccagcccatcagcaatacatctagagccaacctgaataagctgctgaccgattacaccgaaatgaagaaggcgatcctgcatgtgtactgggaagagttccagaaggaccctgtgggcctgatgagccgggtggcccagcctgccagcaagaagatcgatcagaacaagctgaaacctgagatggacgagaagggcaacctgaccaccgccggctttgcctgctctcagtgtggccagcccctgttcgtgtacaagctggagcaggtgtctgagaagggcaaggcttacaccaactacttcggacggtgcaatgtggccgagcacgaaaagctgatcctgctggcccagctgaagcccgagaaggatagcgacgaagccgtgacatatagcctgggaaagtttgggcagagggccctggatttctacagcattcatgtgaccaaggagtccacccaccccgtgaagcccctggcccagatcgccggaaacagatacgcctccggacctgtgggaaaggccctgagcgacgcatgtatgggcacaatcgcctccttcctgtctaagtaccaggacatcatcatcgaacaccagaaggtggtgaagggcaaccagaagagactggagagcctgcgggagctggccggcaaggaaaacctggaataccctagcgtgaccctgccacctcagcctcacaccaaggagggcgttgatgcctacaacgaagtgatcgcccgggtgcgaatgtgggtgaacctgaacctgtggcagaagctgaagctaagcagagatgatgccaagcctctgctgagactgaagggattcccttcctttcctctggtcgagagacaggccaacgaagtggactggtgggacatggtgtgtaacgtgaagaagctgatcaacgagaaaaaggaggatggcaaggtgttttggcagaatctggctggctacaagagacaggaagccctgagaccatacctgagcagcgaggaagatcggaagaagggaaagaaattcgctcggtaccagctgggcgacctgctgctgcacctggaaaagaagcacggcgaggactggggaaaggtgtacgacgaggcctgggagcggattgacaagaaagtggaaggcctgagcaagcacatcaagctggaagaggaacggagaagcgaggacgcccagagcaaggccgccctgaccgactggctgcgggctaaggccagcttcgtgatcgagggcctgaaggaggccgacaaggacgagttctgcagatgcgagctgaagctgcagaagtggtacggggacctgcggggaaagcccttcgccatcgaagccgagaacagcatcctggacatcagcggcttcagcaagcagtacaactgtgccttcatctggcagaaggacggcgtgaagaagctgaacctgtacctgatcatcaactacttcaagggcggcaagctgcggttcaagaagatcaaacctgaagccttcgaagccaacagattctacaccgtgatcaacaaaaagagcggcgagatcgtgcccatggaggtgaacttcaacttcgacgaccccaacctgatcatcctgcctctggcctttggcaagagacagggcagagaattcatctggaacgacctgctgtccctggaaaccggcagcctgaagctggccaacggaagagtgatcgagaagacactgtacaacagaagaacccggcaggatgagcctgccctgttcgtggccctgaccttcgagcggcgggaggtcctggactcctccaatatcaaaccaatgaacctgatcggcgtggcaagaggcgaaaacatccccgccgtgatcgccctgaccgaccccgagggctgcccactgagccggtttaaggatagcctgggaaacccaacccacatcctgagaatcggcgagagctataaggagaagcagcggaccatccaggccaagaaggaggtggagcagcggagagccggcggctacagccggaagtacgccagcaaagccaagaatctggcagacgatatggtgagaaacaccgctagagatctgctgtactacgccgtgacccaggatgccatgctgatcttcgccaacctgagccggggcttcggccggcagggcaagcggaccttcatggccgagagacagtacacacggatggaggactggctgaccgccaagctggcctacgagggcctgagcaagacctacctgtccaagacactggcccagtacacctccaagacatgcagcaactgtgggtttaccatcaccagcgccgactacgacagggtgctggagaagctgaagaagacagcaacaggctggatgaccacaattaacggcaaggagctgaaggtggagggccagattacctactacaacagatacaagagacagaacgtagtcaaggacctgtccgtcgagctggatagactgagcgaagaatctgtgaacaacgacatctcctcctggacaaagggcagaagcggagaagctctgagcctcctgaagaaaagattctcccatagacccgtgcaggagaagttcgtgtgcctgaactgcggcttcgagacacacgcagccgagcaagccgccctgaacatcgccagatcctggctgttcctgcggagccaggagtacaagaaataccagacaaacaagacaaccggcaacaccgataagagagccttcgtcgagacctggcagtccttttaccggaagaagcttaaggaggtgtggaaacctgccgtgcggtctggcggatctggcggaggctccaccagccccaagaaaaagagaaaagtctaagctgccttctgcggggcttgccttctggccatgcccttcttctctcccttgcacctgtacctcttggtctttgaataaagcctgagtaggaaggctagcaaaaaaaaaaaaaaaaaaaaaaaaaaaaaaaaaaaaaaaaaaaaaaaaaaaaaaaaaaaaaaaaaaaaaaaaaaaaaaaa

SEQ ID NO: 9520 - RNA, 8787 nt, synthetic construct
  source 1..8787: mol_type = other RNA
aggaaataagagagaaaagaagagtaagaagaaatataagagccaccatggcccctaagaagaagcgtaaagtgagccggatgaaccacgaccaggagttcgacccccctaaggtgtaccctcccgtccccgccgagaagagaaagcccatccgggtcctgagcctgttcgatggcatcgccaccggtctgctggtgctgaaggacctgggcatccaggtggataggtacattgcctccgaggtgtgcgaggactccatcaccgtgggaatggtgcgtcatcagggcaagatcatgtacgtgggcgacgtgcggagcgtgacacagaagcatatccaggagtggggccctttcgacctggtgatcggcggcagcccttgcaatgacctgagcatcgtgaacccagcccggaagggcctgtacgagggaaccggcagactgttcttcgagttttacagactgctgcacgacgcccggcctaaggaaggcgacgaccggcccttcttttggctgttcgagaatgtggtggccatgggagtcagcgacaagcgggatattagccggttcctggagagcaaccccgtgatgatcgatgccaaggaagtgagcgccgcccaccgggccagatacttctggggcaatctgcctggcatgaacagacccctggccagcaccgtgaacgacaagctggagctgcaggagtgcctggagcacggccggatcgccaagttcagcaaggtgagaaccatcaccacccgaagcaacagcatcaaacaaggcaaggaccagcactttcctgtgttcatgaacgagaaggaggacatcctgtggtgtaccgagatggagagagtgttcgggttcccagtccactacacagatgtcagcaacatgtctagactggccagacagagactgctgggaagaagctggtccgtccctgtgatcagacacctgttcgcccctctgaaggagtacttcgcctgcgtgagcagcggcaacagcaacgccaacagccggggccccagcttctctagcggcctggtgccactgtccctgagagggagccacatgggccccatggagatctacaaaaccgtgagcgcctggaagcggcagcctgtgcgcgtgctgagcctgtttcggaatatcgataaagtcctgaaaagcctgggattcctggagagcggctctggctccggcggtggcaccctgaagtacgtggaggatgtgacaaacgtggtcagacgggatgtggagaagtggggccccttcgatctggtgtacggcagcacccaacccctgggcagctcttgtgaccggtgccctggctggtacatgtttcagttccaccggatcctgcagtacgccctgccgagacaggagtcccagcggccattcttttggattttcatggacaacttgctgctgaccgaggatgaccaggaaactaccactcggttcctgcagaccgaagccgtgaccctgcaggacgtgagaggccgggactaccagaacgccatgcgggtgtggtccaacatccctggactgaaaagcaagcacgcacctctgacccctaaagaagaggagtacctgcaggcccaggtgcggagcagaagcaagctggacgcccctaaggtggatctgctggtgaagaattgcctcctgcccctgagagagtacttcaagtatttcagccagaatagtctgcccctgggaggcagcggcggcggcctgcaggagctgctgagcttcgaggacctgagcgtggacttcacccagaaggagtggcagctgctgaacccctaccagaagaacctgtacaaggacgtgatgctggagaactacagcagcctggtgagcctgggctacgaggtgatcaagcccgacgtgatcttcaagctggagcagggcgaggagccctggatcagggacgccgagatgcccagcagccccagcctggaggtgtggcaggtgggcggcccaagcagcggcgcccctcctcccagcggcggcaggcggcccaagcagcggcgcccctcctcccagcggcggcagcccagccggctccccaacctctaccgaggagggcacctctgagtccgccacccccgagagcggccctggcacctccaccgagcccagcgagggcagcgcacccggcagccctgccggcagccccacctccacagaggagggaaccagcaccgagcccagcgaaggcagcgccccaggcaccagcaccgagcctagtgagcaggagattaaacggatcaacaagatcagaagaagacttgtgaaagacagcaacaccaagaaggccggcaagacaggccccatgaaaaccctgctggttagagtgatgacacccgatctgagagagcggctggaaaacctgagaaagaagcctgaaaatatcccccagcccatcagcaatacatctagagccaacctgaataagctgctgaccgattacaccgaaatgaagaaggcgatcctgcatgtgtactgggaagagttccagaaggaccctgtgggcctgatgagccgggtggcccagcctgccagcaagaagatcgatcagaacaagctgaaacctgagatggacgagaagggcaacctgaccaccgccggctttgcctgctctcagtgtggccagcccctgttcgtgtacaagctggagcaggtgtctgagaagggcaaggcttacaccaactacttcggacggtgcaatgtggccgagcacgaaaagctgatcctgctggcccagctgaagcccgagaaggatagcgacgaagccgtgacatatagcctgggaaagtttgggcagagggccctggatttctacagcattcatgtgaccaaggagtccacccaccccgtgaagcccctggcccagatcgccggaaacagatacgcctccggacctgtgggaaaggccctgagcgacgcatgtatgggcacaatcgcctccttcctgtctaagtaccaggacatcatcatcgaacaccagaaggtggtgaagggcaaccagaagagactggagagcctgcgggagctggccggcaaggaaaacctggaataccctagcgtgaccctgccacctcagcctcacaccaaggagggcgttgatgcctacaacgaagtgatcgcccgggtgcgaatgtgggtgaacctgaacctgtggcagaagctgaagctaagcagagatgatgccaagcctctgctgagactgaagggattcccttcctttcctctggtcgagagacaggccaacgaagtggactggtgggacatggtgtgtaacgtgaagaagctgatcaacgagaaaaaggaggatggcaaggtgttttggcagaatctggctggctacaagagacaggaagccctgagaccatacctgagcagcgaggaagatcggaagaagggaaagaaattcgctcggtaccagctgggcgacctgctgctgcacctggaaaagaagcacggcgaggactggggaaaggtgtacgacgaggcctgggagcggattgacaagaaagtggaaggcctgagcaagcacatcaagctggaagaggaacggagaagcgaggacgcccagagcaaggccgccctgaccgactggctgcgggctaaggccagcttcgtgatcgagggcctgaaggaggccgacaaggacgagttctgcagatgcgagctgaagctgcagaagtggtacggggacctgcggggaaagcccttcgccatcgaagccgagaacagcatcctggacatcagcggcttcagcaagcagtacaactgtgccttcatctggcagaaggacggcgtgaagaagctgaacctgtacctgatcatcaactacttcaagggcggcaagctgcggttcaagaagatcaaacctgaagccttcgaagccaacagattctacaccgtgatcaacaaaaagagcggcgagatcgtgcccatggaggtgaacttcaacttcgacgaccccaacctgatcatcctgcctctggcctttggcaagagacagggcagagaattcatctggaacgacctgctgtccctggaaaccggcagcctgaagctggccaacggaagagtgatcgagaagacactgtacaacagaagaacccggcaggatgagcctgccctgttcgtggccctgaccttcgagcggcgggaggtcctggactcctccaatatcaaaccaatgaacctgatcggcgtggcaagaggcgaaaacatccccgccgtgatcgccctgaccgaccccgagggctgcccactgagccggtttaaggatagcctgggaaacccaacccacatcctgagaatcggcgagagctataaggagaagcagcggaccatccaggccaagaaggaggtggagcagcggagagccggcggctacagccggaagtacgccagcaaagccaagaatctggcagacgatatggtgagaaacaccgctagagatctgctgtactacgccgtgacccaggatgccatgctgatcttcgccaacctgagccggggcttcggccggcagggcaagcggaccttcatggccgagagacagtacacacggatggaggactggctgaccgccaagctggcctacgagggcctgagcaagacctacctgtccaagacactggcccagtacacctccaagacatgcagcaactgtgggtttaccatcaccagcgccgactacgacagggtgctggagaagctgaagaagacagcaacaggctggatgaccacaattaacggcaaggagctgaaggtggagggccagattacctactacaacagatacaagagacagaacgtagtcaaggacctgtccgtcgagctggatagactgagcgaagaatctgtgaacaacgacatctcctcctggacaaagggcagaagcggagaagctctgagcctcctgaagaaaagattctcccatagacccgtgcaggagaagttcgtgtgcctgaactgcggcttcgagacacacgcagccgagcaagccgccctgaacatcgccagatcctggctgttcctgcggagccaggagtacaagaaataccagacaaacaagacaaccggcaacaccgataagagagccttcgtcgagacctggcagtccttttaccggaagaagcttaaggaggtgtggaaacctgccgtgcggtctggcggatctggcggaggctccaccagccccaagaaaaagagaaaagtctaagctgccttctgcggggcttgccttctggccatgcccttcttctctcccttgcacctgtacctcttggtctttgaataaagcctgagtaggaaggctagcaaaaaaaaaaaaaaaaaaaaaaaaaaaaaaaaaaaaaaaaaaaaaaaaaaaaaaaaaaaaaaaaaaaaaaaaaaaaaaaagcccagccggctccccaacctctaccgaggagggcacctctgagtccgccacccccgagagcggccctggcacctccaccgagcccagcgagggcagcgcacccggcagccctgccggcagccccacctccacagaggagggaaccagcaccgagcccagcgaaggcagcgccccaggcaccagcaccgagcctagtgagcaggagattaaacggatcaacaagatcagaagaagacttgtgaaagacagcaacaccaagaaggccggcaagacaggccccatgaaaaccctgctggttagagtgatgacacccgatctgagagagcggctggaaaacctgagaaagaagcctgaaaatatcccccagcccatcagcaatacatctagagccaacctgaataagctgctgaccgattacaccgaaatgaagaaggcgatcctgcatgtgtactgggaagagttccagaaggaccctgtgggcctgatgagccgggtggcccagcctgccagcaagaagatcgatcagaacaagctgaaacctgagatggacgagaagggcaacctgaccaccgccggctttgcctgctctcagtgtggccagcccctgttcgtgtacaagctggagcaggtgtctgagaagggcaaggcttacaccaactacttcggacggtgcaatgtggccgagcacgaaaagctgatcctgctggcccagctgaagcccgagaaggatagcgacgaagccgtgacatatagcctgggaaagtttgggcagagggccctggatttctacagcattcatgtgaccaaggagtccacccaccccgtgaagcccctggcccagatcgccggaaacagatacgcctccggacctgtgggaaaggccctgagcgacgcatgtatgggcacaatcgcctccttcctgtctaagtaccaggacatcatcatcgaacaccagaaggtggtgaagggcaaccagaagagactggagagcctgcgggagctggccggcaaggaaaacctggaataccctagcgtgaccctgccacctcagcctcacaccaaggagggcgttgatgcctacaacgaagtgatcgcccgggtgcgaatgtgggtgaacctgaacctgtggcagaagctgaagctaagcagagatgatgccaagcctctgctgagactgaagggattcccttcctttcctctggtcgagagacaggccaacgaagtggactggtgggacatggtgtgtaacgtgaagaagctgatcaacgagaaaaaggaggatggcaaggtgttttggcagaatctggctggctacaagagacaggaagccctgagaccatacctgagcagcgaggaagatcggaagaagggaaagaaattcgctcggtaccagctgggcgacctgctgctgcacctggaaaagaagcacggcgaggactggggaaaggtgtacgacgaggcctgggagcggattgacaagaaagtggaaggcctgagcaagcacatcaagctggaagaggaacggagaagcgaggacgcccagagcaaggccgccctgaccgactggctgcgggctaaggccagcttcgtgatcgagggcctgaaggaggccgacaaggacgagttctgcagatgcgagctgaagctgcagaagtggtacggggacctgcggggaaagcccttcgccatcgaagccgagaacagcatcctggacatcagcggcttcagcaagcagtacaactgtgccttcatctggcagaaggacggcgtgaagaagctgaacctgtacctgatcatcaactacttcaagggcggcaagctgcggttcaagaagatcaaacctgaagccttcgaagccaacagattctacaccgtgatcaacaaaaagagcggcgagatcgtgcccatggaggtgaacttcaacttcgacgaccccaacctgatcatcctgcctctggcctttggcaagagacagggcagagaattcatctggaacgacctgctgtccctggaaaccggcagcctgaagctggccaacggaagagtgatcgagaagacactgtacaacagaagaacccggcaggatgagcctgccctgttcgtggccctgaccttcgagcggcgggaggtcctggactcctccaatatcaaaccaatgaacctgatcggcgtggcaagaggcgaaaacatccccgccgtgatcgccctgaccgaccccgagggctgcccactgagccggtttaaggatagcctgggaaacccaacccacatcctgagaatcggcgagagctataaggagaagcagcggaccatccaggccaagaaggaggtggagcagcggagagccggcggctacagccggaagtacgccagcaaagccaagaatctggcagacgatatggtgagaaacaccgctagagatctgctgtactacgccgtgacccaggatgccatgctgatcttcgccaacctgagccggggcttcggccggcagggcaagcggaccttcatggccgagagacagtacacacggatggaggactggctgaccgccaagctggcctacgagggcctgagcaagacctacctgtccaagacactggcccagtacacctccaagacatgcagcaactgtgggtttaccatcaccagcgccgactacgacagggtgctggagaagctgaagaagacagcaacaggctggatgaccacaattaacggcaaggagctgaaggtggagggccagattacctactacaacagatacaagagacagaacgtagtcaaggacctgtccgtcgagctggatagactgagcgaagaatctgtgaacaacgacatctcctcctggacaaagggcagaagcggagaagctctgagcctcctgaagaaaagattctcccatagacccgtgcaggagaagttcgtgtgcctgaactgcggcttcgagacacacgcagccgagcaagccgccctgaacatcgccagatcctggctgttcctgcggagccaggagtacaagaaataccagacaaacaagacaaccggcaacaccgataagagagccttcgtcgagacctggcagtccttttaccggaagaagcttaaggaggtgtggaaacctgccgtgcggtctggcggatctggcggaggctccaccagccccaagaaaaagagaaaagtctaagctgccttctgcggggcttgccttctggccatgcccttcttctctcccttgcacctgtacctcttggtctttgaataaagcctgagtaggaaggctagcaaaaaaaaaaaaaaaaaaaaaaaaaaaaaaaaaaaaaaaaaaaaaaaaaaaaaaaaaaaaaaaaaaaaaaaaaaaaaaaa

SEQ ID NO: 9521 - RNA, 8787 nt, synthetic construct
  source 1..8787: mol_type = other RNA
aggaaataagagagaaaagaagagtaagaagaaatataagagccaccatggcccctaagaagaagcgtaaagtgagccggatgaaccacgaccaggagttcgacccccctaaggtgtaccctcccgtccccgccgagaagagaaagcccatccgggtcctgagcctgttcgatggcatcgccaccggtctgctggtgctgaaggacctgggcatccaggtggataggtacattgcctccgaggtgtgcgaggactccatcaccgtgggaatggtgcgtcatcagggcaagatcatgtacgtgggcgacgtgcggagcgtgacacagaagcatatccaggagtggggccctttcgacctggtgatcggcggcagcccttgcaatgacctgagcatcgtgaacccagcccggaagggcctgtacgagggaaccggcagactgttcttcgagttttacagactgctgcacgacgcccggcctaaggaaggcgacgaccggcccttcttttggctgttcgagaatgtggtggccatgggagtcagcgacaagcgggatattagccggttcctggagagcaaccccgtgatgatcgatgccaaggaagtgagcgccgcccaccgggccagatacttctggggcaatctgcctggcatgaacagacccctggccagcaccgtgaacgacaagctggagctgcaggagtgcctggagcacggccggatcgccaagttcagcaaggtgagaaccatcaccacccgaagcaacagcatcaaacaaggcaaggaccagcactttcctgtgttcatgaacgagaaggaggacatcctgtggtgtaccgagatggagagagtgttcgggttcccagtccactacacagatgtcagcaacatgtctagactggccagacagagactgctgggaagaagctggtccgtccctgtgatcagacacctgttcgcccctctgaaggagtacttcgcctgcgtgagcagcggcaacagcaacgccaacagccggggccccagcttctctagcggcctggtgccactgtccctgagagggagccacatgggccccatggagatctacaaaaccgtgagcgcctggaagcggcagcctgtgcgcgtgctgagcctgtttcggaatatcgataaagtcctgaaaagcctgggattcctggagagcggctctggctccggcggtggcaccctgaagtacgtggaggatgtgacaaacgtggtcagacgggatgtggagaagtggggccccttcgatctggtgtacggcagcacccaacccctgggcagctcttgtgaccggtgccctggctggtacatgtttcagttccaccggatcctgcagtacgccctgccgagacaggagtcccagcggccattcttttggattttcatggacaacttgctgctgaccgaggatgaccaggaaactaccactcggttcctgcagaccgaagccgtgaccctgcaggacgtgagaggccgggactaccagaacgccatgcgggtgtggtccaacatccctggactgaaaagcaagcacgcacctctgacccctaaagaagaggagtacctgcaggcccaggtgcggagcagaagcaagctggacgcccctaaggtggatctgctggtgaagaattgcctcctgcccctgagagagtacttcaagtatttcagccagaatagtctgcccctgggaggcagcggcggcggccaggccgccgtgaccttcgaggacgtggccgtgctgctgagcagggaggagtggtgcaggctggcccccgcccagagggacctgtacagggacgtgatgctggagacctacaggaacctgatcagcctgggcaccggcctgaccggccccaagcccggcgtgatcagccagctggagaggggccacgagccctgggtgctggacgtgcagagcaccaagggcagggtggacggcagcgactgcggcggcccaagcagcggcgcccctcctcccagcggcggcaggcggcccaagcagcggcgcccctcctcccagcggcggcagcccagccggctccccaacctctaccgaggagggcacctctgagtccgccacccccgagagcggccctggcacctccaccgagcccagcgagggcagcgcacccggcagccctgccggcagccccacctccacagaggagggaaccagcaccgagcccagcgaaggcagcgccccaggcaccagcaccgagcctagtgagcaggagattaaacggatcaacaagatcagaagaagacttgtgaaagacagcaacaccaagaaggccggcaagacaggccccatgaaaaccctgctggttagagtgatgacacccgatctgagagagcggctggaaaacctgagaaagaagcctgaaaatatcccccagcccatcagcaatacatctagagccaacctgaataagctgctgaccgattacaccgaaatgaagaaggcgatcctgcatgtgtactgggaagagttccagaaggaccctgtgggcctgatgagccgggtggcccagcctgccagcaagaagatcgatcagaacaagctgaaacctgagatggacgagaagggcaacctgaccaccgccggctttgcctgctctcagtgtggccagcccctgttcgtgtacaagctggagcaggtgtctgagaagggcaaggcttacaccaactacttcggacggtgcaatgtggccgagcacgaaaagctgatcctgctggcccagctgaagcccgagaaggatagcgacgaagccgtgacatatagcctgggaaagtttgggcagagggccctggatttctacagcattcatgtgaccaaggagtccacccaccccgtgaagcccctggcccagatcgccggaaacagatacgcctccggacctgtgggaaaggccctgagcgacgcatgtatgggcacaatcgcctccttcctgtctaagtaccaggacatcatcatcgaacaccagaaggtggtgaagggcaaccagaagagactggagagcctgcgggagctggccggcaaggaaaacctggaataccctagcgtgaccctgccacctcagcctcacaccaaggagggcgttgatgcctacaacgaagtgatcgcccgggtgcgaatgtgggtgaacctgaacctgtggcagaagctgaagctaagcagagatgatgccaagcctctgctgagactgaagggattcccttcctttcctctggtcgagagacaggccaacgaagtggactggtgggacatggtgtgtaacgtgaagaagctgatcaacgagaaaaaggaggatggcaaggtgttttggcagaatctggctggctacaagagacaggaagccctgagaccatacctgagcagcgaggaagatcggaagaagggaaagaaattcgctcggtaccagctgggcgacctgctgctgcacctggaaaagaagcacggcgaggactggggaaaggtgtacgacgaggcctgggagcggattgacaagaaagtggaaggcctgagcaagcacatcaagctggaagaggaacggagaagcgaggacgcccagagcaaggccgccctgaccgactggctgcgggctaaggccagcttcgtgatcgagggcctgaaggaggccgacaaggacgagttctgcagatgcgagctgaagctgcagaagtggtacggggacctgcggggaaagcccttcgccatcgaagccgagaacagcatcctggacatcagcggcttcagcaagcagtacaactgtgccttcatctggcagaaggacggcgtgaagaagctgaacctgtacctgatcatcaactacttcaagggcggcaagctgcggttcaagaagatcaaacctgaagccttcgaagccaacagattctacaccgtgatcaacaaaaagagcggcgagatcgtgcccatggaggtgaacttcaacttcgacgaccccaacctgatcatcctgcctctggcctttggcaagagacagggcagagaattcatctggaacgacctgctgtccctggaaaccggcagcctgaagctggccaacggaagagtgatcgagaagacactgtacaacagaagaacccggcaggatgagcctgccctgttcgtggccctgaccttcgagcggcgggaggtcctggactcctccaatatcaaaccaatgaacctgatcggcgtggcaagaggcgaaaacatccccgccgtgatcgccctgaccgaccccgagggctgcccactgagccggtttaaggatagcctgggaaacccaacccacatcctgagaatcggcgagagctataaggagaagcagcggaccatccaggccaagaaggaggtggagcagcggagagccggcggctacagccggaagtacgccagcaaagccaagaatctggcagacgatatggtgagaaacaccgctagagatctgctgtactacgccgtgacccaggatgccatgctgatcttcgccaacctgagccggggcttcggccggcagggcaagcggaccttcatggccgagagacagtacacacggatggaggactggctgaccgccaagctggcctacgagggcctgagcaagacctacctgtccaagacactggcccagtacacctccaagacatgcagcaactgtgggtttaccatcaccagcgccgactacgacagggtgctggagaagctgaagaagacagcaacaggctggatgaccacaattaacggcaaggagctgaaggtggagggccagattacctactacaacagatacaagagacagaacgtagtcaaggacctgtccgtcgagctggatagactgagcgaagaatctgtgaacaacgacatctcctcctggacaaagggcagaagcggagaagctctgagcctcctgaagaaaagattctcccatagacccgtgcaggagaagttcgtgtgcctgaactgcggcttcgagacacacgcagccgagcaagccgccctgaacatcgccagatcctggctgttcctgcggagccaggagtacaagaaataccagacaaacaagacaaccggcaacaccgataagagagccttcgtcgagacctggcagtccttttaccggaagaagcttaaggaggtgtggaaacctgccgtgcggtctggcggatctggcggaggctccaccagccccaagaaaaagagaaaagtctaagctgccttctgcggggcttgccttctggccatgcccttcttctctcccttgcacctgtacctcttggtctttgaataaagcctgagtaggaaggctagcaaaaaaaaaaaaaaaaaaaaaaaaaaaaaaaaaaaaaaaaaaaaaaaaaaaaaaaaaaaaaaaaaaaaaaaaaaaaaaaagcccagccggctccccaacctctaccgaggagggcacctctgagtccgccacccccgagagcggccctggcacctccaccgagcccagcgagggcagcgcacccggcagccctgccggcagccccacctccacagaggagggaaccagcaccgagcccagcgaaggcagcgccccaggcaccagcaccgagcctagtgagcaggagattaaacggatcaacaagatcagaagaagacttgtgaaagacagcaacaccaagaaggccggcaagacaggccccatgaaaaccctgctggttagagtgatgacacccgatctgagagagcggctggaaaacctgagaaagaagcctgaaaatatcccccagcccatcagcaatacatctagagccaacctgaataagctgctgaccgattacaccgaaatgaagaaggcgatcctgcatgtgtactgggaagagttccagaaggaccctgtgggcctgatgagccgggtggcccagcctgccagcaagaagatcgatcagaacaagctgaaacctgagatggacgagaagggcaacctgaccaccgccggctttgcctgctctcagtgtggccagcccctgttcgtgtacaagctggagcaggtgtctgagaagggcaaggcttacaccaactacttcggacggtgcaatgtggccgagcacgaaaagctgatcctgctggcccagctgaagcccgagaaggatagcgacgaagccgtgacatatagcctgggaaagtttgggcagagggccctggatttctacagcattcatgtgaccaaggagtccacccaccccgtgaagcccctggcccagatcgccggaaacagatacgcctccggacctgtgggaaaggccctgagcgacgcatgtatgggcacaatcgcctccttcctgtctaagtaccaggacatcatcatcgaacaccagaaggtggtgaagggcaaccagaagagactggagagcctgcgggagctggccggcaaggaaaacctggaataccctagcgtgaccctgccacctcagcctcacaccaaggagggcgttgatgcctacaacgaagtgatcgcccgggtgcgaatgtgggtgaacctgaacctgtggcagaagctgaagctaagcagagatgatgccaagcctctgctgagactgaagggattcccttcctttcctctggtcgagagacaggccaacgaagtggactggtgggacatggtgtgtaacgtgaagaagctgatcaacgagaaaaaggaggatggcaaggtgttttggcagaatctggctggctacaagagacaggaagccctgagaccatacctgagcagcgaggaagatcggaagaagggaaagaaattcgctcggtaccagctgggcgacctgctgctgcacctggaaaagaagcacggcgaggactggggaaaggtgtacgacgaggcctgggagcggattgacaagaaagtggaaggcctgagcaagcacatcaagctggaagaggaacggagaagcgaggacgcccagagcaaggccgccctgaccgactggctgcgggctaaggccagcttcgtgatcgagggcctgaaggaggccgacaaggacgagttctgcagatgcgagctgaagctgcagaagtggtacggggacctgcggggaaagcccttcgccatcgaagccgagaacagcatcctggacatcagcggcttcagcaagcagtacaactgtgccttcatctggcagaaggacggcgtgaagaagctgaacctgtacctgatcatcaactacttcaagggcggcaagctgcggttcaagaagatcaaacctgaagccttcgaagccaacagattctacaccgtgatcaacaaaaagagcggcgagatcgtgcccatggaggtgaacttcaacttcgacgaccccaacctgatcatcctgcctctggcctttggcaagagacagggcagagaattcatctggaacgacctgctgtccctggaaaccggcagcctgaagctggccaacggaagagtgatcgagaagacactgtacaacagaagaacccggcaggatgagcctgccctgttcgtggccctgaccttcgagcggcgggaggtcctggactcctccaatatcaaaccaatgaacctgatcggcgtggcaagaggcgaaaacatccccgccgtgatcgccctgaccgaccccgagggctgcccactgagccggtttaaggatagcctgggaaacccaacccacatcctgagaatcggcgagagctataaggagaagcagcggaccatccaggccaagaaggaggtggagcagcggagagccggcggctacagccggaagtacgccagcaaagccaagaatctggcagacgatatggtgagaaacaccgctagagatctgctgtactacgccgtgacccaggatgccatgctgatcttcgccaacctgagccggggcttcggccggcagggcaagcggaccttcatggccgagagacagtacacacggatggaggactggctgaccgccaagctggcctacgagggcctgagcaagacctacctgtccaagacactggcccagtacacctccaagacatgcagcaactgtgggtttaccatcaccagcgccgactacgacagggtgctggagaagctgaagaagacagcaacaggctggatgaccacaattaacggcaaggagctgaaggtggagggccagattacctactacaacagatacaagagacagaacgtagtcaaggacctgtccgtcgagctggatagactgagcgaagaatctgtgaacaacgacatctcctcctggacaaagggcagaagcggagaagctctgagcctcctgaagaaaagattctcccatagacccgtgcaggagaagttcgtgtgcctgaactgcggcttcgagacacacgcagccgagcaagccgccctgaacatcgccagatcctggctgttcctgcggagccaggagtacaagaaataccagacaaacaagacaaccggcaacaccgataagagagccttcgtcgagacctggcagtccttttaccggaagaagcttaaggaggtgtggaaacctgccgtgcggtctggcggatctggcggaggctccaccagccccaagaaaaagagaaaagtctaagctgccttctgcggggcttgccttctggccatgcccttcttctctcccttgcacctgtacctcttggtctttgaataaagcctgagtaggaaggctagcaaaaaaaaaaaaaaaaaaaaaaaaaaaaaaaaaaaaaaaaaaaaaaaaaaaaaaaaaaaaaaaaaaaaaaaaaaaaaaaa

SEQ ID NO: 9522 - RNA, 8787 nt, synthetic construct
  source 1..8787: mol_type = other RNA
aggaaataagagagaaaagaagagtaagaagaaatataagagccaccatggcccctaagaagaagcgtaaagtgagccggatgaaccacgaccaggagttcgacccccctaaggtgtaccctcccgtccccgccgagaagagaaagcccatccgggtcctgagcctgttcgatggcatcgccaccggtctgctggtgctgaaggacctgggcatccaggtggataggtacattgcctccgaggtgtgcgaggactccatcaccgtgggaatggtgcgtcatcagggcaagatcatgtacgtgggcgacgtgcggagcgtgacacagaagcatatccaggagtggggccctttcgacctggtgatcggcggcagcccttgcaatgacctgagcatcgtgaacccagcccggaagggcctgtacgagggaaccggcagactgttcttcgagttttacagactgctgcacgacgcccggcctaaggaaggcgacgaccggcccttcttttggctgttcgagaatgtggtggccatgggagtcagcgacaagcgggatattagccggttcctggagagcaaccccgtgatgatcgatgccaaggaagtgagcgccgcccaccgggccagatacttctggggcaatctgcctggcatgaacagacccctggccagcaccgtgaacgacaagctggagctgcaggagtgcctggagcacggccggatcgccaagttcagcaaggtgagaaccatcaccacccgaagcaacagcatcaaacaaggcaaggaccagcactttcctgtgttcatgaacgagaaggaggacatcctgtggtgtaccgagatggagagagtgttcgggttcccagtccactacacagatgtcagcaacatgtctagactggccagacagagactgctgggaagaagctggtccgtccctgtgatcagacacctgttcgcccctctgaaggagtacttcgcctgcgtgagcagcggcaacagcaacgccaacagccggggccccagcttctctagcggcctggtgccactgtccctgagagggagccacatgggccccatggagatctacaaaaccgtgagcgcctggaagcggcagcctgtgcgcgtgctgagcctgtttcggaatatcgataaagtcctgaaaagcctgggattcctggagagcggctctggctccggcggtggcaccctgaagtacgtggaggatgtgacaaacgtggtcagacgggatgtggagaagtggggccccttcgatctggtgtacggcagcacccaacccctgggcagctcttgtgaccggtgccctggctggtacatgtttcagttccaccggatcctgcagtacgccctgccgagacaggagtcccagcggccattcttttggattttcatggacaacttgctgctgaccgaggatgaccaggaaactaccactcggttcctgcagaccgaagccgtgaccctgcaggacgtgagaggccgggactaccagaacgccatgcgggtgtggtccaacatccctggactgaaaagcaagcacgcacctctgacccctaaagaagaggagtacctgcaggcccaggtgcggagcagaagcaagctggacgcccctaaggtggatctgctggtgaagaattgcctcctgcccctgagagagtacttcaagtatttcagccagaatagtctgcccctgggaggcagcggcggcggcagccaggaggccgtgaccttcgaggacgtggccgtgaacttcagcaacgaggagtggcagtgcctgacccacgcccagaggcacctgtacaaggacgtgatgctggagaactacggcaacgtggtgagcctgggcttccccttccccaagccccccctgatcagccacctggagcaggaggccgagctgtgcgtgcaggacggccaggacagggagttcctgagctgcagccaccccgtgagcggcggcccaagcagcggcgcccctcctcccagcggcggcaggcggcccaagcagcggcgcccctcctcccagcggcggcagcccagccggctccccaacctctaccgaggagggcacctctgagtccgccacccccgagagcggccctggcacctccaccgagcccagcgagggcagcgcacccggcagccctgccggcagccccacctccacagaggagggaaccagcaccgagcccagcgaaggcagcgccccaggcaccagcaccgagcctagtgagcaggagattaaacggatcaacaagatcagaagaagacttgtgaaagacagcaacaccaagaaggccggcaagacaggccccatgaaaaccctgctggttagagtgatgacacccgatctgagagagcggctggaaaacctgagaaagaagcctgaaaatatcccccagcccatcagcaatacatctagagccaacctgaataagctgctgaccgattacaccgaaatgaagaaggcgatcctgcatgtgtactgggaagagttccagaaggaccctgtgggcctgatgagccgggtggcccagcctgccagcaagaagatcgatcagaacaagctgaaacctgagatggacgagaagggcaacctgaccaccgccggctttgcctgctctcagtgtggccagcccctgttcgtgtacaagctggagcaggtgtctgagaagggcaaggcttacaccaactacttcggacggtgcaatgtggccgagcacgaaaagctgatcctgctggcccagctgaagcccgagaaggatagcgacgaagccgtgacatatagcctgggaaagtttgggcagagggccctggatttctacagcattcatgtgaccaaggagtccacccaccccgtgaagcccctggcccagatcgccggaaacagatacgcctccggacctgtgggaaaggccctgagcgacgcatgtatgggcacaatcgcctccttcctgtctaagtaccaggacatcatcatcgaacaccagaaggtggtgaagggcaaccagaagagactggagagcctgcgggagctggccggcaaggaaaacctggaataccctagcgtgaccctgccacctcagcctcacaccaaggagggcgttgatgcctacaacgaagtgatcgcccgggtgcgaatgtgggtgaacctgaacctgtggcagaagctgaagctaagcagagatgatgccaagcctctgctgagactgaagggattcccttcctttcctctggtcgagagacaggccaacgaagtggactggtgggacatggtgtgtaacgtgaagaagctgatcaacgagaaaaaggaggatggcaaggtgttttggcagaatctggctggctacaagagacaggaagccctgagaccatacctgagcagcgaggaagatcggaagaagggaaagaaattcgctcggtaccagctgggcgacctgctgctgcacctggaaaagaagcacggcgaggactggggaaaggtgtacgacgaggcctgggagcggattgacaagaaagtggaaggcctgagcaagcacatcaagctggaagaggaacggagaagcgaggacgcccagagcaaggccgccctgaccgactggctgcgggctaaggccagcttcgtgatcgagggcctgaaggaggccgacaaggacgagttctgcagatgcgagctgaagctgcagaagtggtacggggacctgcggggaaagcccttcgccatcgaagccgagaacagcatcctggacatcagcggcttcagcaagcagtacaactgtgccttcatctggcagaaggacggcgtgaagaagctgaacctgtacctgatcatcaactacttcaagggcggcaagctgcggttcaagaagatcaaacctgaagccttcgaagccaacagattctacaccgtgatcaacaaaaagagcggcgagatcgtgcccatggaggtgaacttcaacttcgacgaccccaacctgatcatcctgcctctggcctttggcaagagacagggcagagaattcatctggaacgacctgctgtccctggaaaccggcagcctgaagctggccaacggaagagtgatcgagaagacactgtacaacagaagaacccggcaggatgagcctgccctgttcgtggccctgaccttcgagcggcgggaggtcctggactcctccaatatcaaaccaatgaacctgatcggcgtggcaagaggcgaaaacatccccgccgtgatcgccctgaccgaccccgagggctgcccactgagccggtttaaggatagcctgggaaacccaacccacatcctgagaatcggcgagagctataaggagaagcagcggaccatccaggccaagaaggaggtggagcagcggagagccggcggctacagccggaagtacgccagcaaagccaagaatctggcagacgatatggtgagaaacaccgctagagatctgctgtactacgccgtgacccaggatgccatgctgatcttcgccaacctgagccggggcttcggccggcagggcaagcggaccttcatggccgagagacagtacacacggatggaggactggctgaccgccaagctggcctacgagggcctgagcaagacctacctgtccaagacactggcccagtacacctccaagacatgcagcaactgtgggtttaccatcaccagcgccgactacgacagggtgctggagaagctgaagaagacagcaacaggctggatgaccacaattaacggcaaggagctgaaggtggagggccagattacctactacaacagatacaagagacagaacgtagtcaaggacctgtccgtcgagctggatagactgagcgaagaatctgtgaacaacgacatctcctcctggacaaagggcagaagcggagaagctctgagcctcctgaagaaaagattctcccatagacccgtgcaggagaagttcgtgtgcctgaactgcggcttcgagacacacgcagccgagcaagccgccctgaacatcgccagatcctggctgttcctgcggagccaggagtacaagaaataccagacaaacaagacaaccggcaacaccgataagagagccttcgtcgagacctggcagtccttttaccggaagaagcttaaggaggtgtggaaacctgccgtgcggtctggcggatctggcggaggctccaccagccccaagaaaaagagaaaagtctaagctgccttctgcggggcttgccttctggccatgcccttcttctctcccttgcacctgtacctcttggtctttgaataaagcctgagtaggaaggctagcaaaaaaaaaaaaaaaaaaaaaaaaaaaaaaaaaaaaaaaaaaaaaaaaaaaaaaaaaaaaaaaaaaaaaaaaaaaaaaaagcccagccggctccccaacctctaccgaggagggcacctctgagtccgccacccccgagagcggccctggcacctccaccgagcccagcgagggcagcgcacccggcagccctgccggcagccccacctccacagaggagggaaccagcaccgagcccagcgaaggcagcgccccaggcaccagcaccgagcctagtgagcaggagattaaacggatcaacaagatcagaagaagacttgtgaaagacagcaacaccaagaaggccggcaagacaggccccatgaaaaccctgctggttagagtgatgacacccgatctgagagagcggctggaaaacctgagaaagaagcctgaaaatatcccccagcccatcagcaatacatctagagccaacctgaataagctgctgaccgattacaccgaaatgaagaaggcgatcctgcatgtgtactgggaagagttccagaaggaccctgtgggcctgatgagccgggtggcccagcctgccagcaagaagatcgatcagaacaagctgaaacctgagatggacgagaagggcaacctgaccaccgccggctttgcctgctctcagtgtggccagcccctgttcgtgtacaagctggagcaggtgtctgagaagggcaaggcttacaccaactacttcggacggtgcaatgtggccgagcacgaaaagctgatcctgctggcccagctgaagcccgagaaggatagcgacgaagccgtgacatatagcctgggaaagtttgggcagagggccctggatttctacagcattcatgtgaccaaggagtccacccaccccgtgaagcccctggcccagatcgccggaaacagatacgcctccggacctgtgggaaaggccctgagcgacgcatgtatgggcacaatcgcctccttcctgtctaagtaccaggacatcatcatcgaacaccagaaggtggtgaagggcaaccagaagagactggagagcctgcgggagctggccggcaaggaaaacctggaataccctagcgtgaccctgccacctcagcctcacaccaaggagggcgttgatgcctacaacgaagtgatcgcccgggtgcgaatgtgggtgaacctgaacctgtggcagaagctgaagctaagcagagatgatgccaagcctctgctgagactgaagggattcccttcctttcctctggtcgagagacaggccaacgaagtggactggtgggacatggtgtgtaacgtgaagaagctgatcaacgagaaaaaggaggatggcaaggtgttttggcagaatctggctggctacaagagacaggaagccctgagaccatacctgagcagcgaggaagatcggaagaagggaaagaaattcgctcggtaccagctgggcgacctgctgctgcacctggaaaagaagcacggcgaggactggggaaaggtgtacgacgaggcctgggagcggattgacaagaaagtggaaggcctgagcaagcacatcaagctggaagaggaacggagaagcgaggacgcccagagcaaggccgccctgaccgactggctgcgggctaaggccagcttcgtgatcgagggcctgaaggaggccgacaaggacgagttctgcagatgcgagctgaagctgcagaagtggtacggggacctgcggggaaagcccttcgccatcgaagccgagaacagcatcctggacatcagcggcttcagcaagcagtacaactgtgccttcatctggcagaaggacggcgtgaagaagctgaacctgtacctgatcatcaactacttcaagggcggcaagctgcggttcaagaagatcaaacctgaagccttcgaagccaacagattctacaccgtgatcaacaaaaagagcggcgagatcgtgcccatggaggtgaacttcaacttcgacgaccccaacctgatcatcctgcctctggcctttggcaagagacagggcagagaattcatctggaacgacctgctgtccctggaaaccggcagcctgaagctggccaacggaagagtgatcgagaagacactgtacaacagaagaacccggcaggatgagcctgccctgttcgtggccctgaccttcgagcggcgggaggtcctggactcctccaatatcaaaccaatgaacctgatcggcgtggcaagaggcgaaaacatccccgccgtgatcgccctgaccgaccccgagggctgcccactgagccggtttaaggatagcctgggaaacccaacccacatcctgagaatcggcgagagctataaggagaagcagcggaccatccaggccaagaaggaggtggagcagcggagagccggcggctacagccggaagtacgccagcaaagccaagaatctggcagacgatatggtgagaaacaccgctagagatctgctgtactacgccgtgacccaggatgccatgctgatcttcgccaacctgagccggggcttcggccggcagggcaagcggaccttcatggccgagagacagtacacacggatggaggactggctgaccgccaagctggcctacgagggcctgagcaagacctacctgtccaagacactggcccagtacacctccaagacatgcagcaactgtgggtttaccatcaccagcgccgactacgacagggtgctggagaagctgaagaagacagcaacaggctggatgaccacaattaacggcaaggagctgaaggtggagggccagattacctactacaacagatacaagagacagaacgtagtcaaggacctgtccgtcgagctggatagactgagcgaagaatctgtgaacaacgacatctcctcctggacaaagggcagaagcggagaagctctgagcctcctgaagaaaagattctcccatagacccgtgcaggagaagttcgtgtgcctgaactgcggcttcgagacacacgcagccgagcaagccgccctgaacatcgccagatcctggctgttcctgcggagccaggagtacaagaaataccagacaaacaagacaaccggcaacaccgataagagagccttcgtcgagacctggcagtccttttaccggaagaagcttaaggaggtgtggaaacctgccgtgcggtctggcggatctggcggaggctccaccagccccaagaaaaagagaaaagtctaagctgccttctgcggggcttgccttctggccatgcccttcttctctcccttgcacctgtacctcttggtctttgaataaagcctgagtaggaaggctagcaaaaaaaaaaaaaaaaaaaaaaaaaaaaaaaaaaaaaaaaaaaaaaaaaaaaaaaaaaaaaaaaaaaaaaaaaaaaaaaa

SEQ ID NO: 9523 - RNA, 8787 nt, synthetic construct
  source 1..8787: mol_type = other RNA
aggaaataagagagaaaagaagagtaagaagaaatataagagccaccatggcccctaagaagaagcgtaaagtgagccggatgaaccacgaccaggagttcgacccccctaaggtgtaccctcccgtccccgccgagaagagaaagcccatccgggtcctgagcctgttcgatggcatcgccaccggtctgctggtgctgaaggacctgggcatccaggtggataggtacattgcctccgaggtgtgcgaggactccatcaccgtgggaatggtgcgtcatcagggcaagatcatgtacgtgggcgacgtgcggagcgtgacacagaagcatatccaggagtggggccctttcgacctggtgatcggcggcagcccttgcaatgacctgagcatcgtgaacccagcccggaagggcctgtacgagggaaccggcagactgttcttcgagttttacagactgctgcacgacgcccggcctaaggaaggcgacgaccggcccttcttttggctgttcgagaatgtggtggccatgggagtcagcgacaagcgggatattagccggttcctggagagcaaccccgtgatgatcgatgccaaggaagtgagcgccgcccaccgggccagatacttctggggcaatctgcctggcatgaacagacccctggccagcaccgtgaacgacaagctggagctgcaggagtgcctggagcacggccggatcgccaagttcagcaaggtgagaaccatcaccacccgaagcaacagcatcaaacaaggcaaggaccagcactttcctgtgttcatgaacgagaaggaggacatcctgtggtgtaccgagatggagagagtgttcgggttcccagtccactacacagatgtcagcaacatgtctagactggccagacagagactgctgggaagaagctggtccgtccctgtgatcagacacctgttcgcccctctgaaggagtacttcgcctgcgtgagcagcggcaacagcaacgccaacagccggggccccagcttctctagcggcctggtgccactgtccctgagagggagccacatgggccccatggagatctacaaaaccgtgagcgcctggaagcggcagcctgtgcgcgtgctgagcctgtttcggaatatcgataaagtcctgaaaagcctgggattcctggagagcggctctggctccggcggtggcaccctgaagtacgtggaggatgtgacaaacgtggtcagacgggatgtggagaagtggggccccttcgatctggtgtacggcagcacccaacccctgggcagctcttgtgaccggtgccctggctggtacatgtttcagttccaccggatcctgcagtacgccctgccgagacaggagtcccagcggccattcttttggattttcatggacaacttgctgctgaccgaggatgaccaggaaactaccactcggttcctgcagaccgaagccgtgaccctgcaggacgtgagaggccgggactaccagaacgccatgcgggtgtggtccaacatccctggactgaaaagcaagcacgcacctctgacccctaaagaagaggagtacctgcaggcccaggtgcggagcagaagcaagctggacgcccctaaggtggatctgctggtgaagaattgcctcctgcccctgagagagtacttcaagtatttcagccagaatagtctgcccctgggaggcagcggcggcggcaagcccctggccgtgaggttcgccgacgtggccgtgtacttcagccccgaggagtggggctgcctgctgcccgcccagagggccctgtacagggacgtgatgagggagacctacggccacctgggcgccctgggcttccccggccccaagcccgccctgatcagctggatggagcaggagagcgaggcctggagccccgacgcccaggaccccgaggagggcgagagcctgggcggcgccctgggcggcccaagcagcggcgcccctcctcccagcggcggcaggcggcccaagcagcggcgcccctcctcccagcggcggcagcccagccggctccccaacctctaccgaggagggcacctctgagtccgccacccccgagagcggccctggcacctccaccgagcccagcgagggcagcgcacccggcagccctgccggcagccccacctccacagaggagggaaccagcaccgagcccagcgaaggcagcgccccaggcaccagcaccgagcctagtgagcaggagattaaacggatcaacaagatcagaagaagacttgtgaaagacagcaacaccaagaaggccggcaagacaggccccatgaaaaccctgctggttagagtgatgacacccgatctgagagagcggctggaaaacctgagaaagaagcctgaaaatatcccccagcccatcagcaatacatctagagccaacctgaataagctgctgaccgattacaccgaaatgaagaaggcgatcctgcatgtgtactgggaagagttccagaaggaccctgtgggcctgatgagccgggtggcccagcctgccagcaagaagatcgatcagaacaagctgaaacctgagatggacgagaagggcaacctgaccaccgccggctttgcctgctctcagtgtggccagcccctgttcgtgtacaagctggagcaggtgtctgagaagggcaaggcttacaccaactacttcggacggtgcaatgtggccgagcacgaaaagctgatcctgctggcccagctgaagcccgagaaggatagcgacgaagccgtgacatatagcctgggaaagtttgggcagagggccctggatttctacagcattcatgtgaccaaggagtccacccaccccgtgaagcccctggcccagatcgccggaaacagatacgcctccggacctgtgggaaaggccctgagcgacgcatgtatgggcacaatcgcctccttcctgtctaagtaccaggacatcatcatcgaacaccagaaggtggtgaagggcaaccagaagagactggagagcctgcgggagctggccggcaaggaaaacctggaataccctagcgtgaccctgccacctcagcctcacaccaaggagggcgttgatgcctacaacgaagtgatcgcccgggtgcgaatgtgggtgaacctgaacctgtggcagaagctgaagctaagcagagatgatgccaagcctctgctgagactgaagggattcccttcctttcctctggtcgagagacaggccaacgaagtggactggtgggacatggtgtgtaacgtgaagaagctgatcaacgagaaaaaggaggatggcaaggtgttttggcagaatctggctggctacaagagacaggaagccctgagaccatacctgagcagcgaggaagatcggaagaagggaaagaaattcgctcggtaccagctgggcgacctgctgctgcacctggaaaagaagcacggcgaggactggggaaaggtgtacgacgaggcctgggagcggattgacaagaaagtggaaggcctgagcaagcacatcaagctggaagaggaacggagaagcgaggacgcccagagcaaggccgccctgaccgactggctgcgggctaaggccagcttcgtgatcgagggcctgaaggaggccgacaaggacgagttctgcagatgcgagctgaagctgcagaagtggtacggggacctgcggggaaagcccttcgccatcgaagccgagaacagcatcctggacatcagcggcttcagcaagcagtacaactgtgccttcatctggcagaaggacggcgtgaagaagctgaacctgtacctgatcatcaactacttcaagggcggcaagctgcggttcaagaagatcaaacctgaagccttcgaagccaacagattctacaccgtgatcaacaaaaagagcggcgagatcgtgcccatggaggtgaacttcaacttcgacgaccccaacctgatcatcctgcctctggcctttggcaagagacagggcagagaattcatctggaacgacctgctgtccctggaaaccggcagcctgaagctggccaacggaagagtgatcgagaagacactgtacaacagaagaacccggcaggatgagcctgccctgttcgtggccctgaccttcgagcggcgggaggtcctggactcctccaatatcaaaccaatgaacctgatcggcgtggcaagaggcgaaaacatccccgccgtgatcgccctgaccgaccccgagggctgcccactgagccggtttaaggatagcctgggaaacccaacccacatcctgagaatcggcgagagctataaggagaagcagcggaccatccaggccaagaaggaggtggagcagcggagagccggcggctacagccggaagtacgccagcaaagccaagaatctggcagacgatatggtgagaaacaccgctagagatctgctgtactacgccgtgacccaggatgccatgctgatcttcgccaacctgagccggggcttcggccggcagggcaagcggaccttcatggccgagagacagtacacacggatggaggactggctgaccgccaagctggcctacgagggcctgagcaagacctacctgtccaagacactggcccagtacacctccaagacatgcagcaactgtgggtttaccatcaccagcgccgactacgacagggtgctggagaagctgaagaagacagcaacaggctggatgaccacaattaacggcaaggagctgaaggtggagggccagattacctactacaacagatacaagagacagaacgtagtcaaggacctgtccgtcgagctggatagactgagcgaagaatctgtgaacaacgacatctcctcctggacaaagggcagaagcggagaagctctgagcctcctgaagaaaagattctcccatagacccgtgcaggagaagttcgtgtgcctgaactgcggcttcgagacacacgcagccgagcaagccgccctgaacatcgccagatcctggctgttcctgcggagccaggagtacaagaaataccagacaaacaagacaaccggcaacaccgataagagagccttcgtcgagacctggcagtccttttaccggaagaagcttaaggaggtgtggaaacctgccgtgcggtctggcggatctggcggaggctccaccagccccaagaaaaagagaaaagtctaagctgccttctgcggggcttgccttctggccatgcccttcttctctcccttgcacctgtacctcttggtctttgaataaagcctgagtaggaaggctagcaaaaaaaaaaaaaaaaaaaaaaaaaaaaaaaaaaaaaaaaaaaaaaaaaaaaaaaaaaaaaaaaaaaaaaaaaaaaaaaagcccagccggctccccaacctctaccgaggagggcacctctgagtccgccacccccgagagcggccctggcacctccaccgagcccagcgagggcagcgcacccggcagccctgccggcagccccacctccacagaggagggaaccagcaccgagcccagcgaaggcagcgccccaggcaccagcaccgagcctagtgagcaggagattaaacggatcaacaagatcagaagaagacttgtgaaagacagcaacaccaagaaggccggcaagacaggccccatgaaaaccctgctggttagagtgatgacacccgatctgagagagcggctggaaaacctgagaaagaagcctgaaaatatcccccagcccatcagcaatacatctagagccaacctgaataagctgctgaccgattacaccgaaatgaagaaggcgatcctgcatgtgtactgggaagagttccagaaggaccctgtgggcctgatgagccgggtggcccagcctgccagcaagaagatcgatcagaacaagctgaaacctgagatggacgagaagggcaacctgaccaccgccggctttgcctgctctcagtgtggccagcccctgttcgtgtacaagctggagcaggtgtctgagaagggcaaggcttacaccaactacttcggacggtgcaatgtggccgagcacgaaaagctgatcctgctggcccagctgaagcccgagaaggatagcgacgaagccgtgacatatagcctgggaaagtttgggcagagggccctggatttctacagcattcatgtgaccaaggagtccacccaccccgtgaagcccctggcccagatcgccggaaacagatacgcctccggacctgtgggaaaggccctgagcgacgcatgtatgggcacaatcgcctccttcctgtctaagtaccaggacatcatcatcgaacaccagaaggtggtgaagggcaaccagaagagactggagagcctgcgggagctggccggcaaggaaaacctggaataccctagcgtgaccctgccacctcagcctcacaccaaggagggcgttgatgcctacaacgaagtgatcgcccgggtgcgaatgtgggtgaacctgaacctgtggcagaagctgaagctaagcagagatgatgccaagcctctgctgagactgaagggattcccttcctttcctctggtcgagagacaggccaacgaagtggactggtgggacatggtgtgtaacgtgaagaagctgatcaacgagaaaaaggaggatggcaaggtgttttggcagaatctggctggctacaagagacaggaagccctgagaccatacctgagcagcgaggaagatcggaagaagggaaagaaattcgctcggtaccagctgggcgacctgctgctgcacctggaaaagaagcacggcgaggactggggaaaggtgtacgacgaggcctgggagcggattgacaagaaagtggaaggcctgagcaagcacatcaagctggaagaggaacggagaagcgaggacgcccagagcaaggccgccctgaccgactggctgcgggctaaggccagcttcgtgatcgagggcctgaaggaggccgacaaggacgagttctgcagatgcgagctgaagctgcagaagtggtacggggacctgcggggaaagcccttcgccatcgaagccgagaacagcatcctggacatcagcggcttcagcaagcagtacaactgtgccttcatctggcagaaggacggcgtgaagaagctgaacctgtacctgatcatcaactacttcaagggcggcaagctgcggttcaagaagatcaaacctgaagccttcgaagccaacagattctacaccgtgatcaacaaaaagagcggcgagatcgtgcccatggaggtgaacttcaacttcgacgaccccaacctgatcatcctgcctctggcctttggcaagagacagggcagagaattcatctggaacgacctgctgtccctggaaaccggcagcctgaagctggccaacggaagagtgatcgagaagacactgtacaacagaagaacccggcaggatgagcctgccctgttcgtggccctgaccttcgagcggcgggaggtcctggactcctccaatatcaaaccaatgaacctgatcggcgtggcaagaggcgaaaacatccccgccgtgatcgccctgaccgaccccgagggctgcccactgagccggtttaaggatagcctgggaaacccaacccacatcctgagaatcggcgagagctataaggagaagcagcggaccatccaggccaagaaggaggtggagcagcggagagccggcggctacagccggaagtacgccagcaaagccaagaatctggcagacgatatggtgagaaacaccgctagagatctgctgtactacgccgtgacccaggatgccatgctgatcttcgccaacctgagccggggcttcggccggcagggcaagcggaccttcatggccgagagacagtacacacggatggaggactggctgaccgccaagctggcctacgagggcctgagcaagacctacctgtccaagacactggcccagtacacctccaagacatgcagcaactgtgggtttaccatcaccagcgccgactacgacagggtgctggagaagctgaagaagacagcaacaggctggatgaccacaattaacggcaaggagctgaaggtggagggccagattacctactacaacagatacaagagacagaacgtagtcaaggacctgtccgtcgagctggatagactgagcgaagaatctgtgaacaacgacatctcctcctggacaaagggcagaagcggagaagctctgagcctcctgaagaaaagattctcccatagacccgtgcaggagaagttcgtgtgcctgaactgcggcttcgagacacacgcagccgagcaagccgccctgaacatcgccagatcctggctgttcctgcggagccaggagtacaagaaataccagacaaacaagacaaccggcaacaccgataagagagccttcgtcgagacctggcagtccttttaccggaagaagcttaaggaggtgtggaaacctgccgtgcggtctggcggatctggcggaggctccaccagccccaagaaaaagagaaaagtctaagctgccttctgcggggcttgccttctggccatgcccttcttctctcccttgcacctgtacctcttggtctttgaataaagcctgagtaggaaggctagcaaaaaaaaaaaaaaaaaaaaaaaaaaaaaaaaaaaaaaaaaaaaaaaaaaaaaaaaaaaaaaaaaaaaaaaaaaaaaaaa

SEQ ID NO: 9524 - RNA, 8787 nt, synthetic construct
  source 1..8787: mol_type = other RNA
aggaaataagagagaaaagaagagtaagaagaaatataagagccaccatggcccctaagaagaagcgtaaagtgagccggatgaaccacgaccaggagttcgacccccctaaggtgtaccctcccgtccccgccgagaagagaaagcccatccgggtcctgagcctgttcgatggcatcgccaccggtctgctggtgctgaaggacctgggcatccaggtggataggtacattgcctccgaggtgtgcgaggactccatcaccgtgggaatggtgcgtcatcagggcaagatcatgtacgtgggcgacgtgcggagcgtgacacagaagcatatccaggagtggggccctttcgacctggtgatcggcggcagcccttgcaatgacctgagcatcgtgaacccagcccggaagggcctgtacgagggaaccggcagactgttcttcgagttttacagactgctgcacgacgcccggcctaaggaaggcgacgaccggcccttcttttggctgttcgagaatgtggtggccatgggagtcagcgacaagcgggatattagccggttcctggagagcaaccccgtgatgatcgatgccaaggaagtgagcgccgcccaccgggccagatacttctggggcaatctgcctggcatgaacagacccctggccagcaccgtgaacgacaagctggagctgcaggagtgcctggagcacggccggatcgccaagttcagcaaggtgagaaccatcaccacccgaagcaacagcatcaaacaaggcaaggaccagcactttcctgtgttcatgaacgagaaggaggacatcctgtggtgtaccgagatggagagagtgttcgggttcccagtccactacacagatgtcagcaacatgtctagactggccagacagagactgctgggaagaagctggtccgtccctgtgatcagacacctgttcgcccctctgaaggagtacttcgcctgcgtgagcagcggcaacagcaacgccaacagccggggccccagcttctctagcggcctggtgccactgtccctgagagggagccacatgggccccatggagatctacaaaaccgtgagcgcctggaagcggcagcctgtgcgcgtgctgagcctgtttcggaatatcgataaagtcctgaaaagcctgggattcctggagagcggctctggctccggcggtggcaccctgaagtacgtggaggatgtgacaaacgtggtcagacgggatgtggagaagtggggccccttcgatctggtgtacggcagcacccaacccctgggcagctcttgtgaccggtgccctggctggtacatgtttcagttccaccggatcctgcagtacgccctgccgagacaggagtcccagcggccattcttttggattttcatggacaacttgctgctgaccgaggatgaccaggaaactaccactcggttcctgcagaccgaagccgtgaccctgcaggacgtgagaggccgggactaccagaacgccatgcgggtgtggtccaacatccctggactgaaaagcaagcacgcacctctgacccctaaagaagaggagtacctgcaggcccaggtgcggagcagaagcaagctggacgcccctaaggtggatctgctggtgaagaattgcctcctgcccctgagagagtacttcaagtatttcagccagaatagtctgcccctgggaggcagcggcggcggcctgaagggcctggtgaccttcgaggacgtggccgtggagttcacccaggaggagtgggccctgctggaccccgcccagaggaccctgtacagggacgtgatgctggagaacttcaggaacctggccagcctgggcgaccaggtggacaagcccggcctgatcgcccagctggagcaggaggacaaggtgatgaccgaggagaggggcatcctgcccggcacctgccccgacgtggagaaccccggcggcccaagcagcggcgcccctcctcccagcggcggcaggcggcccaagcagcggcgcccctcctcccagcggcggcagcccagccggctccccaacctctaccgaggagggcacctctgagtccgccacccccgagagcggccctggcacctccaccgagcccagcgagggcagcgcacccggcagccctgccggcagccccacctccacagaggagggaaccagcaccgagcccagcgaaggcagcgccccaggcaccagcaccgagcctagtgagcaggagattaaacggatcaacaagatcagaagaagacttgtgaaagacagcaacaccaagaaggccggcaagacaggccccatgaaaaccctgctggttagagtgatgacacccgatctgagagagcggctggaaaacctgagaaagaagcctgaaaatatcccccagcccatcagcaatacatctagagccaacctgaataagctgctgaccgattacaccgaaatgaagaaggcgatcctgcatgtgtactgggaagagttccagaaggaccctgtgggcctgatgagccgggtggcccagcctgccagcaagaagatcgatcagaacaagctgaaacctgagatggacgagaagggcaacctgaccaccgccggctttgcctgctctcagtgtggccagcccctgttcgtgtacaagctggagcaggtgtctgagaagggcaaggcttacaccaactacttcggacggtgcaatgtggccgagcacgaaaagctgatcctgctggcccagctgaagcccgagaaggatagcgacgaagccgtgacatatagcctgggaaagtttgggcagagggccctggatttctacagcattcatgtgaccaaggagtccacccaccccgtgaagcccctggcccagatcgccggaaacagatacgcctccggacctgtgggaaaggccctgagcgacgcatgtatgggcacaatcgcctccttcctgtctaagtaccaggacatcatcatcgaacaccagaaggtggtgaagggcaaccagaagagactggagagcctgcgggagctggccggcaaggaaaacctggaataccctagcgtgaccctgccacctcagcctcacaccaaggagggcgttgatgcctacaacgaagtgatcgcccgggtgcgaatgtgggtgaacctgaacctgtggcagaagctgaagctaagcagagatgatgccaagcctctgctgagactgaagggattcccttcctttcctctggtcgagagacaggccaacgaagtggactggtgggacatggtgtgtaacgtgaagaagctgatcaacgagaaaaaggaggatggcaaggtgttttggcagaatctggctggctacaagagacaggaagccctgagaccatacctgagcagcgaggaagatcggaagaagggaaagaaattcgctcggtaccagctgggcgacctgctgctgcacctggaaaagaagcacggcgaggactggggaaaggtgtacgacgaggcctgggagcggattgacaagaaagtggaaggcctgagcaagcacatcaagctggaagaggaacggagaagcgaggacgcccagagcaaggccgccctgaccgactggctgcgggctaaggccagcttcgtgatcgagggcctgaaggaggccgacaaggacgagttctgcagatgcgagctgaagctgcagaagtggtacggggacctgcggggaaagcccttcgccatcgaagccgagaacagcatcctggacatcagcggcttcagcaagcagtacaactgtgccttcatctggcagaaggacggcgtgaagaagctgaacctgtacctgatcatcaactacttcaagggcggcaagctgcggttcaagaagatcaaacctgaagccttcgaagccaacagattctacaccgtgatcaacaaaaagagcggcgagatcgtgcccatggaggtgaacttcaacttcgacgaccccaacctgatcatcctgcctctggcctttggcaagagacagggcagagaattcatctggaacgacctgctgtccctggaaaccggcagcctgaagctggccaacggaagagtgatcgagaagacactgtacaacagaagaacccggcaggatgagcctgccctgttcgtggccctgaccttcgagcggcgggaggtcctggactcctccaatatcaaaccaatgaacctgatcggcgtggcaagaggcgaaaacatccccgccgtgatcgccctgaccgaccccgagggctgcccactgagccggtttaaggatagcctgggaaacccaacccacatcctgagaatcggcgagagctataaggagaagcagcggaccatccaggccaagaaggaggtggagcagcggagagccggcggctacagccggaagtacgccagcaaagccaagaatctggcagacgatatggtgagaaacaccgctagagatctgctgtactacgccgtgacccaggatgccatgctgatcttcgccaacctgagccggggcttcggccggcagggcaagcggaccttcatggccgagagacagtacacacggatggaggactggctgaccgccaagctggcctacgagggcctgagcaagacctacctgtccaagacactggcccagtacacctccaagacatgcagcaactgtgggtttaccatcaccagcgccgactacgacagggtgctggagaagctgaagaagacagcaacaggctggatgaccacaattaacggcaaggagctgaaggtggagggccagattacctactacaacagatacaagagacagaacgtagtcaaggacctgtccgtcgagctggatagactgagcgaagaatctgtgaacaacgacatctcctcctggacaaagggcagaagcggagaagctctgagcctcctgaagaaaagattctcccatagacccgtgcaggagaagttcgtgtgcctgaactgcggcttcgagacacacgcagccgagcaagccgccctgaacatcgccagatcctggctgttcctgcggagccaggagtacaagaaataccagacaaacaagacaaccggcaacaccgataagagagccttcgtcgagacctggcagtccttttaccggaagaagcttaaggaggtgtggaaacctgccgtgcggtctggcggatctggcggaggctccaccagccccaagaaaaagagaaaagtctaagctgccttctgcggggcttgccttctggccatgcccttcttctctcccttgcacctgtacctcttggtctttgaataaagcctgagtaggaaggctagcaaaaaaaaaaaaaaaaaaaaaaaaaaaaaaaaaaaaaaaaaaaaaaaaaaaaaaaaaaaaaaaaaaaaaaaaaaaaaaaagcccagccggctccccaacctctaccgaggagggcacctctgagtccgccacccccgagagcggccctggcacctccaccgagcccagcgagggcagcgcacccggcagccctgccggcagccccacctccacagaggagggaaccagcaccgagcccagcgaaggcagcgccccaggcaccagcaccgagcctagtgagcaggagattaaacggatcaacaagatcagaagaagacttgtgaaagacagcaacaccaagaaggccggcaagacaggccccatgaaaaccctgctggttagagtgatgacacccgatctgagagagcggctggaaaacctgagaaagaagcctgaaaatatcccccagcccatcagcaatacatctagagccaacctgaataagctgctgaccgattacaccgaaatgaagaaggcgatcctgcatgtgtactgggaagagttccagaaggaccctgtgggcctgatgagccgggtggcccagcctgccagcaagaagatcgatcagaacaagctgaaacctgagatggacgagaagggcaacctgaccaccgccggctttgcctgctctcagtgtggccagcccctgttcgtgtacaagctggagcaggtgtctgagaagggcaaggcttacaccaactacttcggacggtgcaatgtggccgagcacgaaaagctgatcctgctggcccagctgaagcccgagaaggatagcgacgaagccgtgacatatagcctgggaaagtttgggcagagggccctggatttctacagcattcatgtgaccaaggagtccacccaccccgtgaagcccctggcccagatcgccggaaacagatacgcctccggacctgtgggaaaggccctgagcgacgcatgtatgggcacaatcgcctccttcctgtctaagtaccaggacatcatcatcgaacaccagaaggtggtgaagggcaaccagaagagactggagagcctgcgggagctggccggcaaggaaaacctggaataccctagcgtgaccctgccacctcagcctcacaccaaggagggcgttgatgcctacaacgaagtgatcgcccgggtgcgaatgtgggtgaacctgaacctgtggcagaagctgaagctaagcagagatgatgccaagcctctgctgagactgaagggattcccttcctttcctctggtcgagagacaggccaacgaagtggactggtgggacatggtgtgtaacgtgaagaagctgatcaacgagaaaaaggaggatggcaaggtgttttggcagaatctggctggctacaagagacaggaagccctgagaccatacctgagcagcgaggaagatcggaagaagggaaagaaattcgctcggtaccagctgggcgacctgctgctgcacctggaaaagaagcacggcgaggactggggaaaggtgtacgacgaggcctgggagcggattgacaagaaagtggaaggcctgagcaagcacatcaagctggaagaggaacggagaagcgaggacgcccagagcaaggccgccctgaccgactggctgcgggctaaggccagcttcgtgatcgagggcctgaaggaggccgacaaggacgagttctgcagatgcgagctgaagctgcagaagtggtacggggacctgcggggaaagcccttcgccatcgaagccgagaacagcatcctggacatcagcggcttcagcaagcagtacaactgtgccttcatctggcagaaggacggcgtgaagaagctgaacctgtacctgatcatcaactacttcaagggcggcaagctgcggttcaagaagatcaaacctgaagccttcgaagccaacagattctacaccgtgatcaacaaaaagagcggcgagatcgtgcccatggaggtgaacttcaacttcgacgaccccaacctgatcatcctgcctctggcctttggcaagagacagggcagagaattcatctggaacgacctgctgtccctggaaaccggcagcctgaagctggccaacggaagagtgatcgagaagacactgtacaacagaagaacccggcaggatgagcctgccctgttcgtggccctgaccttcgagcggcgggaggtcctggactcctccaatatcaaaccaatgaacctgatcggcgtggcaagaggcgaaaacatccccgccgtgatcgccctgaccgaccccgagggctgcccactgagccggtttaaggatagcctgggaaacccaacccacatcctgagaatcggcgagagctataaggagaagcagcggaccatccaggccaagaaggaggtggagcagcggagagccggcggctacagccggaagtacgccagcaaagccaagaatctggcagacgatatggtgagaaacaccgctagagatctgctgtactacgccgtgacccaggatgccatgctgatcttcgccaacctgagccggggcttcggccggcagggcaagcggaccttcatggccgagagacagtacacacggatggaggactggctgaccgccaagctggcctacgagggcctgagcaagacctacctgtccaagacactggcccagtacacctccaagacatgcagcaactgtgggtttaccatcaccagcgccgactacgacagggtgctggagaagctgaagaagacagcaacaggctggatgaccacaattaacggcaaggagctgaaggtggagggccagattacctactacaacagatacaagagacagaacgtagtcaaggacctgtccgtcgagctggatagactgagcgaagaatctgtgaacaacgacatctcctcctggacaaagggcagaagcggagaagctctgagcctcctgaagaaaagattctcccatagacccgtgcaggagaagttcgtgtgcctgaactgcggcttcgagacacacgcagccgagcaagccgccctgaacatcgccagatcctggctgttcctgcggagccaggagtacaagaaataccagacaaacaagacaaccggcaacaccgataagagagccttcgtcgagacctggcagtccttttaccggaagaagcttaaggaggtgtggaaacctgccgtgcggtctggcggatctggcggaggctccaccagccccaagaaaaagagaaaagtctaagctgccttctgcggggcttgccttctggccatgcccttcttctctcccttgcacctgtacctcttggtctttgaataaagcctgagtaggaaggctagcaaaaaaaaaaaaaaaaaaaaaaaaaaaaaaaaaaaaaaaaaaaaaaaaaaaaaaaaaaaaaaaaaaaaaaaaaaaaaaaa

SEQ ID NO: 9525 - RNA, 8787 nt, synthetic construct
  source 1..8787: mol_type = other RNA
aggaaataagagagaaaagaagagtaagaagaaatataagagccaccatggcccctaagaagaagcgtaaagtgagccggatgaaccacgaccaggagttcgacccccctaaggtgtaccctcccgtccccgccgagaagagaaagcccatccgggtcctgagcctgttcgatggcatcgccaccggtctgctggtgctgaaggacctgggcatccaggtggataggtacattgcctccgaggtgtgcgaggactccatcaccgtgggaatggtgcgtcatcagggcaagatcatgtacgtgggcgacgtgcggagcgtgacacagaagcatatccaggagtggggccctttcgacctggtgatcggcggcagcccttgcaatgacctgagcatcgtgaacccagcccggaagggcctgtacgagggaaccggcagactgttcttcgagttttacagactgctgcacgacgcccggcctaaggaaggcgacgaccggcccttcttttggctgttcgagaatgtggtggccatgggagtcagcgacaagcgggatattagccggttcctggagagcaaccccgtgatgatcgatgccaaggaagtgagcgccgcccaccgggccagatacttctggggcaatctgcctggcatgaacagacccctggccagcaccgtgaacgacaagctggagctgcaggagtgcctggagcacggccggatcgccaagttcagcaaggtgagaaccatcaccacccgaagcaacagcatcaaacaaggcaaggaccagcactttcctgtgttcatgaacgagaaggaggacatcctgtggtgtaccgagatggagagagtgttcgggttcccagtccactacacagatgtcagcaacatgtctagactggccagacagagactgctgggaagaagctggtccgtccctgtgatcagacacctgttcgcccctctgaaggagtacttcgcctgcgtgagcagcggcaacagcaacgccaacagccggggccccagcttctctagcggcctggtgccactgtccctgagagggagccacatgggccccatggagatctacaaaaccgtgagcgcctggaagcggcagcctgtgcgcgtgctgagcctgtttcggaatatcgataaagtcctgaaaagcctgggattcctggagagcggctctggctccggcggtggcaccctgaagtacgtggaggatgtgacaaacgtggtcagacgggatgtggagaagtggggccccttcgatctggtgtacggcagcacccaacccctgggcagctcttgtgaccggtgccctggctggtacatgtttcagttccaccggatcctgcagtacgccctgccgagacaggagtcccagcggccattcttttggattttcatggacaacttgctgctgaccgaggatgaccaggaaactaccactcggttcctgcagaccgaagccgtgaccctgcaggacgtgagaggccgggactaccagaacgccatgcgggtgtggtccaacatccctggactgaaaagcaagcacgcacctctgacccctaaagaagaggagtacctgcaggcccaggtgcggagcagaagcaagctggacgcccctaaggtggatctgctggtgaagaattgcctcctgcccctgagagagtacttcaagtatttcagccagaatagtctgcccctgggaggcagcggcggcggcatgatcaacgcccaggagctgctgaccctggaggacgtgaccgtggagttcacctgggaggagtggcagctgctggaccccttccagaaggacctgtacagggacgtgatgctggagatctacagcaacctggtgagcatcggctaccaggtgagcaagcccgacgccctgagcaagctggagaggggcgaggagccctggaccgtggaggacgagaggcacagccagatctgccccgagaacggcggcccaagcagcggcgcccctcctcccagcggcggcaggcggcccaagcagcggcgcccctcctcccagcggcggcagcccagccggctccccaacctctaccgaggagggcacctctgagtccgccacccccgagagcggccctggcacctccaccgagcccagcgagggcagcgcacccggcagccctgccggcagccccacctccacagaggagggaaccagcaccgagcccagcgaaggcagcgccccaggcaccagcaccgagcctagtgagcaggagattaaacggatcaacaagatcagaagaagacttgtgaaagacagcaacaccaagaaggccggcaagacaggccccatgaaaaccctgctggttagagtgatgacacccgatctgagagagcggctggaaaacctgagaaagaagcctgaaaatatcccccagcccatcagcaatacatctagagccaacctgaataagctgctgaccgattacaccgaaatgaagaaggcgatcctgcatgtgtactgggaagagttccagaaggaccctgtgggcctgatgagccgggtggcccagcctgccagcaagaagatcgatcagaacaagctgaaacctgagatggacgagaagggcaacctgaccaccgccggctttgcctgctctcagtgtggccagcccctgttcgtgtacaagctggagcaggtgtctgagaagggcaaggcttacaccaactacttcggacggtgcaatgtggccgagcacgaaaagctgatcctgctggcccagctgaagcccgagaaggatagcgacgaagccgtgacatatagcctgggaaagtttgggcagagggccctggatttctacagcattcatgtgaccaaggagtccacccaccccgtgaagcccctggcccagatcgccggaaacagatacgcctccggacctgtgggaaaggccctgagcgacgcatgtatgggcacaatcgcctccttcctgtctaagtaccaggacatcatcatcgaacaccagaaggtggtgaagggcaaccagaagagactggagagcctgcgggagctggccggcaaggaaaacctggaataccctagcgtgaccctgccacctcagcctcacaccaaggagggcgttgatgcctacaacgaagtgatcgcccgggtgcgaatgtgggtgaacctgaacctgtggcagaagctgaagctaagcagagatgatgccaagcctctgctgagactgaagggattcccttcctttcctctggtcgagagacaggccaacgaagtggactggtgggacatggtgtgtaacgtgaagaagctgatcaacgagaaaaaggaggatggcaaggtgttttggcagaatctggctggctacaagagacaggaagccctgagaccatacctgagcagcgaggaagatcggaagaagggaaagaaattcgctcggtaccagctgggcgacctgctgctgcacctggaaaagaagcacggcgaggactggggaaaggtgtacgacgaggcctgggagcggattgacaagaaagtggaaggcctgagcaagcacatcaagctggaagaggaacggagaagcgaggacgcccagagcaaggccgccctgaccgactggctgcgggctaaggccagcttcgtgatcgagggcctgaaggaggccgacaaggacgagttctgcagatgcgagctgaagctgcagaagtggtacggggacctgcggggaaagcccttcgccatcgaagccgagaacagcatcctggacatcagcggcttcagcaagcagtacaactgtgccttcatctggcagaaggacggcgtgaagaagctgaacctgtacctgatcatcaactacttcaagggcggcaagctgcggttcaagaagatcaaacctgaagccttcgaagccaacagattctacaccgtgatcaacaaaaagagcggcgagatcgtgcccatggaggtgaacttcaacttcgacgaccccaacctgatcatcctgcctctggcctttggcaagagacagggcagagaattcatctggaacgacctgctgtccctggaaaccggcagcctgaagctggccaacggaagagtgatcgagaagacactgtacaacagaagaacccggcaggatgagcctgccctgttcgtggccctgaccttcgagcggcgggaggtcctggactcctccaatatcaaaccaatgaacctgatcggcgtggcaagaggcgaaaacatccccgccgtgatcgccctgaccgaccccgagggctgcccactgagccggtttaaggatagcctgggaaacccaacccacatcctgagaatcggcgagagctataaggagaagcagcggaccatccaggccaagaaggaggtggagcagcggagagccggcggctacagccggaagtacgccagcaaagccaagaatctggcagacgatatggtgagaaacaccgctagagatctgctgtactacgccgtgacccaggatgccatgctgatcttcgccaacctgagccggggcttcggccggcagggcaagcggaccttcatggccgagagacagtacacacggatggaggactggctgaccgccaagctggcctacgagggcctgagcaagacctacctgtccaagacactggcccagtacacctccaagacatgcagcaactgtgggtttaccatcaccagcgccgactacgacagggtgctggagaagctgaagaagacagcaacaggctggatgaccacaattaacggcaaggagctgaaggtggagggccagattacctactacaacagatacaagagacagaacgtagtcaaggacctgtccgtcgagctggatagactgagcgaagaatctgtgaacaacgacatctcctcctggacaaagggcagaagcggagaagctctgagcctcctgaagaaaagattctcccatagacccgtgcaggagaagttcgtgtgcctgaactgcggcttcgagacacacgcagccgagcaagccgccctgaacatcgccagatcctggctgttcctgcggagccaggagtacaagaaataccagacaaacaagacaaccggcaacaccgataagagagccttcgtcgagacctggcagtccttttaccggaagaagcttaaggaggtgtggaaacctgccgtgcggtctggcggatctggcggaggctccaccagccccaagaaaaagagaaaagtctaagctgccttctgcggggcttgccttctggccatgcccttcttctctcccttgcacctgtacctcttggtctttgaataaagcctgagtaggaaggctagcaaaaaaaaaaaaaaaaaaaaaaaaaaaaaaaaaaaaaaaaaaaaaaaaaaaaaaaaaaaaaaaaaaaaaaaaaaaaaaaagcccagccggctccccaacctctaccgaggagggcacctctgagtccgccacccccgagagcggccctggcacctccaccgagcccagcgagggcagcgcacccggcagccctgccggcagccccacctccacagaggagggaaccagcaccgagcccagcgaaggcagcgccccaggcaccagcaccgagcctagtgagcaggagattaaacggatcaacaagatcagaagaagacttgtgaaagacagcaacaccaagaaggccggcaagacaggccccatgaaaaccctgctggttagagtgatgacacccgatctgagagagcggctggaaaacctgagaaagaagcctgaaaatatcccccagcccatcagcaatacatctagagccaacctgaataagctgctgaccgattacaccgaaatgaagaaggcgatcctgcatgtgtactgggaagagttccagaaggaccctgtgggcctgatgagccgggtggcccagcctgccagcaagaagatcgatcagaacaagctgaaacctgagatggacgagaagggcaacctgaccaccgccggctttgcctgctctcagtgtggccagcccctgttcgtgtacaagctggagcaggtgtctgagaagggcaaggcttacaccaactacttcggacggtgcaatgtggccgagcacgaaaagctgatcctgctggcccagctgaagcccgagaaggatagcgacgaagccgtgacatatagcctgggaaagtttgggcagagggccctggatttctacagcattcatgtgaccaaggagtccacccaccccgtgaagcccctggcccagatcgccggaaacagatacgcctccggacctgtgggaaaggccctgagcgacgcatgtatgggcacaatcgcctccttcctgtctaagtaccaggacatcatcatcgaacaccagaaggtggtgaagggcaaccagaagagactggagagcctgcgggagctggccggcaaggaaaacctggaataccctagcgtgaccctgccacctcagcctcacaccaaggagggcgttgatgcctacaacgaagtgatcgcccgggtgcgaatgtgggtgaacctgaacctgtggcagaagctgaagctaagcagagatgatgccaagcctctgctgagactgaagggattcccttcctttcctctggtcgagagacaggccaacgaagtggactggtgggacatggtgtgtaacgtgaagaagctgatcaacgagaaaaaggaggatggcaaggtgttttggcagaatctggctggctacaagagacaggaagccctgagaccatacctgagcagcgaggaagatcggaagaagggaaagaaattcgctcggtaccagctgggcgacctgctgctgcacctggaaaagaagcacggcgaggactggggaaaggtgtacgacgaggcctgggagcggattgacaagaaagtggaaggcctgagcaagcacatcaagctggaagaggaacggagaagcgaggacgcccagagcaaggccgccctgaccgactggctgcgggctaaggccagcttcgtgatcgagggcctgaaggaggccgacaaggacgagttctgcagatgcgagctgaagctgcagaagtggtacggggacctgcggggaaagcccttcgccatcgaagccgagaacagcatcctggacatcagcggcttcagcaagcagtacaactgtgccttcatctggcagaaggacggcgtgaagaagctgaacctgtacctgatcatcaactacttcaagggcggcaagctgcggttcaagaagatcaaacctgaagccttcgaagccaacagattctacaccgtgatcaacaaaaagagcggcgagatcgtgcccatggaggtgaacttcaacttcgacgaccccaacctgatcatcctgcctctggcctttggcaagagacagggcagagaattcatctggaacgacctgctgtccctggaaaccggcagcctgaagctggccaacggaagagtgatcgagaagacactgtacaacagaagaacccggcaggatgagcctgccctgttcgtggccctgaccttcgagcggcgggaggtcctggactcctccaatatcaaaccaatgaacctgatcggcgtggcaagaggcgaaaacatccccgccgtgatcgccctgaccgaccccgagggctgcccactgagccggtttaaggatagcctgggaaacccaacccacatcctgagaatcggcgagagctataaggagaagcagcggaccatccaggccaagaaggaggtggagcagcggagagccggcggctacagccggaagtacgccagcaaagccaagaatctggcagacgatatggtgagaaacaccgctagagatctgctgtactacgccgtgacccaggatgccatgctgatcttcgccaacctgagccggggcttcggccggcagggcaagcggaccttcatggccgagagacagtacacacggatggaggactggctgaccgccaagctggcctacgagggcctgagcaagacctacctgtccaagacactggcccagtacacctccaagacatgcagcaactgtgggtttaccatcaccagcgccgactacgacagggtgctggagaagctgaagaagacagcaacaggctggatgaccacaattaacggcaaggagctgaaggtggagggccagattacctactacaacagatacaagagacagaacgtagtcaaggacctgtccgtcgagctggatagactgagcgaagaatctgtgaacaacgacatctcctcctggacaaagggcagaagcggagaagctctgagcctcctgaagaaaagattctcccatagacccgtgcaggagaagttcgtgtgcctgaactgcggcttcgagacacacgcagccgagcaagccgccctgaacatcgccagatcctggctgttcctgcggagccaggagtacaagaaataccagacaaacaagacaaccggcaacaccgataagagagccttcgtcgagacctggcagtccttttaccggaagaagcttaaggaggtgtggaaacctgccgtgcggtctggcggatctggcggaggctccaccagccccaagaaaaagagaaaagtctaagctgccttctgcggggcttgccttctggccatgcccttcttctctcccttgcacctgtacctcttggtctttgaataaagcctgagtaggaaggctagcaaaaaaaaaaaaaaaaaaaaaaaaaaaaaaaaaaaaaaaaaaaaaaaaaaaaaaaaaaaaaaaaaaaaaaaaaaaaaaaa

SEQ ID NO: 9526 - RNA, 8787 nt, synthetic construct
  source 1..8787: mol_type = other RNA
aggaaataagagagaaaagaagagtaagaagaaatataagagccaccatggcccctaagaagaagcgtaaagtgagccggatgaaccacgaccaggagttcgacccccctaaggtgtaccctcccgtccccgccgagaagagaaagcccatccgggtcctgagcctgttcgatggcatcgccaccggtctgctggtgctgaaggacctgggcatccaggtggataggtacattgcctccgaggtgtgcgaggactccatcaccgtgggaatggtgcgtcatcagggcaagatcatgtacgtgggcgacgtgcggagcgtgacacagaagcatatccaggagtggggccctttcgacctggtgatcggcggcagcccttgcaatgacctgagcatcgtgaacccagcccggaagggcctgtacgagggaaccggcagactgttcttcgagttttacagactgctgcacgacgcccggcctaaggaaggcgacgaccggcccttcttttggctgttcgagaatgtggtggccatgggagtcagcgacaagcgggatattagccggttcctggagagcaaccccgtgatgatcgatgccaaggaagtgagcgccgcccaccgggccagatacttctggggcaatctgcctggcatgaacagacccctggccagcaccgtgaacgacaagctggagctgcaggagtgcctggagcacggccggatcgccaagttcagcaaggtgagaaccatcaccacccgaagcaacagcatcaaacaaggcaaggaccagcactttcctgtgttcatgaacgagaaggaggacatcctgtggtgtaccgagatggagagagtgttcgggttcccagtccactacacagatgtcagcaacatgtctagactggccagacagagactgctgggaagaagctggtccgtccctgtgatcagacacctgttcgcccctctgaaggagtacttcgcctgcgtgagcagcggcaacagcaacgccaacagccggggccccagcttctctagcggcctggtgccactgtccctgagagggagccacatgggccccatggagatctacaaaaccgtgagcgcctggaagcggcagcctgtgcgcgtgctgagcctgtttcggaatatcgataaagtcctgaaaagcctgggattcctggagagcggctctggctccggcggtggcaccctgaagtacgtggaggatgtgacaaacgtggtcagacgggatgtggagaagtggggccccttcgatctggtgtacggcagcacccaacccctgggcagctcttgtgaccggtgccctggctggtacatgtttcagttccaccggatcctgcagtacgccctgccgagacaggagtcccagcggccattcttttggattttcatggacaacttgctgctgaccgaggatgaccaggaaactaccactcggttcctgcagaccgaagccgtgaccctgcaggacgtgagaggccgggactaccagaacgccatgcgggtgtggtccaacatccctggactgaaaagcaagcacgcacctctgacccctaaagaagaggagtacctgcaggcccaggtgcggagcagaagcaagctggacgcccctaaggtggatctgctggtgaagaattgcctcctgcccctgagagagtacttcaagtatttcagccagaatagtctgcccctgggaggcagcggcggcggcatggacgtggcccaggagcaggtgaccttccaggacgtggccatctacttcagctgggaggagtgggagtgcctggagcccagccagagggccctgtacagggacgtgatgctggacaacttcagcaacgtggccgccctgggcttctgcagccccaggcccgacctggtgagcaggctggagcagtgggaggagccctgggtggaggacagggacaggcccgagctgcaggccgtgcagaggggcggcccaagcagcggcgcccctcctcccagcggcggcaggcggcccaagcagcggcgcccctcctcccagcggcggcagcccagccggctccccaacctctaccgaggagggcacctctgagtccgccacccccgagagcggccctggcacctccaccgagcccagcgagggcagcgcacccggcagccctgccggcagccccacctccacagaggagggaaccagcaccgagcccagcgaaggcagcgccccaggcaccagcaccgagcctagtgagcaggagattaaacggatcaacaagatcagaagaagacttgtgaaagacagcaacaccaagaaggccggcaagacaggccccatgaaaaccctgctggttagagtgatgacacccgatctgagagagcggctggaaaacctgagaaagaagcctgaaaatatcccccagcccatcagcaatacatctagagccaacctgaataagctgctgaccgattacaccgaaatgaagaaggcgatcctgcatgtgtactgggaagagttccagaaggaccctgtgggcctgatgagccgggtggcccagcctgccagcaagaagatcgatcagaacaagctgaaacctgagatggacgagaagggcaacctgaccaccgccggctttgcctgctctcagtgtggccagcccctgttcgtgtacaagctggagcaggtgtctgagaagggcaaggcttacaccaactacttcggacggtgcaatgtggccgagcacgaaaagctgatcctgctggcccagctgaagcccgagaaggatagcgacgaagccgtgacatatagcctgggaaagtttgggcagagggccctggatttctacagcattcatgtgaccaaggagtccacccaccccgtgaagcccctggcccagatcgccggaaacagatacgcctccggacctgtgggaaaggccctgagcgacgcatgtatgggcacaatcgcctccttcctgtctaagtaccaggacatcatcatcgaacaccagaaggtggtgaagggcaaccagaagagactggagagcctgcgggagctggccggcaaggaaaacctggaataccctagcgtgaccctgccacctcagcctcacaccaaggagggcgttgatgcctacaacgaagtgatcgcccgggtgcgaatgtgggtgaacctgaacctgtggcagaagctgaagctaagcagagatgatgccaagcctctgctgagactgaagggattcccttcctttcctctggtcgagagacaggccaacgaagtggactggtgggacatggtgtgtaacgtgaagaagctgatcaacgagaaaaaggaggatggcaaggtgttttggcagaatctggctggctacaagagacaggaagccctgagaccatacctgagcagcgaggaagatcggaagaagggaaagaaattcgctcggtaccagctgggcgacctgctgctgcacctggaaaagaagcacggcgaggactggggaaaggtgtacgacgaggcctgggagcggattgacaagaaagtggaaggcctgagcaagcacatcaagctggaagaggaacggagaagcgaggacgcccagagcaaggccgccctgaccgactggctgcgggctaaggccagcttcgtgatcgagggcctgaaggaggccgacaaggacgagttctgcagatgcgagctgaagctgcagaagtggtacggggacctgcggggaaagcccttcgccatcgaagccgagaacagcatcctggacatcagcggcttcagcaagcagtacaactgtgccttcatctggcagaaggacggcgtgaagaagctgaacctgtacctgatcatcaactacttcaagggcggcaagctgcggttcaagaagatcaaacctgaagccttcgaagccaacagattctacaccgtgatcaacaaaaagagcggcgagatcgtgcccatggaggtgaacttcaacttcgacgaccccaacctgatcatcctgcctctggcctttggcaagagacagggcagagaattcatctggaacgacctgctgtccctggaaaccggcagcctgaagctggccaacggaagagtgatcgagaagacactgtacaacagaagaacccggcaggatgagcctgccctgttcgtggccctgaccttcgagcggcgggaggtcctggactcctccaatatcaaaccaatgaacctgatcggcgtggcaagaggcgaaaacatccccgccgtgatcgccctgaccgaccccgagggctgcccactgagccggtttaaggatagcctgggaaacccaacccacatcctgagaatcggcgagagctataaggagaagcagcggaccatccaggccaagaaggaggtggagcagcggagagccggcggctacagccggaagtacgccagcaaagccaagaatctggcagacgatatggtgagaaacaccgctagagatctgctgtactacgccgtgacccaggatgccatgctgatcttcgccaacctgagccggggcttcggccggcagggcaagcggaccttcatggccgagagacagtacacacggatggaggactggctgaccgccaagctggcctacgagggcctgagcaagacctacctgtccaagacactggcccagtacacctccaagacatgcagcaactgtgggtttaccatcaccagcgccgactacgacagggtgctggagaagctgaagaagacagcaacaggctggatgaccacaattaacggcaaggagctgaaggtggagggccagattacctactacaacagatacaagagacagaacgtagtcaaggacctgtccgtcgagctggatagactgagcgaagaatctgtgaacaacgacatctcctcctggacaaagggcagaagcggagaagctctgagcctcctgaagaaaagattctcccatagacccgtgcaggagaagttcgtgtgcctgaactgcggcttcgagacacacgcagccgagcaagccgccctgaacatcgccagatcctggctgttcctgcggagccaggagtacaagaaataccagacaaacaagacaaccggcaacaccgataagagagccttcgtcgagacctggcagtccttttaccggaagaagcttaaggaggtgtggaaacctgccgtgcggtctggcggatctggcggaggctccaccagccccaagaaaaagagaaaagtctaagctgccttctgcggggcttgccttctggccatgcccttcttctctcccttgcacctgtacctcttggtctttgaataaagcctgagtaggaaggctagcaaaaaaaaaaaaaaaaaaaaaaaaaaaaaaaaaaaaaaaaaaaaaaaaaaaaaaaaaaaaaaaaaaaaaaaaaaaaaaaagcccagccggctccccaacctctaccgaggagggcacctctgagtccgccacccccgagagcggccctggcacctccaccgagcccagcgagggcagcgcacccggcagccctgccggcagccccacctccacagaggagggaaccagcaccgagcccagcgaaggcagcgccccaggcaccagcaccgagcctagtgagcaggagattaaacggatcaacaagatcagaagaagacttgtgaaagacagcaacaccaagaaggccggcaagacaggccccatgaaaaccctgctggttagagtgatgacacccgatctgagagagcggctggaaaacctgagaaagaagcctgaaaatatcccccagcccatcagcaatacatctagagccaacctgaataagctgctgaccgattacaccgaaatgaagaaggcgatcctgcatgtgtactgggaagagttccagaaggaccctgtgggcctgatgagccgggtggcccagcctgccagcaagaagatcgatcagaacaagctgaaacctgagatggacgagaagggcaacctgaccaccgccggctttgcctgctctcagtgtggccagcccctgttcgtgtacaagctggagcaggtgtctgagaagggcaaggcttacaccaactacttcggacggtgcaatgtggccgagcacgaaaagctgatcctgctggcccagctgaagcccgagaaggatagcgacgaagccgtgacatatagcctgggaaagtttgggcagagggccctggatttctacagcattcatgtgaccaaggagtccacccaccccgtgaagcccctggcccagatcgccggaaacagatacgcctccggacctgtgggaaaggccctgagcgacgcatgtatgggcacaatcgcctccttcctgtctaagtaccaggacatcatcatcgaacaccagaaggtggtgaagggcaaccagaagagactggagagcctgcgggagctggccggcaaggaaaacctggaataccctagcgtgaccctgccacctcagcctcacaccaaggagggcgttgatgcctacaacgaagtgatcgcccgggtgcgaatgtgggtgaacctgaacctgtggcagaagctgaagctaagcagagatgatgccaagcctctgctgagactgaagggattcccttcctttcctctggtcgagagacaggccaacgaagtggactggtgggacatggtgtgtaacgtgaagaagctgatcaacgagaaaaaggaggatggcaaggtgttttggcagaatctggctggctacaagagacaggaagccctgagaccatacctgagcagcgaggaagatcggaagaagggaaagaaattcgctcggtaccagctgggcgacctgctgctgcacctggaaaagaagcacggcgaggactggggaaaggtgtacgacgaggcctgggagcggattgacaagaaagtggaaggcctgagcaagcacatcaagctggaagaggaacggagaagcgaggacgcccagagcaaggccgccctgaccgactggctgcgggctaaggccagcttcgtgatcgagggcctgaaggaggccgacaaggacgagttctgcagatgcgagctgaagctgcagaagtggtacggggacctgcggggaaagcccttcgccatcgaagccgagaacagcatcctggacatcagcggcttcagcaagcagtacaactgtgccttcatctggcagaaggacggcgtgaagaagctgaacctgtacctgatcatcaactacttcaagggcggcaagctgcggttcaagaagatcaaacctgaagccttcgaagccaacagattctacaccgtgatcaacaaaaagagcggcgagatcgtgcccatggaggtgaacttcaacttcgacgaccccaacctgatcatcctgcctctggcctttggcaagagacagggcagagaattcatctggaacgacctgctgtccctggaaaccggcagcctgaagctggccaacggaagagtgatcgagaagacactgtacaacagaagaacccggcaggatgagcctgccctgttcgtggccctgaccttcgagcggcgggaggtcctggactcctccaatatcaaaccaatgaacctgatcggcgtggcaagaggcgaaaacatccccgccgtgatcgccctgaccgaccccgagggctgcccactgagccggtttaaggatagcctgggaaacccaacccacatcctgagaatcggcgagagctataaggagaagcagcggaccatccaggccaagaaggaggtggagcagcggagagccggcggctacagccggaagtacgccagcaaagccaagaatctggcagacgatatggtgagaaacaccgctagagatctgctgtactacgccgtgacccaggatgccatgctgatcttcgccaacctgagccggggcttcggccggcagggcaagcggaccttcatggccgagagacagtacacacggatggaggactggctgaccgccaagctggcctacgagggcctgagcaagacctacctgtccaagacactggcccagtacacctccaagacatgcagcaactgtgggtttaccatcaccagcgccgactacgacagggtgctggagaagctgaagaagacagcaacaggctggatgaccacaattaacggcaaggagctgaaggtggagggccagattacctactacaacagatacaagagacagaacgtagtcaaggacctgtccgtcgagctggatagactgagcgaagaatctgtgaacaacgacatctcctcctggacaaagggcagaagcggagaagctctgagcctcctgaagaaaagattctcccatagacccgtgcaggagaagttcgtgtgcctgaactgcggcttcgagacacacgcagccgagcaagccgccctgaacatcgccagatcctggctgttcctgcggagccaggagtacaagaaataccagacaaacaagacaaccggcaacaccgataagagagccttcgtcgagacctggcagtccttttaccggaagaagcttaaggaggtgtggaaacctgccgtgcggtctggcggatctggcggaggctccaccagccccaagaaaaagagaaaagtctaagctgccttctgcggggcttgccttctggccatgcccttcttctctcccttgcacctgtacctcttggtctttgaataaagcctgagtaggaaggctagcaaaaaaaaaaaaaaaaaaaaaaaaaaaaaaaaaaaaaaaaaaaaaaaaaaaaaaaaaaaaaaaaaaaaaaaaaaaaaaaa

SEQ ID NO: 9527 - RNA, 8787 nt, synthetic construct
  source 1..8787: mol_type = other RNA
aggaaataagagagaaaagaagagtaagaagaaatataagagccaccatggcccctaagaagaagcgtaaagtgagccggatgaaccacgaccaggagttcgacccccctaaggtgtaccctcccgtccccgccgagaagagaaagcccatccgggtcctgagcctgttcgatggcatcgccaccggtctgctggtgctgaaggacctgggcatccaggtggataggtacattgcctccgaggtgtgcgaggactccatcaccgtgggaatggtgcgtcatcagggcaagatcatgtacgtgggcgacgtgcggagcgtgacacagaagcatatccaggagtggggccctttcgacctggtgatcggcggcagcccttgcaatgacctgagcatcgtgaacccagcccggaagggcctgtacgagggaaccggcagactgttcttcgagttttacagactgctgcacgacgcccggcctaaggaaggcgacgaccggcccttcttttggctgttcgagaatgtggtggccatgggagtcagcgacaagcgggatattagccggttcctggagagcaaccccgtgatgatcgatgccaaggaagtgagcgccgcccaccgggccagatacttctggggcaatctgcctggcatgaacagacccctggccagcaccgtgaacgacaagctggagctgcaggagtgcctggagcacggccggatcgccaagttcagcaaggtgagaaccatcaccacccgaagcaacagcatcaaacaaggcaaggaccagcactttcctgtgttcatgaacgagaaggaggacatcctgtggtgtaccgagatggagagagtgttcgggttcccagtccactacacagatgtcagcaacatgtctagactggccagacagagactgctgggaagaagctggtccgtccctgtgatcagacacctgttcgcccctctgaaggagtacttcgcctgcgtgagcagcggcaacagcaacgccaacagccggggccccagcttctctagcggcctggtgccactgtccctgagagggagccacatgggccccatggagatctacaaaaccgtgagcgcctggaagcggcagcctgtgcgcgtgctgagcctgtttcggaatatcgataaagtcctgaaaagcctgggattcctggagagcggctctggctccggcggtggcaccctgaagtacgtggaggatgtgacaaacgtggtcagacgggatgtggagaagtggggccccttcgatctggtgtacggcagcacccaacccctgggcagctcttgtgaccggtgccctggctggtacatgtttcagttccaccggatcctgcagtacgccctgccgagacaggagtcccagcggccattcttttggattttcatggacaacttgctgctgaccgaggatgaccaggaaactaccactcggttcctgcagaccgaagccgtgaccctgcaggacgtgagaggccgggactaccagaacgccatgcgggtgtggtccaacatccctggactgaaaagcaagcacgcacctctgacccctaaagaagaggagtacctgcaggcccaggtgcggagcagaagcaagctggacgcccctaaggtggatctgctggtgaagaattgcctcctgcccctgagagagtacttcaagtatttcagccagaatagtctgcccctgggaggcagcggcggcggcgaggagctgcccgtggtgttcgaggacgtggccgtgtacttcaccagggaggagtggggcatgctggacaagaggcagaaggagctgtacagggacgtgatgaggatgaactacgagctgctggccagcctgggccccgccgccgccaagcccgacctgatcagcaagctggagaggagggccgccccctggatcaaggaccccaacggccccaagtggggcaagggcaggccccccggcaacggcggcccaagcagcggcgcccctcctcccagcggcggcaggcggcccaagcagcggcgcccctcctcccagcggcggcagcccagccggctccccaacctctaccgaggagggcacctctgagtccgccacccccgagagcggccctggcacctccaccgagcccagcgagggcagcgcacccggcagccctgccggcagccccacctccacagaggagggaaccagcaccgagcccagcgaaggcagcgccccaggcaccagcaccgagcctagtgagcaggagattaaacggatcaacaagatcagaagaagacttgtgaaagacagcaacaccaagaaggccggcaagacaggccccatgaaaaccctgctggttagagtgatgacacccgatctgagagagcggctggaaaacctgagaaagaagcctgaaaatatcccccagcccatcagcaatacatctagagccaacctgaataagctgctgaccgattacaccgaaatgaagaaggcgatcctgcatgtgtactgggaagagttccagaaggaccctgtgggcctgatgagccgggtggcccagcctgccagcaagaagatcgatcagaacaagctgaaacctgagatggacgagaagggcaacctgaccaccgccggctttgcctgctctcagtgtggccagcccctgttcgtgtacaagctggagcaggtgtctgagaagggcaaggcttacaccaactacttcggacggtgcaatgtggccgagcacgaaaagctgatcctgctggcccagctgaagcccgagaaggatagcgacgaagccgtgacatatagcctgggaaagtttgggcagagggccctggatttctacagcattcatgtgaccaaggagtccacccaccccgtgaagcccctggcccagatcgccggaaacagatacgcctccggacctgtgggaaaggccctgagcgacgcatgtatgggcacaatcgcctccttcctgtctaagtaccaggacatcatcatcgaacaccagaaggtggtgaagggcaaccagaagagactggagagcctgcgggagctggccggcaaggaaaacctggaataccctagcgtgaccctgccacctcagcctcacaccaaggagggcgttgatgcctacaacgaagtgatcgcccgggtgcgaatgtgggtgaacctgaacctgtggcagaagctgaagctaagcagagatgatgccaagcctctgctgagactgaagggattcccttcctttcctctggtcgagagacaggccaacgaagtggactggtgggacatggtgtgtaacgtgaagaagctgatcaacgagaaaaaggaggatggcaaggtgttttggcagaatctggctggctacaagagacaggaagccctgagaccatacctgagcagcgaggaagatcggaagaagggaaagaaattcgctcggtaccagctgggcgacctgctgctgcacctggaaaagaagcacggcgaggactggggaaaggtgtacgacgaggcctgggagcggattgacaagaaagtggaaggcctgagcaagcacatcaagctggaagaggaacggagaagcgaggacgcccagagcaaggccgccctgaccgactggctgcgggctaaggccagcttcgtgatcgagggcctgaaggaggccgacaaggacgagttctgcagatgcgagctgaagctgcagaagtggtacggggacctgcggggaaagcccttcgccatcgaagccgagaacagcatcctggacatcagcggcttcagcaagcagtacaactgtgccttcatctggcagaaggacggcgtgaagaagctgaacctgtacctgatcatcaactacttcaagggcggcaagctgcggttcaagaagatcaaacctgaagccttcgaagccaacagattctacaccgtgatcaacaaaaagagcggcgagatcgtgcccatggaggtgaacttcaacttcgacgaccccaacctgatcatcctgcctctggcctttggcaagagacagggcagagaattcatctggaacgacctgctgtccctggaaaccggcagcctgaagctggccaacggaagagtgatcgagaagacactgtacaacagaagaacccggcaggatgagcctgccctgttcgtggccctgaccttcgagcggcgggaggtcctggactcctccaatatcaaaccaatgaacctgatcggcgtggcaagaggcgaaaacatccccgccgtgatcgccctgaccgaccccgagggctgcccactgagccggtttaaggatagcctgggaaacccaacccacatcctgagaatcggcgagagctataaggagaagcagcggaccatccaggccaagaaggaggtggagcagcggagagccggcggctacagccggaagtacgccagcaaagccaagaatctggcagacgatatggtgagaaacaccgctagagatctgctgtactacgccgtgacccaggatgccatgctgatcttcgccaacctgagccggggcttcggccggcagggcaagcggaccttcatggccgagagacagtacacacggatggaggactggctgaccgccaagctggcctacgagggcctgagcaagacctacctgtccaagacactggcccagtacacctccaagacatgcagcaactgtgggtttaccatcaccagcgccgactacgacagggtgctggagaagctgaagaagacagcaacaggctggatgaccacaattaacggcaaggagctgaaggtggagggccagattacctactacaacagatacaagagacagaacgtagtcaaggacctgtccgtcgagctggatagactgagcgaagaatctgtgaacaacgacatctcctcctggacaaagggcagaagcggagaagctctgagcctcctgaagaaaagattctcccatagacccgtgcaggagaagttcgtgtgcctgaactgcggcttcgagacacacgcagccgagcaagccgccctgaacatcgccagatcctggctgttcctgcggagccaggagtacaagaaataccagacaaacaagacaaccggcaacaccgataagagagccttcgtcgagacctggcagtccttttaccggaagaagcttaaggaggtgtggaaacctgccgtgcggtctggcggatctggcggaggctccaccagccccaagaaaaagagaaaagtctaagctgccttctgcggggcttgccttctggccatgcccttcttctctcccttgcacctgtacctcttggtctttgaataaagcctgagtaggaaggctagcaaaaaaaaaaaaaaaaaaaaaaaaaaaaaaaaaaaaaaaaaaaaaaaaaaaaaaaaaaaaaaaaaaaaaaaaaaaaaaaagcccagccggctccccaacctctaccgaggagggcacctctgagtccgccacccccgagagcggccctggcacctccaccgagcccagcgagggcagcgcacccggcagccctgccggcagccccacctccacagaggagggaaccagcaccgagcccagcgaaggcagcgccccaggcaccagcaccgagcctagtgagcaggagattaaacggatcaacaagatcagaagaagacttgtgaaagacagcaacaccaagaaggccggcaagacaggccccatgaaaaccctgctggttagagtgatgacacccgatctgagagagcggctggaaaacctgagaaagaagcctgaaaatatcccccagcccatcagcaatacatctagagccaacctgaataagctgctgaccgattacaccgaaatgaagaaggcgatcctgcatgtgtactgggaagagttccagaaggaccctgtgggcctgatgagccgggtggcccagcctgccagcaagaagatcgatcagaacaagctgaaacctgagatggacgagaagggcaacctgaccaccgccggctttgcctgctctcagtgtggccagcccctgttcgtgtacaagctggagcaggtgtctgagaagggcaaggcttacaccaactacttcggacggtgcaatgtggccgagcacgaaaagctgatcctgctggcccagctgaagcccgagaaggatagcgacgaagccgtgacatatagcctgggaaagtttgggcagagggccctggatttctacagcattcatgtgaccaaggagtccacccaccccgtgaagcccctggcccagatcgccggaaacagatacgcctccggacctgtgggaaaggccctgagcgacgcatgtatgggcacaatcgcctccttcctgtctaagtaccaggacatcatcatcgaacaccagaaggtggtgaagggcaaccagaagagactggagagcctgcgggagctggccggcaaggaaaacctggaataccctagcgtgaccctgccacctcagcctcacaccaaggagggcgttgatgcctacaacgaagtgatcgcccgggtgcgaatgtgggtgaacctgaacctgtggcagaagctgaagctaagcagagatgatgccaagcctctgctgagactgaagggattcccttcctttcctctggtcgagagacaggccaacgaagtggactggtgggacatggtgtgtaacgtgaagaagctgatcaacgagaaaaaggaggatggcaaggtgttttggcagaatctggctggctacaagagacaggaagccctgagaccatacctgagcagcgaggaagatcggaagaagggaaagaaattcgctcggtaccagctgggcgacctgctgctgcacctggaaaagaagcacggcgaggactggggaaaggtgtacgacgaggcctgggagcggattgacaagaaagtggaaggcctgagcaagcacatcaagctggaagaggaacggagaagcgaggacgcccagagcaaggccgccctgaccgactggctgcgggctaaggccagcttcgtgatcgagggcctgaaggaggccgacaaggacgagttctgcagatgcgagctgaagctgcagaagtggtacggggacctgcggggaaagcccttcgccatcgaagccgagaacagcatcctggacatcagcggcttcagcaagcagtacaactgtgccttcatctggcagaaggacggcgtgaagaagctgaacctgtacctgatcatcaactacttcaagggcggcaagctgcggttcaagaagatcaaacctgaagccttcgaagccaacagattctacaccgtgatcaacaaaaagagcggcgagatcgtgcccatggaggtgaacttcaacttcgacgaccccaacctgatcatcctgcctctggcctttggcaagagacagggcagagaattcatctggaacgacctgctgtccctggaaaccggcagcctgaagctggccaacggaagagtgatcgagaagacactgtacaacagaagaacccggcaggatgagcctgccctgttcgtggccctgaccttcgagcggcgggaggtcctggactcctccaatatcaaaccaatgaacctgatcggcgtggcaagaggcgaaaacatccccgccgtgatcgccctgaccgaccccgagggctgcccactgagccggtttaaggatagcctgggaaacccaacccacatcctgagaatcggcgagagctataaggagaagcagcggaccatccaggccaagaaggaggtggagcagcggagagccggcggctacagccggaagtacgccagcaaagccaagaatctggcagacgatatggtgagaaacaccgctagagatctgctgtactacgccgtgacccaggatgccatgctgatcttcgccaacctgagccggggcttcggccggcagggcaagcggaccttcatggccgagagacagtacacacggatggaggactggctgaccgccaagctggcctacgagggcctgagcaagacctacctgtccaagacactggcccagtacacctccaagacatgcagcaactgtgggtttaccatcaccagcgccgactacgacagggtgctggagaagctgaagaagacagcaacaggctggatgaccacaattaacggcaaggagctgaaggtggagggccagattacctactacaacagatacaagagacagaacgtagtcaaggacctgtccgtcgagctggatagactgagcgaagaatctgtgaacaacgacatctcctcctggacaaagggcagaagcggagaagctctgagcctcctgaagaaaagattctcccatagacccgtgcaggagaagttcgtgtgcctgaactgcggcttcgagacacacgcagccgagcaagccgccctgaacatcgccagatcctggctgttcctgcggagccaggagtacaagaaataccagacaaacaagacaaccggcaacaccgataagagagccttcgtcgagacctggcagtccttttaccggaagaagcttaaggaggtgtggaaacctgccgtgcggtctggcggatctggcggaggctccaccagccccaagaaaaagagaaaagtctaagctgccttctgcggggcttgccttctggccatgcccttcttctctcccttgcacctgtacctcttggtctttgaataaagcctgagtaggaaggctagcaaaaaaaaaaaaaaaaaaaaaaaaaaaaaaaaaaaaaaaaaaaaaaaaaaaaaaaaaaaaaaaaaaaaaaaaaaaaaaaa

SEQ ID NO: 9528 - RNA, 8787 nt, synthetic construct
  source 1..8787: mol_type = other RNA
aggaaataagagagaaaagaagagtaagaagaaatataagagccaccatggcccctaagaagaagcgtaaagtgagccggatgaaccacgaccaggagttcgacccccctaaggtgtaccctcccgtccccgccgagaagagaaagcccatccgggtcctgagcctgttcgatggcatcgccaccggtctgctggtgctgaaggacctgggcatccaggtggataggtacattgcctccgaggtgtgcgaggactccatcaccgtgggaatggtgcgtcatcagggcaagatcatgtacgtgggcgacgtgcggagcgtgacacagaagcatatccaggagtggggccctttcgacctggtgatcggcggcagcccttgcaatgacctgagcatcgtgaacccagcccggaagggcctgtacgagggaaccggcagactgttcttcgagttttacagactgctgcacgacgcccggcctaaggaaggcgacgaccggcccttcttttggctgttcgagaatgtggtggccatgggagtcagcgacaagcgggatattagccggttcctggagagcaaccccgtgatgatcgatgccaaggaagtgagcgccgcccaccgggccagatacttctggggcaatctgcctggcatgaacagacccctggccagcaccgtgaacgacaagctggagctgcaggagtgcctggagcacggccggatcgccaagttcagcaaggtgagaaccatcaccacccgaagcaacagcatcaaacaaggcaaggaccagcactttcctgtgttcatgaacgagaaggaggacatcctgtggtgtaccgagatggagagagtgttcgggttcccagtccactacacagatgtcagcaacatgtctagactggccagacagagactgctgggaagaagctggtccgtccctgtgatcagacacctgttcgcccctctgaaggagtacttcgcctgcgtgagcagcggcaacagcaacgccaacagccggggccccagcttctctagcggcctggtgccactgtccctgagagggagccacatgggccccatggagatctacaaaaccgtgagcgcctggaagcggcagcctgtgcgcgtgctgagcctgtttcggaatatcgataaagtcctgaaaagcctgggattcctggagagcggctctggctccggcggtggcaccctgaagtacgtggaggatgtgacaaacgtggtcagacgggatgtggagaagtggggccccttcgatctggtgtacggcagcacccaacccctgggcagctcttgtgaccggtgccctggctggtacatgtttcagttccaccggatcctgcagtacgccctgccgagacaggagtcccagcggccattcttttggattttcatggacaacttgctgctgaccgaggatgaccaggaaactaccactcggttcctgcagaccgaagccgtgaccctgcaggacgtgagaggccgggactaccagaacgccatgcgggtgtggtccaacatccctggactgaaaagcaagcacgcacctctgacccctaaagaagaggagtacctgcaggcccaggtgcggagcagaagcaagctggacgcccctaaggtggatctgctggtgaagaattgcctcctgcccctgagagagtacttcaagtatttcagccagaatagtctgcccctgggaggcagcggcggcggcccccaggagagcgtgaccttcaaggacatcgccgtggacttcacccaggaggagtgggccctgctggacaccagccagaggaagctgtacagggacgtgatgctggagaacatcagccacctggtgagcgtgggctaccacctgtgcaagagcgacgtgatcagccagctggagcagggcgtggagctgtggagggagggcaggggcttcccccagggccccaaccccgacaggaagagcggcggcggcccaagcagcggcgcccctcctcccagcggcggcaggcggcccaagcagcggcgcccctcctcccagcggcggcagcccagccggctccccaacctctaccgaggagggcacctctgagtccgccacccccgagagcggccctggcacctccaccgagcccagcgagggcagcgcacccggcagccctgccggcagccccacctccacagaggagggaaccagcaccgagcccagcgaaggcagcgccccaggcaccagcaccgagcctagtgagcaggagattaaacggatcaacaagatcagaagaagacttgtgaaagacagcaacaccaagaaggccggcaagacaggccccatgaaaaccctgctggttagagtgatgacacccgatctgagagagcggctggaaaacctgagaaagaagcctgaaaatatcccccagcccatcagcaatacatctagagccaacctgaataagctgctgaccgattacaccgaaatgaagaaggcgatcctgcatgtgtactgggaagagttccagaaggaccctgtgggcctgatgagccgggtggcccagcctgccagcaagaagatcgatcagaacaagctgaaacctgagatggacgagaagggcaacctgaccaccgccggctttgcctgctctcagtgtggccagcccctgttcgtgtacaagctggagcaggtgtctgagaagggcaaggcttacaccaactacttcggacggtgcaatgtggccgagcacgaaaagctgatcctgctggcccagctgaagcccgagaaggatagcgacgaagccgtgacatatagcctgggaaagtttgggcagagggccctggatttctacagcattcatgtgaccaaggagtccacccaccccgtgaagcccctggcccagatcgccggaaacagatacgcctccggacctgtgggaaaggccctgagcgacgcatgtatgggcacaatcgcctccttcctgtctaagtaccaggacatcatcatcgaacaccagaaggtggtgaagggcaaccagaagagactggagagcctgcgggagctggccggcaaggaaaacctggaataccctagcgtgaccctgccacctcagcctcacaccaaggagggcgttgatgcctacaacgaagtgatcgcccgggtgcgaatgtgggtgaacctgaacctgtggcagaagctgaagctaagcagagatgatgccaagcctctgctgagactgaagggattcccttcctttcctctggtcgagagacaggccaacgaagtggactggtgggacatggtgtgtaacgtgaagaagctgatcaacgagaaaaaggaggatggcaaggtgttttggcagaatctggctggctacaagagacaggaagccctgagaccatacctgagcagcgaggaagatcggaagaagggaaagaaattcgctcggtaccagctgggcgacctgctgctgcacctggaaaagaagcacggcgaggactggggaaaggtgtacgacgaggcctgggagcggattgacaagaaagtggaaggcctgagcaagcacatcaagctggaagaggaacggagaagcgaggacgcccagagcaaggccgccctgaccgactggctgcgggctaaggccagcttcgtgatcgagggcctgaaggaggccgacaaggacgagttctgcagatgcgagctgaagctgcagaagtggtacggggacctgcggggaaagcccttcgccatcgaagccgagaacagcatcctggacatcagcggcttcagcaagcagtacaactgtgccttcatctggcagaaggacggcgtgaagaagctgaacctgtacctgatcatcaactacttcaagggcggcaagctgcggttcaagaagatcaaacctgaagccttcgaagccaacagattctacaccgtgatcaacaaaaagagcggcgagatcgtgcccatggaggtgaacttcaacttcgacgaccccaacctgatcatcctgcctctggcctttggcaagagacagggcagagaattcatctggaacgacctgctgtccctggaaaccggcagcctgaagctggccaacggaagagtgatcgagaagacactgtacaacagaagaacccggcaggatgagcctgccctgttcgtggccctgaccttcgagcggcgggaggtcctggactcctccaatatcaaaccaatgaacctgatcggcgtggcaagaggcgaaaacatccccgccgtgatcgccctgaccgaccccgagggctgcccactgagccggtttaaggatagcctgggaaacccaacccacatcctgagaatcggcgagagctataaggagaagcagcggaccatccaggccaagaaggaggtggagcagcggagagccggcggctacagccggaagtacgccagcaaagccaagaatctggcagacgatatggtgagaaacaccgctagagatctgctgtactacgccgtgacccaggatgccatgctgatcttcgccaacctgagccggggcttcggccggcagggcaagcggaccttcatggccgagagacagtacacacggatggaggactggctgaccgccaagctggcctacgagggcctgagcaagacctacctgtccaagacactggcccagtacacctccaagacatgcagcaactgtgggtttaccatcaccagcgccgactacgacagggtgctggagaagctgaagaagacagcaacaggctggatgaccacaattaacggcaaggagctgaaggtggagggccagattacctactacaacagatacaagagacagaacgtagtcaaggacctgtccgtcgagctggatagactgagcgaagaatctgtgaacaacgacatctcctcctggacaaagggcagaagcggagaagctctgagcctcctgaagaaaagattctcccatagacccgtgcaggagaagttcgtgtgcctgaactgcggcttcgagacacacgcagccgagcaagccgccctgaacatcgccagatcctggctgttcctgcggagccaggagtacaagaaataccagacaaacaagacaaccggcaacaccgataagagagccttcgtcgagacctggcagtccttttaccggaagaagcttaaggaggtgtggaaacctgccgtgcggtctggcggatctggcggaggctccaccagccccaagaaaaagagaaaagtctaagctgccttctgcggggcttgccttctggccatgcccttcttctctcccttgcacctgtacctcttggtctttgaataaagcctgagtaggaaggctagcaaaaaaaaaaaaaaaaaaaaaaaaaaaaaaaaaaaaaaaaaaaaaaaaaaaaaaaaaaaaaaaaaaaaaaaaaaaaaaaagcccagccggctccccaacctctaccgaggagggcacctctgagtccgccacccccgagagcggccctggcacctccaccgagcccagcgagggcagcgcacccggcagccctgccggcagccccacctccacagaggagggaaccagcaccgagcccagcgaaggcagcgccccaggcaccagcaccgagcctagtgagcaggagattaaacggatcaacaagatcagaagaagacttgtgaaagacagcaacaccaagaaggccggcaagacaggccccatgaaaaccctgctggttagagtgatgacacccgatctgagagagcggctggaaaacctgagaaagaagcctgaaaatatcccccagcccatcagcaatacatctagagccaacctgaataagctgctgaccgattacaccgaaatgaagaaggcgatcctgcatgtgtactgggaagagttccagaaggaccctgtgggcctgatgagccgggtggcccagcctgccagcaagaagatcgatcagaacaagctgaaacctgagatggacgagaagggcaacctgaccaccgccggctttgcctgctctcagtgtggccagcccctgttcgtgtacaagctggagcaggtgtctgagaagggcaaggcttacaccaactacttcggacggtgcaatgtggccgagcacgaaaagctgatcctgctggcccagctgaagcccgagaaggatagcgacgaagccgtgacatatagcctgggaaagtttgggcagagggccctggatttctacagcattcatgtgaccaaggagtccacccaccccgtgaagcccctggcccagatcgccggaaacagatacgcctccggacctgtgggaaaggccctgagcgacgcatgtatgggcacaatcgcctccttcctgtctaagtaccaggacatcatcatcgaacaccagaaggtggtgaagggcaaccagaagagactggagagcctgcgggagctggccggcaaggaaaacctggaataccctagcgtgaccctgccacctcagcctcacaccaaggagggcgttgatgcctacaacgaagtgatcgcccgggtgcgaatgtgggtgaacctgaacctgtggcagaagctgaagctaagcagagatgatgccaagcctctgctgagactgaagggattcccttcctttcctctggtcgagagacaggccaacgaagtggactggtgggacatggtgtgtaacgtgaagaagctgatcaacgagaaaaaggaggatggcaaggtgttttggcagaatctggctggctacaagagacaggaagccctgagaccatacctgagcagcgaggaagatcggaagaagggaaagaaattcgctcggtaccagctgggcgacctgctgctgcacctggaaaagaagcacggcgaggactggggaaaggtgtacgacgaggcctgggagcggattgacaagaaagtggaaggcctgagcaagcacatcaagctggaagaggaacggagaagcgaggacgcccagagcaaggccgccctgaccgactggctgcgggctaaggccagcttcgtgatcgagggcctgaaggaggccgacaaggacgagttctgcagatgcgagctgaagctgcagaagtggtacggggacctgcggggaaagcccttcgccatcgaagccgagaacagcatcctggacatcagcggcttcagcaagcagtacaactgtgccttcatctggcagaaggacggcgtgaagaagctgaacctgtacctgatcatcaactacttcaagggcggcaagctgcggttcaagaagatcaaacctgaagccttcgaagccaacagattctacaccgtgatcaacaaaaagagcggcgagatcgtgcccatggaggtgaacttcaacttcgacgaccccaacctgatcatcctgcctctggcctttggcaagagacagggcagagaattcatctggaacgacctgctgtccctggaaaccggcagcctgaagctggccaacggaagagtgatcgagaagacactgtacaacagaagaacccggcaggatgagcctgccctgttcgtggccctgaccttcgagcggcgggaggtcctggactcctccaatatcaaaccaatgaacctgatcggcgtggcaagaggcgaaaacatccccgccgtgatcgccctgaccgaccccgagggctgcccactgagccggtttaaggatagcctgggaaacccaacccacatcctgagaatcggcgagagctataaggagaagcagcggaccatccaggccaagaaggaggtggagcagcggagagccggcggctacagccggaagtacgccagcaaagccaagaatctggcagacgatatggtgagaaacaccgctagagatctgctgtactacgccgtgacccaggatgccatgctgatcttcgccaacctgagccggggcttcggccggcagggcaagcggaccttcatggccgagagacagtacacacggatggaggactggctgaccgccaagctggcctacgagggcctgagcaagacctacctgtccaagacactggcccagtacacctccaagacatgcagcaactgtgggtttaccatcaccagcgccgactacgacagggtgctggagaagctgaagaagacagcaacaggctggatgaccacaattaacggcaaggagctgaaggtggagggccagattacctactacaacagatacaagagacagaacgtagtcaaggacctgtccgtcgagctggatagactgagcgaagaatctgtgaacaacgacatctcctcctggacaaagggcagaagcggagaagctctgagcctcctgaagaaaagattctcccatagacccgtgcaggagaagttcgtgtgcctgaactgcggcttcgagacacacgcagccgagcaagccgccctgaacatcgccagatcctggctgttcctgcggagccaggagtacaagaaataccagacaaacaagacaaccggcaacaccgataagagagccttcgtcgagacctggcagtccttttaccggaagaagcttaaggaggtgtggaaacctgccgtgcggtctggcggatctggcggaggctccaccagccccaagaaaaagagaaaagtctaagctgccttctgcggggcttgccttctggccatgcccttcttctctcccttgcacctgtacctcttggtctttgaataaagcctgagtaggaaggctagcaaaaaaaaaaaaaaaaaaaaaaaaaaaaaaaaaaaaaaaaaaaaaaaaaaaaaaaaaaaaaaaaaaaaaaaaaaaaaaaa

SEQ ID NO: 9529 - RNA, 8787 nt, synthetic construct
  source 1..8787: mol_type = other RNA
aggaaataagagagaaaagaagagtaagaagaaatataagagccaccatggcccctaagaagaagcgtaaagtgagccggatgaaccacgaccaggagttcgacccccctaaggtgtaccctcccgtccccgccgagaagagaaagcccatccgggtcctgagcctgttcgatggcatcgccaccggtctgctggtgctgaaggacctgggcatccaggtggataggtacattgcctccgaggtgtgcgaggactccatcaccgtgggaatggtgcgtcatcagggcaagatcatgtacgtgggcgacgtgcggagcgtgacacagaagcatatccaggagtggggccctttcgacctggtgatcggcggcagcccttgcaatgacctgagcatcgtgaacccagcccggaagggcctgtacgagggaaccggcagactgttcttcgagttttacagactgctgcacgacgcccggcctaaggaaggcgacgaccggcccttcttttggctgttcgagaatgtggtggccatgggagtcagcgacaagcgggatattagccggttcctggagagcaaccccgtgatgatcgatgccaaggaagtgagcgccgcccaccgggccagatacttctggggcaatctgcctggcatgaacagacccctggccagcaccgtgaacgacaagctggagctgcaggagtgcctggagcacggccggatcgccaagttcagcaaggtgagaaccatcaccacccgaagcaacagcatcaaacaaggcaaggaccagcactttcctgtgttcatgaacgagaaggaggacatcctgtggtgtaccgagatggagagagtgttcgggttcccagtccactacacagatgtcagcaacatgtctagactggccagacagagactgctgggaagaagctggtccgtccctgtgatcagacacctgttcgcccctctgaaggagtacttcgcctgcgtgagcagcggcaacagcaacgccaacagccggggccccagcttctctagcggcctggtgccactgtccctgagagggagccacatgggccccatggagatctacaaaaccgtgagcgcctggaagcggcagcctgtgcgcgtgctgagcctgtttcggaatatcgataaagtcctgaaaagcctgggattcctggagagcggctctggctccggcggtggcaccctgaagtacgtggaggatgtgacaaacgtggtcagacgggatgtggagaagtggggccccttcgatctggtgtacggcagcacccaacccctgggcagctcttgtgaccggtgccctggctggtacatgtttcagttccaccggatcctgcagtacgccctgccgagacaggagtcccagcggccattcttttggattttcatggacaacttgctgctgaccgaggatgaccaggaaactaccactcggttcctgcagaccgaagccgtgaccctgcaggacgtgagaggccgggactaccagaacgccatgcgggtgtggtccaacatccctggactgaaaagcaagcacgcacctctgacccctaaagaagaggagtacctgcaggcccaggtgcggagcagaagcaagctggacgcccctaaggtggatctgctggtgaagaattgcctcctgcccctgagagagtacttcaagtatttcagccagaatagtctgcccctgggaggcagcggcggcggcatggccgccctgttcctgagcgcccccccccaggccgaggtgaccttcgaggacgtggccgtgtacctgagcagggaggagtggggcaggctgggccccgcccagaggggcctgtacagggacgtgatgctggagacctacggcaacctggtgagcctgggcgtgggccccgccggccccaagcccggcgtgatcagccagctggagaggggcgacgagccctgggtgctggacgtgcagggcggcggcccaagcagcggcgcccctcctcccagcggcggcaggcggcccaagcagcggcgcccctcctcccagcggcggcagcccagccggctccccaacctctaccgaggagggcacctctgagtccgccacccccgagagcggccctggcacctccaccgagcccagcgagggcagcgcacccggcagccctgccggcagccccacctccacagaggagggaaccagcaccgagcccagcgaaggcagcgccccaggcaccagcaccgagcctagtgagcaggagattaaacggatcaacaagatcagaagaagacttgtgaaagacagcaacaccaagaaggccggcaagacaggccccatgaaaaccctgctggttagagtgatgacacccgatctgagagagcggctggaaaacctgagaaagaagcctgaaaatatcccccagcccatcagcaatacatctagagccaacctgaataagctgctgaccgattacaccgaaatgaagaaggcgatcctgcatgtgtactgggaagagttccagaaggaccctgtgggcctgatgagccgggtggcccagcctgccagcaagaagatcgatcagaacaagctgaaacctgagatggacgagaagggcaacctgaccaccgccggctttgcctgctctcagtgtggccagcccctgttcgtgtacaagctggagcaggtgtctgagaagggcaaggcttacaccaactacttcggacggtgcaatgtggccgagcacgaaaagctgatcctgctggcccagctgaagcccgagaaggatagcgacgaagccgtgacatatagcctgggaaagtttgggcagagggccctggatttctacagcattcatgtgaccaaggagtccacccaccccgtgaagcccctggcccagatcgccggaaacagatacgcctccggacctgtgggaaaggccctgagcgacgcatgtatgggcacaatcgcctccttcctgtctaagtaccaggacatcatcatcgaacaccagaaggtggtgaagggcaaccagaagagactggagagcctgcgggagctggccggcaaggaaaacctggaataccctagcgtgaccctgccacctcagcctcacaccaaggagggcgttgatgcctacaacgaagtgatcgcccgggtgcgaatgtgggtgaacctgaacctgtggcagaagctgaagctaagcagagatgatgccaagcctctgctgagactgaagggattcccttcctttcctctggtcgagagacaggccaacgaagtggactggtgggacatggtgtgtaacgtgaagaagctgatcaacgagaaaaaggaggatggcaaggtgttttggcagaatctggctggctacaagagacaggaagccctgagaccatacctgagcagcgaggaagatcggaagaagggaaagaaattcgctcggtaccagctgggcgacctgctgctgcacctggaaaagaagcacggcgaggactggggaaaggtgtacgacgaggcctgggagcggattgacaagaaagtggaaggcctgagcaagcacatcaagctggaagaggaacggagaagcgaggacgcccagagcaaggccgccctgaccgactggctgcgggctaaggccagcttcgtgatcgagggcctgaaggaggccgacaaggacgagttctgcagatgcgagctgaagctgcagaagtggtacggggacctgcggggaaagcccttcgccatcgaagccgagaacagcatcctggacatcagcggcttcagcaagcagtacaactgtgccttcatctggcagaaggacggcgtgaagaagctgaacctgtacctgatcatcaactacttcaagggcggcaagctgcggttcaagaagatcaaacctgaagccttcgaagccaacagattctacaccgtgatcaacaaaaagagcggcgagatcgtgcccatggaggtgaacttcaacttcgacgaccccaacctgatcatcctgcctctggcctttggcaagagacagggcagagaattcatctggaacgacctgctgtccctggaaaccggcagcctgaagctggccaacggaagagtgatcgagaagacactgtacaacagaagaacccggcaggatgagcctgccctgttcgtggccctgaccttcgagcggcgggaggtcctggactcctccaatatcaaaccaatgaacctgatcggcgtggcaagaggcgaaaacatccccgccgtgatcgccctgaccgaccccgagggctgcccactgagccggtttaaggatagcctgggaaacccaacccacatcctgagaatcggcgagagctataaggagaagcagcggaccatccaggccaagaaggaggtggagcagcggagagccggcggctacagccggaagtacgccagcaaagccaagaatctggcagacgatatggtgagaaacaccgctagagatctgctgtactacgccgtgacccaggatgccatgctgatcttcgccaacctgagccggggcttcggccggcagggcaagcggaccttcatggccgagagacagtacacacggatggaggactggctgaccgccaagctggcctacgagggcctgagcaagacctacctgtccaagacactggcccagtacacctccaagacatgcagcaactgtgggtttaccatcaccagcgccgactacgacagggtgctggagaagctgaagaagacagcaacaggctggatgaccacaattaacggcaaggagctgaaggtggagggccagattacctactacaacagatacaagagacagaacgtagtcaaggacctgtccgtcgagctggatagactgagcgaagaatctgtgaacaacgacatctcctcctggacaaagggcagaagcggagaagctctgagcctcctgaagaaaagattctcccatagacccgtgcaggagaagttcgtgtgcctgaactgcggcttcgagacacacgcagccgagcaagccgccctgaacatcgccagatcctggctgttcctgcggagccaggagtacaagaaataccagacaaacaagacaaccggcaacaccgataagagagccttcgtcgagacctggcagtccttttaccggaagaagcttaaggaggtgtggaaacctgccgtgcggtctggcggatctggcggaggctccaccagccccaagaaaaagagaaaagtctaagctgccttctgcggggcttgccttctggccatgcccttcttctctcccttgcacctgtacctcttggtctttgaataaagcctgagtaggaaggctagcaaaaaaaaaaaaaaaaaaaaaaaaaaaaaaaaaaaaaaaaaaaaaaaaaaaaaaaaaaaaaaaaaaaaaaaaaaaaaaaagcccagccggctccccaacctctaccgaggagggcacctctgagtccgccacccccgagagcggccctggcacctccaccgagcccagcgagggcagcgcacccggcagccctgccggcagccccacctccacagaggagggaaccagcaccgagcccagcgaaggcagcgccccaggcaccagcaccgagcctagtgagcaggagattaaacggatcaacaagatcagaagaagacttgtgaaagacagcaacaccaagaaggccggcaagacaggccccatgaaaaccctgctggttagagtgatgacacccgatctgagagagcggctggaaaacctgagaaagaagcctgaaaatatcccccagcccatcagcaatacatctagagccaacctgaataagctgctgaccgattacaccgaaatgaagaaggcgatcctgcatgtgtactgggaagagttccagaaggaccctgtgggcctgatgagccgggtggcccagcctgccagcaagaagatcgatcagaacaagctgaaacctgagatggacgagaagggcaacctgaccaccgccggctttgcctgctctcagtgtggccagcccctgttcgtgtacaagctggagcaggtgtctgagaagggcaaggcttacaccaactacttcggacggtgcaatgtggccgagcacgaaaagctgatcctgctggcccagctgaagcccgagaaggatagcgacgaagccgtgacatatagcctgggaaagtttgggcagagggccctggatttctacagcattcatgtgaccaaggagtccacccaccccgtgaagcccctggcccagatcgccggaaacagatacgcctccggacctgtgggaaaggccctgagcgacgcatgtatgggcacaatcgcctccttcctgtctaagtaccaggacatcatcatcgaacaccagaaggtggtgaagggcaaccagaagagactggagagcctgcgggagctggccggcaaggaaaacctggaataccctagcgtgaccctgccacctcagcctcacaccaaggagggcgttgatgcctacaacgaagtgatcgcccgggtgcgaatgtgggtgaacctgaacctgtggcagaagctgaagctaagcagagatgatgccaagcctctgctgagactgaagggattcccttcctttcctctggtcgagagacaggccaacgaagtggactggtgggacatggtgtgtaacgtgaagaagctgatcaacgagaaaaaggaggatggcaaggtgttttggcagaatctggctggctacaagagacaggaagccctgagaccatacctgagcagcgaggaagatcggaagaagggaaagaaattcgctcggtaccagctgggcgacctgctgctgcacctggaaaagaagcacggcgaggactggggaaaggtgtacgacgaggcctgggagcggattgacaagaaagtggaaggcctgagcaagcacatcaagctggaagaggaacggagaagcgaggacgcccagagcaaggccgccctgaccgactggctgcgggctaaggccagcttcgtgatcgagggcctgaaggaggccgacaaggacgagttctgcagatgcgagctgaagctgcagaagtggtacggggacctgcggggaaagcccttcgccatcgaagccgagaacagcatcctggacatcagcggcttcagcaagcagtacaactgtgccttcatctggcagaaggacggcgtgaagaagctgaacctgtacctgatcatcaactacttcaagggcggcaagctgcggttcaagaagatcaaacctgaagccttcgaagccaacagattctacaccgtgatcaacaaaaagagcggcgagatcgtgcccatggaggtgaacttcaacttcgacgaccccaacctgatcatcctgcctctggcctttggcaagagacagggcagagaattcatctggaacgacctgctgtccctggaaaccggcagcctgaagctggccaacggaagagtgatcgagaagacactgtacaacagaagaacccggcaggatgagcctgccctgttcgtggccctgaccttcgagcggcgggaggtcctggactcctccaatatcaaaccaatgaacctgatcggcgtggcaagaggcgaaaacatccccgccgtgatcgccctgaccgaccccgagggctgcccactgagccggtttaaggatagcctgggaaacccaacccacatcctgagaatcggcgagagctataaggagaagcagcggaccatccaggccaagaaggaggtggagcagcggagagccggcggctacagccggaagtacgccagcaaagccaagaatctggcagacgatatggtgagaaacaccgctagagatctgctgtactacgccgtgacccaggatgccatgctgatcttcgccaacctgagccggggcttcggccggcagggcaagcggaccttcatggccgagagacagtacacacggatggaggactggctgaccgccaagctggcctacgagggcctgagcaagacctacctgtccaagacactggcccagtacacctccaagacatgcagcaactgtgggtttaccatcaccagcgccgactacgacagggtgctggagaagctgaagaagacagcaacaggctggatgaccacaattaacggcaaggagctgaaggtggagggccagattacctactacaacagatacaagagacagaacgtagtcaaggacctgtccgtcgagctggatagactgagcgaagaatctgtgaacaacgacatctcctcctggacaaagggcagaagcggagaagctctgagcctcctgaagaaaagattctcccatagacccgtgcaggagaagttcgtgtgcctgaactgcggcttcgagacacacgcagccgagcaagccgccctgaacatcgccagatcctggctgttcctgcggagccaggagtacaagaaataccagacaaacaagacaaccggcaacaccgataagagagccttcgtcgagacctggcagtccttttaccggaagaagcttaaggaggtgtggaaacctgccgtgcggtctggcggatctggcggaggctccaccagccccaagaaaaagagaaaagtctaagctgccttctgcggggcttgccttctggccatgcccttcttctctcccttgcacctgtacctcttggtctttgaataaagcctgagtaggaaggctagcaaaaaaaaaaaaaaaaaaaaaaaaaaaaaaaaaaaaaaaaaaaaaaaaaaaaaaaaaaaaaaaaaaaaaaaaaaaaaaaa

SEQ ID NO: 9530 - RNA, 8787 nt, synthetic construct
  source 1..8787: mol_type = other RNA
aggaaataagagagaaaagaagagtaagaagaaatataagagccaccatggcccctaagaagaagcgtaaagtgagccggatgaaccacgaccaggagttcgacccccctaaggtgtaccctcccgtccccgccgagaagagaaagcccatccgggtcctgagcctgttcgatggcatcgccaccggtctgctggtgctgaaggacctgggcatccaggtggataggtacattgcctccgaggtgtgcgaggactccatcaccgtgggaatggtgcgtcatcagggcaagatcatgtacgtgggcgacgtgcggagcgtgacacagaagcatatccaggagtggggccctttcgacctggtgatcggcggcagcccttgcaatgacctgagcatcgtgaacccagcccggaagggcctgtacgagggaaccggcagactgttcttcgagttttacagactgctgcacgacgcccggcctaaggaaggcgacgaccggcccttcttttggctgttcgagaatgtggtggccatgggagtcagcgacaagcgggatattagccggttcctggagagcaaccccgtgatgatcgatgccaaggaagtgagcgccgcccaccgggccagatacttctggggcaatctgcctggcatgaacagacccctggccagcaccgtgaacgacaagctggagctgcaggagtgcctggagcacggccggatcgccaagttcagcaaggtgagaaccatcaccacccgaagcaacagcatcaaacaaggcaaggaccagcactttcctgtgttcatgaacgagaaggaggacatcctgtggtgtaccgagatggagagagtgttcgggttcccagtccactacacagatgtcagcaacatgtctagactggccagacagagactgctgggaagaagctggtccgtccctgtgatcagacacctgttcgcccctctgaaggagtacttcgcctgcgtgagcagcggcaacagcaacgccaacagccggggccccagcttctctagcggcctggtgccactgtccctgagagggagccacatgggccccatggagatctacaaaaccgtgagcgcctggaagcggcagcctgtgcgcgtgctgagcctgtttcggaatatcgataaagtcctgaaaagcctgggattcctggagagcggctctggctccggcggtggcaccctgaagtacgtggaggatgtgacaaacgtggtcagacgggatgtggagaagtggggccccttcgatctggtgtacggcagcacccaacccctgggcagctcttgtgaccggtgccctggctggtacatgtttcagttccaccggatcctgcagtacgccctgccgagacaggagtcccagcggccattcttttggattttcatggacaacttgctgctgaccgaggatgaccaggaaactaccactcggttcctgcagaccgaagccgtgaccctgcaggacgtgagaggccgggactaccagaacgccatgcgggtgtggtccaacatccctggactgaaaagcaagcacgcacctctgacccctaaagaagaggagtacctgcaggcccaggtgcggagcagaagcaagctggacgcccctaaggtggatctgctggtgaagaattgcctcctgcccctgagagagtacttcaagtatttcagccagaatagtctgcccctgggaggcagcggcggcggcaagcccggcatcgtgaggttcgccgacgtggccgtgtacttcagcagggaggagtgggcctgcctgaggcccgcccagagggccctgtacagggacgtgatgagggagacctacggccacctgggcgccctgggcttccccggccccaagcccgccctgatcagctggatggagagggagagcgaggcctggagccccgccgcccaggagcccaaggagggcgagaacctgggcggcgcccccggcggcccaagcagcggcgcccctcctcccagcggcggcaggcggcccaagcagcggcgcccctcctcccagcggcggcagcccagccggctccccaacctctaccgaggagggcacctctgagtccgccacccccgagagcggccctggcacctccaccgagcccagcgagggcagcgcacccggcagccctgccggcagccccacctccacagaggagggaaccagcaccgagcccagcgaaggcagcgccccaggcaccagcaccgagcctagtgagcaggagattaaacggatcaacaagatcagaagaagacttgtgaaagacagcaacaccaagaaggccggcaagacaggccccatgaaaaccctgctggttagagtgatgacacccgatctgagagagcggctggaaaacctgagaaagaagcctgaaaatatcccccagcccatcagcaatacatctagagccaacctgaataagctgctgaccgattacaccgaaatgaagaaggcgatcctgcatgtgtactgggaagagttccagaaggaccctgtgggcctgatgagccgggtggcccagcctgccagcaagaagatcgatcagaacaagctgaaacctgagatggacgagaagggcaacctgaccaccgccggctttgcctgctctcagtgtggccagcccctgttcgtgtacaagctggagcaggtgtctgagaagggcaaggcttacaccaactacttcggacggtgcaatgtggccgagcacgaaaagctgatcctgctggcccagctgaagcccgagaaggatagcgacgaagccgtgacatatagcctgggaaagtttgggcagagggccctggatttctacagcattcatgtgaccaaggagtccacccaccccgtgaagcccctggcccagatcgccggaaacagatacgcctccggacctgtgggaaaggccctgagcgacgcatgtatgggcacaatcgcctccttcctgtctaagtaccaggacatcatcatcgaacaccagaaggtggtgaagggcaaccagaagagactggagagcctgcgggagctggccggcaaggaaaacctggaataccctagcgtgaccctgccacctcagcctcacaccaaggagggcgttgatgcctacaacgaagtgatcgcccgggtgcgaatgtgggtgaacctgaacctgtggcagaagctgaagctaagcagagatgatgccaagcctctgctgagactgaagggattcccttcctttcctctggtcgagagacaggccaacgaagtggactggtgggacatggtgtgtaacgtgaagaagctgatcaacgagaaaaaggaggatggcaaggtgttttggcagaatctggctggctacaagagacaggaagccctgagaccatacctgagcagcgaggaagatcggaagaagggaaagaaattcgctcggtaccagctgggcgacctgctgctgcacctggaaaagaagcacggcgaggactggggaaaggtgtacgacgaggcctgggagcggattgacaagaaagtggaaggcctgagcaagcacatcaagctggaagaggaacggagaagcgaggacgcccagagcaaggccgccctgaccgactggctgcgggctaaggccagcttcgtgatcgagggcctgaaggaggccgacaaggacgagttctgcagatgcgagctgaagctgcagaagtggtacggggacctgcggggaaagcccttcgccatcgaagccgagaacagcatcctggacatcagcggcttcagcaagcagtacaactgtgccttcatctggcagaaggacggcgtgaagaagctgaacctgtacctgatcatcaactacttcaagggcggcaagctgcggttcaagaagatcaaacctgaagccttcgaagccaacagattctacaccgtgatcaacaaaaagagcggcgagatcgtgcccatggaggtgaacttcaacttcgacgaccccaacctgatcatcctgcctctggcctttggcaagagacagggcagagaattcatctggaacgacctgctgtccctggaaaccggcagcctgaagctggccaacggaagagtgatcgagaagacactgtacaacagaagaacccggcaggatgagcctgccctgttcgtggccctgaccttcgagcggcgggaggtcctggactcctccaatatcaaaccaatgaacctgatcggcgtggcaagaggcgaaaacatccccgccgtgatcgccctgaccgaccccgagggctgcccactgagccggtttaaggatagcctgggaaacccaacccacatcctgagaatcggcgagagctataaggagaagcagcggaccatccaggccaagaaggaggtggagcagcggagagccggcggctacagccggaagtacgccagcaaagccaagaatctggcagacgatatggtgagaaacaccgctagagatctgctgtactacgccgtgacccaggatgccatgctgatcttcgccaacctgagccggggcttcggccggcagggcaagcggaccttcatggccgagagacagtacacacggatggaggactggctgaccgccaagctggcctacgagggcctgagcaagacctacctgtccaagacactggcccagtacacctccaagacatgcagcaactgtgggtttaccatcaccagcgccgactacgacagggtgctggagaagctgaagaagacagcaacaggctggatgaccacaattaacggcaaggagctgaaggtggagggccagattacctactacaacagatacaagagacagaacgtagtcaaggacctgtccgtcgagctggatagactgagcgaagaatctgtgaacaacgacatctcctcctggacaaagggcagaagcggagaagctctgagcctcctgaagaaaagattctcccatagacccgtgcaggagaagttcgtgtgcctgaactgcggcttcgagacacacgcagccgagcaagccgccctgaacatcgccagatcctggctgttcctgcggagccaggagtacaagaaataccagacaaacaagacaaccggcaacaccgataagagagccttcgtcgagacctggcagtccttttaccggaagaagcttaaggaggtgtggaaacctgccgtgcggtctggcggatctggcggaggctccaccagccccaagaaaaagagaaaagtctaagctgccttctgcggggcttgccttctggccatgcccttcttctctcccttgcacctgtacctcttggtctttgaataaagcctgagtaggaaggctagcaaaaaaaaaaaaaaaaaaaaaaaaaaaaaaaaaaaaaaaaaaaaaaaaaaaaaaaaaaaaaaaaaaaaaaaaaaaaaaaagcccagccggctccccaacctctaccgaggagggcacctctgagtccgccacccccgagagcggccctggcacctccaccgagcccagcgagggcagcgcacccggcagccctgccggcagccccacctccacagaggagggaaccagcaccgagcccagcgaaggcagcgccccaggcaccagcaccgagcctagtgagcaggagattaaacggatcaacaagatcagaagaagacttgtgaaagacagcaacaccaagaaggccggcaagacaggccccatgaaaaccctgctggttagagtgatgacacccgatctgagagagcggctggaaaacctgagaaagaagcctgaaaatatcccccagcccatcagcaatacatctagagccaacctgaataagctgctgaccgattacaccgaaatgaagaaggcgatcctgcatgtgtactgggaagagttccagaaggaccctgtgggcctgatgagccgggtggcccagcctgccagcaagaagatcgatcagaacaagctgaaacctgagatggacgagaagggcaacctgaccaccgccggctttgcctgctctcagtgtggccagcccctgttcgtgtacaagctggagcaggtgtctgagaagggcaaggcttacaccaactacttcggacggtgcaatgtggccgagcacgaaaagctgatcctgctggcccagctgaagcccgagaaggatagcgacgaagccgtgacatatagcctgggaaagtttgggcagagggccctggatttctacagcattcatgtgaccaaggagtccacccaccccgtgaagcccctggcccagatcgccggaaacagatacgcctccggacctgtgggaaaggccctgagcgacgcatgtatgggcacaatcgcctccttcctgtctaagtaccaggacatcatcatcgaacaccagaaggtggtgaagggcaaccagaagagactggagagcctgcgggagctggccggcaaggaaaacctggaataccctagcgtgaccctgccacctcagcctcacaccaaggagggcgttgatgcctacaacgaagtgatcgcccgggtgcgaatgtgggtgaacctgaacctgtggcagaagctgaagctaagcagagatgatgccaagcctctgctgagactgaagggattcccttcctttcctctggtcgagagacaggccaacgaagtggactggtgggacatggtgtgtaacgtgaagaagctgatcaacgagaaaaaggaggatggcaaggtgttttggcagaatctggctggctacaagagacaggaagccctgagaccatacctgagcagcgaggaagatcggaagaagggaaagaaattcgctcggtaccagctgggcgacctgctgctgcacctggaaaagaagcacggcgaggactggggaaaggtgtacgacgaggcctgggagcggattgacaagaaagtggaaggcctgagcaagcacatcaagctggaagaggaacggagaagcgaggacgcccagagcaaggccgccctgaccgactggctgcgggctaaggccagcttcgtgatcgagggcctgaaggaggccgacaaggacgagttctgcagatgcgagctgaagctgcagaagtggtacggggacctgcggggaaagcccttcgccatcgaagccgagaacagcatcctggacatcagcggcttcagcaagcagtacaactgtgccttcatctggcagaaggacggcgtgaagaagctgaacctgtacctgatcatcaactacttcaagggcggcaagctgcggttcaagaagatcaaacctgaagccttcgaagccaacagattctacaccgtgatcaacaaaaagagcggcgagatcgtgcccatggaggtgaacttcaacttcgacgaccccaacctgatcatcctgcctctggcctttggcaagagacagggcagagaattcatctggaacgacctgctgtccctggaaaccggcagcctgaagctggccaacggaagagtgatcgagaagacactgtacaacagaagaacccggcaggatgagcctgccctgttcgtggccctgaccttcgagcggcgggaggtcctggactcctccaatatcaaaccaatgaacctgatcggcgtggcaagaggcgaaaacatccccgccgtgatcgccctgaccgaccccgagggctgcccactgagccggtttaaggatagcctgggaaacccaacccacatcctgagaatcggcgagagctataaggagaagcagcggaccatccaggccaagaaggaggtggagcagcggagagccggcggctacagccggaagtacgccagcaaagccaagaatctggcagacgatatggtgagaaacaccgctagagatctgctgtactacgccgtgacccaggatgccatgctgatcttcgccaacctgagccggggcttcggccggcagggcaagcggaccttcatggccgagagacagtacacacggatggaggactggctgaccgccaagctggcctacgagggcctgagcaagacctacctgtccaagacactggcccagtacacctccaagacatgcagcaactgtgggtttaccatcaccagcgccgactacgacagggtgctggagaagctgaagaagacagcaacaggctggatgaccacaattaacggcaaggagctgaaggtggagggccagattacctactacaacagatacaagagacagaacgtagtcaaggacctgtccgtcgagctggatagactgagcgaagaatctgtgaacaacgacatctcctcctggacaaagggcagaagcggagaagctctgagcctcctgaagaaaagattctcccatagacccgtgcaggagaagttcgtgtgcctgaactgcggcttcgagacacacgcagccgagcaagccgccctgaacatcgccagatcctggctgttcctgcggagccaggagtacaagaaataccagacaaacaagacaaccggcaacaccgataagagagccttcgtcgagacctggcagtccttttaccggaagaagcttaaggaggtgtggaaacctgccgtgcggtctggcggatctggcggaggctccaccagccccaagaaaaagagaaaagtctaagctgccttctgcggggcttgccttctggccatgcccttcttctctcccttgcacctgtacctcttggtctttgaataaagcctgagtaggaaggctagcaaaaaaaaaaaaaaaaaaaaaaaaaaaaaaaaaaaaaaaaaaaaaaaaaaaaaaaaaaaaaaaaaaaaaaaaaaaaaaaa

SEQ ID NO: 9531 - RNA, 8787 nt, synthetic construct
  source 1..8787: mol_type = other RNA
aggaaataagagagaaaagaagagtaagaagaaatataagagccaccatggcccctaagaagaagcgtaaagtgagccggatgaaccacgaccaggagttcgacccccctaaggtgtaccctcccgtccccgccgagaagagaaagcccatccgggtcctgagcctgttcgatggcatcgccaccggtctgctggtgctgaaggacctgggcatccaggtggataggtacattgcctccgaggtgtgcgaggactccatcaccgtgggaatggtgcgtcatcagggcaagatcatgtacgtgggcgacgtgcggagcgtgacacagaagcatatccaggagtggggccctttcgacctggtgatcggcggcagcccttgcaatgacctgagcatcgtgaacccagcccggaagggcctgtacgagggaaccggcagactgttcttcgagttttacagactgctgcacgacgcccggcctaaggaaggcgacgaccggcccttcttttggctgttcgagaatgtggtggccatgggagtcagcgacaagcgggatattagccggttcctggagagcaaccccgtgatgatcgatgccaaggaagtgagcgccgcccaccgggccagatacttctggggcaatctgcctggcatgaacagacccctggccagcaccgtgaacgacaagctggagctgcaggagtgcctggagcacggccggatcgccaagttcagcaaggtgagaaccatcaccacccgaagcaacagcatcaaacaaggcaaggaccagcactttcctgtgttcatgaacgagaaggaggacatcctgtggtgtaccgagatggagagagtgttcgggttcccagtccactacacagatgtcagcaacatgtctagactggccagacagagactgctgggaagaagctggtccgtccctgtgatcagacacctgttcgcccctctgaaggagtacttcgcctgcgtgagcagcggcaacagcaacgccaacagccggggccccagcttctctagcggcctggtgccactgtccctgagagggagccacatgggccccatggagatctacaaaaccgtgagcgcctggaagcggcagcctgtgcgcgtgctgagcctgtttcggaatatcgataaagtcctgaaaagcctgggattcctggagagcggctctggctccggcggtggcaccctgaagtacgtggaggatgtgacaaacgtggtcagacgggatgtggagaagtggggccccttcgatctggtgtacggcagcacccaacccctgggcagctcttgtgaccggtgccctggctggtacatgtttcagttccaccggatcctgcagtacgccctgccgagacaggagtcccagcggccattcttttggattttcatggacaacttgctgctgaccgaggatgaccaggaaactaccactcggttcctgcagaccgaagccgtgaccctgcaggacgtgagaggccgggactaccagaacgccatgcgggtgtggtccaacatccctggactgaaaagcaagcacgcacctctgacccctaaagaagaggagtacctgcaggcccaggtgcggagcagaagcaagctggacgcccctaaggtggatctgctggtgaagaattgcctcctgcccctgagagagtacttcaagtatttcagccagaatagtctgcccctgggaggcagcggcggcggcatggcccacgccctggtgaccttcagggacgtggccatcgacttcagccagaaggagtgggagtgcctggacaccacccagaggaagctgtacagggacgtgatgctggagaactacaacaacctggtgagcctgggctacagcggcagcaagcccgacgtgatcaccctgctggagcagggcaaggagccctgcatggccgccagggacgtgaccggcaggcagtaccccggcctgctgagcggcggcccaagcagcggcgcccctcctcccagcggcggcaggcggcccaagcagcggcgcccctcctcccagcggcggcagcccagccggctccccaacctctaccgaggagggcacctctgagtccgccacccccgagagcggccctggcacctccaccgagcccagcgagggcagcgcacccggcagccctgccggcagccccacctccacagaggagggaaccagcaccgagcccagcgaaggcagcgccccaggcaccagcaccgagcctagtgagcaggagattaaacggatcaacaagatcagaagaagacttgtgaaagacagcaacaccaagaaggccggcaagacaggccccatgaaaaccctgctggttagagtgatgacacccgatctgagagagcggctggaaaacctgagaaagaagcctgaaaatatcccccagcccatcagcaatacatctagagccaacctgaataagctgctgaccgattacaccgaaatgaagaaggcgatcctgcatgtgtactgggaagagttccagaaggaccctgtgggcctgatgagccgggtggcccagcctgccagcaagaagatcgatcagaacaagctgaaacctgagatggacgagaagggcaacctgaccaccgccggctttgcctgctctcagtgtggccagcccctgttcgtgtacaagctggagcaggtgtctgagaagggcaaggcttacaccaactacttcggacggtgcaatgtggccgagcacgaaaagctgatcctgctggcccagctgaagcccgagaaggatagcgacgaagccgtgacatatagcctgggaaagtttgggcagagggccctggatttctacagcattcatgtgaccaaggagtccacccaccccgtgaagcccctggcccagatcgccggaaacagatacgcctccggacctgtgggaaaggccctgagcgacgcatgtatgggcacaatcgcctccttcctgtctaagtaccaggacatcatcatcgaacaccagaaggtggtgaagggcaaccagaagagactggagagcctgcgggagctggccggcaaggaaaacctggaataccctagcgtgaccctgccacctcagcctcacaccaaggagggcgttgatgcctacaacgaagtgatcgcccgggtgcgaatgtgggtgaacctgaacctgtggcagaagctgaagctaagcagagatgatgccaagcctctgctgagactgaagggattcccttcctttcctctggtcgagagacaggccaacgaagtggactggtgggacatggtgtgtaacgtgaagaagctgatcaacgagaaaaaggaggatggcaaggtgttttggcagaatctggctggctacaagagacaggaagccctgagaccatacctgagcagcgaggaagatcggaagaagggaaagaaattcgctcggtaccagctgggcgacctgctgctgcacctggaaaagaagcacggcgaggactggggaaaggtgtacgacgaggcctgggagcggattgacaagaaagtggaaggcctgagcaagcacatcaagctggaagaggaacggagaagcgaggacgcccagagcaaggccgccctgaccgactggctgcgggctaaggccagcttcgtgatcgagggcctgaaggaggccgacaaggacgagttctgcagatgcgagctgaagctgcagaagtggtacggggacctgcggggaaagcccttcgccatcgaagccgagaacagcatcctggacatcagcggcttcagcaagcagtacaactgtgccttcatctggcagaaggacggcgtgaagaagctgaacctgtacctgatcatcaactacttcaagggcggcaagctgcggttcaagaagatcaaacctgaagccttcgaagccaacagattctacaccgtgatcaacaaaaagagcggcgagatcgtgcccatggaggtgaacttcaacttcgacgaccccaacctgatcatcctgcctctggcctttggcaagagacagggcagagaattcatctggaacgacctgctgtccctggaaaccggcagcctgaagctggccaacggaagagtgatcgagaagacactgtacaacagaagaacccggcaggatgagcctgccctgttcgtggccctgaccttcgagcggcgggaggtcctggactcctccaatatcaaaccaatgaacctgatcggcgtggcaagaggcgaaaacatccccgccgtgatcgccctgaccgaccccgagggctgcccactgagccggtttaaggatagcctgggaaacccaacccacatcctgagaatcggcgagagctataaggagaagcagcggaccatccaggccaagaaggaggtggagcagcggagagccggcggctacagccggaagtacgccagcaaagccaagaatctggcagacgatatggtgagaaacaccgctagagatctgctgtactacgccgtgacccaggatgccatgctgatcttcgccaacctgagccggggcttcggccggcagggcaagcggaccttcatggccgagagacagtacacacggatggaggactggctgaccgccaagctggcctacgagggcctgagcaagacctacctgtccaagacactggcccagtacacctccaagacatgcagcaactgtgggtttaccatcaccagcgccgactacgacagggtgctggagaagctgaagaagacagcaacaggctggatgaccacaattaacggcaaggagctgaaggtggagggccagattacctactacaacagatacaagagacagaacgtagtcaaggacctgtccgtcgagctggatagactgagcgaagaatctgtgaacaacgacatctcctcctggacaaagggcagaagcggagaagctctgagcctcctgaagaaaagattctcccatagacccgtgcaggagaagttcgtgtgcctgaactgcggcttcgagacacacgcagccgagcaagccgccctgaacatcgccagatcctggctgttcctgcggagccaggagtacaagaaataccagacaaacaagacaaccggcaacaccgataagagagccttcgtcgagacctggcagtccttttaccggaagaagcttaaggaggtgtggaaacctgccgtgcggtctggcggatctggcggaggctccaccagccccaagaaaaagagaaaagtctaagctgccttctgcggggcttgccttctggccatgcccttcttctctcccttgcacctgtacctcttggtctttgaataaagcctgagtaggaaggctagcaaaaaaaaaaaaaaaaaaaaaaaaaaaaaaaaaaaaaaaaaaaaaaaaaaaaaaaaaaaaaaaaaaaaaaaaaaaaaaaagcccagccggctccccaacctctaccgaggagggcacctctgagtccgccacccccgagagcggccctggcacctccaccgagcccagcgagggcagcgcacccggcagccctgccggcagccccacctccacagaggagggaaccagcaccgagcccagcgaaggcagcgccccaggcaccagcaccgagcctagtgagcaggagattaaacggatcaacaagatcagaagaagacttgtgaaagacagcaacaccaagaaggccggcaagacaggccccatgaaaaccctgctggttagagtgatgacacccgatctgagagagcggctggaaaacctgagaaagaagcctgaaaatatcccccagcccatcagcaatacatctagagccaacctgaataagctgctgaccgattacaccgaaatgaagaaggcgatcctgcatgtgtactgggaagagttccagaaggaccctgtgggcctgatgagccgggtggcccagcctgccagcaagaagatcgatcagaacaagctgaaacctgagatggacgagaagggcaacctgaccaccgccggctttgcctgctctcagtgtggccagcccctgttcgtgtacaagctggagcaggtgtctgagaagggcaaggcttacaccaactacttcggacggtgcaatgtggccgagcacgaaaagctgatcctgctggcccagctgaagcccgagaaggatagcgacgaagccgtgacatatagcctgggaaagtttgggcagagggccctggatttctacagcattcatgtgaccaaggagtccacccaccccgtgaagcccctggcccagatcgccggaaacagatacgcctccggacctgtgggaaaggccctgagcgacgcatgtatgggcacaatcgcctccttcctgtctaagtaccaggacatcatcatcgaacaccagaaggtggtgaagggcaaccagaagagactggagagcctgcgggagctggccggcaaggaaaacctggaataccctagcgtgaccctgccacctcagcctcacaccaaggagggcgttgatgcctacaacgaagtgatcgcccgggtgcgaatgtgggtgaacctgaacctgtggcagaagctgaagctaagcagagatgatgccaagcctctgctgagactgaagggattcccttcctttcctctggtcgagagacaggccaacgaagtggactggtgggacatggtgtgtaacgtgaagaagctgatcaacgagaaaaaggaggatggcaaggtgttttggcagaatctggctggctacaagagacaggaagccctgagaccatacctgagcagcgaggaagatcggaagaagggaaagaaattcgctcggtaccagctgggcgacctgctgctgcacctggaaaagaagcacggcgaggactggggaaaggtgtacgacgaggcctgggagcggattgacaagaaagtggaaggcctgagcaagcacatcaagctggaagaggaacggagaagcgaggacgcccagagcaaggccgccctgaccgactggctgcgggctaaggccagcttcgtgatcgagggcctgaaggaggccgacaaggacgagttctgcagatgcgagctgaagctgcagaagtggtacggggacctgcggggaaagcccttcgccatcgaagccgagaacagcatcctggacatcagcggcttcagcaagcagtacaactgtgccttcatctggcagaaggacggcgtgaagaagctgaacctgtacctgatcatcaactacttcaagggcggcaagctgcggttcaagaagatcaaacctgaagccttcgaagccaacagattctacaccgtgatcaacaaaaagagcggcgagatcgtgcccatggaggtgaacttcaacttcgacgaccccaacctgatcatcctgcctctggcctttggcaagagacagggcagagaattcatctggaacgacctgctgtccctggaaaccggcagcctgaagctggccaacggaagagtgatcgagaagacactgtacaacagaagaacccggcaggatgagcctgccctgttcgtggccctgaccttcgagcggcgggaggtcctggactcctccaatatcaaaccaatgaacctgatcggcgtggcaagaggcgaaaacatccccgccgtgatcgccctgaccgaccccgagggctgcccactgagccggtttaaggatagcctgggaaacccaacccacatcctgagaatcggcgagagctataaggagaagcagcggaccatccaggccaagaaggaggtggagcagcggagagccggcggctacagccggaagtacgccagcaaagccaagaatctggcagacgatatggtgagaaacaccgctagagatctgctgtactacgccgtgacccaggatgccatgctgatcttcgccaacctgagccggggcttcggccggcagggcaagcggaccttcatggccgagagacagtacacacggatggaggactggctgaccgccaagctggcctacgagggcctgagcaagacctacctgtccaagacactggcccagtacacctccaagacatgcagcaactgtgggtttaccatcaccagcgccgactacgacagggtgctggagaagctgaagaagacagcaacaggctggatgaccacaattaacggcaaggagctgaaggtggagggccagattacctactacaacagatacaagagacagaacgtagtcaaggacctgtccgtcgagctggatagactgagcgaagaatctgtgaacaacgacatctcctcctggacaaagggcagaagcggagaagctctgagcctcctgaagaaaagattctcccatagacccgtgcaggagaagttcgtgtgcctgaactgcggcttcgagacacacgcagccgagcaagccgccctgaacatcgccagatcctggctgttcctgcggagccaggagtacaagaaataccagacaaacaagacaaccggcaacaccgataagagagccttcgtcgagacctggcagtccttttaccggaagaagcttaaggaggtgtggaaacctgccgtgcggtctggcggatctggcggaggctccaccagccccaagaaaaagagaaaagtctaagctgccttctgcggggcttgccttctggccatgcccttcttctctcccttgcacctgtacctcttggtctttgaataaagcctgagtaggaaggctagcaaaaaaaaaaaaaaaaaaaaaaaaaaaaaaaaaaaaaaaaaaaaaaaaaaaaaaaaaaaaaaaaaaaaaaaaaaaaaaaa

SEQ ID NO: 9532 - RNA, 8787 nt, synthetic construct
  source 1..8787: mol_type = other RNA
aggaaataagagagaaaagaagagtaagaagaaatataagagccaccatggcccctaagaagaagcgtaaagtgagccggatgaaccacgaccaggagttcgacccccctaaggtgtaccctcccgtccccgccgagaagagaaagcccatccgggtcctgagcctgttcgatggcatcgccaccggtctgctggtgctgaaggacctgggcatccaggtggataggtacattgcctccgaggtgtgcgaggactccatcaccgtgggaatggtgcgtcatcagggcaagatcatgtacgtgggcgacgtgcggagcgtgacacagaagcatatccaggagtggggccctttcgacctggtgatcggcggcagcccttgcaatgacctgagcatcgtgaacccagcccggaagggcctgtacgagggaaccggcagactgttcttcgagttttacagactgctgcacgacgcccggcctaaggaaggcgacgaccggcccttcttttggctgttcgagaatgtggtggccatgggagtcagcgacaagcgggatattagccggttcctggagagcaaccccgtgatgatcgatgccaaggaagtgagcgccgcccaccgggccagatacttctggggcaatctgcctggcatgaacagacccctggccagcaccgtgaacgacaagctggagctgcaggagtgcctggagcacggccggatcgccaagttcagcaaggtgagaaccatcaccacccgaagcaacagcatcaaacaaggcaaggaccagcactttcctgtgttcatgaacgagaaggaggacatcctgtggtgtaccgagatggagagagtgttcgggttcccagtccactacacagatgtcagcaacatgtctagactggccagacagagactgctgggaagaagctggtccgtccctgtgatcagacacctgttcgcccctctgaaggagtacttcgcctgcgtgagcagcggcaacagcaacgccaacagccggggccccagcttctctagcggcctggtgccactgtccctgagagggagccacatgggccccatggagatctacaaaaccgtgagcgcctggaagcggcagcctgtgcgcgtgctgagcctgtttcggaatatcgataaagtcctgaaaagcctgggattcctggagagcggctctggctccggcggtggcaccctgaagtacgtggaggatgtgacaaacgtggtcagacgggatgtggagaagtggggccccttcgatctggtgtacggcagcacccaacccctgggcagctcttgtgaccggtgccctggctggtacatgtttcagttccaccggatcctgcagtacgccctgccgagacaggagtcccagcggccattcttttggattttcatggacaacttgctgctgaccgaggatgaccaggaaactaccactcggttcctgcagaccgaagccgtgaccctgcaggacgtgagaggccgggactaccagaacgccatgcgggtgtggtccaacatccctggactgaaaagcaagcacgcacctctgacccctaaagaagaggagtacctgcaggcccaggtgcggagcagaagcaagctggacgcccctaaggtggatctgctggtgaagaattgcctcctgcccctgagagagtacttcaagtatttcagccagaatagtctgcccctgggaggcagcggcggcggcatgcccgtgaccttcgaggacgtggccgtgtacttcacccagggccagggcgccctgctggaccccacccagagggccctgtacagggacgtgatgcaggagaactacgagaccgtgaccagcctgggcaagagcgtgaagggcttccccctggccaagcccgacctgatcaccaggctggagaggggcgaggagccctgggtgagcgacctgcaggccaccggcgacgagaggatgagcgagggcggcccaagcagcggcgcccctcctcccagcggcggcaggcggcccaagcagcggcgcccctcctcccagcggcggcagcccagccggctccccaacctctaccgaggagggcacctctgagtccgccacccccgagagcggccctggcacctccaccgagcccagcgagggcagcgcacccggcagccctgccggcagccccacctccacagaggagggaaccagcaccgagcccagcgaaggcagcgccccaggcaccagcaccgagcctagtgagcaggagattaaacggatcaacaagatcagaagaagacttgtgaaagacagcaacaccaagaaggccggcaagacaggccccatgaaaaccctgctggttagagtgatgacacccgatctgagagagcggctggaaaacctgagaaagaagcctgaaaatatcccccagcccatcagcaatacatctagagccaacctgaataagctgctgaccgattacaccgaaatgaagaaggcgatcctgcatgtgtactgggaagagttccagaaggaccctgtgggcctgatgagccgggtggcccagcctgccagcaagaagatcgatcagaacaagctgaaacctgagatggacgagaagggcaacctgaccaccgccggctttgcctgctctcagtgtggccagcccctgttcgtgtacaagctggagcaggtgtctgagaagggcaaggcttacaccaactacttcggacggtgcaatgtggccgagcacgaaaagctgatcctgctggcccagctgaagcccgagaaggatagcgacgaagccgtgacatatagcctgggaaagtttgggcagagggccctggatttctacagcattcatgtgaccaaggagtccacccaccccgtgaagcccctggcccagatcgccggaaacagatacgcctccggacctgtgggaaaggccctgagcgacgcatgtatgggcacaatcgcctccttcctgtctaagtaccaggacatcatcatcgaacaccagaaggtggtgaagggcaaccagaagagactggagagcctgcgggagctggccggcaaggaaaacctggaataccctagcgtgaccctgccacctcagcctcacaccaaggagggcgttgatgcctacaacgaagtgatcgcccgggtgcgaatgtgggtgaacctgaacctgtggcagaagctgaagctaagcagagatgatgccaagcctctgctgagactgaagggattcccttcctttcctctggtcgagagacaggccaacgaagtggactggtgggacatggtgtgtaacgtgaagaagctgatcaacgagaaaaaggaggatggcaaggtgttttggcagaatctggctggctacaagagacaggaagccctgagaccatacctgagcagcgaggaagatcggaagaagggaaagaaattcgctcggtaccagctgggcgacctgctgctgcacctggaaaagaagcacggcgaggactggggaaaggtgtacgacgaggcctgggagcggattgacaagaaagtggaaggcctgagcaagcacatcaagctggaagaggaacggagaagcgaggacgcccagagcaaggccgccctgaccgactggctgcgggctaaggccagcttcgtgatcgagggcctgaaggaggccgacaaggacgagttctgcagatgcgagctgaagctgcagaagtggtacggggacctgcggggaaagcccttcgccatcgaagccgagaacagcatcctggacatcagcggcttcagcaagcagtacaactgtgccttcatctggcagaaggacggcgtgaagaagctgaacctgtacctgatcatcaactacttcaagggcggcaagctgcggttcaagaagatcaaacctgaagccttcgaagccaacagattctacaccgtgatcaacaaaaagagcggcgagatcgtgcccatggaggtgaacttcaacttcgacgaccccaacctgatcatcctgcctctggcctttggcaagagacagggcagagaattcatctggaacgacctgctgtccctggaaaccggcagcctgaagctggccaacggaagagtgatcgagaagacactgtacaacagaagaacccggcaggatgagcctgccctgttcgtggccctgaccttcgagcggcgggaggtcctggactcctccaatatcaaaccaatgaacctgatcggcgtggcaagaggcgaaaacatccccgccgtgatcgccctgaccgaccccgagggctgcccactgagccggtttaaggatagcctgggaaacccaacccacatcctgagaatcggcgagagctataaggagaagcagcggaccatccaggccaagaaggaggtggagcagcggagagccggcggctacagccggaagtacgccagcaaagccaagaatctggcagacgatatggtgagaaacaccgctagagatctgctgtactacgccgtgacccaggatgccatgctgatcttcgccaacctgagccggggcttcggccggcagggcaagcggaccttcatggccgagagacagtacacacggatggaggactggctgaccgccaagctggcctacgagggcctgagcaagacctacctgtccaagacactggcccagtacacctccaagacatgcagcaactgtgggtttaccatcaccagcgccgactacgacagggtgctggagaagctgaagaagacagcaacaggctggatgaccacaattaacggcaaggagctgaaggtggagggccagattacctactacaacagatacaagagacagaacgtagtcaaggacctgtccgtcgagctggatagactgagcgaagaatctgtgaacaacgacatctcctcctggacaaagggcagaagcggagaagctctgagcctcctgaagaaaagattctcccatagacccgtgcaggagaagttcgtgtgcctgaactgcggcttcgagacacacgcagccgagcaagccgccctgaacatcgccagatcctggctgttcctgcggagccaggagtacaagaaataccagacaaacaagacaaccggcaacaccgataagagagccttcgtcgagacctggcagtccttttaccggaagaagcttaaggaggtgtggaaacctgccgtgcggtctggcggatctggcggaggctccaccagccccaagaaaaagagaaaagtctaagctgccttctgcggggcttgccttctggccatgcccttcttctctcccttgcacctgtacctcttggtctttgaataaagcctgagtaggaaggctagcaaaaaaaaaaaaaaaaaaaaaaaaaaaaaaaaaaaaaaaaaaaaaaaaaaaaaaaaaaaaaaaaaaaaaaaaaaaaaaaagcccagccggctccccaacctctaccgaggagggcacctctgagtccgccacccccgagagcggccctggcacctccaccgagcccagcgagggcagcgcacccggcagccctgccggcagccccacctccacagaggagggaaccagcaccgagcccagcgaaggcagcgccccaggcaccagcaccgagcctagtgagcaggagattaaacggatcaacaagatcagaagaagacttgtgaaagacagcaacaccaagaaggccggcaagacaggccccatgaaaaccctgctggttagagtgatgacacccgatctgagagagcggctggaaaacctgagaaagaagcctgaaaatatcccccagcccatcagcaatacatctagagccaacctgaataagctgctgaccgattacaccgaaatgaagaaggcgatcctgcatgtgtactgggaagagttccagaaggaccctgtgggcctgatgagccgggtggcccagcctgccagcaagaagatcgatcagaacaagctgaaacctgagatggacgagaagggcaacctgaccaccgccggctttgcctgctctcagtgtggccagcccctgttcgtgtacaagctggagcaggtgtctgagaagggcaaggcttacaccaactacttcggacggtgcaatgtggccgagcacgaaaagctgatcctgctggcccagctgaagcccgagaaggatagcgacgaagccgtgacatatagcctgggaaagtttgggcagagggccctggatttctacagcattcatgtgaccaaggagtccacccaccccgtgaagcccctggcccagatcgccggaaacagatacgcctccggacctgtgggaaaggccctgagcgacgcatgtatgggcacaatcgcctccttcctgtctaagtaccaggacatcatcatcgaacaccagaaggtggtgaagggcaaccagaagagactggagagcctgcgggagctggccggcaaggaaaacctggaataccctagcgtgaccctgccacctcagcctcacaccaaggagggcgttgatgcctacaacgaagtgatcgcccgggtgcgaatgtgggtgaacctgaacctgtggcagaagctgaagctaagcagagatgatgccaagcctctgctgagactgaagggattcccttcctttcctctggtcgagagacaggccaacgaagtggactggtgggacatggtgtgtaacgtgaagaagctgatcaacgagaaaaaggaggatggcaaggtgttttggcagaatctggctggctacaagagacaggaagccctgagaccatacctgagcagcgaggaagatcggaagaagggaaagaaattcgctcggtaccagctgggcgacctgctgctgcacctggaaaagaagcacggcgaggactggggaaaggtgtacgacgaggcctgggagcggattgacaagaaagtggaaggcctgagcaagcacatcaagctggaagaggaacggagaagcgaggacgcccagagcaaggccgccctgaccgactggctgcgggctaaggccagcttcgtgatcgagggcctgaaggaggccgacaaggacgagttctgcagatgcgagctgaagctgcagaagtggtacggggacctgcggggaaagcccttcgccatcgaagccgagaacagcatcctggacatcagcggcttcagcaagcagtacaactgtgccttcatctggcagaaggacggcgtgaagaagctgaacctgtacctgatcatcaactacttcaagggcggcaagctgcggttcaagaagatcaaacctgaagccttcgaagccaacagattctacaccgtgatcaacaaaaagagcggcgagatcgtgcccatggaggtgaacttcaacttcgacgaccccaacctgatcatcctgcctctggcctttggcaagagacagggcagagaattcatctggaacgacctgctgtccctggaaaccggcagcctgaagctggccaacggaagagtgatcgagaagacactgtacaacagaagaacccggcaggatgagcctgccctgttcgtggccctgaccttcgagcggcgggaggtcctggactcctccaatatcaaaccaatgaacctgatcggcgtggcaagaggcgaaaacatccccgccgtgatcgccctgaccgaccccgagggctgcccactgagccggtttaaggatagcctgggaaacccaacccacatcctgagaatcggcgagagctataaggagaagcagcggaccatccaggccaagaaggaggtggagcagcggagagccggcggctacagccggaagtacgccagcaaagccaagaatctggcagacgatatggtgagaaacaccgctagagatctgctgtactacgccgtgacccaggatgccatgctgatcttcgccaacctgagccggggcttcggccggcagggcaagcggaccttcatggccgagagacagtacacacggatggaggactggctgaccgccaagctggcctacgagggcctgagcaagacctacctgtccaagacactggcccagtacacctccaagacatgcagcaactgtgggtttaccatcaccagcgccgactacgacagggtgctggagaagctgaagaagacagcaacaggctggatgaccacaattaacggcaaggagctgaaggtggagggccagattacctactacaacagatacaagagacagaacgtagtcaaggacctgtccgtcgagctggatagactgagcgaagaatctgtgaacaacgacatctcctcctggacaaagggcagaagcggagaagctctgagcctcctgaagaaaagattctcccatagacccgtgcaggagaagttcgtgtgcctgaactgcggcttcgagacacacgcagccgagcaagccgccctgaacatcgccagatcctggctgttcctgcggagccaggagtacaagaaataccagacaaacaagacaaccggcaacaccgataagagagccttcgtcgagacctggcagtccttttaccggaagaagcttaaggaggtgtggaaacctgccgtgcggtctggcggatctggcggaggctccaccagccccaagaaaaagagaaaagtctaagctgccttctgcggggcttgccttctggccatgcccttcttctctcccttgcacctgtacctcttggtctttgaataaagcctgagtaggaaggctagcaaaaaaaaaaaaaaaaaaaaaaaaaaaaaaaaaaaaaaaaaaaaaaaaaaaaaaaaaaaaaaaaaaaaaaaaaaaaaaaa

SEQ ID NO: 9533 - RNA, 8787 nt, synthetic construct
  source 1..8787: mol_type = other RNA
aggaaataagagagaaaagaagagtaagaagaaatataagagccaccatggcccctaagaagaagcgtaaagtgagccggatgaaccacgaccaggagttcgacccccctaaggtgtaccctcccgtccccgccgagaagagaaagcccatccgggtcctgagcctgttcgatggcatcgccaccggtctgctggtgctgaaggacctgggcatccaggtggataggtacattgcctccgaggtgtgcgaggactccatcaccgtgggaatggtgcgtcatcagggcaagatcatgtacgtgggcgacgtgcggagcgtgacacagaagcatatccaggagtggggccctttcgacctggtgatcggcggcagcccttgcaatgacctgagcatcgtgaacccagcccggaagggcctgtacgagggaaccggcagactgttcttcgagttttacagactgctgcacgacgcccggcctaaggaaggcgacgaccggcccttcttttggctgttcgagaatgtggtggccatgggagtcagcgacaagcgggatattagccggttcctggagagcaaccccgtgatgatcgatgccaaggaagtgagcgccgcccaccgggccagatacttctggggcaatctgcctggcatgaacagacccctggccagcaccgtgaacgacaagctggagctgcaggagtgcctggagcacggccggatcgccaagttcagcaaggtgagaaccatcaccacccgaagcaacagcatcaaacaaggcaaggaccagcactttcctgtgttcatgaacgagaaggaggacatcctgtggtgtaccgagatggagagagtgttcgggttcccagtccactacacagatgtcagcaacatgtctagactggccagacagagactgctgggaagaagctggtccgtccctgtgatcagacacctgttcgcccctctgaaggagtacttcgcctgcgtgagcagcggcaacagcaacgccaacagccggggccccagcttctctagcggcctggtgccactgtccctgagagggagccacatgggccccatggagatctacaaaaccgtgagcgcctggaagcggcagcctgtgcgcgtgctgagcctgtttcggaatatcgataaagtcctgaaaagcctgggattcctggagagcggctctggctccggcggtggcaccctgaagtacgtggaggatgtgacaaacgtggtcagacgggatgtggagaagtggggccccttcgatctggtgtacggcagcacccaacccctgggcagctcttgtgaccggtgccctggctggtacatgtttcagttccaccggatcctgcagtacgccctgccgagacaggagtcccagcggccattcttttggattttcatggacaacttgctgctgaccgaggatgaccaggaaactaccactcggttcctgcagaccgaagccgtgaccctgcaggacgtgagaggccgggactaccagaacgccatgcgggtgtggtccaacatccctggactgaaaagcaagcacgcacctctgacccctaaagaagaggagtacctgcaggcccaggtgcggagcagaagcaagctggacgcccctaaggtggatctgctggtgaagaattgcctcctgcccctgagagagtacttcaagtatttcagccagaatagtctgcccctgggaggcagcggcggcggcggcaagatgagcgtgaccttcgaggacgtggccctgtacttcagccccgaggagtgggccaagctgagcggctgccagaggcagctgtacagggaggtgatgctggagaactaccagatggtggccagcctgggctgggccaacatcaagcccgagatcatctgcaagatggagagggaggagaccctgtgcgtgcccgccccccccagggagtggcagagggaccagagccccgtgcccgccggcggcccaagcagcggcgcccctcctcccagcggcggcaggcggcccaagcagcggcgcccctcctcccagcggcggcagcccagccggctccccaacctctaccgaggagggcacctctgagtccgccacccccgagagcggccctggcacctccaccgagcccagcgagggcagcgcacccggcagccctgccggcagccccacctccacagaggagggaaccagcaccgagcccagcgaaggcagcgccccaggcaccagcaccgagcctagtgagcaggagattaaacggatcaacaagatcagaagaagacttgtgaaagacagcaacaccaagaaggccggcaagacaggccccatgaaaaccctgctggttagagtgatgacacccgatctgagagagcggctggaaaacctgagaaagaagcctgaaaatatcccccagcccatcagcaatacatctagagccaacctgaataagctgctgaccgattacaccgaaatgaagaaggcgatcctgcatgtgtactgggaagagttccagaaggaccctgtgggcctgatgagccgggtggcccagcctgccagcaagaagatcgatcagaacaagctgaaacctgagatggacgagaagggcaacctgaccaccgccggctttgcctgctctcagtgtggccagcccctgttcgtgtacaagctggagcaggtgtctgagaagggcaaggcttacaccaactacttcggacggtgcaatgtggccgagcacgaaaagctgatcctgctggcccagctgaagcccgagaaggatagcgacgaagccgtgacatatagcctgggaaagtttgggcagagggccctggatttctacagcattcatgtgaccaaggagtccacccaccccgtgaagcccctggcccagatcgccggaaacagatacgcctccggacctgtgggaaaggccctgagcgacgcatgtatgggcacaatcgcctccttcctgtctaagtaccaggacatcatcatcgaacaccagaaggtggtgaagggcaaccagaagagactggagagcctgcgggagctggccggcaaggaaaacctggaataccctagcgtgaccctgccacctcagcctcacaccaaggagggcgttgatgcctacaacgaagtgatcgcccgggtgcgaatgtgggtgaacctgaacctgtggcagaagctgaagctaagcagagatgatgccaagcctctgctgagactgaagggattcccttcctttcctctggtcgagagacaggccaacgaagtggactggtgggacatggtgtgtaacgtgaagaagctgatcaacgagaaaaaggaggatggcaaggtgttttggcagaatctggctggctacaagagacaggaagccctgagaccatacctgagcagcgaggaagatcggaagaagggaaagaaattcgctcggtaccagctgggcgacctgctgctgcacctggaaaagaagcacggcgaggactggggaaaggtgtacgacgaggcctgggagcggattgacaagaaagtggaaggcctgagcaagcacatcaagctggaagaggaacggagaagcgaggacgcccagagcaaggccgccctgaccgactggctgcgggctaaggccagcttcgtgatcgagggcctgaaggaggccgacaaggacgagttctgcagatgcgagctgaagctgcagaagtggtacggggacctgcggggaaagcccttcgccatcgaagccgagaacagcatcctggacatcagcggcttcagcaagcagtacaactgtgccttcatctggcagaaggacggcgtgaagaagctgaacctgtacctgatcatcaactacttcaagggcggcaagctgcggttcaagaagatcaaacctgaagccttcgaagccaacagattctacaccgtgatcaacaaaaagagcggcgagatcgtgcccatggaggtgaacttcaacttcgacgaccccaacctgatcatcctgcctctggcctttggcaagagacagggcagagaattcatctggaacgacctgctgtccctggaaaccggcagcctgaagctggccaacggaagagtgatcgagaagacactgtacaacagaagaacccggcaggatgagcctgccctgttcgtggccctgaccttcgagcggcgggaggtcctggactcctccaatatcaaaccaatgaacctgatcggcgtggcaagaggcgaaaacatccccgccgtgatcgccctgaccgaccccgagggctgcccactgagccggtttaaggatagcctgggaaacccaacccacatcctgagaatcggcgagagctataaggagaagcagcggaccatccaggccaagaaggaggtggagcagcggagagccggcggctacagccggaagtacgccagcaaagccaagaatctggcagacgatatggtgagaaacaccgctagagatctgctgtactacgccgtgacccaggatgccatgctgatcttcgccaacctgagccggggcttcggccggcagggcaagcggaccttcatggccgagagacagtacacacggatggaggactggctgaccgccaagctggcctacgagggcctgagcaagacctacctgtccaagacactggcccagtacacctccaagacatgcagcaactgtgggtttaccatcaccagcgccgactacgacagggtgctggagaagctgaagaagacagcaacaggctggatgaccacaattaacggcaaggagctgaaggtggagggccagattacctactacaacagatacaagagacagaacgtagtcaaggacctgtccgtcgagctggatagactgagcgaagaatctgtgaacaacgacatctcctcctggacaaagggcagaagcggagaagctctgagcctcctgaagaaaagattctcccatagacccgtgcaggagaagttcgtgtgcctgaactgcggcttcgagacacacgcagccgagcaagccgccctgaacatcgccagatcctggctgttcctgcggagccaggagtacaagaaataccagacaaacaagacaaccggcaacaccgataagagagccttcgtcgagacctggcagtccttttaccggaagaagcttaaggaggtgtggaaacctgccgtgcggtctggcggatctggcggaggctccaccagccccaagaaaaagagaaaagtctaagctgccttctgcggggcttgccttctggccatgcccttcttctctcccttgcacctgtacctcttggtctttgaataaagcctgagtaggaaggctagcaaaaaaaaaaaaaaaaaaaaaaaaaaaaaaaaaaaaaaaaaaaaaaaaaaaaaaaaaaaaaaaaaaaaaaaaaaaaaaaagcccagccggctccccaacctctaccgaggagggcacctctgagtccgccacccccgagagcggccctggcacctccaccgagcccagcgagggcagcgcacccggcagccctgccggcagccccacctccacagaggagggaaccagcaccgagcccagcgaaggcagcgccccaggcaccagcaccgagcctagtgagcaggagattaaacggatcaacaagatcagaagaagacttgtgaaagacagcaacaccaagaaggccggcaagacaggccccatgaaaaccctgctggttagagtgatgacacccgatctgagagagcggctggaaaacctgagaaagaagcctgaaaatatcccccagcccatcagcaatacatctagagccaacctgaataagctgctgaccgattacaccgaaatgaagaaggcgatcctgcatgtgtactgggaagagttccagaaggaccctgtgggcctgatgagccgggtggcccagcctgccagcaagaagatcgatcagaacaagctgaaacctgagatggacgagaagggcaacctgaccaccgccggctttgcctgctctcagtgtggccagcccctgttcgtgtacaagctggagcaggtgtctgagaagggcaaggcttacaccaactacttcggacggtgcaatgtggccgagcacgaaaagctgatcctgctggcccagctgaagcccgagaaggatagcgacgaagccgtgacatatagcctgggaaagtttgggcagagggccctggatttctacagcattcatgtgaccaaggagtccacccaccccgtgaagcccctggcccagatcgccggaaacagatacgcctccggacctgtgggaaaggccctgagcgacgcatgtatgggcacaatcgcctccttcctgtctaagtaccaggacatcatcatcgaacaccagaaggtggtgaagggcaaccagaagagactggagagcctgcgggagctggccggcaaggaaaacctggaataccctagcgtgaccctgccacctcagcctcacaccaaggagggcgttgatgcctacaacgaagtgatcgcccgggtgcgaatgtgggtgaacctgaacctgtggcagaagctgaagctaagcagagatgatgccaagcctctgctgagactgaagggattcccttcctttcctctggtcgagagacaggccaacgaagtggactggtgggacatggtgtgtaacgtgaagaagctgatcaacgagaaaaaggaggatggcaaggtgttttggcagaatctggctggctacaagagacaggaagccctgagaccatacctgagcagcgaggaagatcggaagaagggaaagaaattcgctcggtaccagctgggcgacctgctgctgcacctggaaaagaagcacggcgaggactggggaaaggtgtacgacgaggcctgggagcggattgacaagaaagtggaaggcctgagcaagcacatcaagctggaagaggaacggagaagcgaggacgcccagagcaaggccgccctgaccgactggctgcgggctaaggccagcttcgtgatcgagggcctgaaggaggccgacaaggacgagttctgcagatgcgagctgaagctgcagaagtggtacggggacctgcggggaaagcccttcgccatcgaagccgagaacagcatcctggacatcagcggcttcagcaagcagtacaactgtgccttcatctggcagaaggacggcgtgaagaagctgaacctgtacctgatcatcaactacttcaagggcggcaagctgcggttcaagaagatcaaacctgaagccttcgaagccaacagattctacaccgtgatcaacaaaaagagcggcgagatcgtgcccatggaggtgaacttcaacttcgacgaccccaacctgatcatcctgcctctggcctttggcaagagacagggcagagaattcatctggaacgacctgctgtccctggaaaccggcagcctgaagctggccaacggaagagtgatcgagaagacactgtacaacagaagaacccggcaggatgagcctgccctgttcgtggccctgaccttcgagcggcgggaggtcctggactcctccaatatcaaaccaatgaacctgatcggcgtggcaagaggcgaaaacatccccgccgtgatcgccctgaccgaccccgagggctgcccactgagccggtttaaggatagcctgggaaacccaacccacatcctgagaatcggcgagagctataaggagaagcagcggaccatccaggccaagaaggaggtggagcagcggagagccggcggctacagccggaagtacgccagcaaagccaagaatctggcagacgatatggtgagaaacaccgctagagatctgctgtactacgccgtgacccaggatgccatgctgatcttcgccaacctgagccggggcttcggccggcagggcaagcggaccttcatggccgagagacagtacacacggatggaggactggctgaccgccaagctggcctacgagggcctgagcaagacctacctgtccaagacactggcccagtacacctccaagacatgcagcaactgtgggtttaccatcaccagcgccgactacgacagggtgctggagaagctgaagaagacagcaacaggctggatgaccacaattaacggcaaggagctgaaggtggagggccagattacctactacaacagatacaagagacagaacgtagtcaaggacctgtccgtcgagctggatagactgagcgaagaatctgtgaacaacgacatctcctcctggacaaagggcagaagcggagaagctctgagcctcctgaagaaaagattctcccatagacccgtgcaggagaagttcgtgtgcctgaactgcggcttcgagacacacgcagccgagcaagccgccctgaacatcgccagatcctggctgttcctgcggagccaggagtacaagaaataccagacaaacaagacaaccggcaacaccgataagagagccttcgtcgagacctggcagtccttttaccggaagaagcttaaggaggtgtggaaacctgccgtgcggtctggcggatctggcggaggctccaccagccccaagaaaaagagaaaagtctaagctgccttctgcggggcttgccttctggccatgcccttcttctctcccttgcacctgtacctcttggtctttgaataaagcctgagtaggaaggctagcaaaaaaaaaaaaaaaaaaaaaaaaaaaaaaaaaaaaaaaaaaaaaaaaaaaaaaaaaaaaaaaaaaaaaaaaaaaaaaaa

SEQ ID NO: 9534 - RNA, 8787 nt, synthetic construct
  source 1..8787: mol_type = other RNA
aggaaataagagagaaaagaagagtaagaagaaatataagagccaccatggcccctaagaagaagcgtaaagtgagccggatgaaccacgaccaggagttcgacccccctaaggtgtaccctcccgtccccgccgagaagagaaagcccatccgggtcctgagcctgttcgatggcatcgccaccggtctgctggtgctgaaggacctgggcatccaggtggataggtacattgcctccgaggtgtgcgaggactccatcaccgtgggaatggtgcgtcatcagggcaagatcatgtacgtgggcgacgtgcggagcgtgacacagaagcatatccaggagtggggccctttcgacctggtgatcggcggcagcccttgcaatgacctgagcatcgtgaacccagcccggaagggcctgtacgagggaaccggcagactgttcttcgagttttacagactgctgcacgacgcccggcctaaggaaggcgacgaccggcccttcttttggctgttcgagaatgtggtggccatgggagtcagcgacaagcgggatattagccggttcctggagagcaaccccgtgatgatcgatgccaaggaagtgagcgccgcccaccgggccagatacttctggggcaatctgcctggcatgaacagacccctggccagcaccgtgaacgacaagctggagctgcaggagtgcctggagcacggccggatcgccaagttcagcaaggtgagaaccatcaccacccgaagcaacagcatcaaacaaggcaaggaccagcactttcctgtgttcatgaacgagaaggaggacatcctgtggtgtaccgagatggagagagtgttcgggttcccagtccactacacagatgtcagcaacatgtctagactggccagacagagactgctgggaagaagctggtccgtccctgtgatcagacacctgttcgcccctctgaaggagtacttcgcctgcgtgagcagcggcaacagcaacgccaacagccggggccccagcttctctagcggcctggtgccactgtccctgagagggagccacatgggccccatggagatctacaaaaccgtgagcgcctggaagcggcagcctgtgcgcgtgctgagcctgtttcggaatatcgataaagtcctgaaaagcctgggattcctggagagcggctctggctccggcggtggcaccctgaagtacgtggaggatgtgacaaacgtggtcagacgggatgtggagaagtggggccccttcgatctggtgtacggcagcacccaacccctgggcagctcttgtgaccggtgccctggctggtacatgtttcagttccaccggatcctgcagtacgccctgccgagacaggagtcccagcggccattcttttggattttcatggacaacttgctgctgaccgaggatgaccaggaaactaccactcggttcctgcagaccgaagccgtgaccctgcaggacgtgagaggccgggactaccagaacgccatgcgggtgtggtccaacatccctggactgaaaagcaagcacgcacctctgacccctaaagaagaggagtacctgcaggcccaggtgcggagcagaagcaagctggacgcccctaaggtggatctgctggtgaagaattgcctcctgcccctgagagagtacttcaagtatttcagccagaatagtctgcccctgggaggcagcggcggcggcatgaacaacagccagggcagggtgaccttcgaggacgtgaccgtgaacttcacccagggcgagtggcagaggctgaaccccgagcagaggaacctgtacagggacgtgatgctggagaactacagcaacctggtgagcgtgggccagagggagaccaccaagcccgacgtgatcctgaggctggagcagggcaaggagccctggagcgaggaggaggaggtgctgggcagcggcagggccgagggcggcccaagcagcggcgcccctcctcccagcggcggcaggcggcccaagcagcggcgcccctcctcccagcggcggcagcccagccggctccccaacctctaccgaggagggcacctctgagtccgccacccccgagagcggccctggcacctccaccgagcccagcgagggcagcgcacccggcagccctgccggcagccccacctccacagaggagggaaccagcaccgagcccagcgaaggcagcgccccaggcaccagcaccgagcctagtgagcaggagattaaacggatcaacaagatcagaagaagacttgtgaaagacagcaacaccaagaaggccggcaagacaggccccatgaaaaccctgctggttagagtgatgacacccgatctgagagagcggctggaaaacctgagaaagaagcctgaaaatatcccccagcccatcagcaatacatctagagccaacctgaataagctgctgaccgattacaccgaaatgaagaaggcgatcctgcatgtgtactgggaagagttccagaaggaccctgtgggcctgatgagccgggtggcccagcctgccagcaagaagatcgatcagaacaagctgaaacctgagatggacgagaagggcaacctgaccaccgccggctttgcctgctctcagtgtggccagcccctgttcgtgtacaagctggagcaggtgtctgagaagggcaaggcttacaccaactacttcggacggtgcaatgtggccgagcacgaaaagctgatcctgctggcccagctgaagcccgagaaggatagcgacgaagccgtgacatatagcctgggaaagtttgggcagagggccctggatttctacagcattcatgtgaccaaggagtccacccaccccgtgaagcccctggcccagatcgccggaaacagatacgcctccggacctgtgggaaaggccctgagcgacgcatgtatgggcacaatcgcctccttcctgtctaagtaccaggacatcatcatcgaacaccagaaggtggtgaagggcaaccagaagagactggagagcctgcgggagctggccggcaaggaaaacctggaataccctagcgtgaccctgccacctcagcctcacaccaaggagggcgttgatgcctacaacgaagtgatcgcccgggtgcgaatgtgggtgaacctgaacctgtggcagaagctgaagctaagcagagatgatgccaagcctctgctgagactgaagggattcccttcctttcctctggtcgagagacaggccaacgaagtggactggtgggacatggtgtgtaacgtgaagaagctgatcaacgagaaaaaggaggatggcaaggtgttttggcagaatctggctggctacaagagacaggaagccctgagaccatacctgagcagcgaggaagatcggaagaagggaaagaaattcgctcggtaccagctgggcgacctgctgctgcacctggaaaagaagcacggcgaggactggggaaaggtgtacgacgaggcctgggagcggattgacaagaaagtggaaggcctgagcaagcacatcaagctggaagaggaacggagaagcgaggacgcccagagcaaggccgccctgaccgactggctgcgggctaaggccagcttcgtgatcgagggcctgaaggaggccgacaaggacgagttctgcagatgcgagctgaagctgcagaagtggtacggggacctgcggggaaagcccttcgccatcgaagccgagaacagcatcctggacatcagcggcttcagcaagcagtacaactgtgccttcatctggcagaaggacggcgtgaagaagctgaacctgtacctgatcatcaactacttcaagggcggcaagctgcggttcaagaagatcaaacctgaagccttcgaagccaacagattctacaccgtgatcaacaaaaagagcggcgagatcgtgcccatggaggtgaacttcaacttcgacgaccccaacctgatcatcctgcctctggcctttggcaagagacagggcagagaattcatctggaacgacctgctgtccctggaaaccggcagcctgaagctggccaacggaagagtgatcgagaagacactgtacaacagaagaacccggcaggatgagcctgccctgttcgtggccctgaccttcgagcggcgggaggtcctggactcctccaatatcaaaccaatgaacctgatcggcgtggcaagaggcgaaaacatccccgccgtgatcgccctgaccgaccccgagggctgcccactgagccggtttaaggatagcctgggaaacccaacccacatcctgagaatcggcgagagctataaggagaagcagcggaccatccaggccaagaaggaggtggagcagcggagagccggcggctacagccggaagtacgccagcaaagccaagaatctggcagacgatatggtgagaaacaccgctagagatctgctgtactacgccgtgacccaggatgccatgctgatcttcgccaacctgagccggggcttcggccggcagggcaagcggaccttcatggccgagagacagtacacacggatggaggactggctgaccgccaagctggcctacgagggcctgagcaagacctacctgtccaagacactggcccagtacacctccaagacatgcagcaactgtgggtttaccatcaccagcgccgactacgacagggtgctggagaagctgaagaagacagcaacaggctggatgaccacaattaacggcaaggagctgaaggtggagggccagattacctactacaacagatacaagagacagaacgtagtcaaggacctgtccgtcgagctggatagactgagcgaagaatctgtgaacaacgacatctcctcctggacaaagggcagaagcggagaagctctgagcctcctgaagaaaagattctcccatagacccgtgcaggagaagttcgtgtgcctgaactgcggcttcgagacacacgcagccgagcaagccgccctgaacatcgccagatcctggctgttcctgcggagccaggagtacaagaaataccagacaaacaagacaaccggcaacaccgataagagagccttcgtcgagacctggcagtccttttaccggaagaagcttaaggaggtgtggaaacctgccgtgcggtctggcggatctggcggaggctccaccagccccaagaaaaagagaaaagtctaagctgccttctgcggggcttgccttctggccatgcccttcttctctcccttgcacctgtacctcttggtctttgaataaagcctgagtaggaaggctagcaaaaaaaaaaaaaaaaaaaaaaaaaaaaaaaaaaaaaaaaaaaaaaaaaaaaaaaaaaaaaaaaaaaaaaaaaaaaaaaagcccagccggctccccaacctctaccgaggagggcacctctgagtccgccacccccgagagcggccctggcacctccaccgagcccagcgagggcagcgcacccggcagccctgccggcagccccacctccacagaggagggaaccagcaccgagcccagcgaaggcagcgccccaggcaccagcaccgagcctagtgagcaggagattaaacggatcaacaagatcagaagaagacttgtgaaagacagcaacaccaagaaggccggcaagacaggccccatgaaaaccctgctggttagagtgatgacacccgatctgagagagcggctggaaaacctgagaaagaagcctgaaaatatcccccagcccatcagcaatacatctagagccaacctgaataagctgctgaccgattacaccgaaatgaagaaggcgatcctgcatgtgtactgggaagagttccagaaggaccctgtgggcctgatgagccgggtggcccagcctgccagcaagaagatcgatcagaacaagctgaaacctgagatggacgagaagggcaacctgaccaccgccggctttgcctgctctcagtgtggccagcccctgttcgtgtacaagctggagcaggtgtctgagaagggcaaggcttacaccaactacttcggacggtgcaatgtggccgagcacgaaaagctgatcctgctggcccagctgaagcccgagaaggatagcgacgaagccgtgacatatagcctgggaaagtttgggcagagggccctggatttctacagcattcatgtgaccaaggagtccacccaccccgtgaagcccctggcccagatcgccggaaacagatacgcctccggacctgtgggaaaggccctgagcgacgcatgtatgggcacaatcgcctccttcctgtctaagtaccaggacatcatcatcgaacaccagaaggtggtgaagggcaaccagaagagactggagagcctgcgggagctggccggcaaggaaaacctggaataccctagcgtgaccctgccacctcagcctcacaccaaggagggcgttgatgcctacaacgaagtgatcgcccgggtgcgaatgtgggtgaacctgaacctgtggcagaagctgaagctaagcagagatgatgccaagcctctgctgagactgaagggattcccttcctttcctctggtcgagagacaggccaacgaagtggactggtgggacatggtgtgtaacgtgaagaagctgatcaacgagaaaaaggaggatggcaaggtgttttggcagaatctggctggctacaagagacaggaagccctgagaccatacctgagcagcgaggaagatcggaagaagggaaagaaattcgctcggtaccagctgggcgacctgctgctgcacctggaaaagaagcacggcgaggactggggaaaggtgtacgacgaggcctgggagcggattgacaagaaagtggaaggcctgagcaagcacatcaagctggaagaggaacggagaagcgaggacgcccagagcaaggccgccctgaccgactggctgcgggctaaggccagcttcgtgatcgagggcctgaaggaggccgacaaggacgagttctgcagatgcgagctgaagctgcagaagtggtacggggacctgcggggaaagcccttcgccatcgaagccgagaacagcatcctggacatcagcggcttcagcaagcagtacaactgtgccttcatctggcagaaggacggcgtgaagaagctgaacctgtacctgatcatcaactacttcaagggcggcaagctgcggttcaagaagatcaaacctgaagccttcgaagccaacagattctacaccgtgatcaacaaaaagagcggcgagatcgtgcccatggaggtgaacttcaacttcgacgaccccaacctgatcatcctgcctctggcctttggcaagagacagggcagagaattcatctggaacgacctgctgtccctggaaaccggcagcctgaagctggccaacggaagagtgatcgagaagacactgtacaacagaagaacccggcaggatgagcctgccctgttcgtggccctgaccttcgagcggcgggaggtcctggactcctccaatatcaaaccaatgaacctgatcggcgtggcaagaggcgaaaacatccccgccgtgatcgccctgaccgaccccgagggctgcccactgagccggtttaaggatagcctgggaaacccaacccacatcctgagaatcggcgagagctataaggagaagcagcggaccatccaggccaagaaggaggtggagcagcggagagccggcggctacagccggaagtacgccagcaaagccaagaatctggcagacgatatggtgagaaacaccgctagagatctgctgtactacgccgtgacccaggatgccatgctgatcttcgccaacctgagccggggcttcggccggcagggcaagcggaccttcatggccgagagacagtacacacggatggaggactggctgaccgccaagctggcctacgagggcctgagcaagacctacctgtccaagacactggcccagtacacctccaagacatgcagcaactgtgggtttaccatcaccagcgccgactacgacagggtgctggagaagctgaagaagacagcaacaggctggatgaccacaattaacggcaaggagctgaaggtggagggccagattacctactacaacagatacaagagacagaacgtagtcaaggacctgtccgtcgagctggatagactgagcgaagaatctgtgaacaacgacatctcctcctggacaaagggcagaagcggagaagctctgagcctcctgaagaaaagattctcccatagacccgtgcaggagaagttcgtgtgcctgaactgcggcttcgagacacacgcagccgagcaagccgccctgaacatcgccagatcctggctgttcctgcggagccaggagtacaagaaataccagacaaacaagacaaccggcaacaccgataagagagccttcgtcgagacctggcagtccttttaccggaagaagcttaaggaggtgtggaaacctgccgtgcggtctggcggatctggcggaggctccaccagccccaagaaaaagagaaaagtctaagctgccttctgcggggcttgccttctggccatgcccttcttctctcccttgcacctgtacctcttggtctttgaataaagcctgagtaggaaggctagcaaaaaaaaaaaaaaaaaaaaaaaaaaaaaaaaaaaaaaaaaaaaaaaaaaaaaaaaaaaaaaaaaaaaaaaaaaaaaaaa

SEQ ID NO: 9535 - RNA, 8787 nt, synthetic construct
  source 1..8787: mol_type = other RNA
aggaaataagagagaaaagaagagtaagaagaaatataagagccaccatggcccctaagaagaagcgtaaagtgagccggatgaaccacgaccaggagttcgacccccctaaggtgtaccctcccgtccccgccgagaagagaaagcccatccgggtcctgagcctgttcgatggcatcgccaccggtctgctggtgctgaaggacctgggcatccaggtggataggtacattgcctccgaggtgtgcgaggactccatcaccgtgggaatggtgcgtcatcagggcaagatcatgtacgtgggcgacgtgcggagcgtgacacagaagcatatccaggagtggggccctttcgacctggtgatcggcggcagcccttgcaatgacctgagcatcgtgaacccagcccggaagggcctgtacgagggaaccggcagactgttcttcgagttttacagactgctgcacgacgcccggcctaaggaaggcgacgaccggcccttcttttggctgttcgagaatgtggtggccatgggagtcagcgacaagcgggatattagccggttcctggagagcaaccccgtgatgatcgatgccaaggaagtgagcgccgcccaccgggccagatacttctggggcaatctgcctggcatgaacagacccctggccagcaccgtgaacgacaagctggagctgcaggagtgcctggagcacggccggatcgccaagttcagcaaggtgagaaccatcaccacccgaagcaacagcatcaaacaaggcaaggaccagcactttcctgtgttcatgaacgagaaggaggacatcctgtggtgtaccgagatggagagagtgttcgggttcccagtccactacacagatgtcagcaacatgtctagactggccagacagagactgctgggaagaagctggtccgtccctgtgatcagacacctgttcgcccctctgaaggagtacttcgcctgcgtgagcagcggcaacagcaacgccaacagccggggccccagcttctctagcggcctggtgccactgtccctgagagggagccacatgggccccatggagatctacaaaaccgtgagcgcctggaagcggcagcctgtgcgcgtgctgagcctgtttcggaatatcgataaagtcctgaaaagcctgggattcctggagagcggctctggctccggcggtggcaccctgaagtacgtggaggatgtgacaaacgtggtcagacgggatgtggagaagtggggccccttcgatctggtgtacggcagcacccaacccctgggcagctcttgtgaccggtgccctggctggtacatgtttcagttccaccggatcctgcagtacgccctgccgagacaggagtcccagcggccattcttttggattttcatggacaacttgctgctgaccgaggatgaccaggaaactaccactcggttcctgcagaccgaagccgtgaccctgcaggacgtgagaggccgggactaccagaacgccatgcgggtgtggtccaacatccctggactgaaaagcaagcacgcacctctgacccctaaagaagaggagtacctgcaggcccaggtgcggagcagaagcaagctggacgcccctaaggtggatctgctggtgaagaattgcctcctgcccctgagagagtacttcaagtatttcagccagaatagtctgcccctgggaggcagcggcggcggcatggacaccgtggtgttcgaggacgtggtggtggacttcacccccgaggagtgggccctgctgaaccccgcccagaggaagctgtacagggacgtgatgctggagaccttcaagcacctggccagcgtggacaacgaggcccagctgaaggccagcggcagcatcagccagcaggacaccagcggcgagaagctgagcctgaagcagaagatcgagaagttcaccaggaagaacatctgggccggcggcccaagcagcggcgcccctcctcccagcggcggcaggcggcccaagcagcggcgcccctcctcccagcggcggcagcccagccggctccccaacctctaccgaggagggcacctctgagtccgccacccccgagagcggccctggcacctccaccgagcccagcgagggcagcgcacccggcagccctgccggcagccccacctccacagaggagggaaccagcaccgagcccagcgaaggcagcgccccaggcaccagcaccgagcctagtgagcaggagattaaacggatcaacaagatcagaagaagacttgtgaaagacagcaacaccaagaaggccggcaagacaggccccatgaaaaccctgctggttagagtgatgacacccgatctgagagagcggctggaaaacctgagaaagaagcctgaaaatatcccccagcccatcagcaatacatctagagccaacctgaataagctgctgaccgattacaccgaaatgaagaaggcgatcctgcatgtgtactgggaagagttccagaaggaccctgtgggcctgatgagccgggtggcccagcctgccagcaagaagatcgatcagaacaagctgaaacctgagatggacgagaagggcaacctgaccaccgccggctttgcctgctctcagtgtggccagcccctgttcgtgtacaagctggagcaggtgtctgagaagggcaaggcttacaccaactacttcggacggtgcaatgtggccgagcacgaaaagctgatcctgctggcccagctgaagcccgagaaggatagcgacgaagccgtgacatatagcctgggaaagtttgggcagagggccctggatttctacagcattcatgtgaccaaggagtccacccaccccgtgaagcccctggcccagatcgccggaaacagatacgcctccggacctgtgggaaaggccctgagcgacgcatgtatgggcacaatcgcctccttcctgtctaagtaccaggacatcatcatcgaacaccagaaggtggtgaagggcaaccagaagagactggagagcctgcgggagctggccggcaaggaaaacctggaataccctagcgtgaccctgccacctcagcctcacaccaaggagggcgttgatgcctacaacgaagtgatcgcccgggtgcgaatgtgggtgaacctgaacctgtggcagaagctgaagctaagcagagatgatgccaagcctctgctgagactgaagggattcccttcctttcctctggtcgagagacaggccaacgaagtggactggtgggacatggtgtgtaacgtgaagaagctgatcaacgagaaaaaggaggatggcaaggtgttttggcagaatctggctggctacaagagacaggaagccctgagaccatacctgagcagcgaggaagatcggaagaagggaaagaaattcgctcggtaccagctgggcgacctgctgctgcacctggaaaagaagcacggcgaggactggggaaaggtgtacgacgaggcctgggagcggattgacaagaaagtggaaggcctgagcaagcacatcaagctggaagaggaacggagaagcgaggacgcccagagcaaggccgccctgaccgactggctgcgggctaaggccagcttcgtgatcgagggcctgaaggaggccgacaaggacgagttctgcagatgcgagctgaagctgcagaagtggtacggggacctgcggggaaagcccttcgccatcgaagccgagaacagcatcctggacatcagcggcttcagcaagcagtacaactgtgccttcatctggcagaaggacggcgtgaagaagctgaacctgtacctgatcatcaactacttcaagggcggcaagctgcggttcaagaagatcaaacctgaagccttcgaagccaacagattctacaccgtgatcaacaaaaagagcggcgagatcgtgcccatggaggtgaacttcaacttcgacgaccccaacctgatcatcctgcctctggcctttggcaagagacagggcagagaattcatctggaacgacctgctgtccctggaaaccggcagcctgaagctggccaacggaagagtgatcgagaagacactgtacaacagaagaacccggcaggatgagcctgccctgttcgtggccctgaccttcgagcggcgggaggtcctggactcctccaatatcaaaccaatgaacctgatcggcgtggcaagaggcgaaaacatccccgccgtgatcgccctgaccgaccccgagggctgcccactgagccggtttaaggatagcctgggaaacccaacccacatcctgagaatcggcgagagctataaggagaagcagcggaccatccaggccaagaaggaggtggagcagcggagagccggcggctacagccggaagtacgccagcaaagccaagaatctggcagacgatatggtgagaaacaccgctagagatctgctgtactacgccgtgacccaggatgccatgctgatcttcgccaacctgagccggggcttcggccggcagggcaagcggaccttcatggccgagagacagtacacacggatggaggactggctgaccgccaagctggcctacgagggcctgagcaagacctacctgtccaagacactggcccagtacacctccaagacatgcagcaactgtgggtttaccatcaccagcgccgactacgacagggtgctggagaagctgaagaagacagcaacaggctggatgaccacaattaacggcaaggagctgaaggtggagggccagattacctactacaacagatacaagagacagaacgtagtcaaggacctgtccgtcgagctggatagactgagcgaagaatctgtgaacaacgacatctcctcctggacaaagggcagaagcggagaagctctgagcctcctgaagaaaagattctcccatagacccgtgcaggagaagttcgtgtgcctgaactgcggcttcgagacacacgcagccgagcaagccgccctgaacatcgccagatcctggctgttcctgcggagccaggagtacaagaaataccagacaaacaagacaaccggcaacaccgataagagagccttcgtcgagacctggcagtccttttaccggaagaagcttaaggaggtgtggaaacctgccgtgcggtctggcggatctggcggaggctccaccagccccaagaaaaagagaaaagtctaagctgccttctgcggggcttgccttctggccatgcccttcttctctcccttgcacctgtacctcttggtctttgaataaagcctgagtaggaaggctagcaaaaaaaaaaaaaaaaaaaaaaaaaaaaaaaaaaaaaaaaaaaaaaaaaaaaaaaaaaaaaaaaaaaaaaaaaaaaaaaagcccagccggctccccaacctctaccgaggagggcacctctgagtccgccacccccgagagcggccctggcacctccaccgagcccagcgagggcagcgcacccggcagccctgccggcagccccacctccacagaggagggaaccagcaccgagcccagcgaaggcagcgccccaggcaccagcaccgagcctagtgagcaggagattaaacggatcaacaagatcagaagaagacttgtgaaagacagcaacaccaagaaggccggcaagacaggccccatgaaaaccctgctggttagagtgatgacacccgatctgagagagcggctggaaaacctgagaaagaagcctgaaaatatcccccagcccatcagcaatacatctagagccaacctgaataagctgctgaccgattacaccgaaatgaagaaggcgatcctgcatgtgtactgggaagagttccagaaggaccctgtgggcctgatgagccgggtggcccagcctgccagcaagaagatcgatcagaacaagctgaaacctgagatggacgagaagggcaacctgaccaccgccggctttgcctgctctcagtgtggccagcccctgttcgtgtacaagctggagcaggtgtctgagaagggcaaggcttacaccaactacttcggacggtgcaatgtggccgagcacgaaaagctgatcctgctggcccagctgaagcccgagaaggatagcgacgaagccgtgacatatagcctgggaaagtttgggcagagggccctggatttctacagcattcatgtgaccaaggagtccacccaccccgtgaagcccctggcccagatcgccggaaacagatacgcctccggacctgtgggaaaggccctgagcgacgcatgtatgggcacaatcgcctccttcctgtctaagtaccaggacatcatcatcgaacaccagaaggtggtgaagggcaaccagaagagactggagagcctgcgggagctggccggcaaggaaaacctggaataccctagcgtgaccctgccacctcagcctcacaccaaggagggcgttgatgcctacaacgaagtgatcgcccgggtgcgaatgtgggtgaacctgaacctgtggcagaagctgaagctaagcagagatgatgccaagcctctgctgagactgaagggattcccttcctttcctctggtcgagagacaggccaacgaagtggactggtgggacatggtgtgtaacgtgaagaagctgatcaacgagaaaaaggaggatggcaaggtgttttggcagaatctggctggctacaagagacaggaagccctgagaccatacctgagcagcgaggaagatcggaagaagggaaagaaattcgctcggtaccagctgggcgacctgctgctgcacctggaaaagaagcacggcgaggactggggaaaggtgtacgacgaggcctgggagcggattgacaagaaagtggaaggcctgagcaagcacatcaagctggaagaggaacggagaagcgaggacgcccagagcaaggccgccctgaccgactggctgcgggctaaggccagcttcgtgatcgagggcctgaaggaggccgacaaggacgagttctgcagatgcgagctgaagctgcagaagtggtacggggacctgcggggaaagcccttcgccatcgaagccgagaacagcatcctggacatcagcggcttcagcaagcagtacaactgtgccttcatctggcagaaggacggcgtgaagaagctgaacctgtacctgatcatcaactacttcaagggcggcaagctgcggttcaagaagatcaaacctgaagccttcgaagccaacagattctacaccgtgatcaacaaaaagagcggcgagatcgtgcccatggaggtgaacttcaacttcgacgaccccaacctgatcatcctgcctctggcctttggcaagagacagggcagagaattcatctggaacgacctgctgtccctggaaaccggcagcctgaagctggccaacggaagagtgatcgagaagacactgtacaacagaagaacccggcaggatgagcctgccctgttcgtggccctgaccttcgagcggcgggaggtcctggactcctccaatatcaaaccaatgaacctgatcggcgtggcaagaggcgaaaacatccccgccgtgatcgccctgaccgaccccgagggctgcccactgagccggtttaaggatagcctgggaaacccaacccacatcctgagaatcggcgagagctataaggagaagcagcggaccatccaggccaagaaggaggtggagcagcggagagccggcggctacagccggaagtacgccagcaaagccaagaatctggcagacgatatggtgagaaacaccgctagagatctgctgtactacgccgtgacccaggatgccatgctgatcttcgccaacctgagccggggcttcggccggcagggcaagcggaccttcatggccgagagacagtacacacggatggaggactggctgaccgccaagctggcctacgagggcctgagcaagacctacctgtccaagacactggcccagtacacctccaagacatgcagcaactgtgggtttaccatcaccagcgccgactacgacagggtgctggagaagctgaagaagacagcaacaggctggatgaccacaattaacggcaaggagctgaaggtggagggccagattacctactacaacagatacaagagacagaacgtagtcaaggacctgtccgtcgagctggatagactgagcgaagaatctgtgaacaacgacatctcctcctggacaaagggcagaagcggagaagctctgagcctcctgaagaaaagattctcccatagacccgtgcaggagaagttcgtgtgcctgaactgcggcttcgagacacacgcagccgagcaagccgccctgaacatcgccagatcctggctgttcctgcggagccaggagtacaagaaataccagacaaacaagacaaccggcaacaccgataagagagccttcgtcgagacctggcagtccttttaccggaagaagcttaaggaggtgtggaaacctgccgtgcggtctggcggatctggcggaggctccaccagccccaagaaaaagagaaaagtctaagctgccttctgcggggcttgccttctggccatgcccttcttctctcccttgcacctgtacctcttggtctttgaataaagcctgagtaggaaggctagcaaaaaaaaaaaaaaaaaaaaaaaaaaaaaaaaaaaaaaaaaaaaaaaaaaaaaaaaaaaaaaaaaaaaaaaaaaaaaaaa

SEQ ID NO: 9536 - RNA, 8787 nt, synthetic construct
  source 1..8787: mol_type = other RNA
aggaaataagagagaaaagaagagtaagaagaaatataagagccaccatggcccctaagaagaagcgtaaagtgagccggatgaaccacgaccaggagttcgacccccctaaggtgtaccctcccgtccccgccgagaagagaaagcccatccgggtcctgagcctgttcgatggcatcgccaccggtctgctggtgctgaaggacctgggcatccaggtggataggtacattgcctccgaggtgtgcgaggactccatcaccgtgggaatggtgcgtcatcagggcaagatcatgtacgtgggcgacgtgcggagcgtgacacagaagcatatccaggagtggggccctttcgacctggtgatcggcggcagcccttgcaatgacctgagcatcgtgaacccagcccggaagggcctgtacgagggaaccggcagactgttcttcgagttttacagactgctgcacgacgcccggcctaaggaaggcgacgaccggcccttcttttggctgttcgagaatgtggtggccatgggagtcagcgacaagcgggatattagccggttcctggagagcaaccccgtgatgatcgatgccaaggaagtgagcgccgcccaccgggccagatacttctggggcaatctgcctggcatgaacagacccctggccagcaccgtgaacgacaagctggagctgcaggagtgcctggagcacggccggatcgccaagttcagcaaggtgagaaccatcaccacccgaagcaacagcatcaaacaaggcaaggaccagcactttcctgtgttcatgaacgagaaggaggacatcctgtggtgtaccgagatggagagagtgttcgggttcccagtccactacacagatgtcagcaacatgtctagactggccagacagagactgctgggaagaagctggtccgtccctgtgatcagacacctgttcgcccctctgaaggagtacttcgcctgcgtgagcagcggcaacagcaacgccaacagccggggccccagcttctctagcggcctggtgccactgtccctgagagggagccacatgggccccatggagatctacaaaaccgtgagcgcctggaagcggcagcctgtgcgcgtgctgagcctgtttcggaatatcgataaagtcctgaaaagcctgggattcctggagagcggctctggctccggcggtggcaccctgaagtacgtggaggatgtgacaaacgtggtcagacgggatgtggagaagtggggccccttcgatctggtgtacggcagcacccaacccctgggcagctcttgtgaccggtgccctggctggtacatgtttcagttccaccggatcctgcagtacgccctgccgagacaggagtcccagcggccattcttttggattttcatggacaacttgctgctgaccgaggatgaccaggaaactaccactcggttcctgcagaccgaagccgtgaccctgcaggacgtgagaggccgggactaccagaacgccatgcgggtgtggtccaacatccctggactgaaaagcaagcacgcacctctgacccctaaagaagaggagtacctgcaggcccaggtgcggagcagaagcaagctggacgcccctaaggtggatctgctggtgaagaattgcctcctgcccctgagagagtacttcaagtatttcagccagaatagtctgcccctgggaggcagcggcggcggcgagagcctgaccctggaggacgtggccgtggagttcacctgggaggagtggcagctgctgggccccgcccagaaggacctgtactgggacgtgatgctggagaactacaaccacctggtgagcctgggctaccaggccagcaagcccgacgccctgagcaagctggcccagggcgaggagccctgcgtgatcgagggcaagatccagaacaggaactgccccggcatcaggaaggccgacagcggcggcccaagcagcggcgcccctcctcccagcggcggcaggcggcccaagcagcggcgcccctcctcccagcggcggcagcccagccggctccccaacctctaccgaggagggcacctctgagtccgccacccccgagagcggccctggcacctccaccgagcccagcgagggcagcgcacccggcagccctgccggcagccccacctccacagaggagggaaccagcaccgagcccagcgaaggcagcgccccaggcaccagcaccgagcctagtgagcaggagattaaacggatcaacaagatcagaagaagacttgtgaaagacagcaacaccaagaaggccggcaagacaggccccatgaaaaccctgctggttagagtgatgacacccgatctgagagagcggctggaaaacctgagaaagaagcctgaaaatatcccccagcccatcagcaatacatctagagccaacctgaataagctgctgaccgattacaccgaaatgaagaaggcgatcctgcatgtgtactgggaagagttccagaaggaccctgtgggcctgatgagccgggtggcccagcctgccagcaagaagatcgatcagaacaagctgaaacctgagatggacgagaagggcaacctgaccaccgccggctttgcctgctctcagtgtggccagcccctgttcgtgtacaagctggagcaggtgtctgagaagggcaaggcttacaccaactacttcggacggtgcaatgtggccgagcacgaaaagctgatcctgctggcccagctgaagcccgagaaggatagcgacgaagccgtgacatatagcctgggaaagtttgggcagagggccctggatttctacagcattcatgtgaccaaggagtccacccaccccgtgaagcccctggcccagatcgccggaaacagatacgcctccggacctgtgggaaaggccctgagcgacgcatgtatgggcacaatcgcctccttcctgtctaagtaccaggacatcatcatcgaacaccagaaggtggtgaagggcaaccagaagagactggagagcctgcgggagctggccggcaaggaaaacctggaataccctagcgtgaccctgccacctcagcctcacaccaaggagggcgttgatgcctacaacgaagtgatcgcccgggtgcgaatgtgggtgaacctgaacctgtggcagaagctgaagctaagcagagatgatgccaagcctctgctgagactgaagggattcccttcctttcctctggtcgagagacaggccaacgaagtggactggtgggacatggtgtgtaacgtgaagaagctgatcaacgagaaaaaggaggatggcaaggtgttttggcagaatctggctggctacaagagacaggaagccctgagaccatacctgagcagcgaggaagatcggaagaagggaaagaaattcgctcggtaccagctgggcgacctgctgctgcacctggaaaagaagcacggcgaggactggggaaaggtgtacgacgaggcctgggagcggattgacaagaaagtggaaggcctgagcaagcacatcaagctggaagaggaacggagaagcgaggacgcccagagcaaggccgccctgaccgactggctgcgggctaaggccagcttcgtgatcgagggcctgaaggaggccgacaaggacgagttctgcagatgcgagctgaagctgcagaagtggtacggggacctgcggggaaagcccttcgccatcgaagccgagaacagcatcctggacatcagcggcttcagcaagcagtacaactgtgccttcatctggcagaaggacggcgtgaagaagctgaacctgtacctgatcatcaactacttcaagggcggcaagctgcggttcaagaagatcaaacctgaagccttcgaagccaacagattctacaccgtgatcaacaaaaagagcggcgagatcgtgcccatggaggtgaacttcaacttcgacgaccccaacctgatcatcctgcctctggcctttggcaagagacagggcagagaattcatctggaacgacctgctgtccctggaaaccggcagcctgaagctggccaacggaagagtgatcgagaagacactgtacaacagaagaacccggcaggatgagcctgccctgttcgtggccctgaccttcgagcggcgggaggtcctggactcctccaatatcaaaccaatgaacctgatcggcgtggcaagaggcgaaaacatccccgccgtgatcgccctgaccgaccccgagggctgcccactgagccggtttaaggatagcctgggaaacccaacccacatcctgagaatcggcgagagctataaggagaagcagcggaccatccaggccaagaaggaggtggagcagcggagagccggcggctacagccggaagtacgccagcaaagccaagaatctggcagacgatatggtgagaaacaccgctagagatctgctgtactacgccgtgacccaggatgccatgctgatcttcgccaacctgagccggggcttcggccggcagggcaagcggaccttcatggccgagagacagtacacacggatggaggactggctgaccgccaagctggcctacgagggcctgagcaagacctacctgtccaagacactggcccagtacacctccaagacatgcagcaactgtgggtttaccatcaccagcgccgactacgacagggtgctggagaagctgaagaagacagcaacaggctggatgaccacaattaacggcaaggagctgaaggtggagggccagattacctactacaacagatacaagagacagaacgtagtcaaggacctgtccgtcgagctggatagactgagcgaagaatctgtgaacaacgacatctcctcctggacaaagggcagaagcggagaagctctgagcctcctgaagaaaagattctcccatagacccgtgcaggagaagttcgtgtgcctgaactgcggcttcgagacacacgcagccgagcaagccgccctgaacatcgccagatcctggctgttcctgcggagccaggagtacaagaaataccagacaaacaagacaaccggcaacaccgataagagagccttcgtcgagacctggcagtccttttaccggaagaagcttaaggaggtgtggaaacctgccgtgcggtctggcggatctggcggaggctccaccagccccaagaaaaagagaaaagtctaagctgccttctgcggggcttgccttctggccatgcccttcttctctcccttgcacctgtacctcttggtctttgaataaagcctgagtaggaaggctagcaaaaaaaaaaaaaaaaaaaaaaaaaaaaaaaaaaaaaaaaaaaaaaaaaaaaaaaaaaaaaaaaaaaaaaaaaaaaaaaagcccagccggctccccaacctctaccgaggagggcacctctgagtccgccacccccgagagcggccctggcacctccaccgagcccagcgagggcagcgcacccggcagccctgccggcagccccacctccacagaggagggaaccagcaccgagcccagcgaaggcagcgccccaggcaccagcaccgagcctagtgagcaggagattaaacggatcaacaagatcagaagaagacttgtgaaagacagcaacaccaagaaggccggcaagacaggccccatgaaaaccctgctggttagagtgatgacacccgatctgagagagcggctggaaaacctgagaaagaagcctgaaaatatcccccagcccatcagcaatacatctagagccaacctgaataagctgctgaccgattacaccgaaatgaagaaggcgatcctgcatgtgtactgggaagagttccagaaggaccctgtgggcctgatgagccgggtggcccagcctgccagcaagaagatcgatcagaacaagctgaaacctgagatggacgagaagggcaacctgaccaccgccggctttgcctgctctcagtgtggccagcccctgttcgtgtacaagctggagcaggtgtctgagaagggcaaggcttacaccaactacttcggacggtgcaatgtggccgagcacgaaaagctgatcctgctggcccagctgaagcccgagaaggatagcgacgaagccgtgacatatagcctgggaaagtttgggcagagggccctggatttctacagcattcatgtgaccaaggagtccacccaccccgtgaagcccctggcccagatcgccggaaacagatacgcctccggacctgtgggaaaggccctgagcgacgcatgtatgggcacaatcgcctccttcctgtctaagtaccaggacatcatcatcgaacaccagaaggtggtgaagggcaaccagaagagactggagagcctgcgggagctggccggcaaggaaaacctggaataccctagcgtgaccctgccacctcagcctcacaccaaggagggcgttgatgcctacaacgaagtgatcgcccgggtgcgaatgtgggtgaacctgaacctgtggcagaagctgaagctaagcagagatgatgccaagcctctgctgagactgaagggattcccttcctttcctctggtcgagagacaggccaacgaagtggactggtgggacatggtgtgtaacgtgaagaagctgatcaacgagaaaaaggaggatggcaaggtgttttggcagaatctggctggctacaagagacaggaagccctgagaccatacctgagcagcgaggaagatcggaagaagggaaagaaattcgctcggtaccagctgggcgacctgctgctgcacctggaaaagaagcacggcgaggactggggaaaggtgtacgacgaggcctgggagcggattgacaagaaagtggaaggcctgagcaagcacatcaagctggaagaggaacggagaagcgaggacgcccagagcaaggccgccctgaccgactggctgcgggctaaggccagcttcgtgatcgagggcctgaaggaggccgacaaggacgagttctgcagatgcgagctgaagctgcagaagtggtacggggacctgcggggaaagcccttcgccatcgaagccgagaacagcatcctggacatcagcggcttcagcaagcagtacaactgtgccttcatctggcagaaggacggcgtgaagaagctgaacctgtacctgatcatcaactacttcaagggcggcaagctgcggttcaagaagatcaaacctgaagccttcgaagccaacagattctacaccgtgatcaacaaaaagagcggcgagatcgtgcccatggaggtgaacttcaacttcgacgaccccaacctgatcatcctgcctctggcctttggcaagagacagggcagagaattcatctggaacgacctgctgtccctggaaaccggcagcctgaagctggccaacggaagagtgatcgagaagacactgtacaacagaagaacccggcaggatgagcctgccctgttcgtggccctgaccttcgagcggcgggaggtcctggactcctccaatatcaaaccaatgaacctgatcggcgtggcaagaggcgaaaacatccccgccgtgatcgccctgaccgaccccgagggctgcccactgagccggtttaaggatagcctgggaaacccaacccacatcctgagaatcggcgagagctataaggagaagcagcggaccatccaggccaagaaggaggtggagcagcggagagccggcggctacagccggaagtacgccagcaaagccaagaatctggcagacgatatggtgagaaacaccgctagagatctgctgtactacgccgtgacccaggatgccatgctgatcttcgccaacctgagccggggcttcggccggcagggcaagcggaccttcatggccgagagacagtacacacggatggaggactggctgaccgccaagctggcctacgagggcctgagcaagacctacctgtccaagacactggcccagtacacctccaagacatgcagcaactgtgggtttaccatcaccagcgccgactacgacagggtgctggagaagctgaagaagacagcaacaggctggatgaccacaattaacggcaaggagctgaaggtggagggccagattacctactacaacagatacaagagacagaacgtagtcaaggacctgtccgtcgagctggatagactgagcgaagaatctgtgaacaacgacatctcctcctggacaaagggcagaagcggagaagctctgagcctcctgaagaaaagattctcccatagacccgtgcaggagaagttcgtgtgcctgaactgcggcttcgagacacacgcagccgagcaagccgccctgaacatcgccagatcctggctgttcctgcggagccaggagtacaagaaataccagacaaacaagacaaccggcaacaccgataagagagccttcgtcgagacctggcagtccttttaccggaagaagcttaaggaggtgtggaaacctgccgtgcggtctggcggatctggcggaggctccaccagccccaagaaaaagagaaaagtctaagctgccttctgcggggcttgccttctggccatgcccttcttctctcccttgcacctgtacctcttggtctttgaataaagcctgagtaggaaggctagcaaaaaaaaaaaaaaaaaaaaaaaaaaaaaaaaaaaaaaaaaaaaaaaaaaaaaaaaaaaaaaaaaaaaaaaaaaaaaaaa

SEQ ID NO: 9537 - RNA, 8787 nt, synthetic construct
  source 1..8787: mol_type = other RNA
aggaaataagagagaaaagaagagtaagaagaaatataagagccaccatggcccctaagaagaagcgtaaagtgagccggatgaaccacgaccaggagttcgacccccctaaggtgtaccctcccgtccccgccgagaagagaaagcccatccgggtcctgagcctgttcgatggcatcgccaccggtctgctggtgctgaaggacctgggcatccaggtggataggtacattgcctccgaggtgtgcgaggactccatcaccgtgggaatggtgcgtcatcagggcaagatcatgtacgtgggcgacgtgcggagcgtgacacagaagcatatccaggagtggggccctttcgacctggtgatcggcggcagcccttgcaatgacctgagcatcgtgaacccagcccggaagggcctgtacgagggaaccggcagactgttcttcgagttttacagactgctgcacgacgcccggcctaaggaaggcgacgaccggcccttcttttggctgttcgagaatgtggtggccatgggagtcagcgacaagcgggatattagccggttcctggagagcaaccccgtgatgatcgatgccaaggaagtgagcgccgcccaccgggccagatacttctggggcaatctgcctggcatgaacagacccctggccagcaccgtgaacgacaagctggagctgcaggagtgcctggagcacggccggatcgccaagttcagcaaggtgagaaccatcaccacccgaagcaacagcatcaaacaaggcaaggaccagcactttcctgtgttcatgaacgagaaggaggacatcctgtggtgtaccgagatggagagagtgttcgggttcccagtccactacacagatgtcagcaacatgtctagactggccagacagagactgctgggaagaagctggtccgtccctgtgatcagacacctgttcgcccctctgaaggagtacttcgcctgcgtgagcagcggcaacagcaacgccaacagccggggccccagcttctctagcggcctggtgccactgtccctgagagggagccacatgggccccatggagatctacaaaaccgtgagcgcctggaagcggcagcctgtgcgcgtgctgagcctgtttcggaatatcgataaagtcctgaaaagcctgggattcctggagagcggctctggctccggcggtggcaccctgaagtacgtggaggatgtgacaaacgtggtcagacgggatgtggagaagtggggccccttcgatctggtgtacggcagcacccaacccctgggcagctcttgtgaccggtgccctggctggtacatgtttcagttccaccggatcctgcagtacgccctgccgagacaggagtcccagcggccattcttttggattttcatggacaacttgctgctgaccgaggatgaccaggaaactaccactcggttcctgcagaccgaagccgtgaccctgcaggacgtgagaggccgggactaccagaacgccatgcgggtgtggtccaacatccctggactgaaaagcaagcacgcacctctgacccctaaagaagaggagtacctgcaggcccaggtgcggagcagaagcaagctggacgcccctaaggtggatctgctggtgaagaattgcctcctgcccctgagagagtacttcaagtatttcagccagaatagtctgcccctgggaggcagcggcggcggcatgaccctgctgaccttcagggacgtggccatcgagttcagcctggaggagtggaagtgcctggacctggcccagcagaacctgtacagggacgtgatgctggagaactacaggaacctgttcagcgtgggcctgaccgtgagcaagcccggcctgatcacctgcctggagcagaggaaggagccctggaacgtgaagaggcaggaggccgccgacggccaccccggctggagcgccgtggtgggcggcccaagcagcggcgcccctcctcccagcggcggcaggcggcccaagcagcggcgcccctcctcccagcggcggcagcccagccggctccccaacctctaccgaggagggcacctctgagtccgccacccccgagagcggccctggcacctccaccgagcccagcgagggcagcgcacccggcagccctgccggcagccccacctccacagaggagggaaccagcaccgagcccagcgaaggcagcgccccaggcaccagcaccgagcctagtgagcaggagattaaacggatcaacaagatcagaagaagacttgtgaaagacagcaacaccaagaaggccggcaagacaggccccatgaaaaccctgctggttagagtgatgacacccgatctgagagagcggctggaaaacctgagaaagaagcctgaaaatatcccccagcccatcagcaatacatctagagccaacctgaataagctgctgaccgattacaccgaaatgaagaaggcgatcctgcatgtgtactgggaagagttccagaaggaccctgtgggcctgatgagccgggtggcccagcctgccagcaagaagatcgatcagaacaagctgaaacctgagatggacgagaagggcaacctgaccaccgccggctttgcctgctctcagtgtggccagcccctgttcgtgtacaagctggagcaggtgtctgagaagggcaaggcttacaccaactacttcggacggtgcaatgtggccgagcacgaaaagctgatcctgctggcccagctgaagcccgagaaggatagcgacgaagccgtgacatatagcctgggaaagtttgggcagagggccctggatttctacagcattcatgtgaccaaggagtccacccaccccgtgaagcccctggcccagatcgccggaaacagatacgcctccggacctgtgggaaaggccctgagcgacgcatgtatgggcacaatcgcctccttcctgtctaagtaccaggacatcatcatcgaacaccagaaggtggtgaagggcaaccagaagagactggagagcctgcgggagctggccggcaaggaaaacctggaataccctagcgtgaccctgccacctcagcctcacaccaaggagggcgttgatgcctacaacgaagtgatcgcccgggtgcgaatgtgggtgaacctgaacctgtggcagaagctgaagctaagcagagatgatgccaagcctctgctgagactgaagggattcccttcctttcctctggtcgagagacaggccaacgaagtggactggtgggacatggtgtgtaacgtgaagaagctgatcaacgagaaaaaggaggatggcaaggtgttttggcagaatctggctggctacaagagacaggaagccctgagaccatacctgagcagcgaggaagatcggaagaagggaaagaaattcgctcggtaccagctgggcgacctgctgctgcacctggaaaagaagcacggcgaggactggggaaaggtgtacgacgaggcctgggagcggattgacaagaaagtggaaggcctgagcaagcacatcaagctggaagaggaacggagaagcgaggacgcccagagcaaggccgccctgaccgactggctgcgggctaaggccagcttcgtgatcgagggcctgaaggaggccgacaaggacgagttctgcagatgcgagctgaagctgcagaagtggtacggggacctgcggggaaagcccttcgccatcgaagccgagaacagcatcctggacatcagcggcttcagcaagcagtacaactgtgccttcatctggcagaaggacggcgtgaagaagctgaacctgtacctgatcatcaactacttcaagggcggcaagctgcggttcaagaagatcaaacctgaagccttcgaagccaacagattctacaccgtgatcaacaaaaagagcggcgagatcgtgcccatggaggtgaacttcaacttcgacgaccccaacctgatcatcctgcctctggcctttggcaagagacagggcagagaattcatctggaacgacctgctgtccctggaaaccggcagcctgaagctggccaacggaagagtgatcgagaagacactgtacaacagaagaacccggcaggatgagcctgccctgttcgtggccctgaccttcgagcggcgggaggtcctggactcctccaatatcaaaccaatgaacctgatcggcgtggcaagaggcgaaaacatccccgccgtgatcgccctgaccgaccccgagggctgcccactgagccggtttaaggatagcctgggaaacccaacccacatcctgagaatcggcgagagctataaggagaagcagcggaccatccaggccaagaaggaggtggagcagcggagagccggcggctacagccggaagtacgccagcaaagccaagaatctggcagacgatatggtgagaaacaccgctagagatctgctgtactacgccgtgacccaggatgccatgctgatcttcgccaacctgagccggggcttcggccggcagggcaagcggaccttcatggccgagagacagtacacacggatggaggactggctgaccgccaagctggcctacgagggcctgagcaagacctacctgtccaagacactggcccagtacacctccaagacatgcagcaactgtgggtttaccatcaccagcgccgactacgacagggtgctggagaagctgaagaagacagcaacaggctggatgaccacaattaacggcaaggagctgaaggtggagggccagattacctactacaacagatacaagagacagaacgtagtcaaggacctgtccgtcgagctggatagactgagcgaagaatctgtgaacaacgacatctcctcctggacaaagggcagaagcggagaagctctgagcctcctgaagaaaagattctcccatagacccgtgcaggagaagttcgtgtgcctgaactgcggcttcgagacacacgcagccgagcaagccgccctgaacatcgccagatcctggctgttcctgcggagccaggagtacaagaaataccagacaaacaagacaaccggcaacaccgataagagagccttcgtcgagacctggcagtccttttaccggaagaagcttaaggaggtgtggaaacctgccgtgcggtctggcggatctggcggaggctccaccagccccaagaaaaagagaaaagtctaagctgccttctgcggggcttgccttctggccatgcccttcttctctcccttgcacctgtacctcttggtctttgaataaagcctgagtaggaaggctagcaaaaaaaaaaaaaaaaaaaaaaaaaaaaaaaaaaaaaaaaaaaaaaaaaaaaaaaaaaaaaaaaaaaaaaaaaaaaaaaagcccagccggctccccaacctctaccgaggagggcacctctgagtccgccacccccgagagcggccctggcacctccaccgagcccagcgagggcagcgcacccggcagccctgccggcagccccacctccacagaggagggaaccagcaccgagcccagcgaaggcagcgccccaggcaccagcaccgagcctagtgagcaggagattaaacggatcaacaagatcagaagaagacttgtgaaagacagcaacaccaagaaggccggcaagacaggccccatgaaaaccctgctggttagagtgatgacacccgatctgagagagcggctggaaaacctgagaaagaagcctgaaaatatcccccagcccatcagcaatacatctagagccaacctgaataagctgctgaccgattacaccgaaatgaagaaggcgatcctgcatgtgtactgggaagagttccagaaggaccctgtgggcctgatgagccgggtggcccagcctgccagcaagaagatcgatcagaacaagctgaaacctgagatggacgagaagggcaacctgaccaccgccggctttgcctgctctcagtgtggccagcccctgttcgtgtacaagctggagcaggtgtctgagaagggcaaggcttacaccaactacttcggacggtgcaatgtggccgagcacgaaaagctgatcctgctggcccagctgaagcccgagaaggatagcgacgaagccgtgacatatagcctgggaaagtttgggcagagggccctggatttctacagcattcatgtgaccaaggagtccacccaccccgtgaagcccctggcccagatcgccggaaacagatacgcctccggacctgtgggaaaggccctgagcgacgcatgtatgggcacaatcgcctccttcctgtctaagtaccaggacatcatcatcgaacaccagaaggtggtgaagggcaaccagaagagactggagagcctgcgggagctggccggcaaggaaaacctggaataccctagcgtgaccctgccacctcagcctcacaccaaggagggcgttgatgcctacaacgaagtgatcgcccgggtgcgaatgtgggtgaacctgaacctgtggcagaagctgaagctaagcagagatgatgccaagcctctgctgagactgaagggattcccttcctttcctctggtcgagagacaggccaacgaagtggactggtgggacatggtgtgtaacgtgaagaagctgatcaacgagaaaaaggaggatggcaaggtgttttggcagaatctggctggctacaagagacaggaagccctgagaccatacctgagcagcgaggaagatcggaagaagggaaagaaattcgctcggtaccagctgggcgacctgctgctgcacctggaaaagaagcacggcgaggactggggaaaggtgtacgacgaggcctgggagcggattgacaagaaagtggaaggcctgagcaagcacatcaagctggaagaggaacggagaagcgaggacgcccagagcaaggccgccctgaccgactggctgcgggctaaggccagcttcgtgatcgagggcctgaaggaggccgacaaggacgagttctgcagatgcgagctgaagctgcagaagtggtacggggacctgcggggaaagcccttcgccatcgaagccgagaacagcatcctggacatcagcggcttcagcaagcagtacaactgtgccttcatctggcagaaggacggcgtgaagaagctgaacctgtacctgatcatcaactacttcaagggcggcaagctgcggttcaagaagatcaaacctgaagccttcgaagccaacagattctacaccgtgatcaacaaaaagagcggcgagatcgtgcccatggaggtgaacttcaacttcgacgaccccaacctgatcatcctgcctctggcctttggcaagagacagggcagagaattcatctggaacgacctgctgtccctggaaaccggcagcctgaagctggccaacggaagagtgatcgagaagacactgtacaacagaagaacccggcaggatgagcctgccctgttcgtggccctgaccttcgagcggcgggaggtcctggactcctccaatatcaaaccaatgaacctgatcggcgtggcaagaggcgaaaacatccccgccgtgatcgccctgaccgaccccgagggctgcccactgagccggtttaaggatagcctgggaaacccaacccacatcctgagaatcggcgagagctataaggagaagcagcggaccatccaggccaagaaggaggtggagcagcggagagccggcggctacagccggaagtacgccagcaaagccaagaatctggcagacgatatggtgagaaacaccgctagagatctgctgtactacgccgtgacccaggatgccatgctgatcttcgccaacctgagccggggcttcggccggcagggcaagcggaccttcatggccgagagacagtacacacggatggaggactggctgaccgccaagctggcctacgagggcctgagcaagacctacctgtccaagacactggcccagtacacctccaagacatgcagcaactgtgggtttaccatcaccagcgccgactacgacagggtgctggagaagctgaagaagacagcaacaggctggatgaccacaattaacggcaaggagctgaaggtggagggccagattacctactacaacagatacaagagacagaacgtagtcaaggacctgtccgtcgagctggatagactgagcgaagaatctgtgaacaacgacatctcctcctggacaaagggcagaagcggagaagctctgagcctcctgaagaaaagattctcccatagacccgtgcaggagaagttcgtgtgcctgaactgcggcttcgagacacacgcagccgagcaagccgccctgaacatcgccagatcctggctgttcctgcggagccaggagtacaagaaataccagacaaacaagacaaccggcaacaccgataagagagccttcgtcgagacctggcagtccttttaccggaagaagcttaaggaggtgtggaaacctgccgtgcggtctggcggatctggcggaggctccaccagccccaagaaaaagagaaaagtctaagctgccttctgcggggcttgccttctggccatgcccttcttctctcccttgcacctgtacctcttggtctttgaataaagcctgagtaggaaggctagcaaaaaaaaaaaaaaaaaaaaaaaaaaaaaaaaaaaaaaaaaaaaaaaaaaaaaaaaaaaaaaaaaaaaaaaaaaaaaaaa

SEQ ID NO: 9538 - RNA, 8787 nt, synthetic construct
  source 1..8787: mol_type = other RNA
aggaaataagagagaaaagaagagtaagaagaaatataagagccaccatggcccctaagaagaagcgtaaagtgagccggatgaaccacgaccaggagttcgacccccctaaggtgtaccctcccgtccccgccgagaagagaaagcccatccgggtcctgagcctgttcgatggcatcgccaccggtctgctggtgctgaaggacctgggcatccaggtggataggtacattgcctccgaggtgtgcgaggactccatcaccgtgggaatggtgcgtcatcagggcaagatcatgtacgtgggcgacgtgcggagcgtgacacagaagcatatccaggagtggggccctttcgacctggtgatcggcggcagcccttgcaatgacctgagcatcgtgaacccagcccggaagggcctgtacgagggaaccggcagactgttcttcgagttttacagactgctgcacgacgcccggcctaaggaaggcgacgaccggcccttcttttggctgttcgagaatgtggtggccatgggagtcagcgacaagcgggatattagccggttcctggagagcaaccccgtgatgatcgatgccaaggaagtgagcgccgcccaccgggccagatacttctggggcaatctgcctggcatgaacagacccctggccagcaccgtgaacgacaagctggagctgcaggagtgcctggagcacggccggatcgccaagttcagcaaggtgagaaccatcaccacccgaagcaacagcatcaaacaaggcaaggaccagcactttcctgtgttcatgaacgagaaggaggacatcctgtggtgtaccgagatggagagagtgttcgggttcccagtccactacacagatgtcagcaacatgtctagactggccagacagagactgctgggaagaagctggtccgtccctgtgatcagacacctgttcgcccctctgaaggagtacttcgcctgcgtgagcagcggcaacagcaacgccaacagccggggccccagcttctctagcggcctggtgccactgtccctgagagggagccacatgggccccatggagatctacaaaaccgtgagcgcctggaagcggcagcctgtgcgcgtgctgagcctgtttcggaatatcgataaagtcctgaaaagcctgggattcctggagagcggctctggctccggcggtggcaccctgaagtacgtggaggatgtgacaaacgtggtcagacgggatgtggagaagtggggccccttcgatctggtgtacggcagcacccaacccctgggcagctcttgtgaccggtgccctggctggtacatgtttcagttccaccggatcctgcagtacgccctgccgagacaggagtcccagcggccattcttttggattttcatggacaacttgctgctgaccgaggatgaccaggaaactaccactcggttcctgcagaccgaagccgtgaccctgcaggacgtgagaggccgggactaccagaacgccatgcgggtgtggtccaacatccctggactgaaaagcaagcacgcacctctgacccctaaagaagaggagtacctgcaggcccaggtgcggagcagaagcaagctggacgcccctaaggtggatctgctggtgaagaattgcctcctgcccctgagagagtacttcaagtatttcagccagaatagtctgcccctgggaggcagcggcggcggcagccaggagctgctgaccttcaaggacgtgagcgtggacttcacccaggaggagtggggccagctggcccccgcccacaggaacctgtacagggaggtgatgctggagaactacggcaacctggtgagcgtgggctgccagctgagcaagcccggcgtgatcagccagctggagaagggcgaggagccctggctgatggagagggacatcagcggcgtgcccagcagcgacctgaagagcaagggcggcccaagcagcggcgcccctcctcccagcggcggcaggcggcccaagcagcggcgcccctcctcccagcggcggcagcccagccggctccccaacctctaccgaggagggcacctctgagtccgccacccccgagagcggccctggcacctccaccgagcccagcgagggcagcgcacccggcagccctgccggcagccccacctccacagaggagggaaccagcaccgagcccagcgaaggcagcgccccaggcaccagcaccgagcctagtgagcaggagattaaacggatcaacaagatcagaagaagacttgtgaaagacagcaacaccaagaaggccggcaagacaggccccatgaaaaccctgctggttagagtgatgacacccgatctgagagagcggctggaaaacctgagaaagaagcctgaaaatatcccccagcccatcagcaatacatctagagccaacctgaataagctgctgaccgattacaccgaaatgaagaaggcgatcctgcatgtgtactgggaagagttccagaaggaccctgtgggcctgatgagccgggtggcccagcctgccagcaagaagatcgatcagaacaagctgaaacctgagatggacgagaagggcaacctgaccaccgccggctttgcctgctctcagtgtggccagcccctgttcgtgtacaagctggagcaggtgtctgagaagggcaaggcttacaccaactacttcggacggtgcaatgtggccgagcacgaaaagctgatcctgctggcccagctgaagcccgagaaggatagcgacgaagccgtgacatatagcctgggaaagtttgggcagagggccctggatttctacagcattcatgtgaccaaggagtccacccaccccgtgaagcccctggcccagatcgccggaaacagatacgcctccggacctgtgggaaaggccctgagcgacgcatgtatgggcacaatcgcctccttcctgtctaagtaccaggacatcatcatcgaacaccagaaggtggtgaagggcaaccagaagagactggagagcctgcgggagctggccggcaaggaaaacctggaataccctagcgtgaccctgccacctcagcctcacaccaaggagggcgttgatgcctacaacgaagtgatcgcccgggtgcgaatgtgggtgaacctgaacctgtggcagaagctgaagctaagcagagatgatgccaagcctctgctgagactgaagggattcccttcctttcctctggtcgagagacaggccaacgaagtggactggtgggacatggtgtgtaacgtgaagaagctgatcaacgagaaaaaggaggatggcaaggtgttttggcagaatctggctggctacaagagacaggaagccctgagaccatacctgagcagcgaggaagatcggaagaagggaaagaaattcgctcggtaccagctgggcgacctgctgctgcacctggaaaagaagcacggcgaggactggggaaaggtgtacgacgaggcctgggagcggattgacaagaaagtggaaggcctgagcaagcacatcaagctggaagaggaacggagaagcgaggacgcccagagcaaggccgccctgaccgactggctgcgggctaaggccagcttcgtgatcgagggcctgaaggaggccgacaaggacgagttctgcagatgcgagctgaagctgcagaagtggtacggggacctgcggggaaagcccttcgccatcgaagccgagaacagcatcctggacatcagcggcttcagcaagcagtacaactgtgccttcatctggcagaaggacggcgtgaagaagctgaacctgtacctgatcatcaactacttcaagggcggcaagctgcggttcaagaagatcaaacctgaagccttcgaagccaacagattctacaccgtgatcaacaaaaagagcggcgagatcgtgcccatggaggtgaacttcaacttcgacgaccccaacctgatcatcctgcctctggcctttggcaagagacagggcagagaattcatctggaacgacctgctgtccctggaaaccggcagcctgaagctggccaacggaagagtgatcgagaagacactgtacaacagaagaacccggcaggatgagcctgccctgttcgtggccctgaccttcgagcggcgggaggtcctggactcctccaatatcaaaccaatgaacctgatcggcgtggcaagaggcgaaaacatccccgccgtgatcgccctgaccgaccccgagggctgcccactgagccggtttaaggatagcctgggaaacccaacccacatcctgagaatcggcgagagctataaggagaagcagcggaccatccaggccaagaaggaggtggagcagcggagagccggcggctacagccggaagtacgccagcaaagccaagaatctggcagacgatatggtgagaaacaccgctagagatctgctgtactacgccgtgacccaggatgccatgctgatcttcgccaacctgagccggggcttcggccggcagggcaagcggaccttcatggccgagagacagtacacacggatggaggactggctgaccgccaagctggcctacgagggcctgagcaagacctacctgtccaagacactggcccagtacacctccaagacatgcagcaactgtgggtttaccatcaccagcgccgactacgacagggtgctggagaagctgaagaagacagcaacaggctggatgaccacaattaacggcaaggagctgaaggtggagggccagattacctactacaacagatacaagagacagaacgtagtcaaggacctgtccgtcgagctggatagactgagcgaagaatctgtgaacaacgacatctcctcctggacaaagggcagaagcggagaagctctgagcctcctgaagaaaagattctcccatagacccgtgcaggagaagttcgtgtgcctgaactgcggcttcgagacacacgcagccgagcaagccgccctgaacatcgccagatcctggctgttcctgcggagccaggagtacaagaaataccagacaaacaagacaaccggcaacaccgataagagagccttcgtcgagacctggcagtccttttaccggaagaagcttaaggaggtgtggaaacctgccgtgcggtctggcggatctggcggaggctccaccagccccaagaaaaagagaaaagtctaagctgccttctgcggggcttgccttctggccatgcccttcttctctcccttgcacctgtacctcttggtctttgaataaagcctgagtaggaaggctagcaaaaaaaaaaaaaaaaaaaaaaaaaaaaaaaaaaaaaaaaaaaaaaaaaaaaaaaaaaaaaaaaaaaaaaaaaaaaaaaagcccagccggctccccaacctctaccgaggagggcacctctgagtccgccacccccgagagcggccctggcacctccaccgagcccagcgagggcagcgcacccggcagccctgccggcagccccacctccacagaggagggaaccagcaccgagcccagcgaaggcagcgccccaggcaccagcaccgagcctagtgagcaggagattaaacggatcaacaagatcagaagaagacttgtgaaagacagcaacaccaagaaggccggcaagacaggccccatgaaaaccctgctggttagagtgatgacacccgatctgagagagcggctggaaaacctgagaaagaagcctgaaaatatcccccagcccatcagcaatacatctagagccaacctgaataagctgctgaccgattacaccgaaatgaagaaggcgatcctgcatgtgtactgggaagagttccagaaggaccctgtgggcctgatgagccgggtggcccagcctgccagcaagaagatcgatcagaacaagctgaaacctgagatggacgagaagggcaacctgaccaccgccggctttgcctgctctcagtgtggccagcccctgttcgtgtacaagctggagcaggtgtctgagaagggcaaggcttacaccaactacttcggacggtgcaatgtggccgagcacgaaaagctgatcctgctggcccagctgaagcccgagaaggatagcgacgaagccgtgacatatagcctgggaaagtttgggcagagggccctggatttctacagcattcatgtgaccaaggagtccacccaccccgtgaagcccctggcccagatcgccggaaacagatacgcctccggacctgtgggaaaggccctgagcgacgcatgtatgggcacaatcgcctccttcctgtctaagtaccaggacatcatcatcgaacaccagaaggtggtgaagggcaaccagaagagactggagagcctgcgggagctggccggcaaggaaaacctggaataccctagcgtgaccctgccacctcagcctcacaccaaggagggcgttgatgcctacaacgaagtgatcgcccgggtgcgaatgtgggtgaacctgaacctgtggcagaagctgaagctaagcagagatgatgccaagcctctgctgagactgaagggattcccttcctttcctctggtcgagagacaggccaacgaagtggactggtgggacatggtgtgtaacgtgaagaagctgatcaacgagaaaaaggaggatggcaaggtgttttggcagaatctggctggctacaagagacaggaagccctgagaccatacctgagcagcgaggaagatcggaagaagggaaagaaattcgctcggtaccagctgggcgacctgctgctgcacctggaaaagaagcacggcgaggactggggaaaggtgtacgacgaggcctgggagcggattgacaagaaagtggaaggcctgagcaagcacatcaagctggaagaggaacggagaagcgaggacgcccagagcaaggccgccctgaccgactggctgcgggctaaggccagcttcgtgatcgagggcctgaaggaggccgacaaggacgagttctgcagatgcgagctgaagctgcagaagtggtacggggacctgcggggaaagcccttcgccatcgaagccgagaacagcatcctggacatcagcggcttcagcaagcagtacaactgtgccttcatctggcagaaggacggcgtgaagaagctgaacctgtacctgatcatcaactacttcaagggcggcaagctgcggttcaagaagatcaaacctgaagccttcgaagccaacagattctacaccgtgatcaacaaaaagagcggcgagatcgtgcccatggaggtgaacttcaacttcgacgaccccaacctgatcatcctgcctctggcctttggcaagagacagggcagagaattcatctggaacgacctgctgtccctggaaaccggcagcctgaagctggccaacggaagagtgatcgagaagacactgtacaacagaagaacccggcaggatgagcctgccctgttcgtggccctgaccttcgagcggcgggaggtcctggactcctccaatatcaaaccaatgaacctgatcggcgtggcaagaggcgaaaacatccccgccgtgatcgccctgaccgaccccgagggctgcccactgagccggtttaaggatagcctgggaaacccaacccacatcctgagaatcggcgagagctataaggagaagcagcggaccatccaggccaagaaggaggtggagcagcggagagccggcggctacagccggaagtacgccagcaaagccaagaatctggcagacgatatggtgagaaacaccgctagagatctgctgtactacgccgtgacccaggatgccatgctgatcttcgccaacctgagccggggcttcggccggcagggcaagcggaccttcatggccgagagacagtacacacggatggaggactggctgaccgccaagctggcctacgagggcctgagcaagacctacctgtccaagacactggcccagtacacctccaagacatgcagcaactgtgggtttaccatcaccagcgccgactacgacagggtgctggagaagctgaagaagacagcaacaggctggatgaccacaattaacggcaaggagctgaaggtggagggccagattacctactacaacagatacaagagacagaacgtagtcaaggacctgtccgtcgagctggatagactgagcgaagaatctgtgaacaacgacatctcctcctggacaaagggcagaagcggagaagctctgagcctcctgaagaaaagattctcccatagacccgtgcaggagaagttcgtgtgcctgaactgcggcttcgagacacacgcagccgagcaagccgccctgaacatcgccagatcctggctgttcctgcggagccaggagtacaagaaataccagacaaacaagacaaccggcaacaccgataagagagccttcgtcgagacctggcagtccttttaccggaagaagcttaaggaggtgtggaaacctgccgtgcggtctggcggatctggcggaggctccaccagccccaagaaaaagagaaaagtctaagctgccttctgcggggcttgccttctggccatgcccttcttctctcccttgcacctgtacctcttggtctttgaataaagcctgagtaggaaggctagcaaaaaaaaaaaaaaaaaaaaaaaaaaaaaaaaaaaaaaaaaaaaaaaaaaaaaaaaaaaaaaaaaaaaaaaaaaaaaaaa

SEQ ID NO: 9539 - RNA, 8787 nt, synthetic construct
  source 1..8787: mol_type = other RNA
aggaaataagagagaaaagaagagtaagaagaaatataagagccaccatggcccctaagaagaagcgtaaagtgagccggatgaaccacgaccaggagttcgacccccctaaggtgtaccctcccgtccccgccgagaagagaaagcccatccgggtcctgagcctgttcgatggcatcgccaccggtctgctggtgctgaaggacctgggcatccaggtggataggtacattgcctccgaggtgtgcgaggactccatcaccgtgggaatggtgcgtcatcagggcaagatcatgtacgtgggcgacgtgcggagcgtgacacagaagcatatccaggagtggggccctttcgacctggtgatcggcggcagcccttgcaatgacctgagcatcgtgaacccagcccggaagggcctgtacgagggaaccggcagactgttcttcgagttttacagactgctgcacgacgcccggcctaaggaaggcgacgaccggcccttcttttggctgttcgagaatgtggtggccatgggagtcagcgacaagcgggatattagccggttcctggagagcaaccccgtgatgatcgatgccaaggaagtgagcgccgcccaccgggccagatacttctggggcaatctgcctggcatgaacagacccctggccagcaccgtgaacgacaagctggagctgcaggagtgcctggagcacggccggatcgccaagttcagcaaggtgagaaccatcaccacccgaagcaacagcatcaaacaaggcaaggaccagcactttcctgtgttcatgaacgagaaggaggacatcctgtggtgtaccgagatggagagagtgttcgggttcccagtccactacacagatgtcagcaacatgtctagactggccagacagagactgctgggaagaagctggtccgtccctgtgatcagacacctgttcgcccctctgaaggagtacttcgcctgcgtgagcagcggcaacagcaacgccaacagccggggccccagcttctctagcggcctggtgccactgtccctgagagggagccacatgggccccatggagatctacaaaaccgtgagcgcctggaagcggcagcctgtgcgcgtgctgagcctgtttcggaatatcgataaagtcctgaaaagcctgggattcctggagagcggctctggctccggcggtggcaccctgaagtacgtggaggatgtgacaaacgtggtcagacgggatgtggagaagtggggccccttcgatctggtgtacggcagcacccaacccctgggcagctcttgtgaccggtgccctggctggtacatgtttcagttccaccggatcctgcagtacgccctgccgagacaggagtcccagcggccattcttttggattttcatggacaacttgctgctgaccgaggatgaccaggaaactaccactcggttcctgcagaccgaagccgtgaccctgcaggacgtgagaggccgggactaccagaacgccatgcgggtgtggtccaacatccctggactgaaaagcaagcacgcacctctgacccctaaagaagaggagtacctgcaggcccaggtgcggagcagaagcaagctggacgcccctaaggtggatctgctggtgaagaattgcctcctgcccctgagagagtacttcaagtatttcagccagaatagtctgcccctgggaggcagcggcggcggcatggccaacgccaccggcagcggcgtggagcagaagttccagggcagcgtgagcttcaaggacgtgaccgtgggcttcacccaggaggagtggcagcacctggaccccagccagagggccctgtacagggacgtgatgctggagaactacagcaacctggtgagcgtgggctactgcgtgcacaagcccgaggtgatcttcaggctggagcagggcgaggagccctggaagctggaggaggagggcggcccaagcagcggcgcccctcctcccagcggcggcaggcggcccaagcagcggcgcccctcctcccagcggcggcagcccagccggctccccaacctctaccgaggagggcacctctgagtccgccacccccgagagcggccctggcacctccaccgagcccagcgagggcagcgcacccggcagccctgccggcagccccacctccacagaggagggaaccagcaccgagcccagcgaaggcagcgccccaggcaccagcaccgagcctagtgagcaggagattaaacggatcaacaagatcagaagaagacttgtgaaagacagcaacaccaagaaggccggcaagacaggccccatgaaaaccctgctggttagagtgatgacacccgatctgagagagcggctggaaaacctgagaaagaagcctgaaaatatcccccagcccatcagcaatacatctagagccaacctgaataagctgctgaccgattacaccgaaatgaagaaggcgatcctgcatgtgtactgggaagagttccagaaggaccctgtgggcctgatgagccgggtggcccagcctgccagcaagaagatcgatcagaacaagctgaaacctgagatggacgagaagggcaacctgaccaccgccggctttgcctgctctcagtgtggccagcccctgttcgtgtacaagctggagcaggtgtctgagaagggcaaggcttacaccaactacttcggacggtgcaatgtggccgagcacgaaaagctgatcctgctggcccagctgaagcccgagaaggatagcgacgaagccgtgacatatagcctgggaaagtttgggcagagggccctggatttctacagcattcatgtgaccaaggagtccacccaccccgtgaagcccctggcccagatcgccggaaacagatacgcctccggacctgtgggaaaggccctgagcgacgcatgtatgggcacaatcgcctccttcctgtctaagtaccaggacatcatcatcgaacaccagaaggtggtgaagggcaaccagaagagactggagagcctgcgggagctggccggcaaggaaaacctggaataccctagcgtgaccctgccacctcagcctcacaccaaggagggcgttgatgcctacaacgaagtgatcgcccgggtgcgaatgtgggtgaacctgaacctgtggcagaagctgaagctaagcagagatgatgccaagcctctgctgagactgaagggattcccttcctttcctctggtcgagagacaggccaacgaagtggactggtgggacatggtgtgtaacgtgaagaagctgatcaacgagaaaaaggaggatggcaaggtgttttggcagaatctggctggctacaagagacaggaagccctgagaccatacctgagcagcgaggaagatcggaagaagggaaagaaattcgctcggtaccagctgggcgacctgctgctgcacctggaaaagaagcacggcgaggactggggaaaggtgtacgacgaggcctgggagcggattgacaagaaagtggaaggcctgagcaagcacatcaagctggaagaggaacggagaagcgaggacgcccagagcaaggccgccctgaccgactggctgcgggctaaggccagcttcgtgatcgagggcctgaaggaggccgacaaggacgagttctgcagatgcgagctgaagctgcagaagtggtacggggacctgcggggaaagcccttcgccatcgaagccgagaacagcatcctggacatcagcggcttcagcaagcagtacaactgtgccttcatctggcagaaggacggcgtgaagaagctgaacctgtacctgatcatcaactacttcaagggcggcaagctgcggttcaagaagatcaaacctgaagccttcgaagccaacagattctacaccgtgatcaacaaaaagagcggcgagatcgtgcccatggaggtgaacttcaacttcgacgaccccaacctgatcatcctgcctctggcctttggcaagagacagggcagagaattcatctggaacgacctgctgtccctggaaaccggcagcctgaagctggccaacggaagagtgatcgagaagacactgtacaacagaagaacccggcaggatgagcctgccctgttcgtggccctgaccttcgagcggcgggaggtcctggactcctccaatatcaaaccaatgaacctgatcggcgtggcaagaggcgaaaacatccccgccgtgatcgccctgaccgaccccgagggctgcccactgagccggtttaaggatagcctgggaaacccaacccacatcctgagaatcggcgagagctataaggagaagcagcggaccatccaggccaagaaggaggtggagcagcggagagccggcggctacagccggaagtacgccagcaaagccaagaatctggcagacgatatggtgagaaacaccgctagagatctgctgtactacgccgtgacccaggatgccatgctgatcttcgccaacctgagccggggcttcggccggcagggcaagcggaccttcatggccgagagacagtacacacggatggaggactggctgaccgccaagctggcctacgagggcctgagcaagacctacctgtccaagacactggcccagtacacctccaagacatgcagcaactgtgggtttaccatcaccagcgccgactacgacagggtgctggagaagctgaagaagacagcaacaggctggatgaccacaattaacggcaaggagctgaaggtggagggccagattacctactacaacagatacaagagacagaacgtagtcaaggacctgtccgtcgagctggatagactgagcgaagaatctgtgaacaacgacatctcctcctggacaaagggcagaagcggagaagctctgagcctcctgaagaaaagattctcccatagacccgtgcaggagaagttcgtgtgcctgaactgcggcttcgagacacacgcagccgagcaagccgccctgaacatcgccagatcctggctgttcctgcggagccaggagtacaagaaataccagacaaacaagacaaccggcaacaccgataagagagccttcgtcgagacctggcagtccttttaccggaagaagcttaaggaggtgtggaaacctgccgtgcggtctggcggatctggcggaggctccaccagccccaagaaaaagagaaaagtctaagctgccttctgcggggcttgccttctggccatgcccttcttctctcccttgcacctgtacctcttggtctttgaataaagcctgagtaggaaggctagcaaaaaaaaaaaaaaaaaaaaaaaaaaaaaaaaaaaaaaaaaaaaaaaaaaaaaaaaaaaaaaaaaaaaaaaaaaaaaaaagcccagccggctccccaacctctaccgaggagggcacctctgagtccgccacccccgagagcggccctggcacctccaccgagcccagcgagggcagcgcacccggcagccctgccggcagccccacctccacagaggagggaaccagcaccgagcccagcgaaggcagcgccccaggcaccagcaccgagcctagtgagcaggagattaaacggatcaacaagatcagaagaagacttgtgaaagacagcaacaccaagaaggccggcaagacaggccccatgaaaaccctgctggttagagtgatgacacccgatctgagagagcggctggaaaacctgagaaagaagcctgaaaatatcccccagcccatcagcaatacatctagagccaacctgaataagctgctgaccgattacaccgaaatgaagaaggcgatcctgcatgtgtactgggaagagttccagaaggaccctgtgggcctgatgagccgggtggcccagcctgccagcaagaagatcgatcagaacaagctgaaacctgagatggacgagaagggcaacctgaccaccgccggctttgcctgctctcagtgtggccagcccctgttcgtgtacaagctggagcaggtgtctgagaagggcaaggcttacaccaactacttcggacggtgcaatgtggccgagcacgaaaagctgatcctgctggcccagctgaagcccgagaaggatagcgacgaagccgtgacatatagcctgggaaagtttgggcagagggccctggatttctacagcattcatgtgaccaaggagtccacccaccccgtgaagcccctggcccagatcgccggaaacagatacgcctccggacctgtgggaaaggccctgagcgacgcatgtatgggcacaatcgcctccttcctgtctaagtaccaggacatcatcatcgaacaccagaaggtggtgaagggcaaccagaagagactggagagcctgcgggagctggccggcaaggaaaacctggaataccctagcgtgaccctgccacctcagcctcacaccaaggagggcgttgatgcctacaacgaagtgatcgcccgggtgcgaatgtgggtgaacctgaacctgtggcagaagctgaagctaagcagagatgatgccaagcctctgctgagactgaagggattcccttcctttcctctggtcgagagacaggccaacgaagtggactggtgggacatggtgtgtaacgtgaagaagctgatcaacgagaaaaaggaggatggcaaggtgttttggcagaatctggctggctacaagagacaggaagccctgagaccatacctgagcagcgaggaagatcggaagaagggaaagaaattcgctcggtaccagctgggcgacctgctgctgcacctggaaaagaagcacggcgaggactggggaaaggtgtacgacgaggcctgggagcggattgacaagaaagtggaaggcctgagcaagcacatcaagctggaagaggaacggagaagcgaggacgcccagagcaaggccgccctgaccgactggctgcgggctaaggccagcttcgtgatcgagggcctgaaggaggccgacaaggacgagttctgcagatgcgagctgaagctgcagaagtggtacggggacctgcggggaaagcccttcgccatcgaagccgagaacagcatcctggacatcagcggcttcagcaagcagtacaactgtgccttcatctggcagaaggacggcgtgaagaagctgaacctgtacctgatcatcaactacttcaagggcggcaagctgcggttcaagaagatcaaacctgaagccttcgaagccaacagattctacaccgtgatcaacaaaaagagcggcgagatcgtgcccatggaggtgaacttcaacttcgacgaccccaacctgatcatcctgcctctggcctttggcaagagacagggcagagaattcatctggaacgacctgctgtccctggaaaccggcagcctgaagctggccaacggaagagtgatcgagaagacactgtacaacagaagaacccggcaggatgagcctgccctgttcgtggccctgaccttcgagcggcgggaggtcctggactcctccaatatcaaaccaatgaacctgatcggcgtggcaagaggcgaaaacatccccgccgtgatcgccctgaccgaccccgagggctgcccactgagccggtttaaggatagcctgggaaacccaacccacatcctgagaatcggcgagagctataaggagaagcagcggaccatccaggccaagaaggaggtggagcagcggagagccggcggctacagccggaagtacgccagcaaagccaagaatctggcagacgatatggtgagaaacaccgctagagatctgctgtactacgccgtgacccaggatgccatgctgatcttcgccaacctgagccggggcttcggccggcagggcaagcggaccttcatggccgagagacagtacacacggatggaggactggctgaccgccaagctggcctacgagggcctgagcaagacctacctgtccaagacactggcccagtacacctccaagacatgcagcaactgtgggtttaccatcaccagcgccgactacgacagggtgctggagaagctgaagaagacagcaacaggctggatgaccacaattaacggcaaggagctgaaggtggagggccagattacctactacaacagatacaagagacagaacgtagtcaaggacctgtccgtcgagctggatagactgagcgaagaatctgtgaacaacgacatctcctcctggacaaagggcagaagcggagaagctctgagcctcctgaagaaaagattctcccatagacccgtgcaggagaagttcgtgtgcctgaactgcggcttcgagacacacgcagccgagcaagccgccctgaacatcgccagatcctggctgttcctgcggagccaggagtacaagaaataccagacaaacaagacaaccggcaacaccgataagagagccttcgtcgagacctggcagtccttttaccggaagaagcttaaggaggtgtggaaacctgccgtgcggtctggcggatctggcggaggctccaccagccccaagaaaaagagaaaagtctaagctgccttctgcggggcttgccttctggccatgcccttcttctctcccttgcacctgtacctcttggtctttgaataaagcctgagtaggaaggctagcaaaaaaaaaaaaaaaaaaaaaaaaaaaaaaaaaaaaaaaaaaaaaaaaaaaaaaaaaaaaaaaaaaaaaaaaaaaaaaaa

SEQ ID NO: 9540 - RNA, 8787 nt, synthetic construct
  source 1..8787: mol_type = other RNA
aggaaataagagagaaaagaagagtaagaagaaatataagagccaccatggcccctaagaagaagcgtaaagtgagccggatgaaccacgaccaggagttcgacccccctaaggtgtaccctcccgtccccgccgagaagagaaagcccatccgggtcctgagcctgttcgatggcatcgccaccggtctgctggtgctgaaggacctgggcatccaggtggataggtacattgcctccgaggtgtgcgaggactccatcaccgtgggaatggtgcgtcatcagggcaagatcatgtacgtgggcgacgtgcggagcgtgacacagaagcatatccaggagtggggccctttcgacctggtgatcggcggcagcccttgcaatgacctgagcatcgtgaacccagcccggaagggcctgtacgagggaaccggcagactgttcttcgagttttacagactgctgcacgacgcccggcctaaggaaggcgacgaccggcccttcttttggctgttcgagaatgtggtggccatgggagtcagcgacaagcgggatattagccggttcctggagagcaaccccgtgatgatcgatgccaaggaagtgagcgccgcccaccgggccagatacttctggggcaatctgcctggcatgaacagacccctggccagcaccgtgaacgacaagctggagctgcaggagtgcctggagcacggccggatcgccaagttcagcaaggtgagaaccatcaccacccgaagcaacagcatcaaacaaggcaaggaccagcactttcctgtgttcatgaacgagaaggaggacatcctgtggtgtaccgagatggagagagtgttcgggttcccagtccactacacagatgtcagcaacatgtctagactggccagacagagactgctgggaagaagctggtccgtccctgtgatcagacacctgttcgcccctctgaaggagtacttcgcctgcgtgagcagcggcaacagcaacgccaacagccggggccccagcttctctagcggcctggtgccactgtccctgagagggagccacatgggccccatggagatctacaaaaccgtgagcgcctggaagcggcagcctgtgcgcgtgctgagcctgtttcggaatatcgataaagtcctgaaaagcctgggattcctggagagcggctctggctccggcggtggcaccctgaagtacgtggaggatgtgacaaacgtggtcagacgggatgtggagaagtggggccccttcgatctggtgtacggcagcacccaacccctgggcagctcttgtgaccggtgccctggctggtacatgtttcagttccaccggatcctgcagtacgccctgccgagacaggagtcccagcggccattcttttggattttcatggacaacttgctgctgaccgaggatgaccaggaaactaccactcggttcctgcagaccgaagccgtgaccctgcaggacgtgagaggccgggactaccagaacgccatgcgggtgtggtccaacatccctggactgaaaagcaagcacgcacctctgacccctaaagaagaggagtacctgcaggcccaggtgcggagcagaagcaagctggacgcccctaaggtggatctgctggtgaagaattgcctcctgcccctgagagagtacttcaagtatttcagccagaatagtctgcccctgggaggcagcggcggcggcgaggaggtgcccgtggtgttcgaggacgtggccgtgtacttcaccagggacgagtggggcaccctggacaagaggcagaaggagctgtacagggacgtgatgcagatgaactacgagctgctggccagcctgggccccgccgccgccaagcccgacctgatcagcaagctggagcagagggccgccccctggatcaaggacccccacggccccacctggggcaagggcaggccccccggcaagggcggcccaagcagcggcgcccctcctcccagcggcggcaggcggcccaagcagcggcgcccctcctcccagcggcggcagcccagccggctccccaacctctaccgaggagggcacctctgagtccgccacccccgagagcggccctggcacctccaccgagcccagcgagggcagcgcacccggcagccctgccggcagccccacctccacagaggagggaaccagcaccgagcccagcgaaggcagcgccccaggcaccagcaccgagcctagtgagcaggagattaaacggatcaacaagatcagaagaagacttgtgaaagacagcaacaccaagaaggccggcaagacaggccccatgaaaaccctgctggttagagtgatgacacccgatctgagagagcggctggaaaacctgagaaagaagcctgaaaatatcccccagcccatcagcaatacatctagagccaacctgaataagctgctgaccgattacaccgaaatgaagaaggcgatcctgcatgtgtactgggaagagttccagaaggaccctgtgggcctgatgagccgggtggcccagcctgccagcaagaagatcgatcagaacaagctgaaacctgagatggacgagaagggcaacctgaccaccgccggctttgcctgctctcagtgtggccagcccctgttcgtgtacaagctggagcaggtgtctgagaagggcaaggcttacaccaactacttcggacggtgcaatgtggccgagcacgaaaagctgatcctgctggcccagctgaagcccgagaaggatagcgacgaagccgtgacatatagcctgggaaagtttgggcagagggccctggatttctacagcattcatgtgaccaaggagtccacccaccccgtgaagcccctggcccagatcgccggaaacagatacgcctccggacctgtgggaaaggccctgagcgacgcatgtatgggcacaatcgcctccttcctgtctaagtaccaggacatcatcatcgaacaccagaaggtggtgaagggcaaccagaagagactggagagcctgcgggagctggccggcaaggaaaacctggaataccctagcgtgaccctgccacctcagcctcacaccaaggagggcgttgatgcctacaacgaagtgatcgcccgggtgcgaatgtgggtgaacctgaacctgtggcagaagctgaagctaagcagagatgatgccaagcctctgctgagactgaagggattcccttcctttcctctggtcgagagacaggccaacgaagtggactggtgggacatggtgtgtaacgtgaagaagctgatcaacgagaaaaaggaggatggcaaggtgttttggcagaatctggctggctacaagagacaggaagccctgagaccatacctgagcagcgaggaagatcggaagaagggaaagaaattcgctcggtaccagctgggcgacctgctgctgcacctggaaaagaagcacggcgaggactggggaaaggtgtacgacgaggcctgggagcggattgacaagaaagtggaaggcctgagcaagcacatcaagctggaagaggaacggagaagcgaggacgcccagagcaaggccgccctgaccgactggctgcgggctaaggccagcttcgtgatcgagggcctgaaggaggccgacaaggacgagttctgcagatgcgagctgaagctgcagaagtggtacggggacctgcggggaaagcccttcgccatcgaagccgagaacagcatcctggacatcagcggcttcagcaagcagtacaactgtgccttcatctggcagaaggacggcgtgaagaagctgaacctgtacctgatcatcaactacttcaagggcggcaagctgcggttcaagaagatcaaacctgaagccttcgaagccaacagattctacaccgtgatcaacaaaaagagcggcgagatcgtgcccatggaggtgaacttcaacttcgacgaccccaacctgatcatcctgcctctggcctttggcaagagacagggcagagaattcatctggaacgacctgctgtccctggaaaccggcagcctgaagctggccaacggaagagtgatcgagaagacactgtacaacagaagaacccggcaggatgagcctgccctgttcgtggccctgaccttcgagcggcgggaggtcctggactcctccaatatcaaaccaatgaacctgatcggcgtggcaagaggcgaaaacatccccgccgtgatcgccctgaccgaccccgagggctgcccactgagccggtttaaggatagcctgggaaacccaacccacatcctgagaatcggcgagagctataaggagaagcagcggaccatccaggccaagaaggaggtggagcagcggagagccggcggctacagccggaagtacgccagcaaagccaagaatctggcagacgatatggtgagaaacaccgctagagatctgctgtactacgccgtgacccaggatgccatgctgatcttcgccaacctgagccggggcttcggccggcagggcaagcggaccttcatggccgagagacagtacacacggatggaggactggctgaccgccaagctggcctacgagggcctgagcaagacctacctgtccaagacactggcccagtacacctccaagacatgcagcaactgtgggtttaccatcaccagcgccgactacgacagggtgctggagaagctgaagaagacagcaacaggctggatgaccacaattaacggcaaggagctgaaggtggagggccagattacctactacaacagatacaagagacagaacgtagtcaaggacctgtccgtcgagctggatagactgagcgaagaatctgtgaacaacgacatctcctcctggacaaagggcagaagcggagaagctctgagcctcctgaagaaaagattctcccatagacccgtgcaggagaagttcgtgtgcctgaactgcggcttcgagacacacgcagccgagcaagccgccctgaacatcgccagatcctggctgttcctgcggagccaggagtacaagaaataccagacaaacaagacaaccggcaacaccgataagagagccttcgtcgagacctggcagtccttttaccggaagaagcttaaggaggtgtggaaacctgccgtgcggtctggcggatctggcggaggctccaccagccccaagaaaaagagaaaagtctaagctgccttctgcggggcttgccttctggccatgcccttcttctctcccttgcacctgtacctcttggtctttgaataaagcctgagtaggaaggctagcaaaaaaaaaaaaaaaaaaaaaaaaaaaaaaaaaaaaaaaaaaaaaaaaaaaaaaaaaaaaaaaaaaaaaaaaaaaaaaaagcccagccggctccccaacctctaccgaggagggcacctctgagtccgccacccccgagagcggccctggcacctccaccgagcccagcgagggcagcgcacccggcagccctgccggcagccccacctccacagaggagggaaccagcaccgagcccagcgaaggcagcgccccaggcaccagcaccgagcctagtgagcaggagattaaacggatcaacaagatcagaagaagacttgtgaaagacagcaacaccaagaaggccggcaagacaggccccatgaaaaccctgctggttagagtgatgacacccgatctgagagagcggctggaaaacctgagaaagaagcctgaaaatatcccccagcccatcagcaatacatctagagccaacctgaataagctgctgaccgattacaccgaaatgaagaaggcgatcctgcatgtgtactgggaagagttccagaaggaccctgtgggcctgatgagccgggtggcccagcctgccagcaagaagatcgatcagaacaagctgaaacctgagatggacgagaagggcaacctgaccaccgccggctttgcctgctctcagtgtggccagcccctgttcgtgtacaagctggagcaggtgtctgagaagggcaaggcttacaccaactacttcggacggtgcaatgtggccgagcacgaaaagctgatcctgctggcccagctgaagcccgagaaggatagcgacgaagccgtgacatatagcctgggaaagtttgggcagagggccctggatttctacagcattcatgtgaccaaggagtccacccaccccgtgaagcccctggcccagatcgccggaaacagatacgcctccggacctgtgggaaaggccctgagcgacgcatgtatgggcacaatcgcctccttcctgtctaagtaccaggacatcatcatcgaacaccagaaggtggtgaagggcaaccagaagagactggagagcctgcgggagctggccggcaaggaaaacctggaataccctagcgtgaccctgccacctcagcctcacaccaaggagggcgttgatgcctacaacgaagtgatcgcccgggtgcgaatgtgggtgaacctgaacctgtggcagaagctgaagctaagcagagatgatgccaagcctctgctgagactgaagggattcccttcctttcctctggtcgagagacaggccaacgaagtggactggtgggacatggtgtgtaacgtgaagaagctgatcaacgagaaaaaggaggatggcaaggtgttttggcagaatctggctggctacaagagacaggaagccctgagaccatacctgagcagcgaggaagatcggaagaagggaaagaaattcgctcggtaccagctgggcgacctgctgctgcacctggaaaagaagcacggcgaggactggggaaaggtgtacgacgaggcctgggagcggattgacaagaaagtggaaggcctgagcaagcacatcaagctggaagaggaacggagaagcgaggacgcccagagcaaggccgccctgaccgactggctgcgggctaaggccagcttcgtgatcgagggcctgaaggaggccgacaaggacgagttctgcagatgcgagctgaagctgcagaagtggtacggggacctgcggggaaagcccttcgccatcgaagccgagaacagcatcctggacatcagcggcttcagcaagcagtacaactgtgccttcatctggcagaaggacggcgtgaagaagctgaacctgtacctgatcatcaactacttcaagggcggcaagctgcggttcaagaagatcaaacctgaagccttcgaagccaacagattctacaccgtgatcaacaaaaagagcggcgagatcgtgcccatggaggtgaacttcaacttcgacgaccccaacctgatcatcctgcctctggcctttggcaagagacagggcagagaattcatctggaacgacctgctgtccctggaaaccggcagcctgaagctggccaacggaagagtgatcgagaagacactgtacaacagaagaacccggcaggatgagcctgccctgttcgtggccctgaccttcgagcggcgggaggtcctggactcctccaatatcaaaccaatgaacctgatcggcgtggcaagaggcgaaaacatccccgccgtgatcgccctgaccgaccccgagggctgcccactgagccggtttaaggatagcctgggaaacccaacccacatcctgagaatcggcgagagctataaggagaagcagcggaccatccaggccaagaaggaggtggagcagcggagagccggcggctacagccggaagtacgccagcaaagccaagaatctggcagacgatatggtgagaaacaccgctagagatctgctgtactacgccgtgacccaggatgccatgctgatcttcgccaacctgagccggggcttcggccggcagggcaagcggaccttcatggccgagagacagtacacacggatggaggactggctgaccgccaagctggcctacgagggcctgagcaagacctacctgtccaagacactggcccagtacacctccaagacatgcagcaactgtgggtttaccatcaccagcgccgactacgacagggtgctggagaagctgaagaagacagcaacaggctggatgaccacaattaacggcaaggagctgaaggtggagggccagattacctactacaacagatacaagagacagaacgtagtcaaggacctgtccgtcgagctggatagactgagcgaagaatctgtgaacaacgacatctcctcctggacaaagggcagaagcggagaagctctgagcctcctgaagaaaagattctcccatagacccgtgcaggagaagttcgtgtgcctgaactgcggcttcgagacacacgcagccgagcaagccgccctgaacatcgccagatcctggctgttcctgcggagccaggagtacaagaaataccagacaaacaagacaaccggcaacaccgataagagagccttcgtcgagacctggcagtccttttaccggaagaagcttaaggaggtgtggaaacctgccgtgcggtctggcggatctggcggaggctccaccagccccaagaaaaagagaaaagtctaagctgccttctgcggggcttgccttctggccatgcccttcttctctcccttgcacctgtacctcttggtctttgaataaagcctgagtaggaaggctagcaaaaaaaaaaaaaaaaaaaaaaaaaaaaaaaaaaaaaaaaaaaaaaaaaaaaaaaaaaaaaaaaaaaaaaaaaaaaaaaa

SEQ ID NO: 9541 - RNA, 8787 nt, synthetic construct
  source 1..8787: mol_type = other RNA
aggaaataagagagaaaagaagagtaagaagaaatataagagccaccatggcccctaagaagaagcgtaaagtgagccggatgaaccacgaccaggagttcgacccccctaaggtgtaccctcccgtccccgccgagaagagaaagcccatccgggtcctgagcctgttcgatggcatcgccaccggtctgctggtgctgaaggacctgggcatccaggtggataggtacattgcctccgaggtgtgcgaggactccatcaccgtgggaatggtgcgtcatcagggcaagatcatgtacgtgggcgacgtgcggagcgtgacacagaagcatatccaggagtggggccctttcgacctggtgatcggcggcagcccttgcaatgacctgagcatcgtgaacccagcccggaagggcctgtacgagggaaccggcagactgttcttcgagttttacagactgctgcacgacgcccggcctaaggaaggcgacgaccggcccttcttttggctgttcgagaatgtggtggccatgggagtcagcgacaagcgggatattagccggttcctggagagcaaccccgtgatgatcgatgccaaggaagtgagcgccgcccaccgggccagatacttctggggcaatctgcctggcatgaacagacccctggccagcaccgtgaacgacaagctggagctgcaggagtgcctggagcacggccggatcgccaagttcagcaaggtgagaaccatcaccacccgaagcaacagcatcaaacaaggcaaggaccagcactttcctgtgttcatgaacgagaaggaggacatcctgtggtgtaccgagatggagagagtgttcgggttcccagtccactacacagatgtcagcaacatgtctagactggccagacagagactgctgggaagaagctggtccgtccctgtgatcagacacctgttcgcccctctgaaggagtacttcgcctgcgtgagcagcggcaacagcaacgccaacagccggggccccagcttctctagcggcctggtgccactgtccctgagagggagccacatgggccccatggagatctacaaaaccgtgagcgcctggaagcggcagcctgtgcgcgtgctgagcctgtttcggaatatcgataaagtcctgaaaagcctgggattcctggagagcggctctggctccggcggtggcaccctgaagtacgtggaggatgtgacaaacgtggtcagacgggatgtggagaagtggggccccttcgatctggtgtacggcagcacccaacccctgggcagctcttgtgaccggtgccctggctggtacatgtttcagttccaccggatcctgcagtacgccctgccgagacaggagtcccagcggccattcttttggattttcatggacaacttgctgctgaccgaggatgaccaggaaactaccactcggttcctgcagaccgaagccgtgaccctgcaggacgtgagaggccgggactaccagaacgccatgcgggtgtggtccaacatccctggactgaaaagcaagcacgcacctctgacccctaaagaagaggagtacctgcaggcccaggtgcggagcagaagcaagctggacgcccctaaggtggatctgctggtgaagaattgcctcctgcccctgagagagtacttcaagtatttcagccagaatagtctgcccctgggaggcagcggcggcggcttcgaggagagcgtgaccttcgaggacgtggccgtgtacttcagcgagaacgagtggaccggcctggcccccgcccagagggtgctgtacagggacgtgatgctggagaactacggcgccgtggccagcctggccttccccttccccaagcccgccctgatcagccagctggagaggggcgaggccccctggtgcaaggccccccagggcgccctggacggcggcggccccaggggcatcagcggcggcccaagcagcggcgcccctcctcccagcggcggcaggcggcccaagcagcggcgcccctcctcccagcggcggcagcccagccggctccccaacctctaccgaggagggcacctctgagtccgccacccccgagagcggccctggcacctccaccgagcccagcgagggcagcgcacccggcagccctgccggcagccccacctccacagaggagggaaccagcaccgagcccagcgaaggcagcgccccaggcaccagcaccgagcctagtgagcaggagattaaacggatcaacaagatcagaagaagacttgtgaaagacagcaacaccaagaaggccggcaagacaggccccatgaaaaccctgctggttagagtgatgacacccgatctgagagagcggctggaaaacctgagaaagaagcctgaaaatatcccccagcccatcagcaatacatctagagccaacctgaataagctgctgaccgattacaccgaaatgaagaaggcgatcctgcatgtgtactgggaagagttccagaaggaccctgtgggcctgatgagccgggtggcccagcctgccagcaagaagatcgatcagaacaagctgaaacctgagatggacgagaagggcaacctgaccaccgccggctttgcctgctctcagtgtggccagcccctgttcgtgtacaagctggagcaggtgtctgagaagggcaaggcttacaccaactacttcggacggtgcaatgtggccgagcacgaaaagctgatcctgctggcccagctgaagcccgagaaggatagcgacgaagccgtgacatatagcctgggaaagtttgggcagagggccctggatttctacagcattcatgtgaccaaggagtccacccaccccgtgaagcccctggcccagatcgccggaaacagatacgcctccggacctgtgggaaaggccctgagcgacgcatgtatgggcacaatcgcctccttcctgtctaagtaccaggacatcatcatcgaacaccagaaggtggtgaagggcaaccagaagagactggagagcctgcgggagctggccggcaaggaaaacctggaataccctagcgtgaccctgccacctcagcctcacaccaaggagggcgttgatgcctacaacgaagtgatcgcccgggtgcgaatgtgggtgaacctgaacctgtggcagaagctgaagctaagcagagatgatgccaagcctctgctgagactgaagggattcccttcctttcctctggtcgagagacaggccaacgaagtggactggtgggacatggtgtgtaacgtgaagaagctgatcaacgagaaaaaggaggatggcaaggtgttttggcagaatctggctggctacaagagacaggaagccctgagaccatacctgagcagcgaggaagatcggaagaagggaaagaaattcgctcggtaccagctgggcgacctgctgctgcacctggaaaagaagcacggcgaggactggggaaaggtgtacgacgaggcctgggagcggattgacaagaaagtggaaggcctgagcaagcacatcaagctggaagaggaacggagaagcgaggacgcccagagcaaggccgccctgaccgactggctgcgggctaaggccagcttcgtgatcgagggcctgaaggaggccgacaaggacgagttctgcagatgcgagctgaagctgcagaagtggtacggggacctgcggggaaagcccttcgccatcgaagccgagaacagcatcctggacatcagcggcttcagcaagcagtacaactgtgccttcatctggcagaaggacggcgtgaagaagctgaacctgtacctgatcatcaactacttcaagggcggcaagctgcggttcaagaagatcaaacctgaagccttcgaagccaacagattctacaccgtgatcaacaaaaagagcggcgagatcgtgcccatggaggtgaacttcaacttcgacgaccccaacctgatcatcctgcctctggcctttggcaagagacagggcagagaattcatctggaacgacctgctgtccctggaaaccggcagcctgaagctggccaacggaagagtgatcgagaagacactgtacaacagaagaacccggcaggatgagcctgccctgttcgtggccctgaccttcgagcggcgggaggtcctggactcctccaatatcaaaccaatgaacctgatcggcgtggcaagaggcgaaaacatccccgccgtgatcgccctgaccgaccccgagggctgcccactgagccggtttaaggatagcctgggaaacccaacccacatcctgagaatcggcgagagctataaggagaagcagcggaccatccaggccaagaaggaggtggagcagcggagagccggcggctacagccggaagtacgccagcaaagccaagaatctggcagacgatatggtgagaaacaccgctagagatctgctgtactacgccgtgacccaggatgccatgctgatcttcgccaacctgagccggggcttcggccggcagggcaagcggaccttcatggccgagagacagtacacacggatggaggactggctgaccgccaagctggcctacgagggcctgagcaagacctacctgtccaagacactggcccagtacacctccaagacatgcagcaactgtgggtttaccatcaccagcgccgactacgacagggtgctggagaagctgaagaagacagcaacaggctggatgaccacaattaacggcaaggagctgaaggtggagggccagattacctactacaacagatacaagagacagaacgtagtcaaggacctgtccgtcgagctggatagactgagcgaagaatctgtgaacaacgacatctcctcctggacaaagggcagaagcggagaagctctgagcctcctgaagaaaagattctcccatagacccgtgcaggagaagttcgtgtgcctgaactgcggcttcgagacacacgcagccgagcaagccgccctgaacatcgccagatcctggctgttcctgcggagccaggagtacaagaaataccagacaaacaagacaaccggcaacaccgataagagagccttcgtcgagacctggcagtccttttaccggaagaagcttaaggaggtgtggaaacctgccgtgcggtctggcggatctggcggaggctccaccagccccaagaaaaagagaaaagtctaagctgccttctgcggggcttgccttctggccatgcccttcttctctcccttgcacctgtacctcttggtctttgaataaagcctgagtaggaaggctagcaaaaaaaaaaaaaaaaaaaaaaaaaaaaaaaaaaaaaaaaaaaaaaaaaaaaaaaaaaaaaaaaaaaaaaaaaaaaaaaagcccagccggctccccaacctctaccgaggagggcacctctgagtccgccacccccgagagcggccctggcacctccaccgagcccagcgagggcagcgcacccggcagccctgccggcagccccacctccacagaggagggaaccagcaccgagcccagcgaaggcagcgccccaggcaccagcaccgagcctagtgagcaggagattaaacggatcaacaagatcagaagaagacttgtgaaagacagcaacaccaagaaggccggcaagacaggccccatgaaaaccctgctggttagagtgatgacacccgatctgagagagcggctggaaaacctgagaaagaagcctgaaaatatcccccagcccatcagcaatacatctagagccaacctgaataagctgctgaccgattacaccgaaatgaagaaggcgatcctgcatgtgtactgggaagagttccagaaggaccctgtgggcctgatgagccgggtggcccagcctgccagcaagaagatcgatcagaacaagctgaaacctgagatggacgagaagggcaacctgaccaccgccggctttgcctgctctcagtgtggccagcccctgttcgtgtacaagctggagcaggtgtctgagaagggcaaggcttacaccaactacttcggacggtgcaatgtggccgagcacgaaaagctgatcctgctggcccagctgaagcccgagaaggatagcgacgaagccgtgacatatagcctgggaaagtttgggcagagggccctggatttctacagcattcatgtgaccaaggagtccacccaccccgtgaagcccctggcccagatcgccggaaacagatacgcctccggacctgtgggaaaggccctgagcgacgcatgtatgggcacaatcgcctccttcctgtctaagtaccaggacatcatcatcgaacaccagaaggtggtgaagggcaaccagaagagactggagagcctgcgggagctggccggcaaggaaaacctggaataccctagcgtgaccctgccacctcagcctcacaccaaggagggcgttgatgcctacaacgaagtgatcgcccgggtgcgaatgtgggtgaacctgaacctgtggcagaagctgaagctaagcagagatgatgccaagcctctgctgagactgaagggattcccttcctttcctctggtcgagagacaggccaacgaagtggactggtgggacatggtgtgtaacgtgaagaagctgatcaacgagaaaaaggaggatggcaaggtgttttggcagaatctggctggctacaagagacaggaagccctgagaccatacctgagcagcgaggaagatcggaagaagggaaagaaattcgctcggtaccagctgggcgacctgctgctgcacctggaaaagaagcacggcgaggactggggaaaggtgtacgacgaggcctgggagcggattgacaagaaagtggaaggcctgagcaagcacatcaagctggaagaggaacggagaagcgaggacgcccagagcaaggccgccctgaccgactggctgcgggctaaggccagcttcgtgatcgagggcctgaaggaggccgacaaggacgagttctgcagatgcgagctgaagctgcagaagtggtacggggacctgcggggaaagcccttcgccatcgaagccgagaacagcatcctggacatcagcggcttcagcaagcagtacaactgtgccttcatctggcagaaggacggcgtgaagaagctgaacctgtacctgatcatcaactacttcaagggcggcaagctgcggttcaagaagatcaaacctgaagccttcgaagccaacagattctacaccgtgatcaacaaaaagagcggcgagatcgtgcccatggaggtgaacttcaacttcgacgaccccaacctgatcatcctgcctctggcctttggcaagagacagggcagagaattcatctggaacgacctgctgtccctggaaaccggcagcctgaagctggccaacggaagagtgatcgagaagacactgtacaacagaagaacccggcaggatgagcctgccctgttcgtggccctgaccttcgagcggcgggaggtcctggactcctccaatatcaaaccaatgaacctgatcggcgtggcaagaggcgaaaacatccccgccgtgatcgccctgaccgaccccgagggctgcccactgagccggtttaaggatagcctgggaaacccaacccacatcctgagaatcggcgagagctataaggagaagcagcggaccatccaggccaagaaggaggtggagcagcggagagccggcggctacagccggaagtacgccagcaaagccaagaatctggcagacgatatggtgagaaacaccgctagagatctgctgtactacgccgtgacccaggatgccatgctgatcttcgccaacctgagccggggcttcggccggcagggcaagcggaccttcatggccgagagacagtacacacggatggaggactggctgaccgccaagctggcctacgagggcctgagcaagacctacctgtccaagacactggcccagtacacctccaagacatgcagcaactgtgggtttaccatcaccagcgccgactacgacagggtgctggagaagctgaagaagacagcaacaggctggatgaccacaattaacggcaaggagctgaaggtggagggccagattacctactacaacagatacaagagacagaacgtagtcaaggacctgtccgtcgagctggatagactgagcgaagaatctgtgaacaacgacatctcctcctggacaaagggcagaagcggagaagctctgagcctcctgaagaaaagattctcccatagacccgtgcaggagaagttcgtgtgcctgaactgcggcttcgagacacacgcagccgagcaagccgccctgaacatcgccagatcctggctgttcctgcggagccaggagtacaagaaataccagacaaacaagacaaccggcaacaccgataagagagccttcgtcgagacctggcagtccttttaccggaagaagcttaaggaggtgtggaaacctgccgtgcggtctggcggatctggcggaggctccaccagccccaagaaaaagagaaaagtctaagctgccttctgcggggcttgccttctggccatgcccttcttctctcccttgcacctgtacctcttggtctttgaataaagcctgagtaggaaggctagcaaaaaaaaaaaaaaaaaaaaaaaaaaaaaaaaaaaaaaaaaaaaaaaaaaaaaaaaaaaaaaaaaaaaaaaaaaaaaaaa

SEQ ID NO: 9542 - RNA, 8787 nt, synthetic construct
  source 1..8787: mol_type = other RNA
aggaaataagagagaaaagaagagtaagaagaaatataagagccaccatggcccctaagaagaagcgtaaagtgagccggatgaaccacgaccaggagttcgacccccctaaggtgtaccctcccgtccccgccgagaagagaaagcccatccgggtcctgagcctgttcgatggcatcgccaccggtctgctggtgctgaaggacctgggcatccaggtggataggtacattgcctccgaggtgtgcgaggactccatcaccgtgggaatggtgcgtcatcagggcaagatcatgtacgtgggcgacgtgcggagcgtgacacagaagcatatccaggagtggggccctttcgacctggtgatcggcggcagcccttgcaatgacctgagcatcgtgaacccagcccggaagggcctgtacgagggaaccggcagactgttcttcgagttttacagactgctgcacgacgcccggcctaaggaaggcgacgaccggcccttcttttggctgttcgagaatgtggtggccatgggagtcagcgacaagcgggatattagccggttcctggagagcaaccccgtgatgatcgatgccaaggaagtgagcgccgcccaccgggccagatacttctggggcaatctgcctggcatgaacagacccctggccagcaccgtgaacgacaagctggagctgcaggagtgcctggagcacggccggatcgccaagttcagcaaggtgagaaccatcaccacccgaagcaacagcatcaaacaaggcaaggaccagcactttcctgtgttcatgaacgagaaggaggacatcctgtggtgtaccgagatggagagagtgttcgggttcccagtccactacacagatgtcagcaacatgtctagactggccagacagagactgctgggaagaagctggtccgtccctgtgatcagacacctgttcgcccctctgaaggagtacttcgcctgcgtgagcagcggcaacagcaacgccaacagccggggccccagcttctctagcggcctggtgccactgtccctgagagggagccacatgggccccatggagatctacaaaaccgtgagcgcctggaagcggcagcctgtgcgcgtgctgagcctgtttcggaatatcgataaagtcctgaaaagcctgggattcctggagagcggctctggctccggcggtggcaccctgaagtacgtggaggatgtgacaaacgtggtcagacgggatgtggagaagtggggccccttcgatctggtgtacggcagcacccaacccctgggcagctcttgtgaccggtgccctggctggtacatgtttcagttccaccggatcctgcagtacgccctgccgagacaggagtcccagcggccattcttttggattttcatggacaacttgctgctgaccgaggatgaccaggaaactaccactcggttcctgcagaccgaagccgtgaccctgcaggacgtgagaggccgggactaccagaacgccatgcgggtgtggtccaacatccctggactgaaaagcaagcacgcacctctgacccctaaagaagaggagtacctgcaggcccaggtgcggagcagaagcaagctggacgcccctaaggtggatctgctggtgaagaattgcctcctgcccctgagagagtacttcaagtatttcagccagaatagtctgcccctgggaggcagcggcggcggccaggccgaggtgaccttcgaggacgtggccgtgctgttcagcagggaggagtggggcaggctgggccccacccagaggggcctgtacagggacgtgatgctggagacctacaggaacctggtgagcctgggcgccggcagggccggccccaagcccggcgtgatcacccagctggagaggggcgacgagccctgggtgctggacgcccagggcgccaagggcaagggcaggcccagggtgagcggcggcccaagcagcggcgcccctcctcccagcggcggcaggcggcccaagcagcggcgcccctcctcccagcggcggcagcccagccggctccccaacctctaccgaggagggcacctctgagtccgccacccccgagagcggccctggcacctccaccgagcccagcgagggcagcgcacccggcagccctgccggcagccccacctccacagaggagggaaccagcaccgagcccagcgaaggcagcgccccaggcaccagcaccgagcctagtgagcaggagattaaacggatcaacaagatcagaagaagacttgtgaaagacagcaacaccaagaaggccggcaagacaggccccatgaaaaccctgctggttagagtgatgacacccgatctgagagagcggctggaaaacctgagaaagaagcctgaaaatatcccccagcccatcagcaatacatctagagccaacctgaataagctgctgaccgattacaccgaaatgaagaaggcgatcctgcatgtgtactgggaagagttccagaaggaccctgtgggcctgatgagccgggtggcccagcctgccagcaagaagatcgatcagaacaagctgaaacctgagatggacgagaagggcaacctgaccaccgccggctttgcctgctctcagtgtggccagcccctgttcgtgtacaagctggagcaggtgtctgagaagggcaaggcttacaccaactacttcggacggtgcaatgtggccgagcacgaaaagctgatcctgctggcccagctgaagcccgagaaggatagcgacgaagccgtgacatatagcctgggaaagtttgggcagagggccctggatttctacagcattcatgtgaccaaggagtccacccaccccgtgaagcccctggcccagatcgccggaaacagatacgcctccggacctgtgggaaaggccctgagcgacgcatgtatgggcacaatcgcctccttcctgtctaagtaccaggacatcatcatcgaacaccagaaggtggtgaagggcaaccagaagagactggagagcctgcgggagctggccggcaaggaaaacctggaataccctagcgtgaccctgccacctcagcctcacaccaaggagggcgttgatgcctacaacgaagtgatcgcccgggtgcgaatgtgggtgaacctgaacctgtggcagaagctgaagctaagcagagatgatgccaagcctctgctgagactgaagggattcccttcctttcctctggtcgagagacaggccaacgaagtggactggtgggacatggtgtgtaacgtgaagaagctgatcaacgagaaaaaggaggatggcaaggtgttttggcagaatctggctggctacaagagacaggaagccctgagaccatacctgagcagcgaggaagatcggaagaagggaaagaaattcgctcggtaccagctgggcgacctgctgctgcacctggaaaagaagcacggcgaggactggggaaaggtgtacgacgaggcctgggagcggattgacaagaaagtggaaggcctgagcaagcacatcaagctggaagaggaacggagaagcgaggacgcccagagcaaggccgccctgaccgactggctgcgggctaaggccagcttcgtgatcgagggcctgaaggaggccgacaaggacgagttctgcagatgcgagctgaagctgcagaagtggtacggggacctgcggggaaagcccttcgccatcgaagccgagaacagcatcctggacatcagcggcttcagcaagcagtacaactgtgccttcatctggcagaaggacggcgtgaagaagctgaacctgtacctgatcatcaactacttcaagggcggcaagctgcggttcaagaagatcaaacctgaagccttcgaagccaacagattctacaccgtgatcaacaaaaagagcggcgagatcgtgcccatggaggtgaacttcaacttcgacgaccccaacctgatcatcctgcctctggcctttggcaagagacagggcagagaattcatctggaacgacctgctgtccctggaaaccggcagcctgaagctggccaacggaagagtgatcgagaagacactgtacaacagaagaacccggcaggatgagcctgccctgttcgtggccctgaccttcgagcggcgggaggtcctggactcctccaatatcaaaccaatgaacctgatcggcgtggcaagaggcgaaaacatccccgccgtgatcgccctgaccgaccccgagggctgcccactgagccggtttaaggatagcctgggaaacccaacccacatcctgagaatcggcgagagctataaggagaagcagcggaccatccaggccaagaaggaggtggagcagcggagagccggcggctacagccggaagtacgccagcaaagccaagaatctggcagacgatatggtgagaaacaccgctagagatctgctgtactacgccgtgacccaggatgccatgctgatcttcgccaacctgagccggggcttcggccggcagggcaagcggaccttcatggccgagagacagtacacacggatggaggactggctgaccgccaagctggcctacgagggcctgagcaagacctacctgtccaagacactggcccagtacacctccaagacatgcagcaactgtgggtttaccatcaccagcgccgactacgacagggtgctggagaagctgaagaagacagcaacaggctggatgaccacaattaacggcaaggagctgaaggtggagggccagattacctactacaacagatacaagagacagaacgtagtcaaggacctgtccgtcgagctggatagactgagcgaagaatctgtgaacaacgacatctcctcctggacaaagggcagaagcggagaagctctgagcctcctgaagaaaagattctcccatagacccgtgcaggagaagttcgtgtgcctgaactgcggcttcgagacacacgcagccgagcaagccgccctgaacatcgccagatcctggctgttcctgcggagccaggagtacaagaaataccagacaaacaagacaaccggcaacaccgataagagagccttcgtcgagacctggcagtccttttaccggaagaagcttaaggaggtgtggaaacctgccgtgcggtctggcggatctggcggaggctccaccagccccaagaaaaagagaaaagtctaagctgccttctgcggggcttgccttctggccatgcccttcttctctcccttgcacctgtacctcttggtctttgaataaagcctgagtaggaaggctagcaaaaaaaaaaaaaaaaaaaaaaaaaaaaaaaaaaaaaaaaaaaaaaaaaaaaaaaaaaaaaaaaaaaaaaaaaaaaaaaagcccagccggctccccaacctctaccgaggagggcacctctgagtccgccacccccgagagcggccctggcacctccaccgagcccagcgagggcagcgcacccggcagccctgccggcagccccacctccacagaggagggaaccagcaccgagcccagcgaaggcagcgccccaggcaccagcaccgagcctagtgagcaggagattaaacggatcaacaagatcagaagaagacttgtgaaagacagcaacaccaagaaggccggcaagacaggccccatgaaaaccctgctggttagagtgatgacacccgatctgagagagcggctggaaaacctgagaaagaagcctgaaaatatcccccagcccatcagcaatacatctagagccaacctgaataagctgctgaccgattacaccgaaatgaagaaggcgatcctgcatgtgtactgggaagagttccagaaggaccctgtgggcctgatgagccgggtggcccagcctgccagcaagaagatcgatcagaacaagctgaaacctgagatggacgagaagggcaacctgaccaccgccggctttgcctgctctcagtgtggccagcccctgttcgtgtacaagctggagcaggtgtctgagaagggcaaggcttacaccaactacttcggacggtgcaatgtggccgagcacgaaaagctgatcctgctggcccagctgaagcccgagaaggatagcgacgaagccgtgacatatagcctgggaaagtttgggcagagggccctggatttctacagcattcatgtgaccaaggagtccacccaccccgtgaagcccctggcccagatcgccggaaacagatacgcctccggacctgtgggaaaggccctgagcgacgcatgtatgggcacaatcgcctccttcctgtctaagtaccaggacatcatcatcgaacaccagaaggtggtgaagggcaaccagaagagactggagagcctgcgggagctggccggcaaggaaaacctggaataccctagcgtgaccctgccacctcagcctcacaccaaggagggcgttgatgcctacaacgaagtgatcgcccgggtgcgaatgtgggtgaacctgaacctgtggcagaagctgaagctaagcagagatgatgccaagcctctgctgagactgaagggattcccttcctttcctctggtcgagagacaggccaacgaagtggactggtgggacatggtgtgtaacgtgaagaagctgatcaacgagaaaaaggaggatggcaaggtgttttggcagaatctggctggctacaagagacaggaagccctgagaccatacctgagcagcgaggaagatcggaagaagggaaagaaattcgctcggtaccagctgggcgacctgctgctgcacctggaaaagaagcacggcgaggactggggaaaggtgtacgacgaggcctgggagcggattgacaagaaagtggaaggcctgagcaagcacatcaagctggaagaggaacggagaagcgaggacgcccagagcaaggccgccctgaccgactggctgcgggctaaggccagcttcgtgatcgagggcctgaaggaggccgacaaggacgagttctgcagatgcgagctgaagctgcagaagtggtacggggacctgcggggaaagcccttcgccatcgaagccgagaacagcatcctggacatcagcggcttcagcaagcagtacaactgtgccttcatctggcagaaggacggcgtgaagaagctgaacctgtacctgatcatcaactacttcaagggcggcaagctgcggttcaagaagatcaaacctgaagccttcgaagccaacagattctacaccgtgatcaacaaaaagagcggcgagatcgtgcccatggaggtgaacttcaacttcgacgaccccaacctgatcatcctgcctctggcctttggcaagagacagggcagagaattcatctggaacgacctgctgtccctggaaaccggcagcctgaagctggccaacggaagagtgatcgagaagacactgtacaacagaagaacccggcaggatgagcctgccctgttcgtggccctgaccttcgagcggcgggaggtcctggactcctccaatatcaaaccaatgaacctgatcggcgtggcaagaggcgaaaacatccccgccgtgatcgccctgaccgaccccgagggctgcccactgagccggtttaaggatagcctgggaaacccaacccacatcctgagaatcggcgagagctataaggagaagcagcggaccatccaggccaagaaggaggtggagcagcggagagccggcggctacagccggaagtacgccagcaaagccaagaatctggcagacgatatggtgagaaacaccgctagagatctgctgtactacgccgtgacccaggatgccatgctgatcttcgccaacctgagccggggcttcggccggcagggcaagcggaccttcatggccgagagacagtacacacggatggaggactggctgaccgccaagctggcctacgagggcctgagcaagacctacctgtccaagacactggcccagtacacctccaagacatgcagcaactgtgggtttaccatcaccagcgccgactacgacagggtgctggagaagctgaagaagacagcaacaggctggatgaccacaattaacggcaaggagctgaaggtggagggccagattacctactacaacagatacaagagacagaacgtagtcaaggacctgtccgtcgagctggatagactgagcgaagaatctgtgaacaacgacatctcctcctggacaaagggcagaagcggagaagctctgagcctcctgaagaaaagattctcccatagacccgtgcaggagaagttcgtgtgcctgaactgcggcttcgagacacacgcagccgagcaagccgccctgaacatcgccagatcctggctgttcctgcggagccaggagtacaagaaataccagacaaacaagacaaccggcaacaccgataagagagccttcgtcgagacctggcagtccttttaccggaagaagcttaaggaggtgtggaaacctgccgtgcggtctggcggatctggcggaggctccaccagccccaagaaaaagagaaaagtctaagctgccttctgcggggcttgccttctggccatgcccttcttctctcccttgcacctgtacctcttggtctttgaataaagcctgagtaggaaggctagcaaaaaaaaaaaaaaaaaaaaaaaaaaaaaaaaaaaaaaaaaaaaaaaaaaaaaaaaaaaaaaaaaaaaaaaaaaaaaaaa

SEQ ID NO: 9543 - RNA, 8787 nt, synthetic construct
  source 1..8787: mol_type = other RNA
aggaaataagagagaaaagaagagtaagaagaaatataagagccaccatggcccctaagaagaagcgtaaagtgagccggatgaaccacgaccaggagttcgacccccctaaggtgtaccctcccgtccccgccgagaagagaaagcccatccgggtcctgagcctgttcgatggcatcgccaccggtctgctggtgctgaaggacctgggcatccaggtggataggtacattgcctccgaggtgtgcgaggactccatcaccgtgggaatggtgcgtcatcagggcaagatcatgtacgtgggcgacgtgcggagcgtgacacagaagcatatccaggagtggggccctttcgacctggtgatcggcggcagcccttgcaatgacctgagcatcgtgaacccagcccggaagggcctgtacgagggaaccggcagactgttcttcgagttttacagactgctgcacgacgcccggcctaaggaaggcgacgaccggcccttcttttggctgttcgagaatgtggtggccatgggagtcagcgacaagcgggatattagccggttcctggagagcaaccccgtgatgatcgatgccaaggaagtgagcgccgcccaccgggccagatacttctggggcaatctgcctggcatgaacagacccctggccagcaccgtgaacgacaagctggagctgcaggagtgcctggagcacggccggatcgccaagttcagcaaggtgagaaccatcaccacccgaagcaacagcatcaaacaaggcaaggaccagcactttcctgtgttcatgaacgagaaggaggacatcctgtggtgtaccgagatggagagagtgttcgggttcccagtccactacacagatgtcagcaacatgtctagactggccagacagagactgctgggaagaagctggtccgtccctgtgatcagacacctgttcgcccctctgaaggagtacttcgcctgcgtgagcagcggcaacagcaacgccaacagccggggccccagcttctctagcggcctggtgccactgtccctgagagggagccacatgggccccatggagatctacaaaaccgtgagcgcctggaagcggcagcctgtgcgcgtgctgagcctgtttcggaatatcgataaagtcctgaaaagcctgggattcctggagagcggctctggctccggcggtggcaccctgaagtacgtggaggatgtgacaaacgtggtcagacgggatgtggagaagtggggccccttcgatctggtgtacggcagcacccaacccctgggcagctcttgtgaccggtgccctggctggtacatgtttcagttccaccggatcctgcagtacgccctgccgagacaggagtcccagcggccattcttttggattttcatggacaacttgctgctgaccgaggatgaccaggaaactaccactcggttcctgcagaccgaagccgtgaccctgcaggacgtgagaggccgggactaccagaacgccatgcgggtgtggtccaacatccctggactgaaaagcaagcacgcacctctgacccctaaagaagaggagtacctgcaggcccaggtgcggagcagaagcaagctggacgcccctaaggtggatctgctggtgaagaattgcctcctgcccctgagagagtacttcaagtatttcagccagaatagtctgcccctgggaggcagcggcggcggcatggccgccggccagagggaggccaggccccaggtgagcctgaccttcgaggacgtggccgtgctgttcaccagggacgagtggaggaagctggcccccagccagaggaacctgtacagggacgtgatgctggagaactacaggaacctggtgagcctgggcctgcccttcaccaagcccaaggtgatcagcctgctgcagcagggcgaggacccctgggaggtggagaaggacggcagcggcggcggcccaagcagcggcgcccctcctcccagcggcggcaggcggcccaagcagcggcgcccctcctcccagcggcggcagcccagccggctccccaacctctaccgaggagggcacctctgagtccgccacccccgagagcggccctggcacctccaccgagcccagcgagggcagcgcacccggcagccctgccggcagccccacctccacagaggagggaaccagcaccgagcccagcgaaggcagcgccccaggcaccagcaccgagcctagtgagcaggagattaaacggatcaacaagatcagaagaagacttgtgaaagacagcaacaccaagaaggccggcaagacaggccccatgaaaaccctgctggttagagtgatgacacccgatctgagagagcggctggaaaacctgagaaagaagcctgaaaatatcccccagcccatcagcaatacatctagagccaacctgaataagctgctgaccgattacaccgaaatgaagaaggcgatcctgcatgtgtactgggaagagttccagaaggaccctgtgggcctgatgagccgggtggcccagcctgccagcaagaagatcgatcagaacaagctgaaacctgagatggacgagaagggcaacctgaccaccgccggctttgcctgctctcagtgtggccagcccctgttcgtgtacaagctggagcaggtgtctgagaagggcaaggcttacaccaactacttcggacggtgcaatgtggccgagcacgaaaagctgatcctgctggcccagctgaagcccgagaaggatagcgacgaagccgtgacatatagcctgggaaagtttgggcagagggccctggatttctacagcattcatgtgaccaaggagtccacccaccccgtgaagcccctggcccagatcgccggaaacagatacgcctccggacctgtgggaaaggccctgagcgacgcatgtatgggcacaatcgcctccttcctgtctaagtaccaggacatcatcatcgaacaccagaaggtggtgaagggcaaccagaagagactggagagcctgcgggagctggccggcaaggaaaacctggaataccctagcgtgaccctgccacctcagcctcacaccaaggagggcgttgatgcctacaacgaagtgatcgcccgggtgcgaatgtgggtgaacctgaacctgtggcagaagctgaagctaagcagagatgatgccaagcctctgctgagactgaagggattcccttcctttcctctggtcgagagacaggccaacgaagtggactggtgggacatggtgtgtaacgtgaagaagctgatcaacgagaaaaaggaggatggcaaggtgttttggcagaatctggctggctacaagagacaggaagccctgagaccatacctgagcagcgaggaagatcggaagaagggaaagaaattcgctcggtaccagctgggcgacctgctgctgcacctggaaaagaagcacggcgaggactggggaaaggtgtacgacgaggcctgggagcggattgacaagaaagtggaaggcctgagcaagcacatcaagctggaagaggaacggagaagcgaggacgcccagagcaaggccgccctgaccgactggctgcgggctaaggccagcttcgtgatcgagggcctgaaggaggccgacaaggacgagttctgcagatgcgagctgaagctgcagaagtggtacggggacctgcggggaaagcccttcgccatcgaagccgagaacagcatcctggacatcagcggcttcagcaagcagtacaactgtgccttcatctggcagaaggacggcgtgaagaagctgaacctgtacctgatcatcaactacttcaagggcggcaagctgcggttcaagaagatcaaacctgaagccttcgaagccaacagattctacaccgtgatcaacaaaaagagcggcgagatcgtgcccatggaggtgaacttcaacttcgacgaccccaacctgatcatcctgcctctggcctttggcaagagacagggcagagaattcatctggaacgacctgctgtccctggaaaccggcagcctgaagctggccaacggaagagtgatcgagaagacactgtacaacagaagaacccggcaggatgagcctgccctgttcgtggccctgaccttcgagcggcgggaggtcctggactcctccaatatcaaaccaatgaacctgatcggcgtggcaagaggcgaaaacatccccgccgtgatcgccctgaccgaccccgagggctgcccactgagccggtttaaggatagcctgggaaacccaacccacatcctgagaatcggcgagagctataaggagaagcagcggaccatccaggccaagaaggaggtggagcagcggagagccggcggctacagccggaagtacgccagcaaagccaagaatctggcagacgatatggtgagaaacaccgctagagatctgctgtactacgccgtgacccaggatgccatgctgatcttcgccaacctgagccggggcttcggccggcagggcaagcggaccttcatggccgagagacagtacacacggatggaggactggctgaccgccaagctggcctacgagggcctgagcaagacctacctgtccaagacactggcccagtacacctccaagacatgcagcaactgtgggtttaccatcaccagcgccgactacgacagggtgctggagaagctgaagaagacagcaacaggctggatgaccacaattaacggcaaggagctgaaggtggagggccagattacctactacaacagatacaagagacagaacgtagtcaaggacctgtccgtcgagctggatagactgagcgaagaatctgtgaacaacgacatctcctcctggacaaagggcagaagcggagaagctctgagcctcctgaagaaaagattctcccatagacccgtgcaggagaagttcgtgtgcctgaactgcggcttcgagacacacgcagccgagcaagccgccctgaacatcgccagatcctggctgttcctgcggagccaggagtacaagaaataccagacaaacaagacaaccggcaacaccgataagagagccttcgtcgagacctggcagtccttttaccggaagaagcttaaggaggtgtggaaacctgccgtgcggtctggcggatctggcggaggctccaccagccccaagaaaaagagaaaagtctaagctgccttctgcggggcttgccttctggccatgcccttcttctctcccttgcacctgtacctcttggtctttgaataaagcctgagtaggaaggctagcaaaaaaaaaaaaaaaaaaaaaaaaaaaaaaaaaaaaaaaaaaaaaaaaaaaaaaaaaaaaaaaaaaaaaaaaaaaaaaaagcccagccggctccccaacctctaccgaggagggcacctctgagtccgccacccccgagagcggccctggcacctccaccgagcccagcgagggcagcgcacccggcagccctgccggcagccccacctccacagaggagggaaccagcaccgagcccagcgaaggcagcgccccaggcaccagcaccgagcctagtgagcaggagattaaacggatcaacaagatcagaagaagacttgtgaaagacagcaacaccaagaaggccggcaagacaggccccatgaaaaccctgctggttagagtgatgacacccgatctgagagagcggctggaaaacctgagaaagaagcctgaaaatatcccccagcccatcagcaatacatctagagccaacctgaataagctgctgaccgattacaccgaaatgaagaaggcgatcctgcatgtgtactgggaagagttccagaaggaccctgtgggcctgatgagccgggtggcccagcctgccagcaagaagatcgatcagaacaagctgaaacctgagatggacgagaagggcaacctgaccaccgccggctttgcctgctctcagtgtggccagcccctgttcgtgtacaagctggagcaggtgtctgagaagggcaaggcttacaccaactacttcggacggtgcaatgtggccgagcacgaaaagctgatcctgctggcccagctgaagcccgagaaggatagcgacgaagccgtgacatatagcctgggaaagtttgggcagagggccctggatttctacagcattcatgtgaccaaggagtccacccaccccgtgaagcccctggcccagatcgccggaaacagatacgcctccggacctgtgggaaaggccctgagcgacgcatgtatgggcacaatcgcctccttcctgtctaagtaccaggacatcatcatcgaacaccagaaggtggtgaagggcaaccagaagagactggagagcctgcgggagctggccggcaaggaaaacctggaataccctagcgtgaccctgccacctcagcctcacaccaaggagggcgttgatgcctacaacgaagtgatcgcccgggtgcgaatgtgggtgaacctgaacctgtggcagaagctgaagctaagcagagatgatgccaagcctctgctgagactgaagggattcccttcctttcctctggtcgagagacaggccaacgaagtggactggtgggacatggtgtgtaacgtgaagaagctgatcaacgagaaaaaggaggatggcaaggtgttttggcagaatctggctggctacaagagacaggaagccctgagaccatacctgagcagcgaggaagatcggaagaagggaaagaaattcgctcggtaccagctgggcgacctgctgctgcacctggaaaagaagcacggcgaggactggggaaaggtgtacgacgaggcctgggagcggattgacaagaaagtggaaggcctgagcaagcacatcaagctggaagaggaacggagaagcgaggacgcccagagcaaggccgccctgaccgactggctgcgggctaaggccagcttcgtgatcgagggcctgaaggaggccgacaaggacgagttctgcagatgcgagctgaagctgcagaagtggtacggggacctgcggggaaagcccttcgccatcgaagccgagaacagcatcctggacatcagcggcttcagcaagcagtacaactgtgccttcatctggcagaaggacggcgtgaagaagctgaacctgtacctgatcatcaactacttcaagggcggcaagctgcggttcaagaagatcaaacctgaagccttcgaagccaacagattctacaccgtgatcaacaaaaagagcggcgagatcgtgcccatggaggtgaacttcaacttcgacgaccccaacctgatcatcctgcctctggcctttggcaagagacagggcagagaattcatctggaacgacctgctgtccctggaaaccggcagcctgaagctggccaacggaagagtgatcgagaagacactgtacaacagaagaacccggcaggatgagcctgccctgttcgtggccctgaccttcgagcggcgggaggtcctggactcctccaatatcaaaccaatgaacctgatcggcgtggcaagaggcgaaaacatccccgccgtgatcgccctgaccgaccccgagggctgcccactgagccggtttaaggatagcctgggaaacccaacccacatcctgagaatcggcgagagctataaggagaagcagcggaccatccaggccaagaaggaggtggagcagcggagagccggcggctacagccggaagtacgccagcaaagccaagaatctggcagacgatatggtgagaaacaccgctagagatctgctgtactacgccgtgacccaggatgccatgctgatcttcgccaacctgagccggggcttcggccggcagggcaagcggaccttcatggccgagagacagtacacacggatggaggactggctgaccgccaagctggcctacgagggcctgagcaagacctacctgtccaagacactggcccagtacacctccaagacatgcagcaactgtgggtttaccatcaccagcgccgactacgacagggtgctggagaagctgaagaagacagcaacaggctggatgaccacaattaacggcaaggagctgaaggtggagggccagattacctactacaacagatacaagagacagaacgtagtcaaggacctgtccgtcgagctggatagactgagcgaagaatctgtgaacaacgacatctcctcctggacaaagggcagaagcggagaagctctgagcctcctgaagaaaagattctcccatagacccgtgcaggagaagttcgtgtgcctgaactgcggcttcgagacacacgcagccgagcaagccgccctgaacatcgccagatcctggctgttcctgcggagccaggagtacaagaaataccagacaaacaagacaaccggcaacaccgataagagagccttcgtcgagacctggcagtccttttaccggaagaagcttaaggaggtgtggaaacctgccgtgcggtctggcggatctggcggaggctccaccagccccaagaaaaagagaaaagtctaagctgccttctgcggggcttgccttctggccatgcccttcttctctcccttgcacctgtacctcttggtctttgaataaagcctgagtaggaaggctagcaaaaaaaaaaaaaaaaaaaaaaaaaaaaaaaaaaaaaaaaaaaaaaaaaaaaaaaaaaaaaaaaaaaaaaaaaaaaaaaa

SEQ ID NO: 9544 - RNA, 8787 nt, synthetic construct
  source 1..8787: mol_type = other RNA
aggaaataagagagaaaagaagagtaagaagaaatataagagccaccatggcccctaagaagaagcgtaaagtgagccggatgaaccacgaccaggagttcgacccccctaaggtgtaccctcccgtccccgccgagaagagaaagcccatccgggtcctgagcctgttcgatggcatcgccaccggtctgctggtgctgaaggacctgggcatccaggtggataggtacattgcctccgaggtgtgcgaggactccatcaccgtgggaatggtgcgtcatcagggcaagatcatgtacgtgggcgacgtgcggagcgtgacacagaagcatatccaggagtggggccctttcgacctggtgatcggcggcagcccttgcaatgacctgagcatcgtgaacccagcccggaagggcctgtacgagggaaccggcagactgttcttcgagttttacagactgctgcacgacgcccggcctaaggaaggcgacgaccggcccttcttttggctgttcgagaatgtggtggccatgggagtcagcgacaagcgggatattagccggttcctggagagcaaccccgtgatgatcgatgccaaggaagtgagcgccgcccaccgggccagatacttctggggcaatctgcctggcatgaacagacccctggccagcaccgtgaacgacaagctggagctgcaggagtgcctggagcacggccggatcgccaagttcagcaaggtgagaaccatcaccacccgaagcaacagcatcaaacaaggcaaggaccagcactttcctgtgttcatgaacgagaaggaggacatcctgtggtgtaccgagatggagagagtgttcgggttcccagtccactacacagatgtcagcaacatgtctagactggccagacagagactgctgggaagaagctggtccgtccctgtgatcagacacctgttcgcccctctgaaggagtacttcgcctgcgtgagcagcggcaacagcaacgccaacagccggggccccagcttctctagcggcctggtgccactgtccctgagagggagccacatgggccccatggagatctacaaaaccgtgagcgcctggaagcggcagcctgtgcgcgtgctgagcctgtttcggaatatcgataaagtcctgaaaagcctgggattcctggagagcggctctggctccggcggtggcaccctgaagtacgtggaggatgtgacaaacgtggtcagacgggatgtggagaagtggggccccttcgatctggtgtacggcagcacccaacccctgggcagctcttgtgaccggtgccctggctggtacatgtttcagttccaccggatcctgcagtacgccctgccgagacaggagtcccagcggccattcttttggattttcatggacaacttgctgctgaccgaggatgaccaggaaactaccactcggttcctgcagaccgaagccgtgaccctgcaggacgtgagaggccgggactaccagaacgccatgcgggtgtggtccaacatccctggactgaaaagcaagcacgcacctctgacccctaaagaagaggagtacctgcaggcccaggtgcggagcagaagcaagctggacgcccctaaggtggatctgctggtgaagaattgcctcctgcccctgagagagtacttcaagtatttcagccagaatagtctgcccctgggaggcagcggcggcggcatccagaggctgctgaccttcggcgacgtggccgtggccttcaccaggatcgagtggaggcacctggacgccgcccagagggccctgtacagggacgtgatgctggagaactacggcaacctggtgagcgtgggcctgctgagcagcaagcccaagctgatcgcccagctggagcagggcgccgagccctggatggaggccagggagacccccagcggcaccagggccgtgcccgactactggggcggcccaagcagcggcgcccctcctcccagcggcggcaggcggcccaagcagcggcgcccctcctcccagcggcggcagcccagccggctccccaacctctaccgaggagggcacctctgagtccgccacccccgagagcggccctggcacctccaccgagcccagcgagggcagcgcacccggcagccctgccggcagccccacctccacagaggagggaaccagcaccgagcccagcgaaggcagcgccccaggcaccagcaccgagcctagtgagcaggagattaaacggatcaacaagatcagaagaagacttgtgaaagacagcaacaccaagaaggccggcaagacaggccccatgaaaaccctgctggttagagtgatgacacccgatctgagagagcggctggaaaacctgagaaagaagcctgaaaatatcccccagcccatcagcaatacatctagagccaacctgaataagctgctgaccgattacaccgaaatgaagaaggcgatcctgcatgtgtactgggaagagttccagaaggaccctgtgggcctgatgagccgggtggcccagcctgccagcaagaagatcgatcagaacaagctgaaacctgagatggacgagaagggcaacctgaccaccgccggctttgcctgctctcagtgtggccagcccctgttcgtgtacaagctggagcaggtgtctgagaagggcaaggcttacaccaactacttcggacggtgcaatgtggccgagcacgaaaagctgatcctgctggcccagctgaagcccgagaaggatagcgacgaagccgtgacatatagcctgggaaagtttgggcagagggccctggatttctacagcattcatgtgaccaaggagtccacccaccccgtgaagcccctggcccagatcgccggaaacagatacgcctccggacctgtgggaaaggccctgagcgacgcatgtatgggcacaatcgcctccttcctgtctaagtaccaggacatcatcatcgaacaccagaaggtggtgaagggcaaccagaagagactggagagcctgcgggagctggccggcaaggaaaacctggaataccctagcgtgaccctgccacctcagcctcacaccaaggagggcgttgatgcctacaacgaagtgatcgcccgggtgcgaatgtgggtgaacctgaacctgtggcagaagctgaagctaagcagagatgatgccaagcctctgctgagactgaagggattcccttcctttcctctggtcgagagacaggccaacgaagtggactggtgggacatggtgtgtaacgtgaagaagctgatcaacgagaaaaaggaggatggcaaggtgttttggcagaatctggctggctacaagagacaggaagccctgagaccatacctgagcagcgaggaagatcggaagaagggaaagaaattcgctcggtaccagctgggcgacctgctgctgcacctggaaaagaagcacggcgaggactggggaaaggtgtacgacgaggcctgggagcggattgacaagaaagtggaaggcctgagcaagcacatcaagctggaagaggaacggagaagcgaggacgcccagagcaaggccgccctgaccgactggctgcgggctaaggccagcttcgtgatcgagggcctgaaggaggccgacaaggacgagttctgcagatgcgagctgaagctgcagaagtggtacggggacctgcggggaaagcccttcgccatcgaagccgagaacagcatcctggacatcagcggcttcagcaagcagtacaactgtgccttcatctggcagaaggacggcgtgaagaagctgaacctgtacctgatcatcaactacttcaagggcggcaagctgcggttcaagaagatcaaacctgaagccttcgaagccaacagattctacaccgtgatcaacaaaaagagcggcgagatcgtgcccatggaggtgaacttcaacttcgacgaccccaacctgatcatcctgcctctggcctttggcaagagacagggcagagaattcatctggaacgacctgctgtccctggaaaccggcagcctgaagctggccaacggaagagtgatcgagaagacactgtacaacagaagaacccggcaggatgagcctgccctgttcgtggccctgaccttcgagcggcgggaggtcctggactcctccaatatcaaaccaatgaacctgatcggcgtggcaagaggcgaaaacatccccgccgtgatcgccctgaccgaccccgagggctgcccactgagccggtttaaggatagcctgggaaacccaacccacatcctgagaatcggcgagagctataaggagaagcagcggaccatccaggccaagaaggaggtggagcagcggagagccggcggctacagccggaagtacgccagcaaagccaagaatctggcagacgatatggtgagaaacaccgctagagatctgctgtactacgccgtgacccaggatgccatgctgatcttcgccaacctgagccggggcttcggccggcagggcaagcggaccttcatggccgagagacagtacacacggatggaggactggctgaccgccaagctggcctacgagggcctgagcaagacctacctgtccaagacactggcccagtacacctccaagacatgcagcaactgtgggtttaccatcaccagcgccgactacgacagggtgctggagaagctgaagaagacagcaacaggctggatgaccacaattaacggcaaggagctgaaggtggagggccagattacctactacaacagatacaagagacagaacgtagtcaaggacctgtccgtcgagctggatagactgagcgaagaatctgtgaacaacgacatctcctcctggacaaagggcagaagcggagaagctctgagcctcctgaagaaaagattctcccatagacccgtgcaggagaagttcgtgtgcctgaactgcggcttcgagacacacgcagccgagcaagccgccctgaacatcgccagatcctggctgttcctgcggagccaggagtacaagaaataccagacaaacaagacaaccggcaacaccgataagagagccttcgtcgagacctggcagtccttttaccggaagaagcttaaggaggtgtggaaacctgccgtgcggtctggcggatctggcggaggctccaccagccccaagaaaaagagaaaagtctaagctgccttctgcggggcttgccttctggccatgcccttcttctctcccttgcacctgtacctcttggtctttgaataaagcctgagtaggaaggctagcaaaaaaaaaaaaaaaaaaaaaaaaaaaaaaaaaaaaaaaaaaaaaaaaaaaaaaaaaaaaaaaaaaaaaaaaaaaaaaaagcccagccggctccccaacctctaccgaggagggcacctctgagtccgccacccccgagagcggccctggcacctccaccgagcccagcgagggcagcgcacccggcagccctgccggcagccccacctccacagaggagggaaccagcaccgagcccagcgaaggcagcgccccaggcaccagcaccgagcctagtgagcaggagattaaacggatcaacaagatcagaagaagacttgtgaaagacagcaacaccaagaaggccggcaagacaggccccatgaaaaccctgctggttagagtgatgacacccgatctgagagagcggctggaaaacctgagaaagaagcctgaaaatatcccccagcccatcagcaatacatctagagccaacctgaataagctgctgaccgattacaccgaaatgaagaaggcgatcctgcatgtgtactgggaagagttccagaaggaccctgtgggcctgatgagccgggtggcccagcctgccagcaagaagatcgatcagaacaagctgaaacctgagatggacgagaagggcaacctgaccaccgccggctttgcctgctctcagtgtggccagcccctgttcgtgtacaagctggagcaggtgtctgagaagggcaaggcttacaccaactacttcggacggtgcaatgtggccgagcacgaaaagctgatcctgctggcccagctgaagcccgagaaggatagcgacgaagccgtgacatatagcctgggaaagtttgggcagagggccctggatttctacagcattcatgtgaccaaggagtccacccaccccgtgaagcccctggcccagatcgccggaaacagatacgcctccggacctgtgggaaaggccctgagcgacgcatgtatgggcacaatcgcctccttcctgtctaagtaccaggacatcatcatcgaacaccagaaggtggtgaagggcaaccagaagagactggagagcctgcgggagctggccggcaaggaaaacctggaataccctagcgtgaccctgccacctcagcctcacaccaaggagggcgttgatgcctacaacgaagtgatcgcccgggtgcgaatgtgggtgaacctgaacctgtggcagaagctgaagctaagcagagatgatgccaagcctctgctgagactgaagggattcccttcctttcctctggtcgagagacaggccaacgaagtggactggtgggacatggtgtgtaacgtgaagaagctgatcaacgagaaaaaggaggatggcaaggtgttttggcagaatctggctggctacaagagacaggaagccctgagaccatacctgagcagcgaggaagatcggaagaagggaaagaaattcgctcggtaccagctgggcgacctgctgctgcacctggaaaagaagcacggcgaggactggggaaaggtgtacgacgaggcctgggagcggattgacaagaaagtggaaggcctgagcaagcacatcaagctggaagaggaacggagaagcgaggacgcccagagcaaggccgccctgaccgactggctgcgggctaaggccagcttcgtgatcgagggcctgaaggaggccgacaaggacgagttctgcagatgcgagctgaagctgcagaagtggtacggggacctgcggggaaagcccttcgccatcgaagccgagaacagcatcctggacatcagcggcttcagcaagcagtacaactgtgccttcatctggcagaaggacggcgtgaagaagctgaacctgtacctgatcatcaactacttcaagggcggcaagctgcggttcaagaagatcaaacctgaagccttcgaagccaacagattctacaccgtgatcaacaaaaagagcggcgagatcgtgcccatggaggtgaacttcaacttcgacgaccccaacctgatcatcctgcctctggcctttggcaagagacagggcagagaattcatctggaacgacctgctgtccctggaaaccggcagcctgaagctggccaacggaagagtgatcgagaagacactgtacaacagaagaacccggcaggatgagcctgccctgttcgtggccctgaccttcgagcggcgggaggtcctggactcctccaatatcaaaccaatgaacctgatcggcgtggcaagaggcgaaaacatccccgccgtgatcgccctgaccgaccccgagggctgcccactgagccggtttaaggatagcctgggaaacccaacccacatcctgagaatcggcgagagctataaggagaagcagcggaccatccaggccaagaaggaggtggagcagcggagagccggcggctacagccggaagtacgccagcaaagccaagaatctggcagacgatatggtgagaaacaccgctagagatctgctgtactacgccgtgacccaggatgccatgctgatcttcgccaacctgagccggggcttcggccggcagggcaagcggaccttcatggccgagagacagtacacacggatggaggactggctgaccgccaagctggcctacgagggcctgagcaagacctacctgtccaagacactggcccagtacacctccaagacatgcagcaactgtgggtttaccatcaccagcgccgactacgacagggtgctggagaagctgaagaagacagcaacaggctggatgaccacaattaacggcaaggagctgaaggtggagggccagattacctactacaacagatacaagagacagaacgtagtcaaggacctgtccgtcgagctggatagactgagcgaagaatctgtgaacaacgacatctcctcctggacaaagggcagaagcggagaagctctgagcctcctgaagaaaagattctcccatagacccgtgcaggagaagttcgtgtgcctgaactgcggcttcgagacacacgcagccgagcaagccgccctgaacatcgccagatcctggctgttcctgcggagccaggagtacaagaaataccagacaaacaagacaaccggcaacaccgataagagagccttcgtcgagacctggcagtccttttaccggaagaagcttaaggaggtgtggaaacctgccgtgcggtctggcggatctggcggaggctccaccagccccaagaaaaagagaaaagtctaagctgccttctgcggggcttgccttctggccatgcccttcttctctcccttgcacctgtacctcttggtctttgaataaagcctgagtaggaaggctagcaaaaaaaaaaaaaaaaaaaaaaaaaaaaaaaaaaaaaaaaaaaaaaaaaaaaaaaaaaaaaaaaaaaaaaaaaaaaaaaa

SEQ ID NO: 9545 - RNA, 8787 nt, synthetic construct
  source 1..8787: mol_type = other RNA
aggaaataagagagaaaagaagagtaagaagaaatataagagccaccatggcccctaagaagaagcgtaaagtgagccggatgaaccacgaccaggagttcgacccccctaaggtgtaccctcccgtccccgccgagaagagaaagcccatccgggtcctgagcctgttcgatggcatcgccaccggtctgctggtgctgaaggacctgggcatccaggtggataggtacattgcctccgaggtgtgcgaggactccatcaccgtgggaatggtgcgtcatcagggcaagatcatgtacgtgggcgacgtgcggagcgtgacacagaagcatatccaggagtggggccctttcgacctggtgatcggcggcagcccttgcaatgacctgagcatcgtgaacccagcccggaagggcctgtacgagggaaccggcagactgttcttcgagttttacagactgctgcacgacgcccggcctaaggaaggcgacgaccggcccttcttttggctgttcgagaatgtggtggccatgggagtcagcgacaagcgggatattagccggttcctggagagcaaccccgtgatgatcgatgccaaggaagtgagcgccgcccaccgggccagatacttctggggcaatctgcctggcatgaacagacccctggccagcaccgtgaacgacaagctggagctgcaggagtgcctggagcacggccggatcgccaagttcagcaaggtgagaaccatcaccacccgaagcaacagcatcaaacaaggcaaggaccagcactttcctgtgttcatgaacgagaaggaggacatcctgtggtgtaccgagatggagagagtgttcgggttcccagtccactacacagatgtcagcaacatgtctagactggccagacagagactgctgggaagaagctggtccgtccctgtgatcagacacctgttcgcccctctgaaggagtacttcgcctgcgtgagcagcggcaacagcaacgccaacagccggggccccagcttctctagcggcctggtgccactgtccctgagagggagccacatgggccccatggagatctacaaaaccgtgagcgcctggaagcggcagcctgtgcgcgtgctgagcctgtttcggaatatcgataaagtcctgaaaagcctgggattcctggagagcggctctggctccggcggtggcaccctgaagtacgtggaggatgtgacaaacgtggtcagacgggatgtggagaagtggggccccttcgatctggtgtacggcagcacccaacccctgggcagctcttgtgaccggtgccctggctggtacatgtttcagttccaccggatcctgcagtacgccctgccgagacaggagtcccagcggccattcttttggattttcatggacaacttgctgctgaccgaggatgaccaggaaactaccactcggttcctgcagaccgaagccgtgaccctgcaggacgtgagaggccgggactaccagaacgccatgcgggtgtggtccaacatccctggactgaaaagcaagcacgcacctctgacccctaaagaagaggagtacctgcaggcccaggtgcggagcagaagcaagctggacgcccctaaggtggatctgctggtgaagaattgcctcctgcccctgagagagtacttcaagtatttcagccagaatagtctgcccctgggaggcagcggcggcggccaggtgcccgtgaccttcgaggacatcgccatctacttctgccaggaggagtgggaggtgctggaggagtggcagaaggacctgtacaaggacgtgatgaaggagaactaccaggccctgatcagcctgggcaccggcagcctgatcgtgagccccgacatcatcagcaggatcgagaggggcgaggacccctacatcagggacgagaggggcagcaagaagagggagaccgagaacagcagcggcggcccaagcagcggcgcccctcctcccagcggcggcaggcggcccaagcagcggcgcccctcctcccagcggcggcagcccagccggctccccaacctctaccgaggagggcacctctgagtccgccacccccgagagcggccctggcacctccaccgagcccagcgagggcagcgcacccggcagccctgccggcagccccacctccacagaggagggaaccagcaccgagcccagcgaaggcagcgccccaggcaccagcaccgagcctagtgagcaggagattaaacggatcaacaagatcagaagaagacttgtgaaagacagcaacaccaagaaggccggcaagacaggccccatgaaaaccctgctggttagagtgatgacacccgatctgagagagcggctggaaaacctgagaaagaagcctgaaaatatcccccagcccatcagcaatacatctagagccaacctgaataagctgctgaccgattacaccgaaatgaagaaggcgatcctgcatgtgtactgggaagagttccagaaggaccctgtgggcctgatgagccgggtggcccagcctgccagcaagaagatcgatcagaacaagctgaaacctgagatggacgagaagggcaacctgaccaccgccggctttgcctgctctcagtgtggccagcccctgttcgtgtacaagctggagcaggtgtctgagaagggcaaggcttacaccaactacttcggacggtgcaatgtggccgagcacgaaaagctgatcctgctggcccagctgaagcccgagaaggatagcgacgaagccgtgacatatagcctgggaaagtttgggcagagggccctggatttctacagcattcatgtgaccaaggagtccacccaccccgtgaagcccctggcccagatcgccggaaacagatacgcctccggacctgtgggaaaggccctgagcgacgcatgtatgggcacaatcgcctccttcctgtctaagtaccaggacatcatcatcgaacaccagaaggtggtgaagggcaaccagaagagactggagagcctgcgggagctggccggcaaggaaaacctggaataccctagcgtgaccctgccacctcagcctcacaccaaggagggcgttgatgcctacaacgaagtgatcgcccgggtgcgaatgtgggtgaacctgaacctgtggcagaagctgaagctaagcagagatgatgccaagcctctgctgagactgaagggattcccttcctttcctctggtcgagagacaggccaacgaagtggactggtgggacatggtgtgtaacgtgaagaagctgatcaacgagaaaaaggaggatggcaaggtgttttggcagaatctggctggctacaagagacaggaagccctgagaccatacctgagcagcgaggaagatcggaagaagggaaagaaattcgctcggtaccagctgggcgacctgctgctgcacctggaaaagaagcacggcgaggactggggaaaggtgtacgacgaggcctgggagcggattgacaagaaagtggaaggcctgagcaagcacatcaagctggaagaggaacggagaagcgaggacgcccagagcaaggccgccctgaccgactggctgcgggctaaggccagcttcgtgatcgagggcctgaaggaggccgacaaggacgagttctgcagatgcgagctgaagctgcagaagtggtacggggacctgcggggaaagcccttcgccatcgaagccgagaacagcatcctggacatcagcggcttcagcaagcagtacaactgtgccttcatctggcagaaggacggcgtgaagaagctgaacctgtacctgatcatcaactacttcaagggcggcaagctgcggttcaagaagatcaaacctgaagccttcgaagccaacagattctacaccgtgatcaacaaaaagagcggcgagatcgtgcccatggaggtgaacttcaacttcgacgaccccaacctgatcatcctgcctctggcctttggcaagagacagggcagagaattcatctggaacgacctgctgtccctggaaaccggcagcctgaagctggccaacggaagagtgatcgagaagacactgtacaacagaagaacccggcaggatgagcctgccctgttcgtggccctgaccttcgagcggcgggaggtcctggactcctccaatatcaaaccaatgaacctgatcggcgtggcaagaggcgaaaacatccccgccgtgatcgccctgaccgaccccgagggctgcccactgagccggtttaaggatagcctgggaaacccaacccacatcctgagaatcggcgagagctataaggagaagcagcggaccatccaggccaagaaggaggtggagcagcggagagccggcggctacagccggaagtacgccagcaaagccaagaatctggcagacgatatggtgagaaacaccgctagagatctgctgtactacgccgtgacccaggatgccatgctgatcttcgccaacctgagccggggcttcggccggcagggcaagcggaccttcatggccgagagacagtacacacggatggaggactggctgaccgccaagctggcctacgagggcctgagcaagacctacctgtccaagacactggcccagtacacctccaagacatgcagcaactgtgggtttaccatcaccagcgccgactacgacagggtgctggagaagctgaagaagacagcaacaggctggatgaccacaattaacggcaaggagctgaaggtggagggccagattacctactacaacagatacaagagacagaacgtagtcaaggacctgtccgtcgagctggatagactgagcgaagaatctgtgaacaacgacatctcctcctggacaaagggcagaagcggagaagctctgagcctcctgaagaaaagattctcccatagacccgtgcaggagaagttcgtgtgcctgaactgcggcttcgagacacacgcagccgagcaagccgccctgaacatcgccagatcctggctgttcctgcggagccaggagtacaagaaataccagacaaacaagacaaccggcaacaccgataagagagccttcgtcgagacctggcagtccttttaccggaagaagcttaaggaggtgtggaaacctgccgtgcggtctggcggatctggcggaggctccaccagccccaagaaaaagagaaaagtctaagctgccttctgcggggcttgccttctggccatgcccttcttctctcccttgcacctgtacctcttggtctttgaataaagcctgagtaggaaggctagcaaaaaaaaaaaaaaaaaaaaaaaaaaaaaaaaaaaaaaaaaaaaaaaaaaaaaaaaaaaaaaaaaaaaaaaaaaaaaaaagcccagccggctccccaacctctaccgaggagggcacctctgagtccgccacccccgagagcggccctggcacctccaccgagcccagcgagggcagcgcacccggcagccctgccggcagccccacctccacagaggagggaaccagcaccgagcccagcgaaggcagcgccccaggcaccagcaccgagcctagtgagcaggagattaaacggatcaacaagatcagaagaagacttgtgaaagacagcaacaccaagaaggccggcaagacaggccccatgaaaaccctgctggttagagtgatgacacccgatctgagagagcggctggaaaacctgagaaagaagcctgaaaatatcccccagcccatcagcaatacatctagagccaacctgaataagctgctgaccgattacaccgaaatgaagaaggcgatcctgcatgtgtactgggaagagttccagaaggaccctgtgggcctgatgagccgggtggcccagcctgccagcaagaagatcgatcagaacaagctgaaacctgagatggacgagaagggcaacctgaccaccgccggctttgcctgctctcagtgtggccagcccctgttcgtgtacaagctggagcaggtgtctgagaagggcaaggcttacaccaactacttcggacggtgcaatgtggccgagcacgaaaagctgatcctgctggcccagctgaagcccgagaaggatagcgacgaagccgtgacatatagcctgggaaagtttgggcagagggccctggatttctacagcattcatgtgaccaaggagtccacccaccccgtgaagcccctggcccagatcgccggaaacagatacgcctccggacctgtgggaaaggccctgagcgacgcatgtatgggcacaatcgcctccttcctgtctaagtaccaggacatcatcatcgaacaccagaaggtggtgaagggcaaccagaagagactggagagcctgcgggagctggccggcaaggaaaacctggaataccctagcgtgaccctgccacctcagcctcacaccaaggagggcgttgatgcctacaacgaagtgatcgcccgggtgcgaatgtgggtgaacctgaacctgtggcagaagctgaagctaagcagagatgatgccaagcctctgctgagactgaagggattcccttcctttcctctggtcgagagacaggccaacgaagtggactggtgggacatggtgtgtaacgtgaagaagctgatcaacgagaaaaaggaggatggcaaggtgttttggcagaatctggctggctacaagagacaggaagccctgagaccatacctgagcagcgaggaagatcggaagaagggaaagaaattcgctcggtaccagctgggcgacctgctgctgcacctggaaaagaagcacggcgaggactggggaaaggtgtacgacgaggcctgggagcggattgacaagaaagtggaaggcctgagcaagcacatcaagctggaagaggaacggagaagcgaggacgcccagagcaaggccgccctgaccgactggctgcgggctaaggccagcttcgtgatcgagggcctgaaggaggccgacaaggacgagttctgcagatgcgagctgaagctgcagaagtggtacggggacctgcggggaaagcccttcgccatcgaagccgagaacagcatcctggacatcagcggcttcagcaagcagtacaactgtgccttcatctggcagaaggacggcgtgaagaagctgaacctgtacctgatcatcaactacttcaagggcggcaagctgcggttcaagaagatcaaacctgaagccttcgaagccaacagattctacaccgtgatcaacaaaaagagcggcgagatcgtgcccatggaggtgaacttcaacttcgacgaccccaacctgatcatcctgcctctggcctttggcaagagacagggcagagaattcatctggaacgacctgctgtccctggaaaccggcagcctgaagctggccaacggaagagtgatcgagaagacactgtacaacagaagaacccggcaggatgagcctgccctgttcgtggccctgaccttcgagcggcgggaggtcctggactcctccaatatcaaaccaatgaacctgatcggcgtggcaagaggcgaaaacatccccgccgtgatcgccctgaccgaccccgagggctgcccactgagccggtttaaggatagcctgggaaacccaacccacatcctgagaatcggcgagagctataaggagaagcagcggaccatccaggccaagaaggaggtggagcagcggagagccggcggctacagccggaagtacgccagcaaagccaagaatctggcagacgatatggtgagaaacaccgctagagatctgctgtactacgccgtgacccaggatgccatgctgatcttcgccaacctgagccggggcttcggccggcagggcaagcggaccttcatggccgagagacagtacacacggatggaggactggctgaccgccaagctggcctacgagggcctgagcaagacctacctgtccaagacactggcccagtacacctccaagacatgcagcaactgtgggtttaccatcaccagcgccgactacgacagggtgctggagaagctgaagaagacagcaacaggctggatgaccacaattaacggcaaggagctgaaggtggagggccagattacctactacaacagatacaagagacagaacgtagtcaaggacctgtccgtcgagctggatagactgagcgaagaatctgtgaacaacgacatctcctcctggacaaagggcagaagcggagaagctctgagcctcctgaagaaaagattctcccatagacccgtgcaggagaagttcgtgtgcctgaactgcggcttcgagacacacgcagccgagcaagccgccctgaacatcgccagatcctggctgttcctgcggagccaggagtacaagaaataccagacaaacaagacaaccggcaacaccgataagagagccttcgtcgagacctggcagtccttttaccggaagaagcttaaggaggtgtggaaacctgccgtgcggtctggcggatctggcggaggctccaccagccccaagaaaaagagaaaagtctaagctgccttctgcggggcttgccttctggccatgcccttcttctctcccttgcacctgtacctcttggtctttgaataaagcctgagtaggaaggctagcaaaaaaaaaaaaaaaaaaaaaaaaaaaaaaaaaaaaaaaaaaaaaaaaaaaaaaaaaaaaaaaaaaaaaaaaaaaaaaaa

SEQ ID NO: 9546 - RNA, 8787 nt, synthetic construct
  source 1..8787: mol_type = other RNA
aggaaataagagagaaaagaagagtaagaagaaatataagagccaccatggcccctaagaagaagcgtaaagtgagccggatgaaccacgaccaggagttcgacccccctaaggtgtaccctcccgtccccgccgagaagagaaagcccatccgggtcctgagcctgttcgatggcatcgccaccggtctgctggtgctgaaggacctgggcatccaggtggataggtacattgcctccgaggtgtgcgaggactccatcaccgtgggaatggtgcgtcatcagggcaagatcatgtacgtgggcgacgtgcggagcgtgacacagaagcatatccaggagtggggccctttcgacctggtgatcggcggcagcccttgcaatgacctgagcatcgtgaacccagcccggaagggcctgtacgagggaaccggcagactgttcttcgagttttacagactgctgcacgacgcccggcctaaggaaggcgacgaccggcccttcttttggctgttcgagaatgtggtggccatgggagtcagcgacaagcgggatattagccggttcctggagagcaaccccgtgatgatcgatgccaaggaagtgagcgccgcccaccgggccagatacttctggggcaatctgcctggcatgaacagacccctggccagcaccgtgaacgacaagctggagctgcaggagtgcctggagcacggccggatcgccaagttcagcaaggtgagaaccatcaccacccgaagcaacagcatcaaacaaggcaaggaccagcactttcctgtgttcatgaacgagaaggaggacatcctgtggtgtaccgagatggagagagtgttcgggttcccagtccactacacagatgtcagcaacatgtctagactggccagacagagactgctgggaagaagctggtccgtccctgtgatcagacacctgttcgcccctctgaaggagtacttcgcctgcgtgagcagcggcaacagcaacgccaacagccggggccccagcttctctagcggcctggtgccactgtccctgagagggagccacatgggccccatggagatctacaaaaccgtgagcgcctggaagcggcagcctgtgcgcgtgctgagcctgtttcggaatatcgataaagtcctgaaaagcctgggattcctggagagcggctctggctccggcggtggcaccctgaagtacgtggaggatgtgacaaacgtggtcagacgggatgtggagaagtggggccccttcgatctggtgtacggcagcacccaacccctgggcagctcttgtgaccggtgccctggctggtacatgtttcagttccaccggatcctgcagtacgccctgccgagacaggagtcccagcggccattcttttggattttcatggacaacttgctgctgaccgaggatgaccaggaaactaccactcggttcctgcagaccgaagccgtgaccctgcaggacgtgagaggccgggactaccagaacgccatgcgggtgtggtccaacatccctggactgaaaagcaagcacgcacctctgacccctaaagaagaggagtacctgcaggcccaggtgcggagcagaagcaagctggacgcccctaaggtggatctgctggtgaagaattgcctcctgcccctgagagagtacttcaagtatttcagccagaatagtctgcccctgggaggcagcggcggcggcatgatcaactaccagacccccgtgagcttcagggacgtggtggtgggcttcacccaggaggagtggcacaggctgaaccccacccagagggccctgtacagggacgtgatgctggagacctacagcaacctggtgagcgtgggctacgagggcaccaagcccgacgtgatcctgaggctggagcaggaggaggccccctggatcggcgaggccgcctgcctgggctgccactgctgggaggacggcggcccaagcagcggcgcccctcctcccagcggcggcaggcggcccaagcagcggcgcccctcctcccagcggcggcagcccagccggctccccaacctctaccgaggagggcacctctgagtccgccacccccgagagcggccctggcacctccaccgagcccagcgagggcagcgcacccggcagccctgccggcagccccacctccacagaggagggaaccagcaccgagcccagcgaaggcagcgccccaggcaccagcaccgagcctagtgagcaggagattaaacggatcaacaagatcagaagaagacttgtgaaagacagcaacaccaagaaggccggcaagacaggccccatgaaaaccctgctggttagagtgatgacacccgatctgagagagcggctggaaaacctgagaaagaagcctgaaaatatcccccagcccatcagcaatacatctagagccaacctgaataagctgctgaccgattacaccgaaatgaagaaggcgatcctgcatgtgtactgggaagagttccagaaggaccctgtgggcctgatgagccgggtggcccagcctgccagcaagaagatcgatcagaacaagctgaaacctgagatggacgagaagggcaacctgaccaccgccggctttgcctgctctcagtgtggccagcccctgttcgtgtacaagctggagcaggtgtctgagaagggcaaggcttacaccaactacttcggacggtgcaatgtggccgagcacgaaaagctgatcctgctggcccagctgaagcccgagaaggatagcgacgaagccgtgacatatagcctgggaaagtttgggcagagggccctggatttctacagcattcatgtgaccaaggagtccacccaccccgtgaagcccctggcccagatcgccggaaacagatacgcctccggacctgtgggaaaggccctgagcgacgcatgtatgggcacaatcgcctccttcctgtctaagtaccaggacatcatcatcgaacaccagaaggtggtgaagggcaaccagaagagactggagagcctgcgggagctggccggcaaggaaaacctggaataccctagcgtgaccctgccacctcagcctcacaccaaggagggcgttgatgcctacaacgaagtgatcgcccgggtgcgaatgtgggtgaacctgaacctgtggcagaagctgaagctaagcagagatgatgccaagcctctgctgagactgaagggattcccttcctttcctctggtcgagagacaggccaacgaagtggactggtgggacatggtgtgtaacgtgaagaagctgatcaacgagaaaaaggaggatggcaaggtgttttggcagaatctggctggctacaagagacaggaagccctgagaccatacctgagcagcgaggaagatcggaagaagggaaagaaattcgctcggtaccagctgggcgacctgctgctgcacctggaaaagaagcacggcgaggactggggaaaggtgtacgacgaggcctgggagcggattgacaagaaagtggaaggcctgagcaagcacatcaagctggaagaggaacggagaagcgaggacgcccagagcaaggccgccctgaccgactggctgcgggctaaggccagcttcgtgatcgagggcctgaaggaggccgacaaggacgagttctgcagatgcgagctgaagctgcagaagtggtacggggacctgcggggaaagcccttcgccatcgaagccgagaacagcatcctggacatcagcggcttcagcaagcagtacaactgtgccttcatctggcagaaggacggcgtgaagaagctgaacctgtacctgatcatcaactacttcaagggcggcaagctgcggttcaagaagatcaaacctgaagccttcgaagccaacagattctacaccgtgatcaacaaaaagagcggcgagatcgtgcccatggaggtgaacttcaacttcgacgaccccaacctgatcatcctgcctctggcctttggcaagagacagggcagagaattcatctggaacgacctgctgtccctggaaaccggcagcctgaagctggccaacggaagagtgatcgagaagacactgtacaacagaagaacccggcaggatgagcctgccctgttcgtggccctgaccttcgagcggcgggaggtcctggactcctccaatatcaaaccaatgaacctgatcggcgtggcaagaggcgaaaacatccccgccgtgatcgccctgaccgaccccgagggctgcccactgagccggtttaaggatagcctgggaaacccaacccacatcctgagaatcggcgagagctataaggagaagcagcggaccatccaggccaagaaggaggtggagcagcggagagccggcggctacagccggaagtacgccagcaaagccaagaatctggcagacgatatggtgagaaacaccgctagagatctgctgtactacgccgtgacccaggatgccatgctgatcttcgccaacctgagccggggcttcggccggcagggcaagcggaccttcatggccgagagacagtacacacggatggaggactggctgaccgccaagctggcctacgagggcctgagcaagacctacctgtccaagacactggcccagtacacctccaagacatgcagcaactgtgggtttaccatcaccagcgccgactacgacagggtgctggagaagctgaagaagacagcaacaggctggatgaccacaattaacggcaaggagctgaaggtggagggccagattacctactacaacagatacaagagacagaacgtagtcaaggacctgtccgtcgagctggatagactgagcgaagaatctgtgaacaacgacatctcctcctggacaaagggcagaagcggagaagctctgagcctcctgaagaaaagattctcccatagacccgtgcaggagaagttcgtgtgcctgaactgcggcttcgagacacacgcagccgagcaagccgccctgaacatcgccagatcctggctgttcctgcggagccaggagtacaagaaataccagacaaacaagacaaccggcaacaccgataagagagccttcgtcgagacctggcagtccttttaccggaagaagcttaaggaggtgtggaaacctgccgtgcggtctggcggatctggcggaggctccaccagccccaagaaaaagagaaaagtctaagctgccttctgcggggcttgccttctggccatgcccttcttctctcccttgcacctgtacctcttggtctttgaataaagcctgagtaggaaggctagcaaaaaaaaaaaaaaaaaaaaaaaaaaaaaaaaaaaaaaaaaaaaaaaaaaaaaaaaaaaaaaaaaaaaaaaaaaaaaaaagcccagccggctccccaacctctaccgaggagggcacctctgagtccgccacccccgagagcggccctggcacctccaccgagcccagcgagggcagcgcacccggcagccctgccggcagccccacctccacagaggagggaaccagcaccgagcccagcgaaggcagcgccccaggcaccagcaccgagcctagtgagcaggagattaaacggatcaacaagatcagaagaagacttgtgaaagacagcaacaccaagaaggccggcaagacaggccccatgaaaaccctgctggttagagtgatgacacccgatctgagagagcggctggaaaacctgagaaagaagcctgaaaatatcccccagcccatcagcaatacatctagagccaacctgaataagctgctgaccgattacaccgaaatgaagaaggcgatcctgcatgtgtactgggaagagttccagaaggaccctgtgggcctgatgagccgggtggcccagcctgccagcaagaagatcgatcagaacaagctgaaacctgagatggacgagaagggcaacctgaccaccgccggctttgcctgctctcagtgtggccagcccctgttcgtgtacaagctggagcaggtgtctgagaagggcaaggcttacaccaactacttcggacggtgcaatgtggccgagcacgaaaagctgatcctgctggcccagctgaagcccgagaaggatagcgacgaagccgtgacatatagcctgggaaagtttgggcagagggccctggatttctacagcattcatgtgaccaaggagtccacccaccccgtgaagcccctggcccagatcgccggaaacagatacgcctccggacctgtgggaaaggccctgagcgacgcatgtatgggcacaatcgcctccttcctgtctaagtaccaggacatcatcatcgaacaccagaaggtggtgaagggcaaccagaagagactggagagcctgcgggagctggccggcaaggaaaacctggaataccctagcgtgaccctgccacctcagcctcacaccaaggagggcgttgatgcctacaacgaagtgatcgcccgggtgcgaatgtgggtgaacctgaacctgtggcagaagctgaagctaagcagagatgatgccaagcctctgctgagactgaagggattcccttcctttcctctggtcgagagacaggccaacgaagtggactggtgggacatggtgtgtaacgtgaagaagctgatcaacgagaaaaaggaggatggcaaggtgttttggcagaatctggctggctacaagagacaggaagccctgagaccatacctgagcagcgaggaagatcggaagaagggaaagaaattcgctcggtaccagctgggcgacctgctgctgcacctggaaaagaagcacggcgaggactggggaaaggtgtacgacgaggcctgggagcggattgacaagaaagtggaaggcctgagcaagcacatcaagctggaagaggaacggagaagcgaggacgcccagagcaaggccgccctgaccgactggctgcgggctaaggccagcttcgtgatcgagggcctgaaggaggccgacaaggacgagttctgcagatgcgagctgaagctgcagaagtggtacggggacctgcggggaaagcccttcgccatcgaagccgagaacagcatcctggacatcagcggcttcagcaagcagtacaactgtgccttcatctggcagaaggacggcgtgaagaagctgaacctgtacctgatcatcaactacttcaagggcggcaagctgcggttcaagaagatcaaacctgaagccttcgaagccaacagattctacaccgtgatcaacaaaaagagcggcgagatcgtgcccatggaggtgaacttcaacttcgacgaccccaacctgatcatcctgcctctggcctttggcaagagacagggcagagaattcatctggaacgacctgctgtccctggaaaccggcagcctgaagctggccaacggaagagtgatcgagaagacactgtacaacagaagaacccggcaggatgagcctgccctgttcgtggccctgaccttcgagcggcgggaggtcctggactcctccaatatcaaaccaatgaacctgatcggcgtggcaagaggcgaaaacatccccgccgtgatcgccctgaccgaccccgagggctgcccactgagccggtttaaggatagcctgggaaacccaacccacatcctgagaatcggcgagagctataaggagaagcagcggaccatccaggccaagaaggaggtggagcagcggagagccggcggctacagccggaagtacgccagcaaagccaagaatctggcagacgatatggtgagaaacaccgctagagatctgctgtactacgccgtgacccaggatgccatgctgatcttcgccaacctgagccggggcttcggccggcagggcaagcggaccttcatggccgagagacagtacacacggatggaggactggctgaccgccaagctggcctacgagggcctgagcaagacctacctgtccaagacactggcccagtacacctccaagacatgcagcaactgtgggtttaccatcaccagcgccgactacgacagggtgctggagaagctgaagaagacagcaacaggctggatgaccacaattaacggcaaggagctgaaggtggagggccagattacctactacaacagatacaagagacagaacgtagtcaaggacctgtccgtcgagctggatagactgagcgaagaatctgtgaacaacgacatctcctcctggacaaagggcagaagcggagaagctctgagcctcctgaagaaaagattctcccatagacccgtgcaggagaagttcgtgtgcctgaactgcggcttcgagacacacgcagccgagcaagccgccctgaacatcgccagatcctggctgttcctgcggagccaggagtacaagaaataccagacaaacaagacaaccggcaacaccgataagagagccttcgtcgagacctggcagtccttttaccggaagaagcttaaggaggtgtggaaacctgccgtgcggtctggcggatctggcggaggctccaccagccccaagaaaaagagaaaagtctaagctgccttctgcggggcttgccttctggccatgcccttcttctctcccttgcacctgtacctcttggtctttgaataaagcctgagtaggaaggctagcaaaaaaaaaaaaaaaaaaaaaaaaaaaaaaaaaaaaaaaaaaaaaaaaaaaaaaaaaaaaaaaaaaaaaaaaaaaaaaaa

SEQ ID NO: 9547 - RNA, 8787 nt, synthetic construct
  source 1..8787: mol_type = other RNA
aggaaataagagagaaaagaagagtaagaagaaatataagagccaccatggcccctaagaagaagcgtaaagtgagccggatgaaccacgaccaggagttcgacccccctaaggtgtaccctcccgtccccgccgagaagagaaagcccatccgggtcctgagcctgttcgatggcatcgccaccggtctgctggtgctgaaggacctgggcatccaggtggataggtacattgcctccgaggtgtgcgaggactccatcaccgtgggaatggtgcgtcatcagggcaagatcatgtacgtgggcgacgtgcggagcgtgacacagaagcatatccaggagtggggccctttcgacctggtgatcggcggcagcccttgcaatgacctgagcatcgtgaacccagcccggaagggcctgtacgagggaaccggcagactgttcttcgagttttacagactgctgcacgacgcccggcctaaggaaggcgacgaccggcccttcttttggctgttcgagaatgtggtggccatgggagtcagcgacaagcgggatattagccggttcctggagagcaaccccgtgatgatcgatgccaaggaagtgagcgccgcccaccgggccagatacttctggggcaatctgcctggcatgaacagacccctggccagcaccgtgaacgacaagctggagctgcaggagtgcctggagcacggccggatcgccaagttcagcaaggtgagaaccatcaccacccgaagcaacagcatcaaacaaggcaaggaccagcactttcctgtgttcatgaacgagaaggaggacatcctgtggtgtaccgagatggagagagtgttcgggttcccagtccactacacagatgtcagcaacatgtctagactggccagacagagactgctgggaagaagctggtccgtccctgtgatcagacacctgttcgcccctctgaaggagtacttcgcctgcgtgagcagcggcaacagcaacgccaacagccggggccccagcttctctagcggcctggtgccactgtccctgagagggagccacatgggccccatggagatctacaaaaccgtgagcgcctggaagcggcagcctgtgcgcgtgctgagcctgtttcggaatatcgataaagtcctgaaaagcctgggattcctggagagcggctctggctccggcggtggcaccctgaagtacgtggaggatgtgacaaacgtggtcagacgggatgtggagaagtggggccccttcgatctggtgtacggcagcacccaacccctgggcagctcttgtgaccggtgccctggctggtacatgtttcagttccaccggatcctgcagtacgccctgccgagacaggagtcccagcggccattcttttggattttcatggacaacttgctgctgaccgaggatgaccaggaaactaccactcggttcctgcagaccgaagccgtgaccctgcaggacgtgagaggccgggactaccagaacgccatgcgggtgtggtccaacatccctggactgaaaagcaagcacgcacctctgacccctaaagaagaggagtacctgcaggcccaggtgcggagcagaagcaagctggacgcccctaaggtggatctgctggtgaagaattgcctcctgcccctgagagagtacttcaagtatttcagccagaatagtctgcccctgggaggcagcggcggcggcaagagcgccgccgtgagcttcagcgacgtggccgtgtacttcagcctggaggagtggggctgcctgaggcccgcccagagggccctgtacagggacgtgatgagggagacctacggccacctgggcgccctgggcttccccggccccaagcccgccctgatcagctggatggagcaggagagcgaggcctggagccccgccgcccaggaccccgaggagggcgagagcctgggcggcgccctgggcggcccaagcagcggcgcccctcctcccagcggcggcaggcggcccaagcagcggcgcccctcctcccagcggcggcagcccagccggctccccaacctctaccgaggagggcacctctgagtccgccacccccgagagcggccctggcacctccaccgagcccagcgagggcagcgcacccggcagccctgccggcagccccacctccacagaggagggaaccagcaccgagcccagcgaaggcagcgccccaggcaccagcaccgagcctagtgagcaggagattaaacggatcaacaagatcagaagaagacttgtgaaagacagcaacaccaagaaggccggcaagacaggccccatgaaaaccctgctggttagagtgatgacacccgatctgagagagcggctggaaaacctgagaaagaagcctgaaaatatcccccagcccatcagcaatacatctagagccaacctgaataagctgctgaccgattacaccgaaatgaagaaggcgatcctgcatgtgtactgggaagagttccagaaggaccctgtgggcctgatgagccgggtggcccagcctgccagcaagaagatcgatcagaacaagctgaaacctgagatggacgagaagggcaacctgaccaccgccggctttgcctgctctcagtgtggccagcccctgttcgtgtacaagctggagcaggtgtctgagaagggcaaggcttacaccaactacttcggacggtgcaatgtggccgagcacgaaaagctgatcctgctggcccagctgaagcccgagaaggatagcgacgaagccgtgacatatagcctgggaaagtttgggcagagggccctggatttctacagcattcatgtgaccaaggagtccacccaccccgtgaagcccctggcccagatcgccggaaacagatacgcctccggacctgtgggaaaggccctgagcgacgcatgtatgggcacaatcgcctccttcctgtctaagtaccaggacatcatcatcgaacaccagaaggtggtgaagggcaaccagaagagactggagagcctgcgggagctggccggcaaggaaaacctggaataccctagcgtgaccctgccacctcagcctcacaccaaggagggcgttgatgcctacaacgaagtgatcgcccgggtgcgaatgtgggtgaacctgaacctgtggcagaagctgaagctaagcagagatgatgccaagcctctgctgagactgaagggattcccttcctttcctctggtcgagagacaggccaacgaagtggactggtgggacatggtgtgtaacgtgaagaagctgatcaacgagaaaaaggaggatggcaaggtgttttggcagaatctggctggctacaagagacaggaagccctgagaccatacctgagcagcgaggaagatcggaagaagggaaagaaattcgctcggtaccagctgggcgacctgctgctgcacctggaaaagaagcacggcgaggactggggaaaggtgtacgacgaggcctgggagcggattgacaagaaagtggaaggcctgagcaagcacatcaagctggaagaggaacggagaagcgaggacgcccagagcaaggccgccctgaccgactggctgcgggctaaggccagcttcgtgatcgagggcctgaaggaggccgacaaggacgagttctgcagatgcgagctgaagctgcagaagtggtacggggacctgcggggaaagcccttcgccatcgaagccgagaacagcatcctggacatcagcggcttcagcaagcagtacaactgtgccttcatctggcagaaggacggcgtgaagaagctgaacctgtacctgatcatcaactacttcaagggcggcaagctgcggttcaagaagatcaaacctgaagccttcgaagccaacagattctacaccgtgatcaacaaaaagagcggcgagatcgtgcccatggaggtgaacttcaacttcgacgaccccaacctgatcatcctgcctctggcctttggcaagagacagggcagagaattcatctggaacgacctgctgtccctggaaaccggcagcctgaagctggccaacggaagagtgatcgagaagacactgtacaacagaagaacccggcaggatgagcctgccctgttcgtggccctgaccttcgagcggcgggaggtcctggactcctccaatatcaaaccaatgaacctgatcggcgtggcaagaggcgaaaacatccccgccgtgatcgccctgaccgaccccgagggctgcccactgagccggtttaaggatagcctgggaaacccaacccacatcctgagaatcggcgagagctataaggagaagcagcggaccatccaggccaagaaggaggtggagcagcggagagccggcggctacagccggaagtacgccagcaaagccaagaatctggcagacgatatggtgagaaacaccgctagagatctgctgtactacgccgtgacccaggatgccatgctgatcttcgccaacctgagccggggcttcggccggcagggcaagcggaccttcatggccgagagacagtacacacggatggaggactggctgaccgccaagctggcctacgagggcctgagcaagacctacctgtccaagacactggcccagtacacctccaagacatgcagcaactgtgggtttaccatcaccagcgccgactacgacagggtgctggagaagctgaagaagacagcaacaggctggatgaccacaattaacggcaaggagctgaaggtggagggccagattacctactacaacagatacaagagacagaacgtagtcaaggacctgtccgtcgagctggatagactgagcgaagaatctgtgaacaacgacatctcctcctggacaaagggcagaagcggagaagctctgagcctcctgaagaaaagattctcccatagacccgtgcaggagaagttcgtgtgcctgaactgcggcttcgagacacacgcagccgagcaagccgccctgaacatcgccagatcctggctgttcctgcggagccaggagtacaagaaataccagacaaacaagacaaccggcaacaccgataagagagccttcgtcgagacctggcagtccttttaccggaagaagcttaaggaggtgtggaaacctgccgtgcggtctggcggatctggcggaggctccaccagccccaagaaaaagagaaaagtctaagctgccttctgcggggcttgccttctggccatgcccttcttctctcccttgcacctgtacctcttggtctttgaataaagcctgagtaggaaggctagcaaaaaaaaaaaaaaaaaaaaaaaaaaaaaaaaaaaaaaaaaaaaaaaaaaaaaaaaaaaaaaaaaaaaaaaaaaaaaaaagcccagccggctccccaacctctaccgaggagggcacctctgagtccgccacccccgagagcggccctggcacctccaccgagcccagcgagggcagcgcacccggcagccctgccggcagccccacctccacagaggagggaaccagcaccgagcccagcgaaggcagcgccccaggcaccagcaccgagcctagtgagcaggagattaaacggatcaacaagatcagaagaagacttgtgaaagacagcaacaccaagaaggccggcaagacaggccccatgaaaaccctgctggttagagtgatgacacccgatctgagagagcggctggaaaacctgagaaagaagcctgaaaatatcccccagcccatcagcaatacatctagagccaacctgaataagctgctgaccgattacaccgaaatgaagaaggcgatcctgcatgtgtactgggaagagttccagaaggaccctgtgggcctgatgagccgggtggcccagcctgccagcaagaagatcgatcagaacaagctgaaacctgagatggacgagaagggcaacctgaccaccgccggctttgcctgctctcagtgtggccagcccctgttcgtgtacaagctggagcaggtgtctgagaagggcaaggcttacaccaactacttcggacggtgcaatgtggccgagcacgaaaagctgatcctgctggcccagctgaagcccgagaaggatagcgacgaagccgtgacatatagcctgggaaagtttgggcagagggccctggatttctacagcattcatgtgaccaaggagtccacccaccccgtgaagcccctggcccagatcgccggaaacagatacgcctccggacctgtgggaaaggccctgagcgacgcatgtatgggcacaatcgcctccttcctgtctaagtaccaggacatcatcatcgaacaccagaaggtggtgaagggcaaccagaagagactggagagcctgcgggagctggccggcaaggaaaacctggaataccctagcgtgaccctgccacctcagcctcacaccaaggagggcgttgatgcctacaacgaagtgatcgcccgggtgcgaatgtgggtgaacctgaacctgtggcagaagctgaagctaagcagagatgatgccaagcctctgctgagactgaagggattcccttcctttcctctggtcgagagacaggccaacgaagtggactggtgggacatggtgtgtaacgtgaagaagctgatcaacgagaaaaaggaggatggcaaggtgttttggcagaatctggctggctacaagagacaggaagccctgagaccatacctgagcagcgaggaagatcggaagaagggaaagaaattcgctcggtaccagctgggcgacctgctgctgcacctggaaaagaagcacggcgaggactggggaaaggtgtacgacgaggcctgggagcggattgacaagaaagtggaaggcctgagcaagcacatcaagctggaagaggaacggagaagcgaggacgcccagagcaaggccgccctgaccgactggctgcgggctaaggccagcttcgtgatcgagggcctgaaggaggccgacaaggacgagttctgcagatgcgagctgaagctgcagaagtggtacggggacctgcggggaaagcccttcgccatcgaagccgagaacagcatcctggacatcagcggcttcagcaagcagtacaactgtgccttcatctggcagaaggacggcgtgaagaagctgaacctgtacctgatcatcaactacttcaagggcggcaagctgcggttcaagaagatcaaacctgaagccttcgaagccaacagattctacaccgtgatcaacaaaaagagcggcgagatcgtgcccatggaggtgaacttcaacttcgacgaccccaacctgatcatcctgcctctggcctttggcaagagacagggcagagaattcatctggaacgacctgctgtccctggaaaccggcagcctgaagctggccaacggaagagtgatcgagaagacactgtacaacagaagaacccggcaggatgagcctgccctgttcgtggccctgaccttcgagcggcgggaggtcctggactcctccaatatcaaaccaatgaacctgatcggcgtggcaagaggcgaaaacatccccgccgtgatcgccctgaccgaccccgagggctgcccactgagccggtttaaggatagcctgggaaacccaacccacatcctgagaatcggcgagagctataaggagaagcagcggaccatccaggccaagaaggaggtggagcagcggagagccggcggctacagccggaagtacgccagcaaagccaagaatctggcagacgatatggtgagaaacaccgctagagatctgctgtactacgccgtgacccaggatgccatgctgatcttcgccaacctgagccggggcttcggccggcagggcaagcggaccttcatggccgagagacagtacacacggatggaggactggctgaccgccaagctggcctacgagggcctgagcaagacctacctgtccaagacactggcccagtacacctccaagacatgcagcaactgtgggtttaccatcaccagcgccgactacgacagggtgctggagaagctgaagaagacagcaacaggctggatgaccacaattaacggcaaggagctgaaggtggagggccagattacctactacaacagatacaagagacagaacgtagtcaaggacctgtccgtcgagctggatagactgagcgaagaatctgtgaacaacgacatctcctcctggacaaagggcagaagcggagaagctctgagcctcctgaagaaaagattctcccatagacccgtgcaggagaagttcgtgtgcctgaactgcggcttcgagacacacgcagccgagcaagccgccctgaacatcgccagatcctggctgttcctgcggagccaggagtacaagaaataccagacaaacaagacaaccggcaacaccgataagagagccttcgtcgagacctggcagtccttttaccggaagaagcttaaggaggtgtggaaacctgccgtgcggtctggcggatctggcggaggctccaccagccccaagaaaaagagaaaagtctaagctgccttctgcggggcttgccttctggccatgcccttcttctctcccttgcacctgtacctcttggtctttgaataaagcctgagtaggaaggctagcaaaaaaaaaaaaaaaaaaaaaaaaaaaaaaaaaaaaaaaaaaaaaaaaaaaaaaaaaaaaaaaaaaaaaaaaaaaaaaaa

SEQ ID NO: 9548 - RNA, 8787 nt, synthetic construct
  source 1..8787: mol_type = other RNA
aggaaataagagagaaaagaagagtaagaagaaatataagagccaccatggcccctaagaagaagcgtaaagtgagccggatgaaccacgaccaggagttcgacccccctaaggtgtaccctcccgtccccgccgagaagagaaagcccatccgggtcctgagcctgttcgatggcatcgccaccggtctgctggtgctgaaggacctgggcatccaggtggataggtacattgcctccgaggtgtgcgaggactccatcaccgtgggaatggtgcgtcatcagggcaagatcatgtacgtgggcgacgtgcggagcgtgacacagaagcatatccaggagtggggccctttcgacctggtgatcggcggcagcccttgcaatgacctgagcatcgtgaacccagcccggaagggcctgtacgagggaaccggcagactgttcttcgagttttacagactgctgcacgacgcccggcctaaggaaggcgacgaccggcccttcttttggctgttcgagaatgtggtggccatgggagtcagcgacaagcgggatattagccggttcctggagagcaaccccgtgatgatcgatgccaaggaagtgagcgccgcccaccgggccagatacttctggggcaatctgcctggcatgaacagacccctggccagcaccgtgaacgacaagctggagctgcaggagtgcctggagcacggccggatcgccaagttcagcaaggtgagaaccatcaccacccgaagcaacagcatcaaacaaggcaaggaccagcactttcctgtgttcatgaacgagaaggaggacatcctgtggtgtaccgagatggagagagtgttcgggttcccagtccactacacagatgtcagcaacatgtctagactggccagacagagactgctgggaagaagctggtccgtccctgtgatcagacacctgttcgcccctctgaaggagtacttcgcctgcgtgagcagcggcaacagcaacgccaacagccggggccccagcttctctagcggcctggtgccactgtccctgagagggagccacatgggccccatggagatctacaaaaccgtgagcgcctggaagcggcagcctgtgcgcgtgctgagcctgtttcggaatatcgataaagtcctgaaaagcctgggattcctggagagcggctctggctccggcggtggcaccctgaagtacgtggaggatgtgacaaacgtggtcagacgggatgtggagaagtggggccccttcgatctggtgtacggcagcacccaacccctgggcagctcttgtgaccggtgccctggctggtacatgtttcagttccaccggatcctgcagtacgccctgccgagacaggagtcccagcggccattcttttggattttcatggacaacttgctgctgaccgaggatgaccaggaaactaccactcggttcctgcagaccgaagccgtgaccctgcaggacgtgagaggccgggactaccagaacgccatgcgggtgtggtccaacatccctggactgaaaagcaagcacgcacctctgacccctaaagaagaggagtacctgcaggcccaggtgcggagcagaagcaagctggacgcccctaaggtggatctgctggtgaagaattgcctcctgcccctgagagagtacttcaagtatttcagccagaatagtctgcccctgggaggcagcggcggcggcccccaggagtgcgtgaccttcaaggacgtggccgtgaacttcacccaggaggagtggcagcagctgaaccccgcccagagggacctgtacagggaggtgatgctggagaactacaggaacctgatcagcctgggcctgcccgtgagcaagcccgacgtgatcttccagctggagcagggcgaggagccctggatgctggacctgcagaggatcgaggagggcgagatcagcaggaacatgtacggcggcccaagcagcggcgcccctcctcccagcggcggcaggcggcccaagcagcggcgcccctcctcccagcggcggcagcccagccggctccccaacctctaccgaggagggcacctctgagtccgccacccccgagagcggccctggcacctccaccgagcccagcgagggcagcgcacccggcagccctgccggcagccccacctccacagaggagggaaccagcaccgagcccagcgaaggcagcgccccaggcaccagcaccgagcctagtgagcaggagattaaacggatcaacaagatcagaagaagacttgtgaaagacagcaacaccaagaaggccggcaagacaggccccatgaaaaccctgctggttagagtgatgacacccgatctgagagagcggctggaaaacctgagaaagaagcctgaaaatatcccccagcccatcagcaatacatctagagccaacctgaataagctgctgaccgattacaccgaaatgaagaaggcgatcctgcatgtgtactgggaagagttccagaaggaccctgtgggcctgatgagccgggtggcccagcctgccagcaagaagatcgatcagaacaagctgaaacctgagatggacgagaagggcaacctgaccaccgccggctttgcctgctctcagtgtggccagcccctgttcgtgtacaagctggagcaggtgtctgagaagggcaaggcttacaccaactacttcggacggtgcaatgtggccgagcacgaaaagctgatcctgctggcccagctgaagcccgagaaggatagcgacgaagccgtgacatatagcctgggaaagtttgggcagagggccctggatttctacagcattcatgtgaccaaggagtccacccaccccgtgaagcccctggcccagatcgccggaaacagatacgcctccggacctgtgggaaaggccctgagcgacgcatgtatgggcacaatcgcctccttcctgtctaagtaccaggacatcatcatcgaacaccagaaggtggtgaagggcaaccagaagagactggagagcctgcgggagctggccggcaaggaaaacctggaataccctagcgtgaccctgccacctcagcctcacaccaaggagggcgttgatgcctacaacgaagtgatcgcccgggtgcgaatgtgggtgaacctgaacctgtggcagaagctgaagctaagcagagatgatgccaagcctctgctgagactgaagggattcccttcctttcctctggtcgagagacaggccaacgaagtggactggtgggacatggtgtgtaacgtgaagaagctgatcaacgagaaaaaggaggatggcaaggtgttttggcagaatctggctggctacaagagacaggaagccctgagaccatacctgagcagcgaggaagatcggaagaagggaaagaaattcgctcggtaccagctgggcgacctgctgctgcacctggaaaagaagcacggcgaggactggggaaaggtgtacgacgaggcctgggagcggattgacaagaaagtggaaggcctgagcaagcacatcaagctggaagaggaacggagaagcgaggacgcccagagcaaggccgccctgaccgactggctgcgggctaaggccagcttcgtgatcgagggcctgaaggaggccgacaaggacgagttctgcagatgcgagctgaagctgcagaagtggtacggggacctgcggggaaagcccttcgccatcgaagccgagaacagcatcctggacatcagcggcttcagcaagcagtacaactgtgccttcatctggcagaaggacggcgtgaagaagctgaacctgtacctgatcatcaactacttcaagggcggcaagctgcggttcaagaagatcaaacctgaagccttcgaagccaacagattctacaccgtgatcaacaaaaagagcggcgagatcgtgcccatggaggtgaacttcaacttcgacgaccccaacctgatcatcctgcctctggcctttggcaagagacagggcagagaattcatctggaacgacctgctgtccctggaaaccggcagcctgaagctggccaacggaagagtgatcgagaagacactgtacaacagaagaacccggcaggatgagcctgccctgttcgtggccctgaccttcgagcggcgggaggtcctggactcctccaatatcaaaccaatgaacctgatcggcgtggcaagaggcgaaaacatccccgccgtgatcgccctgaccgaccccgagggctgcccactgagccggtttaaggatagcctgggaaacccaacccacatcctgagaatcggcgagagctataaggagaagcagcggaccatccaggccaagaaggaggtggagcagcggagagccggcggctacagccggaagtacgccagcaaagccaagaatctggcagacgatatggtgagaaacaccgctagagatctgctgtactacgccgtgacccaggatgccatgctgatcttcgccaacctgagccggggcttcggccggcagggcaagcggaccttcatggccgagagacagtacacacggatggaggactggctgaccgccaagctggcctacgagggcctgagcaagacctacctgtccaagacactggcccagtacacctccaagacatgcagcaactgtgggtttaccatcaccagcgccgactacgacagggtgctggagaagctgaagaagacagcaacaggctggatgaccacaattaacggcaaggagctgaaggtggagggccagattacctactacaacagatacaagagacagaacgtagtcaaggacctgtccgtcgagctggatagactgagcgaagaatctgtgaacaacgacatctcctcctggacaaagggcagaagcggagaagctctgagcctcctgaagaaaagattctcccatagacccgtgcaggagaagttcgtgtgcctgaactgcggcttcgagacacacgcagccgagcaagccgccctgaacatcgccagatcctggctgttcctgcggagccaggagtacaagaaataccagacaaacaagacaaccggcaacaccgataagagagccttcgtcgagacctggcagtccttttaccggaagaagcttaaggaggtgtggaaacctgccgtgcggtctggcggatctggcggaggctccaccagccccaagaaaaagagaaaagtctaagctgccttctgcggggcttgccttctggccatgcccttcttctctcccttgcacctgtacctcttggtctttgaataaagcctgagtaggaaggctagcaaaaaaaaaaaaaaaaaaaaaaaaaaaaaaaaaaaaaaaaaaaaaaaaaaaaaaaaaaaaaaaaaaaaaaaaaaaaaaaagcccagccggctccccaacctctaccgaggagggcacctctgagtccgccacccccgagagcggccctggcacctccaccgagcccagcgagggcagcgcacccggcagccctgccggcagccccacctccacagaggagggaaccagcaccgagcccagcgaaggcagcgccccaggcaccagcaccgagcctagtgagcaggagattaaacggatcaacaagatcagaagaagacttgtgaaagacagcaacaccaagaaggccggcaagacaggccccatgaaaaccctgctggttagagtgatgacacccgatctgagagagcggctggaaaacctgagaaagaagcctgaaaatatcccccagcccatcagcaatacatctagagccaacctgaataagctgctgaccgattacaccgaaatgaagaaggcgatcctgcatgtgtactgggaagagttccagaaggaccctgtgggcctgatgagccgggtggcccagcctgccagcaagaagatcgatcagaacaagctgaaacctgagatggacgagaagggcaacctgaccaccgccggctttgcctgctctcagtgtggccagcccctgttcgtgtacaagctggagcaggtgtctgagaagggcaaggcttacaccaactacttcggacggtgcaatgtggccgagcacgaaaagctgatcctgctggcccagctgaagcccgagaaggatagcgacgaagccgtgacatatagcctgggaaagtttgggcagagggccctggatttctacagcattcatgtgaccaaggagtccacccaccccgtgaagcccctggcccagatcgccggaaacagatacgcctccggacctgtgggaaaggccctgagcgacgcatgtatgggcacaatcgcctccttcctgtctaagtaccaggacatcatcatcgaacaccagaaggtggtgaagggcaaccagaagagactggagagcctgcgggagctggccggcaaggaaaacctggaataccctagcgtgaccctgccacctcagcctcacaccaaggagggcgttgatgcctacaacgaagtgatcgcccgggtgcgaatgtgggtgaacctgaacctgtggcagaagctgaagctaagcagagatgatgccaagcctctgctgagactgaagggattcccttcctttcctctggtcgagagacaggccaacgaagtggactggtgggacatggtgtgtaacgtgaagaagctgatcaacgagaaaaaggaggatggcaaggtgttttggcagaatctggctggctacaagagacaggaagccctgagaccatacctgagcagcgaggaagatcggaagaagggaaagaaattcgctcggtaccagctgggcgacctgctgctgcacctggaaaagaagcacggcgaggactggggaaaggtgtacgacgaggcctgggagcggattgacaagaaagtggaaggcctgagcaagcacatcaagctggaagaggaacggagaagcgaggacgcccagagcaaggccgccctgaccgactggctgcgggctaaggccagcttcgtgatcgagggcctgaaggaggccgacaaggacgagttctgcagatgcgagctgaagctgcagaagtggtacggggacctgcggggaaagcccttcgccatcgaagccgagaacagcatcctggacatcagcggcttcagcaagcagtacaactgtgccttcatctggcagaaggacggcgtgaagaagctgaacctgtacctgatcatcaactacttcaagggcggcaagctgcggttcaagaagatcaaacctgaagccttcgaagccaacagattctacaccgtgatcaacaaaaagagcggcgagatcgtgcccatggaggtgaacttcaacttcgacgaccccaacctgatcatcctgcctctggcctttggcaagagacagggcagagaattcatctggaacgacctgctgtccctggaaaccggcagcctgaagctggccaacggaagagtgatcgagaagacactgtacaacagaagaacccggcaggatgagcctgccctgttcgtggccctgaccttcgagcggcgggaggtcctggactcctccaatatcaaaccaatgaacctgatcggcgtggcaagaggcgaaaacatccccgccgtgatcgccctgaccgaccccgagggctgcccactgagccggtttaaggatagcctgggaaacccaacccacatcctgagaatcggcgagagctataaggagaagcagcggaccatccaggccaagaaggaggtggagcagcggagagccggcggctacagccggaagtacgccagcaaagccaagaatctggcagacgatatggtgagaaacaccgctagagatctgctgtactacgccgtgacccaggatgccatgctgatcttcgccaacctgagccggggcttcggccggcagggcaagcggaccttcatggccgagagacagtacacacggatggaggactggctgaccgccaagctggcctacgagggcctgagcaagacctacctgtccaagacactggcccagtacacctccaagacatgcagcaactgtgggtttaccatcaccagcgccgactacgacagggtgctggagaagctgaagaagacagcaacaggctggatgaccacaattaacggcaaggagctgaaggtggagggccagattacctactacaacagatacaagagacagaacgtagtcaaggacctgtccgtcgagctggatagactgagcgaagaatctgtgaacaacgacatctcctcctggacaaagggcagaagcggagaagctctgagcctcctgaagaaaagattctcccatagacccgtgcaggagaagttcgtgtgcctgaactgcggcttcgagacacacgcagccgagcaagccgccctgaacatcgccagatcctggctgttcctgcggagccaggagtacaagaaataccagacaaacaagacaaccggcaacaccgataagagagccttcgtcgagacctggcagtccttttaccggaagaagcttaaggaggtgtggaaacctgccgtgcggtctggcggatctggcggaggctccaccagccccaagaaaaagagaaaagtctaagctgccttctgcggggcttgccttctggccatgcccttcttctctcccttgcacctgtacctcttggtctttgaataaagcctgagtaggaaggctagcaaaaaaaaaaaaaaaaaaaaaaaaaaaaaaaaaaaaaaaaaaaaaaaaaaaaaaaaaaaaaaaaaaaaaaaaaaaaaaaa

SEQ ID NO: 9549 - RNA, 8787 nt, synthetic construct
  source 1..8787: mol_type = other RNA
aggaaataagagagaaaagaagagtaagaagaaatataagagccaccatggcccctaagaagaagcgtaaagtgagccggatgaaccacgaccaggagttcgacccccctaaggtgtaccctcccgtccccgccgagaagagaaagcccatccgggtcctgagcctgttcgatggcatcgccaccggtctgctggtgctgaaggacctgggcatccaggtggataggtacattgcctccgaggtgtgcgaggactccatcaccgtgggaatggtgcgtcatcagggcaagatcatgtacgtgggcgacgtgcggagcgtgacacagaagcatatccaggagtggggccctttcgacctggtgatcggcggcagcccttgcaatgacctgagcatcgtgaacccagcccggaagggcctgtacgagggaaccggcagactgttcttcgagttttacagactgctgcacgacgcccggcctaaggaaggcgacgaccggcccttcttttggctgttcgagaatgtggtggccatgggagtcagcgacaagcgggatattagccggttcctggagagcaaccccgtgatgatcgatgccaaggaagtgagcgccgcccaccgggccagatacttctggggcaatctgcctggcatgaacagacccctggccagcaccgtgaacgacaagctggagctgcaggagtgcctggagcacggccggatcgccaagttcagcaaggtgagaaccatcaccacccgaagcaacagcatcaaacaaggcaaggaccagcactttcctgtgttcatgaacgagaaggaggacatcctgtggtgtaccgagatggagagagtgttcgggttcccagtccactacacagatgtcagcaacatgtctagactggccagacagagactgctgggaagaagctggtccgtccctgtgatcagacacctgttcgcccctctgaaggagtacttcgcctgcgtgagcagcggcaacagcaacgccaacagccggggccccagcttctctagcggcctggtgccactgtccctgagagggagccacatgggccccatggagatctacaaaaccgtgagcgcctggaagcggcagcctgtgcgcgtgctgagcctgtttcggaatatcgataaagtcctgaaaagcctgggattcctggagagcggctctggctccggcggtggcaccctgaagtacgtggaggatgtgacaaacgtggtcagacgggatgtggagaagtggggccccttcgatctggtgtacggcagcacccaacccctgggcagctcttgtgaccggtgccctggctggtacatgtttcagttccaccggatcctgcagtacgccctgccgagacaggagtcccagcggccattcttttggattttcatggacaacttgctgctgaccgaggatgaccaggaaactaccactcggttcctgcagaccgaagccgtgaccctgcaggacgtgagaggccgggactaccagaacgccatgcgggtgtggtccaacatccctggactgaaaagcaagcacgcacctctgacccctaaagaagaggagtacctgcaggcccaggtgcggagcagaagcaagctggacgcccctaaggtggatctgctggtgaagaattgcctcctgcccctgagagagtacttcaagtatttcagccagaatagtctgcccctgggaggcagcggcggcggcgagatgggcctgctgaccttcagggacatcgccatcgagttcagcctggaggagtggcagtgcctggactgcgcccagaggaacctgtacagggacgtgatgctggagaactacaggaacctggtgagcctgggcatcgccgtgagcaagcccgacctgatcacctgcctggagcagaacaaggagagccagaacatcaagaggaacaagatggtggccaagcaccccgtgatgcacagccacggcggcccaagcagcggcgcccctcctcccagcggcggcaggcggcccaagcagcggcgcccctcctcccagcggcggcagcccagccggctccccaacctctaccgaggagggcacctctgagtccgccacccccgagagcggccctggcacctccaccgagcccagcgagggcagcgcacccggcagccctgccggcagccccacctccacagaggagggaaccagcaccgagcccagcgaaggcagcgccccaggcaccagcaccgagcctagtgagcaggagattaaacggatcaacaagatcagaagaagacttgtgaaagacagcaacaccaagaaggccggcaagacaggccccatgaaaaccctgctggttagagtgatgacacccgatctgagagagcggctggaaaacctgagaaagaagcctgaaaatatcccccagcccatcagcaatacatctagagccaacctgaataagctgctgaccgattacaccgaaatgaagaaggcgatcctgcatgtgtactgggaagagttccagaaggaccctgtgggcctgatgagccgggtggcccagcctgccagcaagaagatcgatcagaacaagctgaaacctgagatggacgagaagggcaacctgaccaccgccggctttgcctgctctcagtgtggccagcccctgttcgtgtacaagctggagcaggtgtctgagaagggcaaggcttacaccaactacttcggacggtgcaatgtggccgagcacgaaaagctgatcctgctggcccagctgaagcccgagaaggatagcgacgaagccgtgacatatagcctgggaaagtttgggcagagggccctggatttctacagcattcatgtgaccaaggagtccacccaccccgtgaagcccctggcccagatcgccggaaacagatacgcctccggacctgtgggaaaggccctgagcgacgcatgtatgggcacaatcgcctccttcctgtctaagtaccaggacatcatcatcgaacaccagaaggtggtgaagggcaaccagaagagactggagagcctgcgggagctggccggcaaggaaaacctggaataccctagcgtgaccctgccacctcagcctcacaccaaggagggcgttgatgcctacaacgaagtgatcgcccgggtgcgaatgtgggtgaacctgaacctgtggcagaagctgaagctaagcagagatgatgccaagcctctgctgagactgaagggattcccttcctttcctctggtcgagagacaggccaacgaagtggactggtgggacatggtgtgtaacgtgaagaagctgatcaacgagaaaaaggaggatggcaaggtgttttggcagaatctggctggctacaagagacaggaagccctgagaccatacctgagcagcgaggaagatcggaagaagggaaagaaattcgctcggtaccagctgggcgacctgctgctgcacctggaaaagaagcacggcgaggactggggaaaggtgtacgacgaggcctgggagcggattgacaagaaagtggaaggcctgagcaagcacatcaagctggaagaggaacggagaagcgaggacgcccagagcaaggccgccctgaccgactggctgcgggctaaggccagcttcgtgatcgagggcctgaaggaggccgacaaggacgagttctgcagatgcgagctgaagctgcagaagtggtacggggacctgcggggaaagcccttcgccatcgaagccgagaacagcatcctggacatcagcggcttcagcaagcagtacaactgtgccttcatctggcagaaggacggcgtgaagaagctgaacctgtacctgatcatcaactacttcaagggcggcaagctgcggttcaagaagatcaaacctgaagccttcgaagccaacagattctacaccgtgatcaacaaaaagagcggcgagatcgtgcccatggaggtgaacttcaacttcgacgaccccaacctgatcatcctgcctctggcctttggcaagagacagggcagagaattcatctggaacgacctgctgtccctggaaaccggcagcctgaagctggccaacggaagagtgatcgagaagacactgtacaacagaagaacccggcaggatgagcctgccctgttcgtggccctgaccttcgagcggcgggaggtcctggactcctccaatatcaaaccaatgaacctgatcggcgtggcaagaggcgaaaacatccccgccgtgatcgccctgaccgaccccgagggctgcccactgagccggtttaaggatagcctgggaaacccaacccacatcctgagaatcggcgagagctataaggagaagcagcggaccatccaggccaagaaggaggtggagcagcggagagccggcggctacagccggaagtacgccagcaaagccaagaatctggcagacgatatggtgagaaacaccgctagagatctgctgtactacgccgtgacccaggatgccatgctgatcttcgccaacctgagccggggcttcggccggcagggcaagcggaccttcatggccgagagacagtacacacggatggaggactggctgaccgccaagctggcctacgagggcctgagcaagacctacctgtccaagacactggcccagtacacctccaagacatgcagcaactgtgggtttaccatcaccagcgccgactacgacagggtgctggagaagctgaagaagacagcaacaggctggatgaccacaattaacggcaaggagctgaaggtggagggccagattacctactacaacagatacaagagacagaacgtagtcaaggacctgtccgtcgagctggatagactgagcgaagaatctgtgaacaacgacatctcctcctggacaaagggcagaagcggagaagctctgagcctcctgaagaaaagattctcccatagacccgtgcaggagaagttcgtgtgcctgaactgcggcttcgagacacacgcagccgagcaagccgccctgaacatcgccagatcctggctgttcctgcggagccaggagtacaagaaataccagacaaacaagacaaccggcaacaccgataagagagccttcgtcgagacctggcagtccttttaccggaagaagcttaaggaggtgtggaaacctgccgtgcggtctggcggatctggcggaggctccaccagccccaagaaaaagagaaaagtctaagctgccttctgcggggcttgccttctggccatgcccttcttctctcccttgcacctgtacctcttggtctttgaataaagcctgagtaggaaggctagcaaaaaaaaaaaaaaaaaaaaaaaaaaaaaaaaaaaaaaaaaaaaaaaaaaaaaaaaaaaaaaaaaaaaaaaaaaaaaaaagcccagccggctccccaacctctaccgaggagggcacctctgagtccgccacccccgagagcggccctggcacctccaccgagcccagcgagggcagcgcacccggcagccctgccggcagccccacctccacagaggagggaaccagcaccgagcccagcgaaggcagcgccccaggcaccagcaccgagcctagtgagcaggagattaaacggatcaacaagatcagaagaagacttgtgaaagacagcaacaccaagaaggccggcaagacaggccccatgaaaaccctgctggttagagtgatgacacccgatctgagagagcggctggaaaacctgagaaagaagcctgaaaatatcccccagcccatcagcaatacatctagagccaacctgaataagctgctgaccgattacaccgaaatgaagaaggcgatcctgcatgtgtactgggaagagttccagaaggaccctgtgggcctgatgagccgggtggcccagcctgccagcaagaagatcgatcagaacaagctgaaacctgagatggacgagaagggcaacctgaccaccgccggctttgcctgctctcagtgtggccagcccctgttcgtgtacaagctggagcaggtgtctgagaagggcaaggcttacaccaactacttcggacggtgcaatgtggccgagcacgaaaagctgatcctgctggcccagctgaagcccgagaaggatagcgacgaagccgtgacatatagcctgggaaagtttgggcagagggccctggatttctacagcattcatgtgaccaaggagtccacccaccccgtgaagcccctggcccagatcgccggaaacagatacgcctccggacctgtgggaaaggccctgagcgacgcatgtatgggcacaatcgcctccttcctgtctaagtaccaggacatcatcatcgaacaccagaaggtggtgaagggcaaccagaagagactggagagcctgcgggagctggccggcaaggaaaacctggaataccctagcgtgaccctgccacctcagcctcacaccaaggagggcgttgatgcctacaacgaagtgatcgcccgggtgcgaatgtgggtgaacctgaacctgtggcagaagctgaagctaagcagagatgatgccaagcctctgctgagactgaagggattcccttcctttcctctggtcgagagacaggccaacgaagtggactggtgggacatggtgtgtaacgtgaagaagctgatcaacgagaaaaaggaggatggcaaggtgttttggcagaatctggctggctacaagagacaggaagccctgagaccatacctgagcagcgaggaagatcggaagaagggaaagaaattcgctcggtaccagctgggcgacctgctgctgcacctggaaaagaagcacggcgaggactggggaaaggtgtacgacgaggcctgggagcggattgacaagaaagtggaaggcctgagcaagcacatcaagctggaagaggaacggagaagcgaggacgcccagagcaaggccgccctgaccgactggctgcgggctaaggccagcttcgtgatcgagggcctgaaggaggccgacaaggacgagttctgcagatgcgagctgaagctgcagaagtggtacggggacctgcggggaaagcccttcgccatcgaagccgagaacagcatcctggacatcagcggcttcagcaagcagtacaactgtgccttcatctggcagaaggacggcgtgaagaagctgaacctgtacctgatcatcaactacttcaagggcggcaagctgcggttcaagaagatcaaacctgaagccttcgaagccaacagattctacaccgtgatcaacaaaaagagcggcgagatcgtgcccatggaggtgaacttcaacttcgacgaccccaacctgatcatcctgcctctggcctttggcaagagacagggcagagaattcatctggaacgacctgctgtccctggaaaccggcagcctgaagctggccaacggaagagtgatcgagaagacactgtacaacagaagaacccggcaggatgagcctgccctgttcgtggccctgaccttcgagcggcgggaggtcctggactcctccaatatcaaaccaatgaacctgatcggcgtggcaagaggcgaaaacatccccgccgtgatcgccctgaccgaccccgagggctgcccactgagccggtttaaggatagcctgggaaacccaacccacatcctgagaatcggcgagagctataaggagaagcagcggaccatccaggccaagaaggaggtggagcagcggagagccggcggctacagccggaagtacgccagcaaagccaagaatctggcagacgatatggtgagaaacaccgctagagatctgctgtactacgccgtgacccaggatgccatgctgatcttcgccaacctgagccggggcttcggccggcagggcaagcggaccttcatggccgagagacagtacacacggatggaggactggctgaccgccaagctggcctacgagggcctgagcaagacctacctgtccaagacactggcccagtacacctccaagacatgcagcaactgtgggtttaccatcaccagcgccgactacgacagggtgctggagaagctgaagaagacagcaacaggctggatgaccacaattaacggcaaggagctgaaggtggagggccagattacctactacaacagatacaagagacagaacgtagtcaaggacctgtccgtcgagctggatagactgagcgaagaatctgtgaacaacgacatctcctcctggacaaagggcagaagcggagaagctctgagcctcctgaagaaaagattctcccatagacccgtgcaggagaagttcgtgtgcctgaactgcggcttcgagacacacgcagccgagcaagccgccctgaacatcgccagatcctggctgttcctgcggagccaggagtacaagaaataccagacaaacaagacaaccggcaacaccgataagagagccttcgtcgagacctggcagtccttttaccggaagaagcttaaggaggtgtggaaacctgccgtgcggtctggcggatctggcggaggctccaccagccccaagaaaaagagaaaagtctaagctgccttctgcggggcttgccttctggccatgcccttcttctctcccttgcacctgtacctcttggtctttgaataaagcctgagtaggaaggctagcaaaaaaaaaaaaaaaaaaaaaaaaaaaaaaaaaaaaaaaaaaaaaaaaaaaaaaaaaaaaaaaaaaaaaaaaaaaaaaaa

SEQ ID NO: 9550 - RNA, 8787 nt, synthetic construct
  source 1..8787: mol_type = other RNA
aggaaataagagagaaaagaagagtaagaagaaatataagagccaccatggcccctaagaagaagcgtaaagtgagccggatgaaccacgaccaggagttcgacccccctaaggtgtaccctcccgtccccgccgagaagagaaagcccatccgggtcctgagcctgttcgatggcatcgccaccggtctgctggtgctgaaggacctgggcatccaggtggataggtacattgcctccgaggtgtgcgaggactccatcaccgtgggaatggtgcgtcatcagggcaagatcatgtacgtgggcgacgtgcggagcgtgacacagaagcatatccaggagtggggccctttcgacctggtgatcggcggcagcccttgcaatgacctgagcatcgtgaacccagcccggaagggcctgtacgagggaaccggcagactgttcttcgagttttacagactgctgcacgacgcccggcctaaggaaggcgacgaccggcccttcttttggctgttcgagaatgtggtggccatgggagtcagcgacaagcgggatattagccggttcctggagagcaaccccgtgatgatcgatgccaaggaagtgagcgccgcccaccgggccagatacttctggggcaatctgcctggcatgaacagacccctggccagcaccgtgaacgacaagctggagctgcaggagtgcctggagcacggccggatcgccaagttcagcaaggtgagaaccatcaccacccgaagcaacagcatcaaacaaggcaaggaccagcactttcctgtgttcatgaacgagaaggaggacatcctgtggtgtaccgagatggagagagtgttcgggttcccagtccactacacagatgtcagcaacatgtctagactggccagacagagactgctgggaagaagctggtccgtccctgtgatcagacacctgttcgcccctctgaaggagtacttcgcctgcgtgagcagcggcaacagcaacgccaacagccggggccccagcttctctagcggcctggtgccactgtccctgagagggagccacatgggccccatggagatctacaaaaccgtgagcgcctggaagcggcagcctgtgcgcgtgctgagcctgtttcggaatatcgataaagtcctgaaaagcctgggattcctggagagcggctctggctccggcggtggcaccctgaagtacgtggaggatgtgacaaacgtggtcagacgggatgtggagaagtggggccccttcgatctggtgtacggcagcacccaacccctgggcagctcttgtgaccggtgccctggctggtacatgtttcagttccaccggatcctgcagtacgccctgccgagacaggagtcccagcggccattcttttggattttcatggacaacttgctgctgaccgaggatgaccaggaaactaccactcggttcctgcagaccgaagccgtgaccctgcaggacgtgagaggccgggactaccagaacgccatgcgggtgtggtccaacatccctggactgaaaagcaagcacgcacctctgacccctaaagaagaggagtacctgcaggcccaggtgcggagcagaagcaagctggacgcccctaaggtggatctgctggtgaagaattgcctcctgcccctgagagagtacttcaagtatttcagccagaatagtctgcccctgggaggcagcggcggcggcttcgaggagctggtgaccttcgaggacgtgctggtggacttcagccccgaggagctgagcagcctgagcgccgcccagaggaacctgtacagggaggtgatgctggagaactacaggaacctggtgagcctgggccaccagttcagcaagcccgacgtgatcagcaggctggaggaggaggagagccacgccatggagaccgacagcaggcacaccgtgatctgccccggcgagagccacgacggcggcccaagcagcggcgcccctcctcccagcggcggcaggcggcccaagcagcggcgcccctcctcccagcggcggcagcccagccggctccccaacctctaccgaggagggcacctctgagtccgccacccccgagagcggccctggcacctccaccgagcccagcgagggcagcgcacccggcagccctgccggcagccccacctccacagaggagggaaccagcaccgagcccagcgaaggcagcgccccaggcaccagcaccgagcctagtgagcaggagattaaacggatcaacaagatcagaagaagacttgtgaaagacagcaacaccaagaaggccggcaagacaggccccatgaaaaccctgctggttagagtgatgacacccgatctgagagagcggctggaaaacctgagaaagaagcctgaaaatatcccccagcccatcagcaatacatctagagccaacctgaataagctgctgaccgattacaccgaaatgaagaaggcgatcctgcatgtgtactgggaagagttccagaaggaccctgtgggcctgatgagccgggtggcccagcctgccagcaagaagatcgatcagaacaagctgaaacctgagatggacgagaagggcaacctgaccaccgccggctttgcctgctctcagtgtggccagcccctgttcgtgtacaagctggagcaggtgtctgagaagggcaaggcttacaccaactacttcggacggtgcaatgtggccgagcacgaaaagctgatcctgctggcccagctgaagcccgagaaggatagcgacgaagccgtgacatatagcctgggaaagtttgggcagagggccctggatttctacagcattcatgtgaccaaggagtccacccaccccgtgaagcccctggcccagatcgccggaaacagatacgcctccggacctgtgggaaaggccctgagcgacgcatgtatgggcacaatcgcctccttcctgtctaagtaccaggacatcatcatcgaacaccagaaggtggtgaagggcaaccagaagagactggagagcctgcgggagctggccggcaaggaaaacctggaataccctagcgtgaccctgccacctcagcctcacaccaaggagggcgttgatgcctacaacgaagtgatcgcccgggtgcgaatgtgggtgaacctgaacctgtggcagaagctgaagctaagcagagatgatgccaagcctctgctgagactgaagggattcccttcctttcctctggtcgagagacaggccaacgaagtggactggtgggacatggtgtgtaacgtgaagaagctgatcaacgagaaaaaggaggatggcaaggtgttttggcagaatctggctggctacaagagacaggaagccctgagaccatacctgagcagcgaggaagatcggaagaagggaaagaaattcgctcggtaccagctgggcgacctgctgctgcacctggaaaagaagcacggcgaggactggggaaaggtgtacgacgaggcctgggagcggattgacaagaaagtggaaggcctgagcaagcacatcaagctggaagaggaacggagaagcgaggacgcccagagcaaggccgccctgaccgactggctgcgggctaaggccagcttcgtgatcgagggcctgaaggaggccgacaaggacgagttctgcagatgcgagctgaagctgcagaagtggtacggggacctgcggggaaagcccttcgccatcgaagccgagaacagcatcctggacatcagcggcttcagcaagcagtacaactgtgccttcatctggcagaaggacggcgtgaagaagctgaacctgtacctgatcatcaactacttcaagggcggcaagctgcggttcaagaagatcaaacctgaagccttcgaagccaacagattctacaccgtgatcaacaaaaagagcggcgagatcgtgcccatggaggtgaacttcaacttcgacgaccccaacctgatcatcctgcctctggcctttggcaagagacagggcagagaattcatctggaacgacctgctgtccctggaaaccggcagcctgaagctggccaacggaagagtgatcgagaagacactgtacaacagaagaacccggcaggatgagcctgccctgttcgtggccctgaccttcgagcggcgggaggtcctggactcctccaatatcaaaccaatgaacctgatcggcgtggcaagaggcgaaaacatccccgccgtgatcgccctgaccgaccccgagggctgcccactgagccggtttaaggatagcctgggaaacccaacccacatcctgagaatcggcgagagctataaggagaagcagcggaccatccaggccaagaaggaggtggagcagcggagagccggcggctacagccggaagtacgccagcaaagccaagaatctggcagacgatatggtgagaaacaccgctagagatctgctgtactacgccgtgacccaggatgccatgctgatcttcgccaacctgagccggggcttcggccggcagggcaagcggaccttcatggccgagagacagtacacacggatggaggactggctgaccgccaagctggcctacgagggcctgagcaagacctacctgtccaagacactggcccagtacacctccaagacatgcagcaactgtgggtttaccatcaccagcgccgactacgacagggtgctggagaagctgaagaagacagcaacaggctggatgaccacaattaacggcaaggagctgaaggtggagggccagattacctactacaacagatacaagagacagaacgtagtcaaggacctgtccgtcgagctggatagactgagcgaagaatctgtgaacaacgacatctcctcctggacaaagggcagaagcggagaagctctgagcctcctgaagaaaagattctcccatagacccgtgcaggagaagttcgtgtgcctgaactgcggcttcgagacacacgcagccgagcaagccgccctgaacatcgccagatcctggctgttcctgcggagccaggagtacaagaaataccagacaaacaagacaaccggcaacaccgataagagagccttcgtcgagacctggcagtccttttaccggaagaagcttaaggaggtgtggaaacctgccgtgcggtctggcggatctggcggaggctccaccagccccaagaaaaagagaaaagtctaagctgccttctgcggggcttgccttctggccatgcccttcttctctcccttgcacctgtacctcttggtctttgaataaagcctgagtaggaaggctagcaaaaaaaaaaaaaaaaaaaaaaaaaaaaaaaaaaaaaaaaaaaaaaaaaaaaaaaaaaaaaaaaaaaaaaaaaaaaaaaagcccagccggctccccaacctctaccgaggagggcacctctgagtccgccacccccgagagcggccctggcacctccaccgagcccagcgagggcagcgcacccggcagccctgccggcagccccacctccacagaggagggaaccagcaccgagcccagcgaaggcagcgccccaggcaccagcaccgagcctagtgagcaggagattaaacggatcaacaagatcagaagaagacttgtgaaagacagcaacaccaagaaggccggcaagacaggccccatgaaaaccctgctggttagagtgatgacacccgatctgagagagcggctggaaaacctgagaaagaagcctgaaaatatcccccagcccatcagcaatacatctagagccaacctgaataagctgctgaccgattacaccgaaatgaagaaggcgatcctgcatgtgtactgggaagagttccagaaggaccctgtgggcctgatgagccgggtggcccagcctgccagcaagaagatcgatcagaacaagctgaaacctgagatggacgagaagggcaacctgaccaccgccggctttgcctgctctcagtgtggccagcccctgttcgtgtacaagctggagcaggtgtctgagaagggcaaggcttacaccaactacttcggacggtgcaatgtggccgagcacgaaaagctgatcctgctggcccagctgaagcccgagaaggatagcgacgaagccgtgacatatagcctgggaaagtttgggcagagggccctggatttctacagcattcatgtgaccaaggagtccacccaccccgtgaagcccctggcccagatcgccggaaacagatacgcctccggacctgtgggaaaggccctgagcgacgcatgtatgggcacaatcgcctccttcctgtctaagtaccaggacatcatcatcgaacaccagaaggtggtgaagggcaaccagaagagactggagagcctgcgggagctggccggcaaggaaaacctggaataccctagcgtgaccctgccacctcagcctcacaccaaggagggcgttgatgcctacaacgaagtgatcgcccgggtgcgaatgtgggtgaacctgaacctgtggcagaagctgaagctaagcagagatgatgccaagcctctgctgagactgaagggattcccttcctttcctctggtcgagagacaggccaacgaagtggactggtgggacatggtgtgtaacgtgaagaagctgatcaacgagaaaaaggaggatggcaaggtgttttggcagaatctggctggctacaagagacaggaagccctgagaccatacctgagcagcgaggaagatcggaagaagggaaagaaattcgctcggtaccagctgggcgacctgctgctgcacctggaaaagaagcacggcgaggactggggaaaggtgtacgacgaggcctgggagcggattgacaagaaagtggaaggcctgagcaagcacatcaagctggaagaggaacggagaagcgaggacgcccagagcaaggccgccctgaccgactggctgcgggctaaggccagcttcgtgatcgagggcctgaaggaggccgacaaggacgagttctgcagatgcgagctgaagctgcagaagtggtacggggacctgcggggaaagcccttcgccatcgaagccgagaacagcatcctggacatcagcggcttcagcaagcagtacaactgtgccttcatctggcagaaggacggcgtgaagaagctgaacctgtacctgatcatcaactacttcaagggcggcaagctgcggttcaagaagatcaaacctgaagccttcgaagccaacagattctacaccgtgatcaacaaaaagagcggcgagatcgtgcccatggaggtgaacttcaacttcgacgaccccaacctgatcatcctgcctctggcctttggcaagagacagggcagagaattcatctggaacgacctgctgtccctggaaaccggcagcctgaagctggccaacggaagagtgatcgagaagacactgtacaacagaagaacccggcaggatgagcctgccctgttcgtggccctgaccttcgagcggcgggaggtcctggactcctccaatatcaaaccaatgaacctgatcggcgtggcaagaggcgaaaacatccccgccgtgatcgccctgaccgaccccgagggctgcccactgagccggtttaaggatagcctgggaaacccaacccacatcctgagaatcggcgagagctataaggagaagcagcggaccatccaggccaagaaggaggtggagcagcggagagccggcggctacagccggaagtacgccagcaaagccaagaatctggcagacgatatggtgagaaacaccgctagagatctgctgtactacgccgtgacccaggatgccatgctgatcttcgccaacctgagccggggcttcggccggcagggcaagcggaccttcatggccgagagacagtacacacggatggaggactggctgaccgccaagctggcctacgagggcctgagcaagacctacctgtccaagacactggcccagtacacctccaagacatgcagcaactgtgggtttaccatcaccagcgccgactacgacagggtgctggagaagctgaagaagacagcaacaggctggatgaccacaattaacggcaaggagctgaaggtggagggccagattacctactacaacagatacaagagacagaacgtagtcaaggacctgtccgtcgagctggatagactgagcgaagaatctgtgaacaacgacatctcctcctggacaaagggcagaagcggagaagctctgagcctcctgaagaaaagattctcccatagacccgtgcaggagaagttcgtgtgcctgaactgcggcttcgagacacacgcagccgagcaagccgccctgaacatcgccagatcctggctgttcctgcggagccaggagtacaagaaataccagacaaacaagacaaccggcaacaccgataagagagccttcgtcgagacctggcagtccttttaccggaagaagcttaaggaggtgtggaaacctgccgtgcggtctggcggatctggcggaggctccaccagccccaagaaaaagagaaaagtctaagctgccttctgcggggcttgccttctggccatgcccttcttctctcccttgcacctgtacctcttggtctttgaataaagcctgagtaggaaggctagcaaaaaaaaaaaaaaaaaaaaaaaaaaaaaaaaaaaaaaaaaaaaaaaaaaaaaaaaaaaaaaaaaaaaaaaaaaaaaaaa

SEQ ID NO: 9551 - RNA, 8787 nt, synthetic construct
  source 1..8787: mol_type = other RNA
aggaaataagagagaaaagaagagtaagaagaaatataagagccaccatggcccctaagaagaagcgtaaagtgagccggatgaaccacgaccaggagttcgacccccctaaggtgtaccctcccgtccccgccgagaagagaaagcccatccgggtcctgagcctgttcgatggcatcgccaccggtctgctggtgctgaaggacctgggcatccaggtggataggtacattgcctccgaggtgtgcgaggactccatcaccgtgggaatggtgcgtcatcagggcaagatcatgtacgtgggcgacgtgcggagcgtgacacagaagcatatccaggagtggggccctttcgacctggtgatcggcggcagcccttgcaatgacctgagcatcgtgaacccagcccggaagggcctgtacgagggaaccggcagactgttcttcgagttttacagactgctgcacgacgcccggcctaaggaaggcgacgaccggcccttcttttggctgttcgagaatgtggtggccatgggagtcagcgacaagcgggatattagccggttcctggagagcaaccccgtgatgatcgatgccaaggaagtgagcgccgcccaccgggccagatacttctggggcaatctgcctggcatgaacagacccctggccagcaccgtgaacgacaagctggagctgcaggagtgcctggagcacggccggatcgccaagttcagcaaggtgagaaccatcaccacccgaagcaacagcatcaaacaaggcaaggaccagcactttcctgtgttcatgaacgagaaggaggacatcctgtggtgtaccgagatggagagagtgttcgggttcccagtccactacacagatgtcagcaacatgtctagactggccagacagagactgctgggaagaagctggtccgtccctgtgatcagacacctgttcgcccctctgaaggagtacttcgcctgcgtgagcagcggcaacagcaacgccaacagccggggccccagcttctctagcggcctggtgccactgtccctgagagggagccacatgggccccatggagatctacaaaaccgtgagcgcctggaagcggcagcctgtgcgcgtgctgagcctgtttcggaatatcgataaagtcctgaaaagcctgggattcctggagagcggctctggctccggcggtggcaccctgaagtacgtggaggatgtgacaaacgtggtcagacgggatgtggagaagtggggccccttcgatctggtgtacggcagcacccaacccctgggcagctcttgtgaccggtgccctggctggtacatgtttcagttccaccggatcctgcagtacgccctgccgagacaggagtcccagcggccattcttttggattttcatggacaacttgctgctgaccgaggatgaccaggaaactaccactcggttcctgcagaccgaagccgtgaccctgcaggacgtgagaggccgggactaccagaacgccatgcgggtgtggtccaacatccctggactgaaaagcaagcacgcacctctgacccctaaagaagaggagtacctgcaggcccaggtgcggagcagaagcaagctggacgcccctaaggtggatctgctggtgaagaattgcctcctgcccctgagagagtacttcaagtatttcagccagaatagtctgcccctgggaggcagcggcggcggcatgatgaccgccgtgagcctgaccaccaggccccaggagagcgtggccttcgaggacgtggccgtgtacttcaccgccaaggagtgggacatcatggtgcccgccgagagggccctgtacagggacgtgatgctggagaactacgaggccgtggccttcgtggtgccccccaccagcaagcccgccctggtgagccacctggagcagggcaaggagagctgcttcaccaggccccagggcgtgggcggcccaagcagcggcgcccctcctcccagcggcggcaggcggcccaagcagcggcgcccctcctcccagcggcggcagcccagccggctccccaacctctaccgaggagggcacctctgagtccgccacccccgagagcggccctggcacctccaccgagcccagcgagggcagcgcacccggcagccctgccggcagccccacctccacagaggagggaaccagcaccgagcccagcgaaggcagcgccccaggcaccagcaccgagcctagtgagcaggagattaaacggatcaacaagatcagaagaagacttgtgaaagacagcaacaccaagaaggccggcaagacaggccccatgaaaaccctgctggttagagtgatgacacccgatctgagagagcggctggaaaacctgagaaagaagcctgaaaatatcccccagcccatcagcaatacatctagagccaacctgaataagctgctgaccgattacaccgaaatgaagaaggcgatcctgcatgtgtactgggaagagttccagaaggaccctgtgggcctgatgagccgggtggcccagcctgccagcaagaagatcgatcagaacaagctgaaacctgagatggacgagaagggcaacctgaccaccgccggctttgcctgctctcagtgtggccagcccctgttcgtgtacaagctggagcaggtgtctgagaagggcaaggcttacaccaactacttcggacggtgcaatgtggccgagcacgaaaagctgatcctgctggcccagctgaagcccgagaaggatagcgacgaagccgtgacatatagcctgggaaagtttgggcagagggccctggatttctacagcattcatgtgaccaaggagtccacccaccccgtgaagcccctggcccagatcgccggaaacagatacgcctccggacctgtgggaaaggccctgagcgacgcatgtatgggcacaatcgcctccttcctgtctaagtaccaggacatcatcatcgaacaccagaaggtggtgaagggcaaccagaagagactggagagcctgcgggagctggccggcaaggaaaacctggaataccctagcgtgaccctgccacctcagcctcacaccaaggagggcgttgatgcctacaacgaagtgatcgcccgggtgcgaatgtgggtgaacctgaacctgtggcagaagctgaagctaagcagagatgatgccaagcctctgctgagactgaagggattcccttcctttcctctggtcgagagacaggccaacgaagtggactggtgggacatggtgtgtaacgtgaagaagctgatcaacgagaaaaaggaggatggcaaggtgttttggcagaatctggctggctacaagagacaggaagccctgagaccatacctgagcagcgaggaagatcggaagaagggaaagaaattcgctcggtaccagctgggcgacctgctgctgcacctggaaaagaagcacggcgaggactggggaaaggtgtacgacgaggcctgggagcggattgacaagaaagtggaaggcctgagcaagcacatcaagctggaagaggaacggagaagcgaggacgcccagagcaaggccgccctgaccgactggctgcgggctaaggccagcttcgtgatcgagggcctgaaggaggccgacaaggacgagttctgcagatgcgagctgaagctgcagaagtggtacggggacctgcggggaaagcccttcgccatcgaagccgagaacagcatcctggacatcagcggcttcagcaagcagtacaactgtgccttcatctggcagaaggacggcgtgaagaagctgaacctgtacctgatcatcaactacttcaagggcggcaagctgcggttcaagaagatcaaacctgaagccttcgaagccaacagattctacaccgtgatcaacaaaaagagcggcgagatcgtgcccatggaggtgaacttcaacttcgacgaccccaacctgatcatcctgcctctggcctttggcaagagacagggcagagaattcatctggaacgacctgctgtccctggaaaccggcagcctgaagctggccaacggaagagtgatcgagaagacactgtacaacagaagaacccggcaggatgagcctgccctgttcgtggccctgaccttcgagcggcgggaggtcctggactcctccaatatcaaaccaatgaacctgatcggcgtggcaagaggcgaaaacatccccgccgtgatcgccctgaccgaccccgagggctgcccactgagccggtttaaggatagcctgggaaacccaacccacatcctgagaatcggcgagagctataaggagaagcagcggaccatccaggccaagaaggaggtggagcagcggagagccggcggctacagccggaagtacgccagcaaagccaagaatctggcagacgatatggtgagaaacaccgctagagatctgctgtactacgccgtgacccaggatgccatgctgatcttcgccaacctgagccggggcttcggccggcagggcaagcggaccttcatggccgagagacagtacacacggatggaggactggctgaccgccaagctggcctacgagggcctgagcaagacctacctgtccaagacactggcccagtacacctccaagacatgcagcaactgtgggtttaccatcaccagcgccgactacgacagggtgctggagaagctgaagaagacagcaacaggctggatgaccacaattaacggcaaggagctgaaggtggagggccagattacctactacaacagatacaagagacagaacgtagtcaaggacctgtccgtcgagctggatagactgagcgaagaatctgtgaacaacgacatctcctcctggacaaagggcagaagcggagaagctctgagcctcctgaagaaaagattctcccatagacccgtgcaggagaagttcgtgtgcctgaactgcggcttcgagacacacgcagccgagcaagccgccctgaacatcgccagatcctggctgttcctgcggagccaggagtacaagaaataccagacaaacaagacaaccggcaacaccgataagagagccttcgtcgagacctggcagtccttttaccggaagaagcttaaggaggtgtggaaacctgccgtgcggtctggcggatctggcggaggctccaccagccccaagaaaaagagaaaagtctaagctgccttctgcggggcttgccttctggccatgcccttcttctctcccttgcacctgtacctcttggtctttgaataaagcctgagtaggaaggctagcaaaaaaaaaaaaaaaaaaaaaaaaaaaaaaaaaaaaaaaaaaaaaaaaaaaaaaaaaaaaaaaaaaaaaaaaaaaaaaaagcccagccggctccccaacctctaccgaggagggcacctctgagtccgccacccccgagagcggccctggcacctccaccgagcccagcgagggcagcgcacccggcagccctgccggcagccccacctccacagaggagggaaccagcaccgagcccagcgaaggcagcgccccaggcaccagcaccgagcctagtgagcaggagattaaacggatcaacaagatcagaagaagacttgtgaaagacagcaacaccaagaaggccggcaagacaggccccatgaaaaccctgctggttagagtgatgacacccgatctgagagagcggctggaaaacctgagaaagaagcctgaaaatatcccccagcccatcagcaatacatctagagccaacctgaataagctgctgaccgattacaccgaaatgaagaaggcgatcctgcatgtgtactgggaagagttccagaaggaccctgtgggcctgatgagccgggtggcccagcctgccagcaagaagatcgatcagaacaagctgaaacctgagatggacgagaagggcaacctgaccaccgccggctttgcctgctctcagtgtggccagcccctgttcgtgtacaagctggagcaggtgtctgagaagggcaaggcttacaccaactacttcggacggtgcaatgtggccgagcacgaaaagctgatcctgctggcccagctgaagcccgagaaggatagcgacgaagccgtgacatatagcctgggaaagtttgggcagagggccctggatttctacagcattcatgtgaccaaggagtccacccaccccgtgaagcccctggcccagatcgccggaaacagatacgcctccggacctgtgggaaaggccctgagcgacgcatgtatgggcacaatcgcctccttcctgtctaagtaccaggacatcatcatcgaacaccagaaggtggtgaagggcaaccagaagagactggagagcctgcgggagctggccggcaaggaaaacctggaataccctagcgtgaccctgccacctcagcctcacaccaaggagggcgttgatgcctacaacgaagtgatcgcccgggtgcgaatgtgggtgaacctgaacctgtggcagaagctgaagctaagcagagatgatgccaagcctctgctgagactgaagggattcccttcctttcctctggtcgagagacaggccaacgaagtggactggtgggacatggtgtgtaacgtgaagaagctgatcaacgagaaaaaggaggatggcaaggtgttttggcagaatctggctggctacaagagacaggaagccctgagaccatacctgagcagcgaggaagatcggaagaagggaaagaaattcgctcggtaccagctgggcgacctgctgctgcacctggaaaagaagcacggcgaggactggggaaaggtgtacgacgaggcctgggagcggattgacaagaaagtggaaggcctgagcaagcacatcaagctggaagaggaacggagaagcgaggacgcccagagcaaggccgccctgaccgactggctgcgggctaaggccagcttcgtgatcgagggcctgaaggaggccgacaaggacgagttctgcagatgcgagctgaagctgcagaagtggtacggggacctgcggggaaagcccttcgccatcgaagccgagaacagcatcctggacatcagcggcttcagcaagcagtacaactgtgccttcatctggcagaaggacggcgtgaagaagctgaacctgtacctgatcatcaactacttcaagggcggcaagctgcggttcaagaagatcaaacctgaagccttcgaagccaacagattctacaccgtgatcaacaaaaagagcggcgagatcgtgcccatggaggtgaacttcaacttcgacgaccccaacctgatcatcctgcctctggcctttggcaagagacagggcagagaattcatctggaacgacctgctgtccctggaaaccggcagcctgaagctggccaacggaagagtgatcgagaagacactgtacaacagaagaacccggcaggatgagcctgccctgttcgtggccctgaccttcgagcggcgggaggtcctggactcctccaatatcaaaccaatgaacctgatcggcgtggcaagaggcgaaaacatccccgccgtgatcgccctgaccgaccccgagggctgcccactgagccggtttaaggatagcctgggaaacccaacccacatcctgagaatcggcgagagctataaggagaagcagcggaccatccaggccaagaaggaggtggagcagcggagagccggcggctacagccggaagtacgccagcaaagccaagaatctggcagacgatatggtgagaaacaccgctagagatctgctgtactacgccgtgacccaggatgccatgctgatcttcgccaacctgagccggggcttcggccggcagggcaagcggaccttcatggccgagagacagtacacacggatggaggactggctgaccgccaagctggcctacgagggcctgagcaagacctacctgtccaagacactggcccagtacacctccaagacatgcagcaactgtgggtttaccatcaccagcgccgactacgacagggtgctggagaagctgaagaagacagcaacaggctggatgaccacaattaacggcaaggagctgaaggtggagggccagattacctactacaacagatacaagagacagaacgtagtcaaggacctgtccgtcgagctggatagactgagcgaagaatctgtgaacaacgacatctcctcctggacaaagggcagaagcggagaagctctgagcctcctgaagaaaagattctcccatagacccgtgcaggagaagttcgtgtgcctgaactgcggcttcgagacacacgcagccgagcaagccgccctgaacatcgccagatcctggctgttcctgcggagccaggagtacaagaaataccagacaaacaagacaaccggcaacaccgataagagagccttcgtcgagacctggcagtccttttaccggaagaagcttaaggaggtgtggaaacctgccgtgcggtctggcggatctggcggaggctccaccagccccaagaaaaagagaaaagtctaagctgccttctgcggggcttgccttctggccatgcccttcttctctcccttgcacctgtacctcttggtctttgaataaagcctgagtaggaaggctagcaaaaaaaaaaaaaaaaaaaaaaaaaaaaaaaaaaaaaaaaaaaaaaaaaaaaaaaaaaaaaaaaaaaaaaaaaaaaaaaa

SEQ ID NO: 9552 - RNA, 8787 nt, synthetic construct
  source 1..8787: mol_type = other RNA
aggaaataagagagaaaagaagagtaagaagaaatataagagccaccatggcccctaagaagaagcgtaaagtgagccggatgaaccacgaccaggagttcgacccccctaaggtgtaccctcccgtccccgccgagaagagaaagcccatccgggtcctgagcctgttcgatggcatcgccaccggtctgctggtgctgaaggacctgggcatccaggtggataggtacattgcctccgaggtgtgcgaggactccatcaccgtgggaatggtgcgtcatcagggcaagatcatgtacgtgggcgacgtgcggagcgtgacacagaagcatatccaggagtggggccctttcgacctggtgatcggcggcagcccttgcaatgacctgagcatcgtgaacccagcccggaagggcctgtacgagggaaccggcagactgttcttcgagttttacagactgctgcacgacgcccggcctaaggaaggcgacgaccggcccttcttttggctgttcgagaatgtggtggccatgggagtcagcgacaagcgggatattagccggttcctggagagcaaccccgtgatgatcgatgccaaggaagtgagcgccgcccaccgggccagatacttctggggcaatctgcctggcatgaacagacccctggccagcaccgtgaacgacaagctggagctgcaggagtgcctggagcacggccggatcgccaagttcagcaaggtgagaaccatcaccacccgaagcaacagcatcaaacaaggcaaggaccagcactttcctgtgttcatgaacgagaaggaggacatcctgtggtgtaccgagatggagagagtgttcgggttcccagtccactacacagatgtcagcaacatgtctagactggccagacagagactgctgggaagaagctggtccgtccctgtgatcagacacctgttcgcccctctgaaggagtacttcgcctgcgtgagcagcggcaacagcaacgccaacagccggggccccagcttctctagcggcctggtgccactgtccctgagagggagccacatgggccccatggagatctacaaaaccgtgagcgcctggaagcggcagcctgtgcgcgtgctgagcctgtttcggaatatcgataaagtcctgaaaagcctgggattcctggagagcggctctggctccggcggtggcaccctgaagtacgtggaggatgtgacaaacgtggtcagacgggatgtggagaagtggggccccttcgatctggtgtacggcagcacccaacccctgggcagctcttgtgaccggtgccctggctggtacatgtttcagttccaccggatcctgcagtacgccctgccgagacaggagtcccagcggccattcttttggattttcatggacaacttgctgctgaccgaggatgaccaggaaactaccactcggttcctgcagaccgaagccgtgaccctgcaggacgtgagaggccgggactaccagaacgccatgcgggtgtggtccaacatccctggactgaaaagcaagcacgcacctctgacccctaaagaagaggagtacctgcaggcccaggtgcggagcagaagcaagctggacgcccctaaggtggatctgctggtgaagaattgcctcctgcccctgagagagtacttcaagtatttcagccagaatagtctgcccctgggaggcagcggcggcggcatggtgcacggcagcgtgaccttcagggacgtggccatcgacttcagccaggaggagtgggagtgcctgcagcccgaccagaggaccctgtacagggacgtgatgctggagaactacagccacctgatcagcctggccggcagcagcatcagcaagcccggcgtgatcaccctgctggagcaggagaaggagccctggatggtggtgaggaaggagaccagcaggtggtaccccgacctggagggcggcccaagcagcggcgcccctcctcccagcggcggcaggcggcccaagcagcggcgcccctcctcccagcggcggcagcccagccggctccccaacctctaccgaggagggcacctctgagtccgccacccccgagagcggccctggcacctccaccgagcccagcgagggcagcgcacccggcagccctgccggcagccccacctccacagaggagggaaccagcaccgagcccagcgaaggcagcgccccaggcaccagcaccgagcctagtgagcaggagattaaacggatcaacaagatcagaagaagacttgtgaaagacagcaacaccaagaaggccggcaagacaggccccatgaaaaccctgctggttagagtgatgacacccgatctgagagagcggctggaaaacctgagaaagaagcctgaaaatatcccccagcccatcagcaatacatctagagccaacctgaataagctgctgaccgattacaccgaaatgaagaaggcgatcctgcatgtgtactgggaagagttccagaaggaccctgtgggcctgatgagccgggtggcccagcctgccagcaagaagatcgatcagaacaagctgaaacctgagatggacgagaagggcaacctgaccaccgccggctttgcctgctctcagtgtggccagcccctgttcgtgtacaagctggagcaggtgtctgagaagggcaaggcttacaccaactacttcggacggtgcaatgtggccgagcacgaaaagctgatcctgctggcccagctgaagcccgagaaggatagcgacgaagccgtgacatatagcctgggaaagtttgggcagagggccctggatttctacagcattcatgtgaccaaggagtccacccaccccgtgaagcccctggcccagatcgccggaaacagatacgcctccggacctgtgggaaaggccctgagcgacgcatgtatgggcacaatcgcctccttcctgtctaagtaccaggacatcatcatcgaacaccagaaggtggtgaagggcaaccagaagagactggagagcctgcgggagctggccggcaaggaaaacctggaataccctagcgtgaccctgccacctcagcctcacaccaaggagggcgttgatgcctacaacgaagtgatcgcccgggtgcgaatgtgggtgaacctgaacctgtggcagaagctgaagctaagcagagatgatgccaagcctctgctgagactgaagggattcccttcctttcctctggtcgagagacaggccaacgaagtggactggtgggacatggtgtgtaacgtgaagaagctgatcaacgagaaaaaggaggatggcaaggtgttttggcagaatctggctggctacaagagacaggaagccctgagaccatacctgagcagcgaggaagatcggaagaagggaaagaaattcgctcggtaccagctgggcgacctgctgctgcacctggaaaagaagcacggcgaggactggggaaaggtgtacgacgaggcctgggagcggattgacaagaaagtggaaggcctgagcaagcacatcaagctggaagaggaacggagaagcgaggacgcccagagcaaggccgccctgaccgactggctgcgggctaaggccagcttcgtgatcgagggcctgaaggaggccgacaaggacgagttctgcagatgcgagctgaagctgcagaagtggtacggggacctgcggggaaagcccttcgccatcgaagccgagaacagcatcctggacatcagcggcttcagcaagcagtacaactgtgccttcatctggcagaaggacggcgtgaagaagctgaacctgtacctgatcatcaactacttcaagggcggcaagctgcggttcaagaagatcaaacctgaagccttcgaagccaacagattctacaccgtgatcaacaaaaagagcggcgagatcgtgcccatggaggtgaacttcaacttcgacgaccccaacctgatcatcctgcctctggcctttggcaagagacagggcagagaattcatctggaacgacctgctgtccctggaaaccggcagcctgaagctggccaacggaagagtgatcgagaagacactgtacaacagaagaacccggcaggatgagcctgccctgttcgtggccctgaccttcgagcggcgggaggtcctggactcctccaatatcaaaccaatgaacctgatcggcgtggcaagaggcgaaaacatccccgccgtgatcgccctgaccgaccccgagggctgcccactgagccggtttaaggatagcctgggaaacccaacccacatcctgagaatcggcgagagctataaggagaagcagcggaccatccaggccaagaaggaggtggagcagcggagagccggcggctacagccggaagtacgccagcaaagccaagaatctggcagacgatatggtgagaaacaccgctagagatctgctgtactacgccgtgacccaggatgccatgctgatcttcgccaacctgagccggggcttcggccggcagggcaagcggaccttcatggccgagagacagtacacacggatggaggactggctgaccgccaagctggcctacgagggcctgagcaagacctacctgtccaagacactggcccagtacacctccaagacatgcagcaactgtgggtttaccatcaccagcgccgactacgacagggtgctggagaagctgaagaagacagcaacaggctggatgaccacaattaacggcaaggagctgaaggtggagggccagattacctactacaacagatacaagagacagaacgtagtcaaggacctgtccgtcgagctggatagactgagcgaagaatctgtgaacaacgacatctcctcctggacaaagggcagaagcggagaagctctgagcctcctgaagaaaagattctcccatagacccgtgcaggagaagttcgtgtgcctgaactgcggcttcgagacacacgcagccgagcaagccgccctgaacatcgccagatcctggctgttcctgcggagccaggagtacaagaaataccagacaaacaagacaaccggcaacaccgataagagagccttcgtcgagacctggcagtccttttaccggaagaagcttaaggaggtgtggaaacctgccgtgcggtctggcggatctggcggaggctccaccagccccaagaaaaagagaaaagtctaagctgccttctgcggggcttgccttctggccatgcccttcttctctcccttgcacctgtacctcttggtctttgaataaagcctgagtaggaaggctagcaaaaaaaaaaaaaaaaaaaaaaaaaaaaaaaaaaaaaaaaaaaaaaaaaaaaaaaaaaaaaaaaaaaaaaaaaaaaaaaagcccagccggctccccaacctctaccgaggagggcacctctgagtccgccacccccgagagcggccctggcacctccaccgagcccagcgagggcagcgcacccggcagccctgccggcagccccacctccacagaggagggaaccagcaccgagcccagcgaaggcagcgccccaggcaccagcaccgagcctagtgagcaggagattaaacggatcaacaagatcagaagaagacttgtgaaagacagcaacaccaagaaggccggcaagacaggccccatgaaaaccctgctggttagagtgatgacacccgatctgagagagcggctggaaaacctgagaaagaagcctgaaaatatcccccagcccatcagcaatacatctagagccaacctgaataagctgctgaccgattacaccgaaatgaagaaggcgatcctgcatgtgtactgggaagagttccagaaggaccctgtgggcctgatgagccgggtggcccagcctgccagcaagaagatcgatcagaacaagctgaaacctgagatggacgagaagggcaacctgaccaccgccggctttgcctgctctcagtgtggccagcccctgttcgtgtacaagctggagcaggtgtctgagaagggcaaggcttacaccaactacttcggacggtgcaatgtggccgagcacgaaaagctgatcctgctggcccagctgaagcccgagaaggatagcgacgaagccgtgacatatagcctgggaaagtttgggcagagggccctggatttctacagcattcatgtgaccaaggagtccacccaccccgtgaagcccctggcccagatcgccggaaacagatacgcctccggacctgtgggaaaggccctgagcgacgcatgtatgggcacaatcgcctccttcctgtctaagtaccaggacatcatcatcgaacaccagaaggtggtgaagggcaaccagaagagactggagagcctgcgggagctggccggcaaggaaaacctggaataccctagcgtgaccctgccacctcagcctcacaccaaggagggcgttgatgcctacaacgaagtgatcgcccgggtgcgaatgtgggtgaacctgaacctgtggcagaagctgaagctaagcagagatgatgccaagcctctgctgagactgaagggattcccttcctttcctctggtcgagagacaggccaacgaagtggactggtgggacatggtgtgtaacgtgaagaagctgatcaacgagaaaaaggaggatggcaaggtgttttggcagaatctggctggctacaagagacaggaagccctgagaccatacctgagcagcgaggaagatcggaagaagggaaagaaattcgctcggtaccagctgggcgacctgctgctgcacctggaaaagaagcacggcgaggactggggaaaggtgtacgacgaggcctgggagcggattgacaagaaagtggaaggcctgagcaagcacatcaagctggaagaggaacggagaagcgaggacgcccagagcaaggccgccctgaccgactggctgcgggctaaggccagcttcgtgatcgagggcctgaaggaggccgacaaggacgagttctgcagatgcgagctgaagctgcagaagtggtacggggacctgcggggaaagcccttcgccatcgaagccgagaacagcatcctggacatcagcggcttcagcaagcagtacaactgtgccttcatctggcagaaggacggcgtgaagaagctgaacctgtacctgatcatcaactacttcaagggcggcaagctgcggttcaagaagatcaaacctgaagccttcgaagccaacagattctacaccgtgatcaacaaaaagagcggcgagatcgtgcccatggaggtgaacttcaacttcgacgaccccaacctgatcatcctgcctctggcctttggcaagagacagggcagagaattcatctggaacgacctgctgtccctggaaaccggcagcctgaagctggccaacggaagagtgatcgagaagacactgtacaacagaagaacccggcaggatgagcctgccctgttcgtggccctgaccttcgagcggcgggaggtcctggactcctccaatatcaaaccaatgaacctgatcggcgtggcaagaggcgaaaacatccccgccgtgatcgccctgaccgaccccgagggctgcccactgagccggtttaaggatagcctgggaaacccaacccacatcctgagaatcggcgagagctataaggagaagcagcggaccatccaggccaagaaggaggtggagcagcggagagccggcggctacagccggaagtacgccagcaaagccaagaatctggcagacgatatggtgagaaacaccgctagagatctgctgtactacgccgtgacccaggatgccatgctgatcttcgccaacctgagccggggcttcggccggcagggcaagcggaccttcatggccgagagacagtacacacggatggaggactggctgaccgccaagctggcctacgagggcctgagcaagacctacctgtccaagacactggcccagtacacctccaagacatgcagcaactgtgggtttaccatcaccagcgccgactacgacagggtgctggagaagctgaagaagacagcaacaggctggatgaccacaattaacggcaaggagctgaaggtggagggccagattacctactacaacagatacaagagacagaacgtagtcaaggacctgtccgtcgagctggatagactgagcgaagaatctgtgaacaacgacatctcctcctggacaaagggcagaagcggagaagctctgagcctcctgaagaaaagattctcccatagacccgtgcaggagaagttcgtgtgcctgaactgcggcttcgagacacacgcagccgagcaagccgccctgaacatcgccagatcctggctgttcctgcggagccaggagtacaagaaataccagacaaacaagacaaccggcaacaccgataagagagccttcgtcgagacctggcagtccttttaccggaagaagcttaaggaggtgtggaaacctgccgtgcggtctggcggatctggcggaggctccaccagccccaagaaaaagagaaaagtctaagctgccttctgcggggcttgccttctggccatgcccttcttctctcccttgcacctgtacctcttggtctttgaataaagcctgagtaggaaggctagcaaaaaaaaaaaaaaaaaaaaaaaaaaaaaaaaaaaaaaaaaaaaaaaaaaaaaaaaaaaaaaaaaaaaaaaaaaaaaaaa

SEQ ID NO: 9553 - RNA, 8787 nt, synthetic construct
  source 1..8787: mol_type = other RNA
aggaaataagagagaaaagaagagtaagaagaaatataagagccaccatggcccctaagaagaagcgtaaagtgagccggatgaaccacgaccaggagttcgacccccctaaggtgtaccctcccgtccccgccgagaagagaaagcccatccgggtcctgagcctgttcgatggcatcgccaccggtctgctggtgctgaaggacctgggcatccaggtggataggtacattgcctccgaggtgtgcgaggactccatcaccgtgggaatggtgcgtcatcagggcaagatcatgtacgtgggcgacgtgcggagcgtgacacagaagcatatccaggagtggggccctttcgacctggtgatcggcggcagcccttgcaatgacctgagcatcgtgaacccagcccggaagggcctgtacgagggaaccggcagactgttcttcgagttttacagactgctgcacgacgcccggcctaaggaaggcgacgaccggcccttcttttggctgttcgagaatgtggtggccatgggagtcagcgacaagcgggatattagccggttcctggagagcaaccccgtgatgatcgatgccaaggaagtgagcgccgcccaccgggccagatacttctggggcaatctgcctggcatgaacagacccctggccagcaccgtgaacgacaagctggagctgcaggagtgcctggagcacggccggatcgccaagttcagcaaggtgagaaccatcaccacccgaagcaacagcatcaaacaaggcaaggaccagcactttcctgtgttcatgaacgagaaggaggacatcctgtggtgtaccgagatggagagagtgttcgggttcccagtccactacacagatgtcagcaacatgtctagactggccagacagagactgctgggaagaagctggtccgtccctgtgatcagacacctgttcgcccctctgaaggagtacttcgcctgcgtgagcagcggcaacagcaacgccaacagccggggccccagcttctctagcggcctggtgccactgtccctgagagggagccacatgggccccatggagatctacaaaaccgtgagcgcctggaagcggcagcctgtgcgcgtgctgagcctgtttcggaatatcgataaagtcctgaaaagcctgggattcctggagagcggctctggctccggcggtggcaccctgaagtacgtggaggatgtgacaaacgtggtcagacgggatgtggagaagtggggccccttcgatctggtgtacggcagcacccaacccctgggcagctcttgtgaccggtgccctggctggtacatgtttcagttccaccggatcctgcagtacgccctgccgagacaggagtcccagcggccattcttttggattttcatggacaacttgctgctgaccgaggatgaccaggaaactaccactcggttcctgcagaccgaagccgtgaccctgcaggacgtgagaggccgggactaccagaacgccatgcgggtgtggtccaacatccctggactgaaaagcaagcacgcacctctgacccctaaagaagaggagtacctgcaggcccaggtgcggagcagaagcaagctggacgcccctaaggtggatctgctggtgaagaattgcctcctgcccctgagagagtacttcaagtatttcagccagaatagtctgcccctgggaggcagcggcggcggcccccaggagctggtgaccttcagggacgtggccgtggacttcacccccgaggagtggggccagctgggccccgcccagaaggagctgtaccaggaggtgatgctggagaactacaggaacctggtgtgcctgggcctgaccgtgagcaagcccgacgtgatcagccagctggagcagggcgaggccccctggaggctggagggcggcagcgccaggggcaggtgcctggactggggcatgaggggcggcccaagcagcggcgcccctcctcccagcggcggcaggcggcccaagcagcggcgcccctcctcccagcggcggcagcccagccggctccccaacctctaccgaggagggcacctctgagtccgccacccccgagagcggccctggcacctccaccgagcccagcgagggcagcgcacccggcagccctgccggcagccccacctccacagaggagggaaccagcaccgagcccagcgaaggcagcgccccaggcaccagcaccgagcctagtgagcaggagattaaacggatcaacaagatcagaagaagacttgtgaaagacagcaacaccaagaaggccggcaagacaggccccatgaaaaccctgctggttagagtgatgacacccgatctgagagagcggctggaaaacctgagaaagaagcctgaaaatatcccccagcccatcagcaatacatctagagccaacctgaataagctgctgaccgattacaccgaaatgaagaaggcgatcctgcatgtgtactgggaagagttccagaaggaccctgtgggcctgatgagccgggtggcccagcctgccagcaagaagatcgatcagaacaagctgaaacctgagatggacgagaagggcaacctgaccaccgccggctttgcctgctctcagtgtggccagcccctgttcgtgtacaagctggagcaggtgtctgagaagggcaaggcttacaccaactacttcggacggtgcaatgtggccgagcacgaaaagctgatcctgctggcccagctgaagcccgagaaggatagcgacgaagccgtgacatatagcctgggaaagtttgggcagagggccctggatttctacagcattcatgtgaccaaggagtccacccaccccgtgaagcccctggcccagatcgccggaaacagatacgcctccggacctgtgggaaaggccctgagcgacgcatgtatgggcacaatcgcctccttcctgtctaagtaccaggacatcatcatcgaacaccagaaggtggtgaagggcaaccagaagagactggagagcctgcgggagctggccggcaaggaaaacctggaataccctagcgtgaccctgccacctcagcctcacaccaaggagggcgttgatgcctacaacgaagtgatcgcccgggtgcgaatgtgggtgaacctgaacctgtggcagaagctgaagctaagcagagatgatgccaagcctctgctgagactgaagggattcccttcctttcctctggtcgagagacaggccaacgaagtggactggtgggacatggtgtgtaacgtgaagaagctgatcaacgagaaaaaggaggatggcaaggtgttttggcagaatctggctggctacaagagacaggaagccctgagaccatacctgagcagcgaggaagatcggaagaagggaaagaaattcgctcggtaccagctgggcgacctgctgctgcacctggaaaagaagcacggcgaggactggggaaaggtgtacgacgaggcctgggagcggattgacaagaaagtggaaggcctgagcaagcacatcaagctggaagaggaacggagaagcgaggacgcccagagcaaggccgccctgaccgactggctgcgggctaaggccagcttcgtgatcgagggcctgaaggaggccgacaaggacgagttctgcagatgcgagctgaagctgcagaagtggtacggggacctgcggggaaagcccttcgccatcgaagccgagaacagcatcctggacatcagcggcttcagcaagcagtacaactgtgccttcatctggcagaaggacggcgtgaagaagctgaacctgtacctgatcatcaactacttcaagggcggcaagctgcggttcaagaagatcaaacctgaagccttcgaagccaacagattctacaccgtgatcaacaaaaagagcggcgagatcgtgcccatggaggtgaacttcaacttcgacgaccccaacctgatcatcctgcctctggcctttggcaagagacagggcagagaattcatctggaacgacctgctgtccctggaaaccggcagcctgaagctggccaacggaagagtgatcgagaagacactgtacaacagaagaacccggcaggatgagcctgccctgttcgtggccctgaccttcgagcggcgggaggtcctggactcctccaatatcaaaccaatgaacctgatcggcgtggcaagaggcgaaaacatccccgccgtgatcgccctgaccgaccccgagggctgcccactgagccggtttaaggatagcctgggaaacccaacccacatcctgagaatcggcgagagctataaggagaagcagcggaccatccaggccaagaaggaggtggagcagcggagagccggcggctacagccggaagtacgccagcaaagccaagaatctggcagacgatatggtgagaaacaccgctagagatctgctgtactacgccgtgacccaggatgccatgctgatcttcgccaacctgagccggggcttcggccggcagggcaagcggaccttcatggccgagagacagtacacacggatggaggactggctgaccgccaagctggcctacgagggcctgagcaagacctacctgtccaagacactggcccagtacacctccaagacatgcagcaactgtgggtttaccatcaccagcgccgactacgacagggtgctggagaagctgaagaagacagcaacaggctggatgaccacaattaacggcaaggagctgaaggtggagggccagattacctactacaacagatacaagagacagaacgtagtcaaggacctgtccgtcgagctggatagactgagcgaagaatctgtgaacaacgacatctcctcctggacaaagggcagaagcggagaagctctgagcctcctgaagaaaagattctcccatagacccgtgcaggagaagttcgtgtgcctgaactgcggcttcgagacacacgcagccgagcaagccgccctgaacatcgccagatcctggctgttcctgcggagccaggagtacaagaaataccagacaaacaagacaaccggcaacaccgataagagagccttcgtcgagacctggcagtccttttaccggaagaagcttaaggaggtgtggaaacctgccgtgcggtctggcggatctggcggaggctccaccagccccaagaaaaagagaaaagtctaagctgccttctgcggggcttgccttctggccatgcccttcttctctcccttgcacctgtacctcttggtctttgaataaagcctgagtaggaaggctagcaaaaaaaaaaaaaaaaaaaaaaaaaaaaaaaaaaaaaaaaaaaaaaaaaaaaaaaaaaaaaaaaaaaaaaaaaaaaaaaagcccagccggctccccaacctctaccgaggagggcacctctgagtccgccacccccgagagcggccctggcacctccaccgagcccagcgagggcagcgcacccggcagccctgccggcagccccacctccacagaggagggaaccagcaccgagcccagcgaaggcagcgccccaggcaccagcaccgagcctagtgagcaggagattaaacggatcaacaagatcagaagaagacttgtgaaagacagcaacaccaagaaggccggcaagacaggccccatgaaaaccctgctggttagagtgatgacacccgatctgagagagcggctggaaaacctgagaaagaagcctgaaaatatcccccagcccatcagcaatacatctagagccaacctgaataagctgctgaccgattacaccgaaatgaagaaggcgatcctgcatgtgtactgggaagagttccagaaggaccctgtgggcctgatgagccgggtggcccagcctgccagcaagaagatcgatcagaacaagctgaaacctgagatggacgagaagggcaacctgaccaccgccggctttgcctgctctcagtgtggccagcccctgttcgtgtacaagctggagcaggtgtctgagaagggcaaggcttacaccaactacttcggacggtgcaatgtggccgagcacgaaaagctgatcctgctggcccagctgaagcccgagaaggatagcgacgaagccgtgacatatagcctgggaaagtttgggcagagggccctggatttctacagcattcatgtgaccaaggagtccacccaccccgtgaagcccctggcccagatcgccggaaacagatacgcctccggacctgtgggaaaggccctgagcgacgcatgtatgggcacaatcgcctccttcctgtctaagtaccaggacatcatcatcgaacaccagaaggtggtgaagggcaaccagaagagactggagagcctgcgggagctggccggcaaggaaaacctggaataccctagcgtgaccctgccacctcagcctcacaccaaggagggcgttgatgcctacaacgaagtgatcgcccgggtgcgaatgtgggtgaacctgaacctgtggcagaagctgaagctaagcagagatgatgccaagcctctgctgagactgaagggattcccttcctttcctctggtcgagagacaggccaacgaagtggactggtgggacatggtgtgtaacgtgaagaagctgatcaacgagaaaaaggaggatggcaaggtgttttggcagaatctggctggctacaagagacaggaagccctgagaccatacctgagcagcgaggaagatcggaagaagggaaagaaattcgctcggtaccagctgggcgacctgctgctgcacctggaaaagaagcacggcgaggactggggaaaggtgtacgacgaggcctgggagcggattgacaagaaagtggaaggcctgagcaagcacatcaagctggaagaggaacggagaagcgaggacgcccagagcaaggccgccctgaccgactggctgcgggctaaggccagcttcgtgatcgagggcctgaaggaggccgacaaggacgagttctgcagatgcgagctgaagctgcagaagtggtacggggacctgcggggaaagcccttcgccatcgaagccgagaacagcatcctggacatcagcggcttcagcaagcagtacaactgtgccttcatctggcagaaggacggcgtgaagaagctgaacctgtacctgatcatcaactacttcaagggcggcaagctgcggttcaagaagatcaaacctgaagccttcgaagccaacagattctacaccgtgatcaacaaaaagagcggcgagatcgtgcccatggaggtgaacttcaacttcgacgaccccaacctgatcatcctgcctctggcctttggcaagagacagggcagagaattcatctggaacgacctgctgtccctggaaaccggcagcctgaagctggccaacggaagagtgatcgagaagacactgtacaacagaagaacccggcaggatgagcctgccctgttcgtggccctgaccttcgagcggcgggaggtcctggactcctccaatatcaaaccaatgaacctgatcggcgtggcaagaggcgaaaacatccccgccgtgatcgccctgaccgaccccgagggctgcccactgagccggtttaaggatagcctgggaaacccaacccacatcctgagaatcggcgagagctataaggagaagcagcggaccatccaggccaagaaggaggtggagcagcggagagccggcggctacagccggaagtacgccagcaaagccaagaatctggcagacgatatggtgagaaacaccgctagagatctgctgtactacgccgtgacccaggatgccatgctgatcttcgccaacctgagccggggcttcggccggcagggcaagcggaccttcatggccgagagacagtacacacggatggaggactggctgaccgccaagctggcctacgagggcctgagcaagacctacctgtccaagacactggcccagtacacctccaagacatgcagcaactgtgggtttaccatcaccagcgccgactacgacagggtgctggagaagctgaagaagacagcaacaggctggatgaccacaattaacggcaaggagctgaaggtggagggccagattacctactacaacagatacaagagacagaacgtagtcaaggacctgtccgtcgagctggatagactgagcgaagaatctgtgaacaacgacatctcctcctggacaaagggcagaagcggagaagctctgagcctcctgaagaaaagattctcccatagacccgtgcaggagaagttcgtgtgcctgaactgcggcttcgagacacacgcagccgagcaagccgccctgaacatcgccagatcctggctgttcctgcggagccaggagtacaagaaataccagacaaacaagacaaccggcaacaccgataagagagccttcgtcgagacctggcagtccttttaccggaagaagcttaaggaggtgtggaaacctgccgtgcggtctggcggatctggcggaggctccaccagccccaagaaaaagagaaaagtctaagctgccttctgcggggcttgccttctggccatgcccttcttctctcccttgcacctgtacctcttggtctttgaataaagcctgagtaggaaggctagcaaaaaaaaaaaaaaaaaaaaaaaaaaaaaaaaaaaaaaaaaaaaaaaaaaaaaaaaaaaaaaaaaaaaaaaaaaaaaaaa

SEQ ID NO: 9554 - RNA, 8787 nt, synthetic construct
  source 1..8787: mol_type = other RNA
aggaaataagagagaaaagaagagtaagaagaaatataagagccaccatggcccctaagaagaagcgtaaagtgagccggatgaaccacgaccaggagttcgacccccctaaggtgtaccctcccgtccccgccgagaagagaaagcccatccgggtcctgagcctgttcgatggcatcgccaccggtctgctggtgctgaaggacctgggcatccaggtggataggtacattgcctccgaggtgtgcgaggactccatcaccgtgggaatggtgcgtcatcagggcaagatcatgtacgtgggcgacgtgcggagcgtgacacagaagcatatccaggagtggggccctttcgacctggtgatcggcggcagcccttgcaatgacctgagcatcgtgaacccagcccggaagggcctgtacgagggaaccggcagactgttcttcgagttttacagactgctgcacgacgcccggcctaaggaaggcgacgaccggcccttcttttggctgttcgagaatgtggtggccatgggagtcagcgacaagcgggatattagccggttcctggagagcaaccccgtgatgatcgatgccaaggaagtgagcgccgcccaccgggccagatacttctggggcaatctgcctggcatgaacagacccctggccagcaccgtgaacgacaagctggagctgcaggagtgcctggagcacggccggatcgccaagttcagcaaggtgagaaccatcaccacccgaagcaacagcatcaaacaaggcaaggaccagcactttcctgtgttcatgaacgagaaggaggacatcctgtggtgtaccgagatggagagagtgttcgggttcccagtccactacacagatgtcagcaacatgtctagactggccagacagagactgctgggaagaagctggtccgtccctgtgatcagacacctgttcgcccctctgaaggagtacttcgcctgcgtgagcagcggcaacagcaacgccaacagccggggccccagcttctctagcggcctggtgccactgtccctgagagggagccacatgggccccatggagatctacaaaaccgtgagcgcctggaagcggcagcctgtgcgcgtgctgagcctgtttcggaatatcgataaagtcctgaaaagcctgggattcctggagagcggctctggctccggcggtggcaccctgaagtacgtggaggatgtgacaaacgtggtcagacgggatgtggagaagtggggccccttcgatctggtgtacggcagcacccaacccctgggcagctcttgtgaccggtgccctggctggtacatgtttcagttccaccggatcctgcagtacgccctgccgagacaggagtcccagcggccattcttttggattttcatggacaacttgctgctgaccgaggatgaccaggaaactaccactcggttcctgcagaccgaagccgtgaccctgcaggacgtgagaggccgggactaccagaacgccatgcgggtgtggtccaacatccctggactgaaaagcaagcacgcacctctgacccctaaagaagaggagtacctgcaggcccaggtgcggagcagaagcaagctggacgcccctaaggtggatctgctggtgaagaattgcctcctgcccctgagagagtacttcaagtatttcagccagaatagtctgcccctgggaggcagcggcggcggcaggaagaggggcagcctgaccctggaggacgtggccgtggacttcacctgggaggagtggcagctgctggcccccgcccagaaggccctgtaccaggaggtgatgctggagaactacggcaacctggtgttcgtgggctaccaggccagcaagcccgccgccctgagcaggctggagaggggcgagccctggcccgtggaggacgaggtgcacagccagctgtgccccgagatgaggaaggacggcggcccaagcagcggcgcccctcctcccagcggcggcaggcggcccaagcagcggcgcccctcctcccagcggcggcagcccagccggctccccaacctctaccgaggagggcacctctgagtccgccacccccgagagcggccctggcacctccaccgagcccagcgagggcagcgcacccggcagccctgccggcagccccacctccacagaggagggaaccagcaccgagcccagcgaaggcagcgccccaggcaccagcaccgagcctagtgagcaggagattaaacggatcaacaagatcagaagaagacttgtgaaagacagcaacaccaagaaggccggcaagacaggccccatgaaaaccctgctggttagagtgatgacacccgatctgagagagcggctggaaaacctgagaaagaagcctgaaaatatcccccagcccatcagcaatacatctagagccaacctgaataagctgctgaccgattacaccgaaatgaagaaggcgatcctgcatgtgtactgggaagagttccagaaggaccctgtgggcctgatgagccgggtggcccagcctgccagcaagaagatcgatcagaacaagctgaaacctgagatggacgagaagggcaacctgaccaccgccggctttgcctgctctcagtgtggccagcccctgttcgtgtacaagctggagcaggtgtctgagaagggcaaggcttacaccaactacttcggacggtgcaatgtggccgagcacgaaaagctgatcctgctggcccagctgaagcccgagaaggatagcgacgaagccgtgacatatagcctgggaaagtttgggcagagggccctggatttctacagcattcatgtgaccaaggagtccacccaccccgtgaagcccctggcccagatcgccggaaacagatacgcctccggacctgtgggaaaggccctgagcgacgcatgtatgggcacaatcgcctccttcctgtctaagtaccaggacatcatcatcgaacaccagaaggtggtgaagggcaaccagaagagactggagagcctgcgggagctggccggcaaggaaaacctggaataccctagcgtgaccctgccacctcagcctcacaccaaggagggcgttgatgcctacaacgaagtgatcgcccgggtgcgaatgtgggtgaacctgaacctgtggcagaagctgaagctaagcagagatgatgccaagcctctgctgagactgaagggattcccttcctttcctctggtcgagagacaggccaacgaagtggactggtgggacatggtgtgtaacgtgaagaagctgatcaacgagaaaaaggaggatggcaaggtgttttggcagaatctggctggctacaagagacaggaagccctgagaccatacctgagcagcgaggaagatcggaagaagggaaagaaattcgctcggtaccagctgggcgacctgctgctgcacctggaaaagaagcacggcgaggactggggaaaggtgtacgacgaggcctgggagcggattgacaagaaagtggaaggcctgagcaagcacatcaagctggaagaggaacggagaagcgaggacgcccagagcaaggccgccctgaccgactggctgcgggctaaggccagcttcgtgatcgagggcctgaaggaggccgacaaggacgagttctgcagatgcgagctgaagctgcagaagtggtacggggacctgcggggaaagcccttcgccatcgaagccgagaacagcatcctggacatcagcggcttcagcaagcagtacaactgtgccttcatctggcagaaggacggcgtgaagaagctgaacctgtacctgatcatcaactacttcaagggcggcaagctgcggttcaagaagatcaaacctgaagccttcgaagccaacagattctacaccgtgatcaacaaaaagagcggcgagatcgtgcccatggaggtgaacttcaacttcgacgaccccaacctgatcatcctgcctctggcctttggcaagagacagggcagagaattcatctggaacgacctgctgtccctggaaaccggcagcctgaagctggccaacggaagagtgatcgagaagacactgtacaacagaagaacccggcaggatgagcctgccctgttcgtggccctgaccttcgagcggcgggaggtcctggactcctccaatatcaaaccaatgaacctgatcggcgtggcaagaggcgaaaacatccccgccgtgatcgccctgaccgaccccgagggctgcccactgagccggtttaaggatagcctgggaaacccaacccacatcctgagaatcggcgagagctataaggagaagcagcggaccatccaggccaagaaggaggtggagcagcggagagccggcggctacagccggaagtacgccagcaaagccaagaatctggcagacgatatggtgagaaacaccgctagagatctgctgtactacgccgtgacccaggatgccatgctgatcttcgccaacctgagccggggcttcggccggcagggcaagcggaccttcatggccgagagacagtacacacggatggaggactggctgaccgccaagctggcctacgagggcctgagcaagacctacctgtccaagacactggcccagtacacctccaagacatgcagcaactgtgggtttaccatcaccagcgccgactacgacagggtgctggagaagctgaagaagacagcaacaggctggatgaccacaattaacggcaaggagctgaaggtggagggccagattacctactacaacagatacaagagacagaacgtagtcaaggacctgtccgtcgagctggatagactgagcgaagaatctgtgaacaacgacatctcctcctggacaaagggcagaagcggagaagctctgagcctcctgaagaaaagattctcccatagacccgtgcaggagaagttcgtgtgcctgaactgcggcttcgagacacacgcagccgagcaagccgccctgaacatcgccagatcctggctgttcctgcggagccaggagtacaagaaataccagacaaacaagacaaccggcaacaccgataagagagccttcgtcgagacctggcagtccttttaccggaagaagcttaaggaggtgtggaaacctgccgtgcggtctggcggatctggcggaggctccaccagccccaagaaaaagagaaaagtctaagctgccttctgcggggcttgccttctggccatgcccttcttctctcccttgcacctgtacctcttggtctttgaataaagcctgagtaggaaggctagcaaaaaaaaaaaaaaaaaaaaaaaaaaaaaaaaaaaaaaaaaaaaaaaaaaaaaaaaaaaaaaaaaaaaaaaaaaaaaaaagcccagccggctccccaacctctaccgaggagggcacctctgagtccgccacccccgagagcggccctggcacctccaccgagcccagcgagggcagcgcacccggcagccctgccggcagccccacctccacagaggagggaaccagcaccgagcccagcgaaggcagcgccccaggcaccagcaccgagcctagtgagcaggagattaaacggatcaacaagatcagaagaagacttgtgaaagacagcaacaccaagaaggccggcaagacaggccccatgaaaaccctgctggttagagtgatgacacccgatctgagagagcggctggaaaacctgagaaagaagcctgaaaatatcccccagcccatcagcaatacatctagagccaacctgaataagctgctgaccgattacaccgaaatgaagaaggcgatcctgcatgtgtactgggaagagttccagaaggaccctgtgggcctgatgagccgggtggcccagcctgccagcaagaagatcgatcagaacaagctgaaacctgagatggacgagaagggcaacctgaccaccgccggctttgcctgctctcagtgtggccagcccctgttcgtgtacaagctggagcaggtgtctgagaagggcaaggcttacaccaactacttcggacggtgcaatgtggccgagcacgaaaagctgatcctgctggcccagctgaagcccgagaaggatagcgacgaagccgtgacatatagcctgggaaagtttgggcagagggccctggatttctacagcattcatgtgaccaaggagtccacccaccccgtgaagcccctggcccagatcgccggaaacagatacgcctccggacctgtgggaaaggccctgagcgacgcatgtatgggcacaatcgcctccttcctgtctaagtaccaggacatcatcatcgaacaccagaaggtggtgaagggcaaccagaagagactggagagcctgcgggagctggccggcaaggaaaacctggaataccctagcgtgaccctgccacctcagcctcacaccaaggagggcgttgatgcctacaacgaagtgatcgcccgggtgcgaatgtgggtgaacctgaacctgtggcagaagctgaagctaagcagagatgatgccaagcctctgctgagactgaagggattcccttcctttcctctggtcgagagacaggccaacgaagtggactggtgggacatggtgtgtaacgtgaagaagctgatcaacgagaaaaaggaggatggcaaggtgttttggcagaatctggctggctacaagagacaggaagccctgagaccatacctgagcagcgaggaagatcggaagaagggaaagaaattcgctcggtaccagctgggcgacctgctgctgcacctggaaaagaagcacggcgaggactggggaaaggtgtacgacgaggcctgggagcggattgacaagaaagtggaaggcctgagcaagcacatcaagctggaagaggaacggagaagcgaggacgcccagagcaaggccgccctgaccgactggctgcgggctaaggccagcttcgtgatcgagggcctgaaggaggccgacaaggacgagttctgcagatgcgagctgaagctgcagaagtggtacggggacctgcggggaaagcccttcgccatcgaagccgagaacagcatcctggacatcagcggcttcagcaagcagtacaactgtgccttcatctggcagaaggacggcgtgaagaagctgaacctgtacctgatcatcaactacttcaagggcggcaagctgcggttcaagaagatcaaacctgaagccttcgaagccaacagattctacaccgtgatcaacaaaaagagcggcgagatcgtgcccatggaggtgaacttcaacttcgacgaccccaacctgatcatcctgcctctggcctttggcaagagacagggcagagaattcatctggaacgacctgctgtccctggaaaccggcagcctgaagctggccaacggaagagtgatcgagaagacactgtacaacagaagaacccggcaggatgagcctgccctgttcgtggccctgaccttcgagcggcgggaggtcctggactcctccaatatcaaaccaatgaacctgatcggcgtggcaagaggcgaaaacatccccgccgtgatcgccctgaccgaccccgagggctgcccactgagccggtttaaggatagcctgggaaacccaacccacatcctgagaatcggcgagagctataaggagaagcagcggaccatccaggccaagaaggaggtggagcagcggagagccggcggctacagccggaagtacgccagcaaagccaagaatctggcagacgatatggtgagaaacaccgctagagatctgctgtactacgccgtgacccaggatgccatgctgatcttcgccaacctgagccggggcttcggccggcagggcaagcggaccttcatggccgagagacagtacacacggatggaggactggctgaccgccaagctggcctacgagggcctgagcaagacctacctgtccaagacactggcccagtacacctccaagacatgcagcaactgtgggtttaccatcaccagcgccgactacgacagggtgctggagaagctgaagaagacagcaacaggctggatgaccacaattaacggcaaggagctgaaggtggagggccagattacctactacaacagatacaagagacagaacgtagtcaaggacctgtccgtcgagctggatagactgagcgaagaatctgtgaacaacgacatctcctcctggacaaagggcagaagcggagaagctctgagcctcctgaagaaaagattctcccatagacccgtgcaggagaagttcgtgtgcctgaactgcggcttcgagacacacgcagccgagcaagccgccctgaacatcgccagatcctggctgttcctgcggagccaggagtacaagaaataccagacaaacaagacaaccggcaacaccgataagagagccttcgtcgagacctggcagtccttttaccggaagaagcttaaggaggtgtggaaacctgccgtgcggtctggcggatctggcggaggctccaccagccccaagaaaaagagaaaagtctaagctgccttctgcggggcttgccttctggccatgcccttcttctctcccttgcacctgtacctcttggtctttgaataaagcctgagtaggaaggctagcaaaaaaaaaaaaaaaaaaaaaaaaaaaaaaaaaaaaaaaaaaaaaaaaaaaaaaaaaaaaaaaaaaaaaaaaaaaaaaaa

SEQ ID NO: 9555 - RNA, 8787 nt, synthetic construct
  source 1..8787: mol_type = other RNA
aggaaataagagagaaaagaagagtaagaagaaatataagagccaccatggcccctaagaagaagcgtaaagtgagccggatgaaccacgaccaggagttcgacccccctaaggtgtaccctcccgtccccgccgagaagagaaagcccatccgggtcctgagcctgttcgatggcatcgccaccggtctgctggtgctgaaggacctgggcatccaggtggataggtacattgcctccgaggtgtgcgaggactccatcaccgtgggaatggtgcgtcatcagggcaagatcatgtacgtgggcgacgtgcggagcgtgacacagaagcatatccaggagtggggccctttcgacctggtgatcggcggcagcccttgcaatgacctgagcatcgtgaacccagcccggaagggcctgtacgagggaaccggcagactgttcttcgagttttacagactgctgcacgacgcccggcctaaggaaggcgacgaccggcccttcttttggctgttcgagaatgtggtggccatgggagtcagcgacaagcgggatattagccggttcctggagagcaaccccgtgatgatcgatgccaaggaagtgagcgccgcccaccgggccagatacttctggggcaatctgcctggcatgaacagacccctggccagcaccgtgaacgacaagctggagctgcaggagtgcctggagcacggccggatcgccaagttcagcaaggtgagaaccatcaccacccgaagcaacagcatcaaacaaggcaaggaccagcactttcctgtgttcatgaacgagaaggaggacatcctgtggtgtaccgagatggagagagtgttcgggttcccagtccactacacagatgtcagcaacatgtctagactggccagacagagactgctgggaagaagctggtccgtccctgtgatcagacacctgttcgcccctctgaaggagtacttcgcctgcgtgagcagcggcaacagcaacgccaacagccggggccccagcttctctagcggcctggtgccactgtccctgagagggagccacatgggccccatggagatctacaaaaccgtgagcgcctggaagcggcagcctgtgcgcgtgctgagcctgtttcggaatatcgataaagtcctgaaaagcctgggattcctggagagcggctctggctccggcggtggcaccctgaagtacgtggaggatgtgacaaacgtggtcagacgggatgtggagaagtggggccccttcgatctggtgtacggcagcacccaacccctgggcagctcttgtgaccggtgccctggctggtacatgtttcagttccaccggatcctgcagtacgccctgccgagacaggagtcccagcggccattcttttggattttcatggacaacttgctgctgaccgaggatgaccaggaaactaccactcggttcctgcagaccgaagccgtgaccctgcaggacgtgagaggccgggactaccagaacgccatgcgggtgtggtccaacatccctggactgaaaagcaagcacgcacctctgacccctaaagaagaggagtacctgcaggcccaggtgcggagcagaagcaagctggacgcccctaaggtggatctgctggtgaagaattgcctcctgcccctgagagagtacttcaagtatttcagccagaatagtctgcccctgggaggcagcggcggcggcccccaggagcaggtgaccttcagcgacgtggccgtggacttcaccgtggaggagtggggcaggctggcccccgcccagaaggagctgtacaggagcgtgatgctggagaactacaggaacctggtgtgcctgggcctggccgccagcagccccgacgtgatcggccagctggagaggggcgagggcccctggagggtggagggcaaggtgaggaagggcctgtgcgccgaccagaagaccagcggcggcccaagcagcggcgcccctcctcccagcggcggcaggcggcccaagcagcggcgcccctcctcccagcggcggcagcccagccggctccccaacctctaccgaggagggcacctctgagtccgccacccccgagagcggccctggcacctccaccgagcccagcgagggcagcgcacccggcagccctgccggcagccccacctccacagaggagggaaccagcaccgagcccagcgaaggcagcgccccaggcaccagcaccgagcctagtgagcaggagattaaacggatcaacaagatcagaagaagacttgtgaaagacagcaacaccaagaaggccggcaagacaggccccatgaaaaccctgctggttagagtgatgacacccgatctgagagagcggctggaaaacctgagaaagaagcctgaaaatatcccccagcccatcagcaatacatctagagccaacctgaataagctgctgaccgattacaccgaaatgaagaaggcgatcctgcatgtgtactgggaagagttccagaaggaccctgtgggcctgatgagccgggtggcccagcctgccagcaagaagatcgatcagaacaagctgaaacctgagatggacgagaagggcaacctgaccaccgccggctttgcctgctctcagtgtggccagcccctgttcgtgtacaagctggagcaggtgtctgagaagggcaaggcttacaccaactacttcggacggtgcaatgtggccgagcacgaaaagctgatcctgctggcccagctgaagcccgagaaggatagcgacgaagccgtgacatatagcctgggaaagtttgggcagagggccctggatttctacagcattcatgtgaccaaggagtccacccaccccgtgaagcccctggcccagatcgccggaaacagatacgcctccggacctgtgggaaaggccctgagcgacgcatgtatgggcacaatcgcctccttcctgtctaagtaccaggacatcatcatcgaacaccagaaggtggtgaagggcaaccagaagagactggagagcctgcgggagctggccggcaaggaaaacctggaataccctagcgtgaccctgccacctcagcctcacaccaaggagggcgttgatgcctacaacgaagtgatcgcccgggtgcgaatgtgggtgaacctgaacctgtggcagaagctgaagctaagcagagatgatgccaagcctctgctgagactgaagggattcccttcctttcctctggtcgagagacaggccaacgaagtggactggtgggacatggtgtgtaacgtgaagaagctgatcaacgagaaaaaggaggatggcaaggtgttttggcagaatctggctggctacaagagacaggaagccctgagaccatacctgagcagcgaggaagatcggaagaagggaaagaaattcgctcggtaccagctgggcgacctgctgctgcacctggaaaagaagcacggcgaggactggggaaaggtgtacgacgaggcctgggagcggattgacaagaaagtggaaggcctgagcaagcacatcaagctggaagaggaacggagaagcgaggacgcccagagcaaggccgccctgaccgactggctgcgggctaaggccagcttcgtgatcgagggcctgaaggaggccgacaaggacgagttctgcagatgcgagctgaagctgcagaagtggtacggggacctgcggggaaagcccttcgccatcgaagccgagaacagcatcctggacatcagcggcttcagcaagcagtacaactgtgccttcatctggcagaaggacggcgtgaagaagctgaacctgtacctgatcatcaactacttcaagggcggcaagctgcggttcaagaagatcaaacctgaagccttcgaagccaacagattctacaccgtgatcaacaaaaagagcggcgagatcgtgcccatggaggtgaacttcaacttcgacgaccccaacctgatcatcctgcctctggcctttggcaagagacagggcagagaattcatctggaacgacctgctgtccctggaaaccggcagcctgaagctggccaacggaagagtgatcgagaagacactgtacaacagaagaacccggcaggatgagcctgccctgttcgtggccctgaccttcgagcggcgggaggtcctggactcctccaatatcaaaccaatgaacctgatcggcgtggcaagaggcgaaaacatccccgccgtgatcgccctgaccgaccccgagggctgcccactgagccggtttaaggatagcctgggaaacccaacccacatcctgagaatcggcgagagctataaggagaagcagcggaccatccaggccaagaaggaggtggagcagcggagagccggcggctacagccggaagtacgccagcaaagccaagaatctggcagacgatatggtgagaaacaccgctagagatctgctgtactacgccgtgacccaggatgccatgctgatcttcgccaacctgagccggggcttcggccggcagggcaagcggaccttcatggccgagagacagtacacacggatggaggactggctgaccgccaagctggcctacgagggcctgagcaagacctacctgtccaagacactggcccagtacacctccaagacatgcagcaactgtgggtttaccatcaccagcgccgactacgacagggtgctggagaagctgaagaagacagcaacaggctggatgaccacaattaacggcaaggagctgaaggtggagggccagattacctactacaacagatacaagagacagaacgtagtcaaggacctgtccgtcgagctggatagactgagcgaagaatctgtgaacaacgacatctcctcctggacaaagggcagaagcggagaagctctgagcctcctgaagaaaagattctcccatagacccgtgcaggagaagttcgtgtgcctgaactgcggcttcgagacacacgcagccgagcaagccgccctgaacatcgccagatcctggctgttcctgcggagccaggagtacaagaaataccagacaaacaagacaaccggcaacaccgataagagagccttcgtcgagacctggcagtccttttaccggaagaagcttaaggaggtgtggaaacctgccgtgcggtctggcggatctggcggaggctccaccagccccaagaaaaagagaaaagtctaagctgccttctgcggggcttgccttctggccatgcccttcttctctcccttgcacctgtacctcttggtctttgaataaagcctgagtaggaaggctagcaaaaaaaaaaaaaaaaaaaaaaaaaaaaaaaaaaaaaaaaaaaaaaaaaaaaaaaaaaaaaaaaaaaaaaaaaaaaaaaagcccagccggctccccaacctctaccgaggagggcacctctgagtccgccacccccgagagcggccctggcacctccaccgagcccagcgagggcagcgcacccggcagccctgccggcagccccacctccacagaggagggaaccagcaccgagcccagcgaaggcagcgccccaggcaccagcaccgagcctagtgagcaggagattaaacggatcaacaagatcagaagaagacttgtgaaagacagcaacaccaagaaggccggcaagacaggccccatgaaaaccctgctggttagagtgatgacacccgatctgagagagcggctggaaaacctgagaaagaagcctgaaaatatcccccagcccatcagcaatacatctagagccaacctgaataagctgctgaccgattacaccgaaatgaagaaggcgatcctgcatgtgtactgggaagagttccagaaggaccctgtgggcctgatgagccgggtggcccagcctgccagcaagaagatcgatcagaacaagctgaaacctgagatggacgagaagggcaacctgaccaccgccggctttgcctgctctcagtgtggccagcccctgttcgtgtacaagctggagcaggtgtctgagaagggcaaggcttacaccaactacttcggacggtgcaatgtggccgagcacgaaaagctgatcctgctggcccagctgaagcccgagaaggatagcgacgaagccgtgacatatagcctgggaaagtttgggcagagggccctggatttctacagcattcatgtgaccaaggagtccacccaccccgtgaagcccctggcccagatcgccggaaacagatacgcctccggacctgtgggaaaggccctgagcgacgcatgtatgggcacaatcgcctccttcctgtctaagtaccaggacatcatcatcgaacaccagaaggtggtgaagggcaaccagaagagactggagagcctgcgggagctggccggcaaggaaaacctggaataccctagcgtgaccctgccacctcagcctcacaccaaggagggcgttgatgcctacaacgaagtgatcgcccgggtgcgaatgtgggtgaacctgaacctgtggcagaagctgaagctaagcagagatgatgccaagcctctgctgagactgaagggattcccttcctttcctctggtcgagagacaggccaacgaagtggactggtgggacatggtgtgtaacgtgaagaagctgatcaacgagaaaaaggaggatggcaaggtgttttggcagaatctggctggctacaagagacaggaagccctgagaccatacctgagcagcgaggaagatcggaagaagggaaagaaattcgctcggtaccagctgggcgacctgctgctgcacctggaaaagaagcacggcgaggactggggaaaggtgtacgacgaggcctgggagcggattgacaagaaagtggaaggcctgagcaagcacatcaagctggaagaggaacggagaagcgaggacgcccagagcaaggccgccctgaccgactggctgcgggctaaggccagcttcgtgatcgagggcctgaaggaggccgacaaggacgagttctgcagatgcgagctgaagctgcagaagtggtacggggacctgcggggaaagcccttcgccatcgaagccgagaacagcatcctggacatcagcggcttcagcaagcagtacaactgtgccttcatctggcagaaggacggcgtgaagaagctgaacctgtacctgatcatcaactacttcaagggcggcaagctgcggttcaagaagatcaaacctgaagccttcgaagccaacagattctacaccgtgatcaacaaaaagagcggcgagatcgtgcccatggaggtgaacttcaacttcgacgaccccaacctgatcatcctgcctctggcctttggcaagagacagggcagagaattcatctggaacgacctgctgtccctggaaaccggcagcctgaagctggccaacggaagagtgatcgagaagacactgtacaacagaagaacccggcaggatgagcctgccctgttcgtggccctgaccttcgagcggcgggaggtcctggactcctccaatatcaaaccaatgaacctgatcggcgtggcaagaggcgaaaacatccccgccgtgatcgccctgaccgaccccgagggctgcccactgagccggtttaaggatagcctgggaaacccaacccacatcctgagaatcggcgagagctataaggagaagcagcggaccatccaggccaagaaggaggtggagcagcggagagccggcggctacagccggaagtacgccagcaaagccaagaatctggcagacgatatggtgagaaacaccgctagagatctgctgtactacgccgtgacccaggatgccatgctgatcttcgccaacctgagccggggcttcggccggcagggcaagcggaccttcatggccgagagacagtacacacggatggaggactggctgaccgccaagctggcctacgagggcctgagcaagacctacctgtccaagacactggcccagtacacctccaagacatgcagcaactgtgggtttaccatcaccagcgccgactacgacagggtgctggagaagctgaagaagacagcaacaggctggatgaccacaattaacggcaaggagctgaaggtggagggccagattacctactacaacagatacaagagacagaacgtagtcaaggacctgtccgtcgagctggatagactgagcgaagaatctgtgaacaacgacatctcctcctggacaaagggcagaagcggagaagctctgagcctcctgaagaaaagattctcccatagacccgtgcaggagaagttcgtgtgcctgaactgcggcttcgagacacacgcagccgagcaagccgccctgaacatcgccagatcctggctgttcctgcggagccaggagtacaagaaataccagacaaacaagacaaccggcaacaccgataagagagccttcgtcgagacctggcagtccttttaccggaagaagcttaaggaggtgtggaaacctgccgtgcggtctggcggatctggcggaggctccaccagccccaagaaaaagagaaaagtctaagctgccttctgcggggcttgccttctggccatgcccttcttctctcccttgcacctgtacctcttggtctttgaataaagcctgagtaggaaggctagcaaaaaaaaaaaaaaaaaaaaaaaaaaaaaaaaaaaaaaaaaaaaaaaaaaaaaaaaaaaaaaaaaaaaaaaaaaaaaaaa

SEQ ID NO: 9556 - RNA, 8787 nt, synthetic construct
  source 1..8787: mol_type = other RNA
aggaaataagagagaaaagaagagtaagaagaaatataagagccaccatggcccctaagaagaagcgtaaagtgagccggatgaaccacgaccaggagttcgacccccctaaggtgtaccctcccgtccccgccgagaagagaaagcccatccgggtcctgagcctgttcgatggcatcgccaccggtctgctggtgctgaaggacctgggcatccaggtggataggtacattgcctccgaggtgtgcgaggactccatcaccgtgggaatggtgcgtcatcagggcaagatcatgtacgtgggcgacgtgcggagcgtgacacagaagcatatccaggagtggggccctttcgacctggtgatcggcggcagcccttgcaatgacctgagcatcgtgaacccagcccggaagggcctgtacgagggaaccggcagactgttcttcgagttttacagactgctgcacgacgcccggcctaaggaaggcgacgaccggcccttcttttggctgttcgagaatgtggtggccatgggagtcagcgacaagcgggatattagccggttcctggagagcaaccccgtgatgatcgatgccaaggaagtgagcgccgcccaccgggccagatacttctggggcaatctgcctggcatgaacagacccctggccagcaccgtgaacgacaagctggagctgcaggagtgcctggagcacggccggatcgccaagttcagcaaggtgagaaccatcaccacccgaagcaacagcatcaaacaaggcaaggaccagcactttcctgtgttcatgaacgagaaggaggacatcctgtggtgtaccgagatggagagagtgttcgggttcccagtccactacacagatgtcagcaacatgtctagactggccagacagagactgctgggaagaagctggtccgtccctgtgatcagacacctgttcgcccctctgaaggagtacttcgcctgcgtgagcagcggcaacagcaacgccaacagccggggccccagcttctctagcggcctggtgccactgtccctgagagggagccacatgggccccatggagatctacaaaaccgtgagcgcctggaagcggcagcctgtgcgcgtgctgagcctgtttcggaatatcgataaagtcctgaaaagcctgggattcctggagagcggctctggctccggcggtggcaccctgaagtacgtggaggatgtgacaaacgtggtcagacgggatgtggagaagtggggccccttcgatctggtgtacggcagcacccaacccctgggcagctcttgtgaccggtgccctggctggtacatgtttcagttccaccggatcctgcagtacgccctgccgagacaggagtcccagcggccattcttttggattttcatggacaacttgctgctgaccgaggatgaccaggaaactaccactcggttcctgcagaccgaagccgtgaccctgcaggacgtgagaggccgggactaccagaacgccatgcgggtgtggtccaacatccctggactgaaaagcaagcacgcacctctgacccctaaagaagaggagtacctgcaggcccaggtgcggagcagaagcaagctggacgcccctaaggtggatctgctggtgaagaattgcctcctgcccctgagagagtacttcaagtatttcagccagaatagtctgcccctgggaggcagcggcggcggcatggccgccggccagagggaggccaggccccaggtgagcctgaccttcgaggacgtggccgtgctgttcaccagggacgagtggaggaagctggcccccagccagaggaacctgtacagggacgtgatgctggagaactacaggaacctgctgagcctgggcctgcccttcaccaagccccaggtgatcagcctgctgcagcagggcgaggacccctgggaggtggagaaggagggcagcggcggcggcccaagcagcggcgcccctcctcccagcggcggcaggcggcccaagcagcggcgcccctcctcccagcggcggcagcccagccggctccccaacctctaccgaggagggcacctctgagtccgccacccccgagagcggccctggcacctccaccgagcccagcgagggcagcgcacccggcagccctgccggcagccccacctccacagaggagggaaccagcaccgagcccagcgaaggcagcgccccaggcaccagcaccgagcctagtgagcaggagattaaacggatcaacaagatcagaagaagacttgtgaaagacagcaacaccaagaaggccggcaagacaggccccatgaaaaccctgctggttagagtgatgacacccgatctgagagagcggctggaaaacctgagaaagaagcctgaaaatatcccccagcccatcagcaatacatctagagccaacctgaataagctgctgaccgattacaccgaaatgaagaaggcgatcctgcatgtgtactgggaagagttccagaaggaccctgtgggcctgatgagccgggtggcccagcctgccagcaagaagatcgatcagaacaagctgaaacctgagatggacgagaagggcaacctgaccaccgccggctttgcctgctctcagtgtggccagcccctgttcgtgtacaagctggagcaggtgtctgagaagggcaaggcttacaccaactacttcggacggtgcaatgtggccgagcacgaaaagctgatcctgctggcccagctgaagcccgagaaggatagcgacgaagccgtgacatatagcctgggaaagtttgggcagagggccctggatttctacagcattcatgtgaccaaggagtccacccaccccgtgaagcccctggcccagatcgccggaaacagatacgcctccggacctgtgggaaaggccctgagcgacgcatgtatgggcacaatcgcctccttcctgtctaagtaccaggacatcatcatcgaacaccagaaggtggtgaagggcaaccagaagagactggagagcctgcgggagctggccggcaaggaaaacctggaataccctagcgtgaccctgccacctcagcctcacaccaaggagggcgttgatgcctacaacgaagtgatcgcccgggtgcgaatgtgggtgaacctgaacctgtggcagaagctgaagctaagcagagatgatgccaagcctctgctgagactgaagggattcccttcctttcctctggtcgagagacaggccaacgaagtggactggtgggacatggtgtgtaacgtgaagaagctgatcaacgagaaaaaggaggatggcaaggtgttttggcagaatctggctggctacaagagacaggaagccctgagaccatacctgagcagcgaggaagatcggaagaagggaaagaaattcgctcggtaccagctgggcgacctgctgctgcacctggaaaagaagcacggcgaggactggggaaaggtgtacgacgaggcctgggagcggattgacaagaaagtggaaggcctgagcaagcacatcaagctggaagaggaacggagaagcgaggacgcccagagcaaggccgccctgaccgactggctgcgggctaaggccagcttcgtgatcgagggcctgaaggaggccgacaaggacgagttctgcagatgcgagctgaagctgcagaagtggtacggggacctgcggggaaagcccttcgccatcgaagccgagaacagcatcctggacatcagcggcttcagcaagcagtacaactgtgccttcatctggcagaaggacggcgtgaagaagctgaacctgtacctgatcatcaactacttcaagggcggcaagctgcggttcaagaagatcaaacctgaagccttcgaagccaacagattctacaccgtgatcaacaaaaagagcggcgagatcgtgcccatggaggtgaacttcaacttcgacgaccccaacctgatcatcctgcctctggcctttggcaagagacagggcagagaattcatctggaacgacctgctgtccctggaaaccggcagcctgaagctggccaacggaagagtgatcgagaagacactgtacaacagaagaacccggcaggatgagcctgccctgttcgtggccctgaccttcgagcggcgggaggtcctggactcctccaatatcaaaccaatgaacctgatcggcgtggcaagaggcgaaaacatccccgccgtgatcgccctgaccgaccccgagggctgcccactgagccggtttaaggatagcctgggaaacccaacccacatcctgagaatcggcgagagctataaggagaagcagcggaccatccaggccaagaaggaggtggagcagcggagagccggcggctacagccggaagtacgccagcaaagccaagaatctggcagacgatatggtgagaaacaccgctagagatctgctgtactacgccgtgacccaggatgccatgctgatcttcgccaacctgagccggggcttcggccggcagggcaagcggaccttcatggccgagagacagtacacacggatggaggactggctgaccgccaagctggcctacgagggcctgagcaagacctacctgtccaagacactggcccagtacacctccaagacatgcagcaactgtgggtttaccatcaccagcgccgactacgacagggtgctggagaagctgaagaagacagcaacaggctggatgaccacaattaacggcaaggagctgaaggtggagggccagattacctactacaacagatacaagagacagaacgtagtcaaggacctgtccgtcgagctggatagactgagcgaagaatctgtgaacaacgacatctcctcctggacaaagggcagaagcggagaagctctgagcctcctgaagaaaagattctcccatagacccgtgcaggagaagttcgtgtgcctgaactgcggcttcgagacacacgcagccgagcaagccgccctgaacatcgccagatcctggctgttcctgcggagccaggagtacaagaaataccagacaaacaagacaaccggcaacaccgataagagagccttcgtcgagacctggcagtccttttaccggaagaagcttaaggaggtgtggaaacctgccgtgcggtctggcggatctggcggaggctccaccagccccaagaaaaagagaaaagtctaagctgccttctgcggggcttgccttctggccatgcccttcttctctcccttgcacctgtacctcttggtctttgaataaagcctgagtaggaaggctagcaaaaaaaaaaaaaaaaaaaaaaaaaaaaaaaaaaaaaaaaaaaaaaaaaaaaaaaaaaaaaaaaaaaaaaaaaaaaaaaagcccagccggctccccaacctctaccgaggagggcacctctgagtccgccacccccgagagcggccctggcacctccaccgagcccagcgagggcagcgcacccggcagccctgccggcagccccacctccacagaggagggaaccagcaccgagcccagcgaaggcagcgccccaggcaccagcaccgagcctagtgagcaggagattaaacggatcaacaagatcagaagaagacttgtgaaagacagcaacaccaagaaggccggcaagacaggccccatgaaaaccctgctggttagagtgatgacacccgatctgagagagcggctggaaaacctgagaaagaagcctgaaaatatcccccagcccatcagcaatacatctagagccaacctgaataagctgctgaccgattacaccgaaatgaagaaggcgatcctgcatgtgtactgggaagagttccagaaggaccctgtgggcctgatgagccgggtggcccagcctgccagcaagaagatcgatcagaacaagctgaaacctgagatggacgagaagggcaacctgaccaccgccggctttgcctgctctcagtgtggccagcccctgttcgtgtacaagctggagcaggtgtctgagaagggcaaggcttacaccaactacttcggacggtgcaatgtggccgagcacgaaaagctgatcctgctggcccagctgaagcccgagaaggatagcgacgaagccgtgacatatagcctgggaaagtttgggcagagggccctggatttctacagcattcatgtgaccaaggagtccacccaccccgtgaagcccctggcccagatcgccggaaacagatacgcctccggacctgtgggaaaggccctgagcgacgcatgtatgggcacaatcgcctccttcctgtctaagtaccaggacatcatcatcgaacaccagaaggtggtgaagggcaaccagaagagactggagagcctgcgggagctggccggcaaggaaaacctggaataccctagcgtgaccctgccacctcagcctcacaccaaggagggcgttgatgcctacaacgaagtgatcgcccgggtgcgaatgtgggtgaacctgaacctgtggcagaagctgaagctaagcagagatgatgccaagcctctgctgagactgaagggattcccttcctttcctctggtcgagagacaggccaacgaagtggactggtgggacatggtgtgtaacgtgaagaagctgatcaacgagaaaaaggaggatggcaaggtgttttggcagaatctggctggctacaagagacaggaagccctgagaccatacctgagcagcgaggaagatcggaagaagggaaagaaattcgctcggtaccagctgggcgacctgctgctgcacctggaaaagaagcacggcgaggactggggaaaggtgtacgacgaggcctgggagcggattgacaagaaagtggaaggcctgagcaagcacatcaagctggaagaggaacggagaagcgaggacgcccagagcaaggccgccctgaccgactggctgcgggctaaggccagcttcgtgatcgagggcctgaaggaggccgacaaggacgagttctgcagatgcgagctgaagctgcagaagtggtacggggacctgcggggaaagcccttcgccatcgaagccgagaacagcatcctggacatcagcggcttcagcaagcagtacaactgtgccttcatctggcagaaggacggcgtgaagaagctgaacctgtacctgatcatcaactacttcaagggcggcaagctgcggttcaagaagatcaaacctgaagccttcgaagccaacagattctacaccgtgatcaacaaaaagagcggcgagatcgtgcccatggaggtgaacttcaacttcgacgaccccaacctgatcatcctgcctctggcctttggcaagagacagggcagagaattcatctggaacgacctgctgtccctggaaaccggcagcctgaagctggccaacggaagagtgatcgagaagacactgtacaacagaagaacccggcaggatgagcctgccctgttcgtggccctgaccttcgagcggcgggaggtcctggactcctccaatatcaaaccaatgaacctgatcggcgtggcaagaggcgaaaacatccccgccgtgatcgccctgaccgaccccgagggctgcccactgagccggtttaaggatagcctgggaaacccaacccacatcctgagaatcggcgagagctataaggagaagcagcggaccatccaggccaagaaggaggtggagcagcggagagccggcggctacagccggaagtacgccagcaaagccaagaatctggcagacgatatggtgagaaacaccgctagagatctgctgtactacgccgtgacccaggatgccatgctgatcttcgccaacctgagccggggcttcggccggcagggcaagcggaccttcatggccgagagacagtacacacggatggaggactggctgaccgccaagctggcctacgagggcctgagcaagacctacctgtccaagacactggcccagtacacctccaagacatgcagcaactgtgggtttaccatcaccagcgccgactacgacagggtgctggagaagctgaagaagacagcaacaggctggatgaccacaattaacggcaaggagctgaaggtggagggccagattacctactacaacagatacaagagacagaacgtagtcaaggacctgtccgtcgagctggatagactgagcgaagaatctgtgaacaacgacatctcctcctggacaaagggcagaagcggagaagctctgagcctcctgaagaaaagattctcccatagacccgtgcaggagaagttcgtgtgcctgaactgcggcttcgagacacacgcagccgagcaagccgccctgaacatcgccagatcctggctgttcctgcggagccaggagtacaagaaataccagacaaacaagacaaccggcaacaccgataagagagccttcgtcgagacctggcagtccttttaccggaagaagcttaaggaggtgtggaaacctgccgtgcggtctggcggatctggcggaggctccaccagccccaagaaaaagagaaaagtctaagctgccttctgcggggcttgccttctggccatgcccttcttctctcccttgcacctgtacctcttggtctttgaataaagcctgagtaggaaggctagcaaaaaaaaaaaaaaaaaaaaaaaaaaaaaaaaaaaaaaaaaaaaaaaaaaaaaaaaaaaaaaaaaaaaaaaaaaaaaaaa

SEQ ID NO: 9557 - RNA, 8787 nt, synthetic construct
  source 1..8787: mol_type = other RNA
aggaaataagagagaaaagaagagtaagaagaaatataagagccaccatggcccctaagaagaagcgtaaagtgagccggatgaaccacgaccaggagttcgacccccctaaggtgtaccctcccgtccccgccgagaagagaaagcccatccgggtcctgagcctgttcgatggcatcgccaccggtctgctggtgctgaaggacctgggcatccaggtggataggtacattgcctccgaggtgtgcgaggactccatcaccgtgggaatggtgcgtcatcagggcaagatcatgtacgtgggcgacgtgcggagcgtgacacagaagcatatccaggagtggggccctttcgacctggtgatcggcggcagcccttgcaatgacctgagcatcgtgaacccagcccggaagggcctgtacgagggaaccggcagactgttcttcgagttttacagactgctgcacgacgcccggcctaaggaaggcgacgaccggcccttcttttggctgttcgagaatgtggtggccatgggagtcagcgacaagcgggatattagccggttcctggagagcaaccccgtgatgatcgatgccaaggaagtgagcgccgcccaccgggccagatacttctggggcaatctgcctggcatgaacagacccctggccagcaccgtgaacgacaagctggagctgcaggagtgcctggagcacggccggatcgccaagttcagcaaggtgagaaccatcaccacccgaagcaacagcatcaaacaaggcaaggaccagcactttcctgtgttcatgaacgagaaggaggacatcctgtggtgtaccgagatggagagagtgttcgggttcccagtccactacacagatgtcagcaacatgtctagactggccagacagagactgctgggaagaagctggtccgtccctgtgatcagacacctgttcgcccctctgaaggagtacttcgcctgcgtgagcagcggcaacagcaacgccaacagccggggccccagcttctctagcggcctggtgccactgtccctgagagggagccacatgggccccatggagatctacaaaaccgtgagcgcctggaagcggcagcctgtgcgcgtgctgagcctgtttcggaatatcgataaagtcctgaaaagcctgggattcctggagagcggctctggctccggcggtggcaccctgaagtacgtggaggatgtgacaaacgtggtcagacgggatgtggagaagtggggccccttcgatctggtgtacggcagcacccaacccctgggcagctcttgtgaccggtgccctggctggtacatgtttcagttccaccggatcctgcagtacgccctgccgagacaggagtcccagcggccattcttttggattttcatggacaacttgctgctgaccgaggatgaccaggaaactaccactcggttcctgcagaccgaagccgtgaccctgcaggacgtgagaggccgggactaccagaacgccatgcgggtgtggtccaacatccctggactgaaaagcaagcacgcacctctgacccctaaagaagaggagtacctgcaggcccaggtgcggagcagaagcaagctggacgcccctaaggtggatctgctggtgaagaattgcctcctgcccctgagagagtacttcaagtatttcagccagaatagtctgcccctgggaggcagcggcggcggcatggacagcgtggccttcgaggacgtggccatcaacttcacctgcgaggagtgggccctgctgggccccagccagaagagcctgtacagggacgtgatgcaggagaccatcaggaacctggactgcatcggcatgacctggcagacccacgacatcgaggaggaccagtacaaggacctgaggaggaacctgaggtgccacatggtggagaggagctgcgagatcaaggacaacagccagtgcggcggcccaagcagcggcgcccctcctcccagcggcggcaggcggcccaagcagcggcgcccctcctcccagcggcggcagcccagccggctccccaacctctaccgaggagggcacctctgagtccgccacccccgagagcggccctggcacctccaccgagcccagcgagggcagcgcacccggcagccctgccggcagccccacctccacagaggagggaaccagcaccgagcccagcgaaggcagcgccccaggcaccagcaccgagcctagtgagcaggagattaaacggatcaacaagatcagaagaagacttgtgaaagacagcaacaccaagaaggccggcaagacaggccccatgaaaaccctgctggttagagtgatgacacccgatctgagagagcggctggaaaacctgagaaagaagcctgaaaatatcccccagcccatcagcaatacatctagagccaacctgaataagctgctgaccgattacaccgaaatgaagaaggcgatcctgcatgtgtactgggaagagttccagaaggaccctgtgggcctgatgagccgggtggcccagcctgccagcaagaagatcgatcagaacaagctgaaacctgagatggacgagaagggcaacctgaccaccgccggctttgcctgctctcagtgtggccagcccctgttcgtgtacaagctggagcaggtgtctgagaagggcaaggcttacaccaactacttcggacggtgcaatgtggccgagcacgaaaagctgatcctgctggcccagctgaagcccgagaaggatagcgacgaagccgtgacatatagcctgggaaagtttgggcagagggccctggatttctacagcattcatgtgaccaaggagtccacccaccccgtgaagcccctggcccagatcgccggaaacagatacgcctccggacctgtgggaaaggccctgagcgacgcatgtatgggcacaatcgcctccttcctgtctaagtaccaggacatcatcatcgaacaccagaaggtggtgaagggcaaccagaagagactggagagcctgcgggagctggccggcaaggaaaacctggaataccctagcgtgaccctgccacctcagcctcacaccaaggagggcgttgatgcctacaacgaagtgatcgcccgggtgcgaatgtgggtgaacctgaacctgtggcagaagctgaagctaagcagagatgatgccaagcctctgctgagactgaagggattcccttcctttcctctggtcgagagacaggccaacgaagtggactggtgggacatggtgtgtaacgtgaagaagctgatcaacgagaaaaaggaggatggcaaggtgttttggcagaatctggctggctacaagagacaggaagccctgagaccatacctgagcagcgaggaagatcggaagaagggaaagaaattcgctcggtaccagctgggcgacctgctgctgcacctggaaaagaagcacggcgaggactggggaaaggtgtacgacgaggcctgggagcggattgacaagaaagtggaaggcctgagcaagcacatcaagctggaagaggaacggagaagcgaggacgcccagagcaaggccgccctgaccgactggctgcgggctaaggccagcttcgtgatcgagggcctgaaggaggccgacaaggacgagttctgcagatgcgagctgaagctgcagaagtggtacggggacctgcggggaaagcccttcgccatcgaagccgagaacagcatcctggacatcagcggcttcagcaagcagtacaactgtgccttcatctggcagaaggacggcgtgaagaagctgaacctgtacctgatcatcaactacttcaagggcggcaagctgcggttcaagaagatcaaacctgaagccttcgaagccaacagattctacaccgtgatcaacaaaaagagcggcgagatcgtgcccatggaggtgaacttcaacttcgacgaccccaacctgatcatcctgcctctggcctttggcaagagacagggcagagaattcatctggaacgacctgctgtccctggaaaccggcagcctgaagctggccaacggaagagtgatcgagaagacactgtacaacagaagaacccggcaggatgagcctgccctgttcgtggccctgaccttcgagcggcgggaggtcctggactcctccaatatcaaaccaatgaacctgatcggcgtggcaagaggcgaaaacatccccgccgtgatcgccctgaccgaccccgagggctgcccactgagccggtttaaggatagcctgggaaacccaacccacatcctgagaatcggcgagagctataaggagaagcagcggaccatccaggccaagaaggaggtggagcagcggagagccggcggctacagccggaagtacgccagcaaagccaagaatctggcagacgatatggtgagaaacaccgctagagatctgctgtactacgccgtgacccaggatgccatgctgatcttcgccaacctgagccggggcttcggccggcagggcaagcggaccttcatggccgagagacagtacacacggatggaggactggctgaccgccaagctggcctacgagggcctgagcaagacctacctgtccaagacactggcccagtacacctccaagacatgcagcaactgtgggtttaccatcaccagcgccgactacgacagggtgctggagaagctgaagaagacagcaacaggctggatgaccacaattaacggcaaggagctgaaggtggagggccagattacctactacaacagatacaagagacagaacgtagtcaaggacctgtccgtcgagctggatagactgagcgaagaatctgtgaacaacgacatctcctcctggacaaagggcagaagcggagaagctctgagcctcctgaagaaaagattctcccatagacccgtgcaggagaagttcgtgtgcctgaactgcggcttcgagacacacgcagccgagcaagccgccctgaacatcgccagatcctggctgttcctgcggagccaggagtacaagaaataccagacaaacaagacaaccggcaacaccgataagagagccttcgtcgagacctggcagtccttttaccggaagaagcttaaggaggtgtggaaacctgccgtgcggtctggcggatctggcggaggctccaccagccccaagaaaaagagaaaagtctaagctgccttctgcggggcttgccttctggccatgcccttcttctctcccttgcacctgtacctcttggtctttgaataaagcctgagtaggaaggctagcaaaaaaaaaaaaaaaaaaaaaaaaaaaaaaaaaaaaaaaaaaaaaaaaaaaaaaaaaaaaaaaaaaaaaaaaaaaaaaaagcccagccggctccccaacctctaccgaggagggcacctctgagtccgccacccccgagagcggccctggcacctccaccgagcccagcgagggcagcgcacccggcagccctgccggcagccccacctccacagaggagggaaccagcaccgagcccagcgaaggcagcgccccaggcaccagcaccgagcctagtgagcaggagattaaacggatcaacaagatcagaagaagacttgtgaaagacagcaacaccaagaaggccggcaagacaggccccatgaaaaccctgctggttagagtgatgacacccgatctgagagagcggctggaaaacctgagaaagaagcctgaaaatatcccccagcccatcagcaatacatctagagccaacctgaataagctgctgaccgattacaccgaaatgaagaaggcgatcctgcatgtgtactgggaagagttccagaaggaccctgtgggcctgatgagccgggtggcccagcctgccagcaagaagatcgatcagaacaagctgaaacctgagatggacgagaagggcaacctgaccaccgccggctttgcctgctctcagtgtggccagcccctgttcgtgtacaagctggagcaggtgtctgagaagggcaaggcttacaccaactacttcggacggtgcaatgtggccgagcacgaaaagctgatcctgctggcccagctgaagcccgagaaggatagcgacgaagccgtgacatatagcctgggaaagtttgggcagagggccctggatttctacagcattcatgtgaccaaggagtccacccaccccgtgaagcccctggcccagatcgccggaaacagatacgcctccggacctgtgggaaaggccctgagcgacgcatgtatgggcacaatcgcctccttcctgtctaagtaccaggacatcatcatcgaacaccagaaggtggtgaagggcaaccagaagagactggagagcctgcgggagctggccggcaaggaaaacctggaataccctagcgtgaccctgccacctcagcctcacaccaaggagggcgttgatgcctacaacgaagtgatcgcccgggtgcgaatgtgggtgaacctgaacctgtggcagaagctgaagctaagcagagatgatgccaagcctctgctgagactgaagggattcccttcctttcctctggtcgagagacaggccaacgaagtggactggtgggacatggtgtgtaacgtgaagaagctgatcaacgagaaaaaggaggatggcaaggtgttttggcagaatctggctggctacaagagacaggaagccctgagaccatacctgagcagcgaggaagatcggaagaagggaaagaaattcgctcggtaccagctgggcgacctgctgctgcacctggaaaagaagcacggcgaggactggggaaaggtgtacgacgaggcctgggagcggattgacaagaaagtggaaggcctgagcaagcacatcaagctggaagaggaacggagaagcgaggacgcccagagcaaggccgccctgaccgactggctgcgggctaaggccagcttcgtgatcgagggcctgaaggaggccgacaaggacgagttctgcagatgcgagctgaagctgcagaagtggtacggggacctgcggggaaagcccttcgccatcgaagccgagaacagcatcctggacatcagcggcttcagcaagcagtacaactgtgccttcatctggcagaaggacggcgtgaagaagctgaacctgtacctgatcatcaactacttcaagggcggcaagctgcggttcaagaagatcaaacctgaagccttcgaagccaacagattctacaccgtgatcaacaaaaagagcggcgagatcgtgcccatggaggtgaacttcaacttcgacgaccccaacctgatcatcctgcctctggcctttggcaagagacagggcagagaattcatctggaacgacctgctgtccctggaaaccggcagcctgaagctggccaacggaagagtgatcgagaagacactgtacaacagaagaacccggcaggatgagcctgccctgttcgtggccctgaccttcgagcggcgggaggtcctggactcctccaatatcaaaccaatgaacctgatcggcgtggcaagaggcgaaaacatccccgccgtgatcgccctgaccgaccccgagggctgcccactgagccggtttaaggatagcctgggaaacccaacccacatcctgagaatcggcgagagctataaggagaagcagcggaccatccaggccaagaaggaggtggagcagcggagagccggcggctacagccggaagtacgccagcaaagccaagaatctggcagacgatatggtgagaaacaccgctagagatctgctgtactacgccgtgacccaggatgccatgctgatcttcgccaacctgagccggggcttcggccggcagggcaagcggaccttcatggccgagagacagtacacacggatggaggactggctgaccgccaagctggcctacgagggcctgagcaagacctacctgtccaagacactggcccagtacacctccaagacatgcagcaactgtgggtttaccatcaccagcgccgactacgacagggtgctggagaagctgaagaagacagcaacaggctggatgaccacaattaacggcaaggagctgaaggtggagggccagattacctactacaacagatacaagagacagaacgtagtcaaggacctgtccgtcgagctggatagactgagcgaagaatctgtgaacaacgacatctcctcctggacaaagggcagaagcggagaagctctgagcctcctgaagaaaagattctcccatagacccgtgcaggagaagttcgtgtgcctgaactgcggcttcgagacacacgcagccgagcaagccgccctgaacatcgccagatcctggctgttcctgcggagccaggagtacaagaaataccagacaaacaagacaaccggcaacaccgataagagagccttcgtcgagacctggcagtccttttaccggaagaagcttaaggaggtgtggaaacctgccgtgcggtctggcggatctggcggaggctccaccagccccaagaaaaagagaaaagtctaagctgccttctgcggggcttgccttctggccatgcccttcttctctcccttgcacctgtacctcttggtctttgaataaagcctgagtaggaaggctagcaaaaaaaaaaaaaaaaaaaaaaaaaaaaaaaaaaaaaaaaaaaaaaaaaaaaaaaaaaaaaaaaaaaaaaaaaaaaaaaa

SEQ ID NO: 9558 - RNA, 8787 nt, synthetic construct
  source 1..8787: mol_type = other RNA
aggaaataagagagaaaagaagagtaagaagaaatataagagccaccatggcccctaagaagaagcgtaaagtgagccggatgaaccacgaccaggagttcgacccccctaaggtgtaccctcccgtccccgccgagaagagaaagcccatccgggtcctgagcctgttcgatggcatcgccaccggtctgctggtgctgaaggacctgggcatccaggtggataggtacattgcctccgaggtgtgcgaggactccatcaccgtgggaatggtgcgtcatcagggcaagatcatgtacgtgggcgacgtgcggagcgtgacacagaagcatatccaggagtggggccctttcgacctggtgatcggcggcagcccttgcaatgacctgagcatcgtgaacccagcccggaagggcctgtacgagggaaccggcagactgttcttcgagttttacagactgctgcacgacgcccggcctaaggaaggcgacgaccggcccttcttttggctgttcgagaatgtggtggccatgggagtcagcgacaagcgggatattagccggttcctggagagcaaccccgtgatgatcgatgccaaggaagtgagcgccgcccaccgggccagatacttctggggcaatctgcctggcatgaacagacccctggccagcaccgtgaacgacaagctggagctgcaggagtgcctggagcacggccggatcgccaagttcagcaaggtgagaaccatcaccacccgaagcaacagcatcaaacaaggcaaggaccagcactttcctgtgttcatgaacgagaaggaggacatcctgtggtgtaccgagatggagagagtgttcgggttcccagtccactacacagatgtcagcaacatgtctagactggccagacagagactgctgggaagaagctggtccgtccctgtgatcagacacctgttcgcccctctgaaggagtacttcgcctgcgtgagcagcggcaacagcaacgccaacagccggggccccagcttctctagcggcctggtgccactgtccctgagagggagccacatgggccccatggagatctacaaaaccgtgagcgcctggaagcggcagcctgtgcgcgtgctgagcctgtttcggaatatcgataaagtcctgaaaagcctgggattcctggagagcggctctggctccggcggtggcaccctgaagtacgtggaggatgtgacaaacgtggtcagacgggatgtggagaagtggggccccttcgatctggtgtacggcagcacccaacccctgggcagctcttgtgaccggtgccctggctggtacatgtttcagttccaccggatcctgcagtacgccctgccgagacaggagtcccagcggccattcttttggattttcatggacaacttgctgctgaccgaggatgaccaggaaactaccactcggttcctgcagaccgaagccgtgaccctgcaggacgtgagaggccgggactaccagaacgccatgcgggtgtggtccaacatccctggactgaaaagcaagcacgcacctctgacccctaaagaagaggagtacctgcaggcccaggtgcggagcagaagcaagctggacgcccctaaggtggatctgctggtgaagaattgcctcctgcccctgagagagtacttcaagtatttcagccagaatagtctgcccctgggaggcagcggcggcggcccccagggcagcgtgaccttcgaggacgtggccgtggacttcagccaggaggagtgggagctgctggaccccgcccagaggaccctgtacagggaggtgatgctggagacctgcaggaacctggtgagcctgggctgcagcctgtgccagcccgtggcccccccccacctggagcagggcgaggccgtgtggatggtggacaggggcatcccccaggccttctgcagcgactgggagaccaggggcggcccaagcagcggcgcccctcctcccagcggcggcaggcggcccaagcagcggcgcccctcctcccagcggcggcagcccagccggctccccaacctctaccgaggagggcacctctgagtccgccacccccgagagcggccctggcacctccaccgagcccagcgagggcagcgcacccggcagccctgccggcagccccacctccacagaggagggaaccagcaccgagcccagcgaaggcagcgccccaggcaccagcaccgagcctagtgagcaggagattaaacggatcaacaagatcagaagaagacttgtgaaagacagcaacaccaagaaggccggcaagacaggccccatgaaaaccctgctggttagagtgatgacacccgatctgagagagcggctggaaaacctgagaaagaagcctgaaaatatcccccagcccatcagcaatacatctagagccaacctgaataagctgctgaccgattacaccgaaatgaagaaggcgatcctgcatgtgtactgggaagagttccagaaggaccctgtgggcctgatgagccgggtggcccagcctgccagcaagaagatcgatcagaacaagctgaaacctgagatggacgagaagggcaacctgaccaccgccggctttgcctgctctcagtgtggccagcccctgttcgtgtacaagctggagcaggtgtctgagaagggcaaggcttacaccaactacttcggacggtgcaatgtggccgagcacgaaaagctgatcctgctggcccagctgaagcccgagaaggatagcgacgaagccgtgacatatagcctgggaaagtttgggcagagggccctggatttctacagcattcatgtgaccaaggagtccacccaccccgtgaagcccctggcccagatcgccggaaacagatacgcctccggacctgtgggaaaggccctgagcgacgcatgtatgggcacaatcgcctccttcctgtctaagtaccaggacatcatcatcgaacaccagaaggtggtgaagggcaaccagaagagactggagagcctgcgggagctggccggcaaggaaaacctggaataccctagcgtgaccctgccacctcagcctcacaccaaggagggcgttgatgcctacaacgaagtgatcgcccgggtgcgaatgtgggtgaacctgaacctgtggcagaagctgaagctaagcagagatgatgccaagcctctgctgagactgaagggattcccttcctttcctctggtcgagagacaggccaacgaagtggactggtgggacatggtgtgtaacgtgaagaagctgatcaacgagaaaaaggaggatggcaaggtgttttggcagaatctggctggctacaagagacaggaagccctgagaccatacctgagcagcgaggaagatcggaagaagggaaagaaattcgctcggtaccagctgggcgacctgctgctgcacctggaaaagaagcacggcgaggactggggaaaggtgtacgacgaggcctgggagcggattgacaagaaagtggaaggcctgagcaagcacatcaagctggaagaggaacggagaagcgaggacgcccagagcaaggccgccctgaccgactggctgcgggctaaggccagcttcgtgatcgagggcctgaaggaggccgacaaggacgagttctgcagatgcgagctgaagctgcagaagtggtacggggacctgcggggaaagcccttcgccatcgaagccgagaacagcatcctggacatcagcggcttcagcaagcagtacaactgtgccttcatctggcagaaggacggcgtgaagaagctgaacctgtacctgatcatcaactacttcaagggcggcaagctgcggttcaagaagatcaaacctgaagccttcgaagccaacagattctacaccgtgatcaacaaaaagagcggcgagatcgtgcccatggaggtgaacttcaacttcgacgaccccaacctgatcatcctgcctctggcctttggcaagagacagggcagagaattcatctggaacgacctgctgtccctggaaaccggcagcctgaagctggccaacggaagagtgatcgagaagacactgtacaacagaagaacccggcaggatgagcctgccctgttcgtggccctgaccttcgagcggcgggaggtcctggactcctccaatatcaaaccaatgaacctgatcggcgtggcaagaggcgaaaacatccccgccgtgatcgccctgaccgaccccgagggctgcccactgagccggtttaaggatagcctgggaaacccaacccacatcctgagaatcggcgagagctataaggagaagcagcggaccatccaggccaagaaggaggtggagcagcggagagccggcggctacagccggaagtacgccagcaaagccaagaatctggcagacgatatggtgagaaacaccgctagagatctgctgtactacgccgtgacccaggatgccatgctgatcttcgccaacctgagccggggcttcggccggcagggcaagcggaccttcatggccgagagacagtacacacggatggaggactggctgaccgccaagctggcctacgagggcctgagcaagacctacctgtccaagacactggcccagtacacctccaagacatgcagcaactgtgggtttaccatcaccagcgccgactacgacagggtgctggagaagctgaagaagacagcaacaggctggatgaccacaattaacggcaaggagctgaaggtggagggccagattacctactacaacagatacaagagacagaacgtagtcaaggacctgtccgtcgagctggatagactgagcgaagaatctgtgaacaacgacatctcctcctggacaaagggcagaagcggagaagctctgagcctcctgaagaaaagattctcccatagacccgtgcaggagaagttcgtgtgcctgaactgcggcttcgagacacacgcagccgagcaagccgccctgaacatcgccagatcctggctgttcctgcggagccaggagtacaagaaataccagacaaacaagacaaccggcaacaccgataagagagccttcgtcgagacctggcagtccttttaccggaagaagcttaaggaggtgtggaaacctgccgtgcggtctggcggatctggcggaggctccaccagccccaagaaaaagagaaaagtctaagctgccttctgcggggcttgccttctggccatgcccttcttctctcccttgcacctgtacctcttggtctttgaataaagcctgagtaggaaggctagcaaaaaaaaaaaaaaaaaaaaaaaaaaaaaaaaaaaaaaaaaaaaaaaaaaaaaaaaaaaaaaaaaaaaaaaaaaaaaaaagcccagccggctccccaacctctaccgaggagggcacctctgagtccgccacccccgagagcggccctggcacctccaccgagcccagcgagggcagcgcacccggcagccctgccggcagccccacctccacagaggagggaaccagcaccgagcccagcgaaggcagcgccccaggcaccagcaccgagcctagtgagcaggagattaaacggatcaacaagatcagaagaagacttgtgaaagacagcaacaccaagaaggccggcaagacaggccccatgaaaaccctgctggttagagtgatgacacccgatctgagagagcggctggaaaacctgagaaagaagcctgaaaatatcccccagcccatcagcaatacatctagagccaacctgaataagctgctgaccgattacaccgaaatgaagaaggcgatcctgcatgtgtactgggaagagttccagaaggaccctgtgggcctgatgagccgggtggcccagcctgccagcaagaagatcgatcagaacaagctgaaacctgagatggacgagaagggcaacctgaccaccgccggctttgcctgctctcagtgtggccagcccctgttcgtgtacaagctggagcaggtgtctgagaagggcaaggcttacaccaactacttcggacggtgcaatgtggccgagcacgaaaagctgatcctgctggcccagctgaagcccgagaaggatagcgacgaagccgtgacatatagcctgggaaagtttgggcagagggccctggatttctacagcattcatgtgaccaaggagtccacccaccccgtgaagcccctggcccagatcgccggaaacagatacgcctccggacctgtgggaaaggccctgagcgacgcatgtatgggcacaatcgcctccttcctgtctaagtaccaggacatcatcatcgaacaccagaaggtggtgaagggcaaccagaagagactggagagcctgcgggagctggccggcaaggaaaacctggaataccctagcgtgaccctgccacctcagcctcacaccaaggagggcgttgatgcctacaacgaagtgatcgcccgggtgcgaatgtgggtgaacctgaacctgtggcagaagctgaagctaagcagagatgatgccaagcctctgctgagactgaagggattcccttcctttcctctggtcgagagacaggccaacgaagtggactggtgggacatggtgtgtaacgtgaagaagctgatcaacgagaaaaaggaggatggcaaggtgttttggcagaatctggctggctacaagagacaggaagccctgagaccatacctgagcagcgaggaagatcggaagaagggaaagaaattcgctcggtaccagctgggcgacctgctgctgcacctggaaaagaagcacggcgaggactggggaaaggtgtacgacgaggcctgggagcggattgacaagaaagtggaaggcctgagcaagcacatcaagctggaagaggaacggagaagcgaggacgcccagagcaaggccgccctgaccgactggctgcgggctaaggccagcttcgtgatcgagggcctgaaggaggccgacaaggacgagttctgcagatgcgagctgaagctgcagaagtggtacggggacctgcggggaaagcccttcgccatcgaagccgagaacagcatcctggacatcagcggcttcagcaagcagtacaactgtgccttcatctggcagaaggacggcgtgaagaagctgaacctgtacctgatcatcaactacttcaagggcggcaagctgcggttcaagaagatcaaacctgaagccttcgaagccaacagattctacaccgtgatcaacaaaaagagcggcgagatcgtgcccatggaggtgaacttcaacttcgacgaccccaacctgatcatcctgcctctggcctttggcaagagacagggcagagaattcatctggaacgacctgctgtccctggaaaccggcagcctgaagctggccaacggaagagtgatcgagaagacactgtacaacagaagaacccggcaggatgagcctgccctgttcgtggccctgaccttcgagcggcgggaggtcctggactcctccaatatcaaaccaatgaacctgatcggcgtggcaagaggcgaaaacatccccgccgtgatcgccctgaccgaccccgagggctgcccactgagccggtttaaggatagcctgggaaacccaacccacatcctgagaatcggcgagagctataaggagaagcagcggaccatccaggccaagaaggaggtggagcagcggagagccggcggctacagccggaagtacgccagcaaagccaagaatctggcagacgatatggtgagaaacaccgctagagatctgctgtactacgccgtgacccaggatgccatgctgatcttcgccaacctgagccggggcttcggccggcagggcaagcggaccttcatggccgagagacagtacacacggatggaggactggctgaccgccaagctggcctacgagggcctgagcaagacctacctgtccaagacactggcccagtacacctccaagacatgcagcaactgtgggtttaccatcaccagcgccgactacgacagggtgctggagaagctgaagaagacagcaacaggctggatgaccacaattaacggcaaggagctgaaggtggagggccagattacctactacaacagatacaagagacagaacgtagtcaaggacctgtccgtcgagctggatagactgagcgaagaatctgtgaacaacgacatctcctcctggacaaagggcagaagcggagaagctctgagcctcctgaagaaaagattctcccatagacccgtgcaggagaagttcgtgtgcctgaactgcggcttcgagacacacgcagccgagcaagccgccctgaacatcgccagatcctggctgttcctgcggagccaggagtacaagaaataccagacaaacaagacaaccggcaacaccgataagagagccttcgtcgagacctggcagtccttttaccggaagaagcttaaggaggtgtggaaacctgccgtgcggtctggcggatctggcggaggctccaccagccccaagaaaaagagaaaagtctaagctgccttctgcggggcttgccttctggccatgcccttcttctctcccttgcacctgtacctcttggtctttgaataaagcctgagtaggaaggctagcaaaaaaaaaaaaaaaaaaaaaaaaaaaaaaaaaaaaaaaaaaaaaaaaaaaaaaaaaaaaaaaaaaaaaaaaaaaaaaaa

SEQ ID NO: 9559 - RNA, 8787 nt, synthetic construct
  source 1..8787: mol_type = other RNA
aggaaataagagagaaaagaagagtaagaagaaatataagagccaccatggcccctaagaagaagcgtaaagtgagccggatgaaccacgaccaggagttcgacccccctaaggtgtaccctcccgtccccgccgagaagagaaagcccatccgggtcctgagcctgttcgatggcatcgccaccggtctgctggtgctgaaggacctgggcatccaggtggataggtacattgcctccgaggtgtgcgaggactccatcaccgtgggaatggtgcgtcatcagggcaagatcatgtacgtgggcgacgtgcggagcgtgacacagaagcatatccaggagtggggccctttcgacctggtgatcggcggcagcccttgcaatgacctgagcatcgtgaacccagcccggaagggcctgtacgagggaaccggcagactgttcttcgagttttacagactgctgcacgacgcccggcctaaggaaggcgacgaccggcccttcttttggctgttcgagaatgtggtggccatgggagtcagcgacaagcgggatattagccggttcctggagagcaaccccgtgatgatcgatgccaaggaagtgagcgccgcccaccgggccagatacttctggggcaatctgcctggcatgaacagacccctggccagcaccgtgaacgacaagctggagctgcaggagtgcctggagcacggccggatcgccaagttcagcaaggtgagaaccatcaccacccgaagcaacagcatcaaacaaggcaaggaccagcactttcctgtgttcatgaacgagaaggaggacatcctgtggtgtaccgagatggagagagtgttcgggttcccagtccactacacagatgtcagcaacatgtctagactggccagacagagactgctgggaagaagctggtccgtccctgtgatcagacacctgttcgcccctctgaaggagtacttcgcctgcgtgagcagcggcaacagcaacgccaacagccggggccccagcttctctagcggcctggtgccactgtccctgagagggagccacatgggccccatggagatctacaaaaccgtgagcgcctggaagcggcagcctgtgcgcgtgctgagcctgtttcggaatatcgataaagtcctgaaaagcctgggattcctggagagcggctctggctccggcggtggcaccctgaagtacgtggaggatgtgacaaacgtggtcagacgggatgtggagaagtggggccccttcgatctggtgtacggcagcacccaacccctgggcagctcttgtgaccggtgccctggctggtacatgtttcagttccaccggatcctgcagtacgccctgccgagacaggagtcccagcggccattcttttggattttcatggacaacttgctgctgaccgaggatgaccaggaaactaccactcggttcctgcagaccgaagccgtgaccctgcaggacgtgagaggccgggactaccagaacgccatgcgggtgtggtccaacatccctggactgaaaagcaagcacgcacctctgacccctaaagaagaggagtacctgcaggcccaggtgcggagcagaagcaagctggacgcccctaaggtggatctgctggtgaagaattgcctcctgcccctgagagagtacttcaagtatttcagccagaatagtctgcccctgggaggcagcggcggcggcatgagcctgggcagcgagctgttcagggacgtggccatcgtgttcagccaggaggagtggcagtggctggcccccgcccagagggacctgtacagggacgtgatgctggagacctacagcaacctggtgagcctgggcctggccgtgagcaagcccgacgtgatcagcttcctggagcagggcaaggagccctggatggtggagagggtggtgagcggcggcctgtgccccggcgccaagggcggcggcccaagcagcggcgcccctcctcccagcggcggcaggcggcccaagcagcggcgcccctcctcccagcggcggcagcccagccggctccccaacctctaccgaggagggcacctctgagtccgccacccccgagagcggccctggcacctccaccgagcccagcgagggcagcgcacccggcagccctgccggcagccccacctccacagaggagggaaccagcaccgagcccagcgaaggcagcgccccaggcaccagcaccgagcctagtgagcaggagattaaacggatcaacaagatcagaagaagacttgtgaaagacagcaacaccaagaaggccggcaagacaggccccatgaaaaccctgctggttagagtgatgacacccgatctgagagagcggctggaaaacctgagaaagaagcctgaaaatatcccccagcccatcagcaatacatctagagccaacctgaataagctgctgaccgattacaccgaaatgaagaaggcgatcctgcatgtgtactgggaagagttccagaaggaccctgtgggcctgatgagccgggtggcccagcctgccagcaagaagatcgatcagaacaagctgaaacctgagatggacgagaagggcaacctgaccaccgccggctttgcctgctctcagtgtggccagcccctgttcgtgtacaagctggagcaggtgtctgagaagggcaaggcttacaccaactacttcggacggtgcaatgtggccgagcacgaaaagctgatcctgctggcccagctgaagcccgagaaggatagcgacgaagccgtgacatatagcctgggaaagtttgggcagagggccctggatttctacagcattcatgtgaccaaggagtccacccaccccgtgaagcccctggcccagatcgccggaaacagatacgcctccggacctgtgggaaaggccctgagcgacgcatgtatgggcacaatcgcctccttcctgtctaagtaccaggacatcatcatcgaacaccagaaggtggtgaagggcaaccagaagagactggagagcctgcgggagctggccggcaaggaaaacctggaataccctagcgtgaccctgccacctcagcctcacaccaaggagggcgttgatgcctacaacgaagtgatcgcccgggtgcgaatgtgggtgaacctgaacctgtggcagaagctgaagctaagcagagatgatgccaagcctctgctgagactgaagggattcccttcctttcctctggtcgagagacaggccaacgaagtggactggtgggacatggtgtgtaacgtgaagaagctgatcaacgagaaaaaggaggatggcaaggtgttttggcagaatctggctggctacaagagacaggaagccctgagaccatacctgagcagcgaggaagatcggaagaagggaaagaaattcgctcggtaccagctgggcgacctgctgctgcacctggaaaagaagcacggcgaggactggggaaaggtgtacgacgaggcctgggagcggattgacaagaaagtggaaggcctgagcaagcacatcaagctggaagaggaacggagaagcgaggacgcccagagcaaggccgccctgaccgactggctgcgggctaaggccagcttcgtgatcgagggcctgaaggaggccgacaaggacgagttctgcagatgcgagctgaagctgcagaagtggtacggggacctgcggggaaagcccttcgccatcgaagccgagaacagcatcctggacatcagcggcttcagcaagcagtacaactgtgccttcatctggcagaaggacggcgtgaagaagctgaacctgtacctgatcatcaactacttcaagggcggcaagctgcggttcaagaagatcaaacctgaagccttcgaagccaacagattctacaccgtgatcaacaaaaagagcggcgagatcgtgcccatggaggtgaacttcaacttcgacgaccccaacctgatcatcctgcctctggcctttggcaagagacagggcagagaattcatctggaacgacctgctgtccctggaaaccggcagcctgaagctggccaacggaagagtgatcgagaagacactgtacaacagaagaacccggcaggatgagcctgccctgttcgtggccctgaccttcgagcggcgggaggtcctggactcctccaatatcaaaccaatgaacctgatcggcgtggcaagaggcgaaaacatccccgccgtgatcgccctgaccgaccccgagggctgcccactgagccggtttaaggatagcctgggaaacccaacccacatcctgagaatcggcgagagctataaggagaagcagcggaccatccaggccaagaaggaggtggagcagcggagagccggcggctacagccggaagtacgccagcaaagccaagaatctggcagacgatatggtgagaaacaccgctagagatctgctgtactacgccgtgacccaggatgccatgctgatcttcgccaacctgagccggggcttcggccggcagggcaagcggaccttcatggccgagagacagtacacacggatggaggactggctgaccgccaagctggcctacgagggcctgagcaagacctacctgtccaagacactggcccagtacacctccaagacatgcagcaactgtgggtttaccatcaccagcgccgactacgacagggtgctggagaagctgaagaagacagcaacaggctggatgaccacaattaacggcaaggagctgaaggtggagggccagattacctactacaacagatacaagagacagaacgtagtcaaggacctgtccgtcgagctggatagactgagcgaagaatctgtgaacaacgacatctcctcctggacaaagggcagaagcggagaagctctgagcctcctgaagaaaagattctcccatagacccgtgcaggagaagttcgtgtgcctgaactgcggcttcgagacacacgcagccgagcaagccgccctgaacatcgccagatcctggctgttcctgcggagccaggagtacaagaaataccagacaaacaagacaaccggcaacaccgataagagagccttcgtcgagacctggcagtccttttaccggaagaagcttaaggaggtgtggaaacctgccgtgcggtctggcggatctggcggaggctccaccagccccaagaaaaagagaaaagtctaagctgccttctgcggggcttgccttctggccatgcccttcttctctcccttgcacctgtacctcttggtctttgaataaagcctgagtaggaaggctagcaaaaaaaaaaaaaaaaaaaaaaaaaaaaaaaaaaaaaaaaaaaaaaaaaaaaaaaaaaaaaaaaaaaaaaaaaaaaaaaagcccagccggctccccaacctctaccgaggagggcacctctgagtccgccacccccgagagcggccctggcacctccaccgagcccagcgagggcagcgcacccggcagccctgccggcagccccacctccacagaggagggaaccagcaccgagcccagcgaaggcagcgccccaggcaccagcaccgagcctagtgagcaggagattaaacggatcaacaagatcagaagaagacttgtgaaagacagcaacaccaagaaggccggcaagacaggccccatgaaaaccctgctggttagagtgatgacacccgatctgagagagcggctggaaaacctgagaaagaagcctgaaaatatcccccagcccatcagcaatacatctagagccaacctgaataagctgctgaccgattacaccgaaatgaagaaggcgatcctgcatgtgtactgggaagagttccagaaggaccctgtgggcctgatgagccgggtggcccagcctgccagcaagaagatcgatcagaacaagctgaaacctgagatggacgagaagggcaacctgaccaccgccggctttgcctgctctcagtgtggccagcccctgttcgtgtacaagctggagcaggtgtctgagaagggcaaggcttacaccaactacttcggacggtgcaatgtggccgagcacgaaaagctgatcctgctggcccagctgaagcccgagaaggatagcgacgaagccgtgacatatagcctgggaaagtttgggcagagggccctggatttctacagcattcatgtgaccaaggagtccacccaccccgtgaagcccctggcccagatcgccggaaacagatacgcctccggacctgtgggaaaggccctgagcgacgcatgtatgggcacaatcgcctccttcctgtctaagtaccaggacatcatcatcgaacaccagaaggtggtgaagggcaaccagaagagactggagagcctgcgggagctggccggcaaggaaaacctggaataccctagcgtgaccctgccacctcagcctcacaccaaggagggcgttgatgcctacaacgaagtgatcgcccgggtgcgaatgtgggtgaacctgaacctgtggcagaagctgaagctaagcagagatgatgccaagcctctgctgagactgaagggattcccttcctttcctctggtcgagagacaggccaacgaagtggactggtgggacatggtgtgtaacgtgaagaagctgatcaacgagaaaaaggaggatggcaaggtgttttggcagaatctggctggctacaagagacaggaagccctgagaccatacctgagcagcgaggaagatcggaagaagggaaagaaattcgctcggtaccagctgggcgacctgctgctgcacctggaaaagaagcacggcgaggactggggaaaggtgtacgacgaggcctgggagcggattgacaagaaagtggaaggcctgagcaagcacatcaagctggaagaggaacggagaagcgaggacgcccagagcaaggccgccctgaccgactggctgcgggctaaggccagcttcgtgatcgagggcctgaaggaggccgacaaggacgagttctgcagatgcgagctgaagctgcagaagtggtacggggacctgcggggaaagcccttcgccatcgaagccgagaacagcatcctggacatcagcggcttcagcaagcagtacaactgtgccttcatctggcagaaggacggcgtgaagaagctgaacctgtacctgatcatcaactacttcaagggcggcaagctgcggttcaagaagatcaaacctgaagccttcgaagccaacagattctacaccgtgatcaacaaaaagagcggcgagatcgtgcccatggaggtgaacttcaacttcgacgaccccaacctgatcatcctgcctctggcctttggcaagagacagggcagagaattcatctggaacgacctgctgtccctggaaaccggcagcctgaagctggccaacggaagagtgatcgagaagacactgtacaacagaagaacccggcaggatgagcctgccctgttcgtggccctgaccttcgagcggcgggaggtcctggactcctccaatatcaaaccaatgaacctgatcggcgtggcaagaggcgaaaacatccccgccgtgatcgccctgaccgaccccgagggctgcccactgagccggtttaaggatagcctgggaaacccaacccacatcctgagaatcggcgagagctataaggagaagcagcggaccatccaggccaagaaggaggtggagcagcggagagccggcggctacagccggaagtacgccagcaaagccaagaatctggcagacgatatggtgagaaacaccgctagagatctgctgtactacgccgtgacccaggatgccatgctgatcttcgccaacctgagccggggcttcggccggcagggcaagcggaccttcatggccgagagacagtacacacggatggaggactggctgaccgccaagctggcctacgagggcctgagcaagacctacctgtccaagacactggcccagtacacctccaagacatgcagcaactgtgggtttaccatcaccagcgccgactacgacagggtgctggagaagctgaagaagacagcaacaggctggatgaccacaattaacggcaaggagctgaaggtggagggccagattacctactacaacagatacaagagacagaacgtagtcaaggacctgtccgtcgagctggatagactgagcgaagaatctgtgaacaacgacatctcctcctggacaaagggcagaagcggagaagctctgagcctcctgaagaaaagattctcccatagacccgtgcaggagaagttcgtgtgcctgaactgcggcttcgagacacacgcagccgagcaagccgccctgaacatcgccagatcctggctgttcctgcggagccaggagtacaagaaataccagacaaacaagacaaccggcaacaccgataagagagccttcgtcgagacctggcagtccttttaccggaagaagcttaaggaggtgtggaaacctgccgtgcggtctggcggatctggcggaggctccaccagccccaagaaaaagagaaaagtctaagctgccttctgcggggcttgccttctggccatgcccttcttctctcccttgcacctgtacctcttggtctttgaataaagcctgagtaggaaggctagcaaaaaaaaaaaaaaaaaaaaaaaaaaaaaaaaaaaaaaaaaaaaaaaaaaaaaaaaaaaaaaaaaaaaaaaaaaaaaaaa

SEQ ID NO: 9560 - RNA, 8787 nt, synthetic construct
  source 1..8787: mol_type = other RNA
aggaaataagagagaaaagaagagtaagaagaaatataagagccaccatggcccctaagaagaagcgtaaagtgagccggatgaaccacgaccaggagttcgacccccctaaggtgtaccctcccgtccccgccgagaagagaaagcccatccgggtcctgagcctgttcgatggcatcgccaccggtctgctggtgctgaaggacctgggcatccaggtggataggtacattgcctccgaggtgtgcgaggactccatcaccgtgggaatggtgcgtcatcagggcaagatcatgtacgtgggcgacgtgcggagcgtgacacagaagcatatccaggagtggggccctttcgacctggtgatcggcggcagcccttgcaatgacctgagcatcgtgaacccagcccggaagggcctgtacgagggaaccggcagactgttcttcgagttttacagactgctgcacgacgcccggcctaaggaaggcgacgaccggcccttcttttggctgttcgagaatgtggtggccatgggagtcagcgacaagcgggatattagccggttcctggagagcaaccccgtgatgatcgatgccaaggaagtgagcgccgcccaccgggccagatacttctggggcaatctgcctggcatgaacagacccctggccagcaccgtgaacgacaagctggagctgcaggagtgcctggagcacggccggatcgccaagttcagcaaggtgagaaccatcaccacccgaagcaacagcatcaaacaaggcaaggaccagcactttcctgtgttcatgaacgagaaggaggacatcctgtggtgtaccgagatggagagagtgttcgggttcccagtccactacacagatgtcagcaacatgtctagactggccagacagagactgctgggaagaagctggtccgtccctgtgatcagacacctgttcgcccctctgaaggagtacttcgcctgcgtgagcagcggcaacagcaacgccaacagccggggccccagcttctctagcggcctggtgccactgtccctgagagggagccacatgggccccatggagatctacaaaaccgtgagcgcctggaagcggcagcctgtgcgcgtgctgagcctgtttcggaatatcgataaagtcctgaaaagcctgggattcctggagagcggctctggctccggcggtggcaccctgaagtacgtggaggatgtgacaaacgtggtcagacgggatgtggagaagtggggccccttcgatctggtgtacggcagcacccaacccctgggcagctcttgtgaccggtgccctggctggtacatgtttcagttccaccggatcctgcagtacgccctgccgagacaggagtcccagcggccattcttttggattttcatggacaacttgctgctgaccgaggatgaccaggaaactaccactcggttcctgcagaccgaagccgtgaccctgcaggacgtgagaggccgggactaccagaacgccatgcgggtgtggtccaacatccctggactgaaaagcaagcacgcacctctgacccctaaagaagaggagtacctgcaggcccaggtgcggagcagaagcaagctggacgcccctaaggtggatctgctggtgaagaattgcctcctgcccctgagagagtacttcaagtatttcagccagaatagtctgcccctgggaggcagcggcggcggcagccaggagcccgtgaccttcgaggacgtggccgtgtacttcacccagaaccagtgggccagcctggaccccacccagagggccctgtacagggaggtgatgctggagaactacgccaacatcaccagcctggccttccccttccccaagcccgacctgatcctgcagctggagaggggcgaggccaggtggggcctggacccctggatcgccatcgagggcgaggccctgggcggcgtgcacggcggcccaagcagcggcgcccctcctcccagcggcggcaggcggcccaagcagcggcgcccctcctcccagcggcggcagcccagccggctccccaacctctaccgaggagggcacctctgagtccgccacccccgagagcggccctggcacctccaccgagcccagcgagggcagcgcacccggcagccctgccggcagccccacctccacagaggagggaaccagcaccgagcccagcgaaggcagcgccccaggcaccagcaccgagcctagtgagcaggagattaaacggatcaacaagatcagaagaagacttgtgaaagacagcaacaccaagaaggccggcaagacaggccccatgaaaaccctgctggttagagtgatgacacccgatctgagagagcggctggaaaacctgagaaagaagcctgaaaatatcccccagcccatcagcaatacatctagagccaacctgaataagctgctgaccgattacaccgaaatgaagaaggcgatcctgcatgtgtactgggaagagttccagaaggaccctgtgggcctgatgagccgggtggcccagcctgccagcaagaagatcgatcagaacaagctgaaacctgagatggacgagaagggcaacctgaccaccgccggctttgcctgctctcagtgtggccagcccctgttcgtgtacaagctggagcaggtgtctgagaagggcaaggcttacaccaactacttcggacggtgcaatgtggccgagcacgaaaagctgatcctgctggcccagctgaagcccgagaaggatagcgacgaagccgtgacatatagcctgggaaagtttgggcagagggccctggatttctacagcattcatgtgaccaaggagtccacccaccccgtgaagcccctggcccagatcgccggaaacagatacgcctccggacctgtgggaaaggccctgagcgacgcatgtatgggcacaatcgcctccttcctgtctaagtaccaggacatcatcatcgaacaccagaaggtggtgaagggcaaccagaagagactggagagcctgcgggagctggccggcaaggaaaacctggaataccctagcgtgaccctgccacctcagcctcacaccaaggagggcgttgatgcctacaacgaagtgatcgcccgggtgcgaatgtgggtgaacctgaacctgtggcagaagctgaagctaagcagagatgatgccaagcctctgctgagactgaagggattcccttcctttcctctggtcgagagacaggccaacgaagtggactggtgggacatggtgtgtaacgtgaagaagctgatcaacgagaaaaaggaggatggcaaggtgttttggcagaatctggctggctacaagagacaggaagccctgagaccatacctgagcagcgaggaagatcggaagaagggaaagaaattcgctcggtaccagctgggcgacctgctgctgcacctggaaaagaagcacggcgaggactggggaaaggtgtacgacgaggcctgggagcggattgacaagaaagtggaaggcctgagcaagcacatcaagctggaagaggaacggagaagcgaggacgcccagagcaaggccgccctgaccgactggctgcgggctaaggccagcttcgtgatcgagggcctgaaggaggccgacaaggacgagttctgcagatgcgagctgaagctgcagaagtggtacggggacctgcggggaaagcccttcgccatcgaagccgagaacagcatcctggacatcagcggcttcagcaagcagtacaactgtgccttcatctggcagaaggacggcgtgaagaagctgaacctgtacctgatcatcaactacttcaagggcggcaagctgcggttcaagaagatcaaacctgaagccttcgaagccaacagattctacaccgtgatcaacaaaaagagcggcgagatcgtgcccatggaggtgaacttcaacttcgacgaccccaacctgatcatcctgcctctggcctttggcaagagacagggcagagaattcatctggaacgacctgctgtccctggaaaccggcagcctgaagctggccaacggaagagtgatcgagaagacactgtacaacagaagaacccggcaggatgagcctgccctgttcgtggccctgaccttcgagcggcgggaggtcctggactcctccaatatcaaaccaatgaacctgatcggcgtggcaagaggcgaaaacatccccgccgtgatcgccctgaccgaccccgagggctgcccactgagccggtttaaggatagcctgggaaacccaacccacatcctgagaatcggcgagagctataaggagaagcagcggaccatccaggccaagaaggaggtggagcagcggagagccggcggctacagccggaagtacgccagcaaagccaagaatctggcagacgatatggtgagaaacaccgctagagatctgctgtactacgccgtgacccaggatgccatgctgatcttcgccaacctgagccggggcttcggccggcagggcaagcggaccttcatggccgagagacagtacacacggatggaggactggctgaccgccaagctggcctacgagggcctgagcaagacctacctgtccaagacactggcccagtacacctccaagacatgcagcaactgtgggtttaccatcaccagcgccgactacgacagggtgctggagaagctgaagaagacagcaacaggctggatgaccacaattaacggcaaggagctgaaggtggagggccagattacctactacaacagatacaagagacagaacgtagtcaaggacctgtccgtcgagctggatagactgagcgaagaatctgtgaacaacgacatctcctcctggacaaagggcagaagcggagaagctctgagcctcctgaagaaaagattctcccatagacccgtgcaggagaagttcgtgtgcctgaactgcggcttcgagacacacgcagccgagcaagccgccctgaacatcgccagatcctggctgttcctgcggagccaggagtacaagaaataccagacaaacaagacaaccggcaacaccgataagagagccttcgtcgagacctggcagtccttttaccggaagaagcttaaggaggtgtggaaacctgccgtgcggtctggcggatctggcggaggctccaccagccccaagaaaaagagaaaagtctaagctgccttctgcggggcttgccttctggccatgcccttcttctctcccttgcacctgtacctcttggtctttgaataaagcctgagtaggaaggctagcaaaaaaaaaaaaaaaaaaaaaaaaaaaaaaaaaaaaaaaaaaaaaaaaaaaaaaaaaaaaaaaaaaaaaaaaaaaaaaaagcccagccggctccccaacctctaccgaggagggcacctctgagtccgccacccccgagagcggccctggcacctccaccgagcccagcgagggcagcgcacccggcagccctgccggcagccccacctccacagaggagggaaccagcaccgagcccagcgaaggcagcgccccaggcaccagcaccgagcctagtgagcaggagattaaacggatcaacaagatcagaagaagacttgtgaaagacagcaacaccaagaaggccggcaagacaggccccatgaaaaccctgctggttagagtgatgacacccgatctgagagagcggctggaaaacctgagaaagaagcctgaaaatatcccccagcccatcagcaatacatctagagccaacctgaataagctgctgaccgattacaccgaaatgaagaaggcgatcctgcatgtgtactgggaagagttccagaaggaccctgtgggcctgatgagccgggtggcccagcctgccagcaagaagatcgatcagaacaagctgaaacctgagatggacgagaagggcaacctgaccaccgccggctttgcctgctctcagtgtggccagcccctgttcgtgtacaagctggagcaggtgtctgagaagggcaaggcttacaccaactacttcggacggtgcaatgtggccgagcacgaaaagctgatcctgctggcccagctgaagcccgagaaggatagcgacgaagccgtgacatatagcctgggaaagtttgggcagagggccctggatttctacagcattcatgtgaccaaggagtccacccaccccgtgaagcccctggcccagatcgccggaaacagatacgcctccggacctgtgggaaaggccctgagcgacgcatgtatgggcacaatcgcctccttcctgtctaagtaccaggacatcatcatcgaacaccagaaggtggtgaagggcaaccagaagagactggagagcctgcgggagctggccggcaaggaaaacctggaataccctagcgtgaccctgccacctcagcctcacaccaaggagggcgttgatgcctacaacgaagtgatcgcccgggtgcgaatgtgggtgaacctgaacctgtggcagaagctgaagctaagcagagatgatgccaagcctctgctgagactgaagggattcccttcctttcctctggtcgagagacaggccaacgaagtggactggtgggacatggtgtgtaacgtgaagaagctgatcaacgagaaaaaggaggatggcaaggtgttttggcagaatctggctggctacaagagacaggaagccctgagaccatacctgagcagcgaggaagatcggaagaagggaaagaaattcgctcggtaccagctgggcgacctgctgctgcacctggaaaagaagcacggcgaggactggggaaaggtgtacgacgaggcctgggagcggattgacaagaaagtggaaggcctgagcaagcacatcaagctggaagaggaacggagaagcgaggacgcccagagcaaggccgccctgaccgactggctgcgggctaaggccagcttcgtgatcgagggcctgaaggaggccgacaaggacgagttctgcagatgcgagctgaagctgcagaagtggtacggggacctgcggggaaagcccttcgccatcgaagccgagaacagcatcctggacatcagcggcttcagcaagcagtacaactgtgccttcatctggcagaaggacggcgtgaagaagctgaacctgtacctgatcatcaactacttcaagggcggcaagctgcggttcaagaagatcaaacctgaagccttcgaagccaacagattctacaccgtgatcaacaaaaagagcggcgagatcgtgcccatggaggtgaacttcaacttcgacgaccccaacctgatcatcctgcctctggcctttggcaagagacagggcagagaattcatctggaacgacctgctgtccctggaaaccggcagcctgaagctggccaacggaagagtgatcgagaagacactgtacaacagaagaacccggcaggatgagcctgccctgttcgtggccctgaccttcgagcggcgggaggtcctggactcctccaatatcaaaccaatgaacctgatcggcgtggcaagaggcgaaaacatccccgccgtgatcgccctgaccgaccccgagggctgcccactgagccggtttaaggatagcctgggaaacccaacccacatcctgagaatcggcgagagctataaggagaagcagcggaccatccaggccaagaaggaggtggagcagcggagagccggcggctacagccggaagtacgccagcaaagccaagaatctggcagacgatatggtgagaaacaccgctagagatctgctgtactacgccgtgacccaggatgccatgctgatcttcgccaacctgagccggggcttcggccggcagggcaagcggaccttcatggccgagagacagtacacacggatggaggactggctgaccgccaagctggcctacgagggcctgagcaagacctacctgtccaagacactggcccagtacacctccaagacatgcagcaactgtgggtttaccatcaccagcgccgactacgacagggtgctggagaagctgaagaagacagcaacaggctggatgaccacaattaacggcaaggagctgaaggtggagggccagattacctactacaacagatacaagagacagaacgtagtcaaggacctgtccgtcgagctggatagactgagcgaagaatctgtgaacaacgacatctcctcctggacaaagggcagaagcggagaagctctgagcctcctgaagaaaagattctcccatagacccgtgcaggagaagttcgtgtgcctgaactgcggcttcgagacacacgcagccgagcaagccgccctgaacatcgccagatcctggctgttcctgcggagccaggagtacaagaaataccagacaaacaagacaaccggcaacaccgataagagagccttcgtcgagacctggcagtccttttaccggaagaagcttaaggaggtgtggaaacctgccgtgcggtctggcggatctggcggaggctccaccagccccaagaaaaagagaaaagtctaagctgccttctgcggggcttgccttctggccatgcccttcttctctcccttgcacctgtacctcttggtctttgaataaagcctgagtaggaaggctagcaaaaaaaaaaaaaaaaaaaaaaaaaaaaaaaaaaaaaaaaaaaaaaaaaaaaaaaaaaaaaaaaaaaaaaaaaaaaaaaa

SEQ ID NO: 9561 - RNA, 8787 nt, synthetic construct
  source 1..8787: mol_type = other RNA
aggaaataagagagaaaagaagagtaagaagaaatataagagccaccatggcccctaagaagaagcgtaaagtgagccggatgaaccacgaccaggagttcgacccccctaaggtgtaccctcccgtccccgccgagaagagaaagcccatccgggtcctgagcctgttcgatggcatcgccaccggtctgctggtgctgaaggacctgggcatccaggtggataggtacattgcctccgaggtgtgcgaggactccatcaccgtgggaatggtgcgtcatcagggcaagatcatgtacgtgggcgacgtgcggagcgtgacacagaagcatatccaggagtggggccctttcgacctggtgatcggcggcagcccttgcaatgacctgagcatcgtgaacccagcccggaagggcctgtacgagggaaccggcagactgttcttcgagttttacagactgctgcacgacgcccggcctaaggaaggcgacgaccggcccttcttttggctgttcgagaatgtggtggccatgggagtcagcgacaagcgggatattagccggttcctggagagcaaccccgtgatgatcgatgccaaggaagtgagcgccgcccaccgggccagatacttctggggcaatctgcctggcatgaacagacccctggccagcaccgtgaacgacaagctggagctgcaggagtgcctggagcacggccggatcgccaagttcagcaaggtgagaaccatcaccacccgaagcaacagcatcaaacaaggcaaggaccagcactttcctgtgttcatgaacgagaaggaggacatcctgtggtgtaccgagatggagagagtgttcgggttcccagtccactacacagatgtcagcaacatgtctagactggccagacagagactgctgggaagaagctggtccgtccctgtgatcagacacctgttcgcccctctgaaggagtacttcgcctgcgtgagcagcggcaacagcaacgccaacagccggggccccagcttctctagcggcctggtgccactgtccctgagagggagccacatgggccccatggagatctacaaaaccgtgagcgcctggaagcggcagcctgtgcgcgtgctgagcctgtttcggaatatcgataaagtcctgaaaagcctgggattcctggagagcggctctggctccggcggtggcaccctgaagtacgtggaggatgtgacaaacgtggtcagacgggatgtggagaagtggggccccttcgatctggtgtacggcagcacccaacccctgggcagctcttgtgaccggtgccctggctggtacatgtttcagttccaccggatcctgcagtacgccctgccgagacaggagtcccagcggccattcttttggattttcatggacaacttgctgctgaccgaggatgaccaggaaactaccactcggttcctgcagaccgaagccgtgaccctgcaggacgtgagaggccgggactaccagaacgccatgcgggtgtggtccaacatccctggactgaaaagcaagcacgcacctctgacccctaaagaagaggagtacctgcaggcccaggtgcggagcagaagcaagctggacgcccctaaggtggatctgctggtgaagaattgcctcctgcccctgagagagtacttcaagtatttcagccagaatagtctgcccctgggaggcagcggcggcggcgtgaagttcgccgacgtggccgtgtacttcagccccgaggagtggggctgcctgaggcccgcccagagggccctgtacagggacgtgatgagggagaactacggccacctgggcgccctgggctgcgccggccccaagcccgccctgatcagctggctggagaggaacaccgaggactgggagcccgccgccctggacccccaggactgccccaggggcctgatggtgcagaggaagtggcccggcggcccaagcagcggcgcccctcctcccagcggcggcaggcggcccaagcagcggcgcccctcctcccagcggcggcagcccagccggctccccaacctctaccgaggagggcacctctgagtccgccacccccgagagcggccctggcacctccaccgagcccagcgagggcagcgcacccggcagccctgccggcagccccacctccacagaggagggaaccagcaccgagcccagcgaaggcagcgccccaggcaccagcaccgagcctagtgagcaggagattaaacggatcaacaagatcagaagaagacttgtgaaagacagcaacaccaagaaggccggcaagacaggccccatgaaaaccctgctggttagagtgatgacacccgatctgagagagcggctggaaaacctgagaaagaagcctgaaaatatcccccagcccatcagcaatacatctagagccaacctgaataagctgctgaccgattacaccgaaatgaagaaggcgatcctgcatgtgtactgggaagagttccagaaggaccctgtgggcctgatgagccgggtggcccagcctgccagcaagaagatcgatcagaacaagctgaaacctgagatggacgagaagggcaacctgaccaccgccggctttgcctgctctcagtgtggccagcccctgttcgtgtacaagctggagcaggtgtctgagaagggcaaggcttacaccaactacttcggacggtgcaatgtggccgagcacgaaaagctgatcctgctggcccagctgaagcccgagaaggatagcgacgaagccgtgacatatagcctgggaaagtttgggcagagggccctggatttctacagcattcatgtgaccaaggagtccacccaccccgtgaagcccctggcccagatcgccggaaacagatacgcctccggacctgtgggaaaggccctgagcgacgcatgtatgggcacaatcgcctccttcctgtctaagtaccaggacatcatcatcgaacaccagaaggtggtgaagggcaaccagaagagactggagagcctgcgggagctggccggcaaggaaaacctggaataccctagcgtgaccctgccacctcagcctcacaccaaggagggcgttgatgcctacaacgaagtgatcgcccgggtgcgaatgtgggtgaacctgaacctgtggcagaagctgaagctaagcagagatgatgccaagcctctgctgagactgaagggattcccttcctttcctctggtcgagagacaggccaacgaagtggactggtgggacatggtgtgtaacgtgaagaagctgatcaacgagaaaaaggaggatggcaaggtgttttggcagaatctggctggctacaagagacaggaagccctgagaccatacctgagcagcgaggaagatcggaagaagggaaagaaattcgctcggtaccagctgggcgacctgctgctgcacctggaaaagaagcacggcgaggactggggaaaggtgtacgacgaggcctgggagcggattgacaagaaagtggaaggcctgagcaagcacatcaagctggaagaggaacggagaagcgaggacgcccagagcaaggccgccctgaccgactggctgcgggctaaggccagcttcgtgatcgagggcctgaaggaggccgacaaggacgagttctgcagatgcgagctgaagctgcagaagtggtacggggacctgcggggaaagcccttcgccatcgaagccgagaacagcatcctggacatcagcggcttcagcaagcagtacaactgtgccttcatctggcagaaggacggcgtgaagaagctgaacctgtacctgatcatcaactacttcaagggcggcaagctgcggttcaagaagatcaaacctgaagccttcgaagccaacagattctacaccgtgatcaacaaaaagagcggcgagatcgtgcccatggaggtgaacttcaacttcgacgaccccaacctgatcatcctgcctctggcctttggcaagagacagggcagagaattcatctggaacgacctgctgtccctggaaaccggcagcctgaagctggccaacggaagagtgatcgagaagacactgtacaacagaagaacccggcaggatgagcctgccctgttcgtggccctgaccttcgagcggcgggaggtcctggactcctccaatatcaaaccaatgaacctgatcggcgtggcaagaggcgaaaacatccccgccgtgatcgccctgaccgaccccgagggctgcccactgagccggtttaaggatagcctgggaaacccaacccacatcctgagaatcggcgagagctataaggagaagcagcggaccatccaggccaagaaggaggtggagcagcggagagccggcggctacagccggaagtacgccagcaaagccaagaatctggcagacgatatggtgagaaacaccgctagagatctgctgtactacgccgtgacccaggatgccatgctgatcttcgccaacctgagccggggcttcggccggcagggcaagcggaccttcatggccgagagacagtacacacggatggaggactggctgaccgccaagctggcctacgagggcctgagcaagacctacctgtccaagacactggcccagtacacctccaagacatgcagcaactgtgggtttaccatcaccagcgccgactacgacagggtgctggagaagctgaagaagacagcaacaggctggatgaccacaattaacggcaaggagctgaaggtggagggccagattacctactacaacagatacaagagacagaacgtagtcaaggacctgtccgtcgagctggatagactgagcgaagaatctgtgaacaacgacatctcctcctggacaaagggcagaagcggagaagctctgagcctcctgaagaaaagattctcccatagacccgtgcaggagaagttcgtgtgcctgaactgcggcttcgagacacacgcagccgagcaagccgccctgaacatcgccagatcctggctgttcctgcggagccaggagtacaagaaataccagacaaacaagacaaccggcaacaccgataagagagccttcgtcgagacctggcagtccttttaccggaagaagcttaaggaggtgtggaaacctgccgtgcggtctggcggatctggcggaggctccaccagccccaagaaaaagagaaaagtctaagctgccttctgcggggcttgccttctggccatgcccttcttctctcccttgcacctgtacctcttggtctttgaataaagcctgagtaggaaggctagcaaaaaaaaaaaaaaaaaaaaaaaaaaaaaaaaaaaaaaaaaaaaaaaaaaaaaaaaaaaaaaaaaaaaaaaaaaaaaaaagcccagccggctccccaacctctaccgaggagggcacctctgagtccgccacccccgagagcggccctggcacctccaccgagcccagcgagggcagcgcacccggcagccctgccggcagccccacctccacagaggagggaaccagcaccgagcccagcgaaggcagcgccccaggcaccagcaccgagcctagtgagcaggagattaaacggatcaacaagatcagaagaagacttgtgaaagacagcaacaccaagaaggccggcaagacaggccccatgaaaaccctgctggttagagtgatgacacccgatctgagagagcggctggaaaacctgagaaagaagcctgaaaatatcccccagcccatcagcaatacatctagagccaacctgaataagctgctgaccgattacaccgaaatgaagaaggcgatcctgcatgtgtactgggaagagttccagaaggaccctgtgggcctgatgagccgggtggcccagcctgccagcaagaagatcgatcagaacaagctgaaacctgagatggacgagaagggcaacctgaccaccgccggctttgcctgctctcagtgtggccagcccctgttcgtgtacaagctggagcaggtgtctgagaagggcaaggcttacaccaactacttcggacggtgcaatgtggccgagcacgaaaagctgatcctgctggcccagctgaagcccgagaaggatagcgacgaagccgtgacatatagcctgggaaagtttgggcagagggccctggatttctacagcattcatgtgaccaaggagtccacccaccccgtgaagcccctggcccagatcgccggaaacagatacgcctccggacctgtgggaaaggccctgagcgacgcatgtatgggcacaatcgcctccttcctgtctaagtaccaggacatcatcatcgaacaccagaaggtggtgaagggcaaccagaagagactggagagcctgcgggagctggccggcaaggaaaacctggaataccctagcgtgaccctgccacctcagcctcacaccaaggagggcgttgatgcctacaacgaagtgatcgcccgggtgcgaatgtgggtgaacctgaacctgtggcagaagctgaagctaagcagagatgatgccaagcctctgctgagactgaagggattcccttcctttcctctggtcgagagacaggccaacgaagtggactggtgggacatggtgtgtaacgtgaagaagctgatcaacgagaaaaaggaggatggcaaggtgttttggcagaatctggctggctacaagagacaggaagccctgagaccatacctgagcagcgaggaagatcggaagaagggaaagaaattcgctcggtaccagctgggcgacctgctgctgcacctggaaaagaagcacggcgaggactggggaaaggtgtacgacgaggcctgggagcggattgacaagaaagtggaaggcctgagcaagcacatcaagctggaagaggaacggagaagcgaggacgcccagagcaaggccgccctgaccgactggctgcgggctaaggccagcttcgtgatcgagggcctgaaggaggccgacaaggacgagttctgcagatgcgagctgaagctgcagaagtggtacggggacctgcggggaaagcccttcgccatcgaagccgagaacagcatcctggacatcagcggcttcagcaagcagtacaactgtgccttcatctggcagaaggacggcgtgaagaagctgaacctgtacctgatcatcaactacttcaagggcggcaagctgcggttcaagaagatcaaacctgaagccttcgaagccaacagattctacaccgtgatcaacaaaaagagcggcgagatcgtgcccatggaggtgaacttcaacttcgacgaccccaacctgatcatcctgcctctggcctttggcaagagacagggcagagaattcatctggaacgacctgctgtccctggaaaccggcagcctgaagctggccaacggaagagtgatcgagaagacactgtacaacagaagaacccggcaggatgagcctgccctgttcgtggccctgaccttcgagcggcgggaggtcctggactcctccaatatcaaaccaatgaacctgatcggcgtggcaagaggcgaaaacatccccgccgtgatcgccctgaccgaccccgagggctgcccactgagccggtttaaggatagcctgggaaacccaacccacatcctgagaatcggcgagagctataaggagaagcagcggaccatccaggccaagaaggaggtggagcagcggagagccggcggctacagccggaagtacgccagcaaagccaagaatctggcagacgatatggtgagaaacaccgctagagatctgctgtactacgccgtgacccaggatgccatgctgatcttcgccaacctgagccggggcttcggccggcagggcaagcggaccttcatggccgagagacagtacacacggatggaggactggctgaccgccaagctggcctacgagggcctgagcaagacctacctgtccaagacactggcccagtacacctccaagacatgcagcaactgtgggtttaccatcaccagcgccgactacgacagggtgctggagaagctgaagaagacagcaacaggctggatgaccacaattaacggcaaggagctgaaggtggagggccagattacctactacaacagatacaagagacagaacgtagtcaaggacctgtccgtcgagctggatagactgagcgaagaatctgtgaacaacgacatctcctcctggacaaagggcagaagcggagaagctctgagcctcctgaagaaaagattctcccatagacccgtgcaggagaagttcgtgtgcctgaactgcggcttcgagacacacgcagccgagcaagccgccctgaacatcgccagatcctggctgttcctgcggagccaggagtacaagaaataccagacaaacaagacaaccggcaacaccgataagagagccttcgtcgagacctggcagtccttttaccggaagaagcttaaggaggtgtggaaacctgccgtgcggtctggcggatctggcggaggctccaccagccccaagaaaaagagaaaagtctaagctgccttctgcggggcttgccttctggccatgcccttcttctctcccttgcacctgtacctcttggtctttgaataaagcctgagtaggaaggctagcaaaaaaaaaaaaaaaaaaaaaaaaaaaaaaaaaaaaaaaaaaaaaaaaaaaaaaaaaaaaaaaaaaaaaaaaaaaaaaaa

SEQ ID NO: 9562 - RNA, 8787 nt, synthetic construct
  source 1..8787: mol_type = other RNA
aggaaataagagagaaaagaagagtaagaagaaatataagagccaccatggcccctaagaagaagcgtaaagtgagccggatgaaccacgaccaggagttcgacccccctaaggtgtaccctcccgtccccgccgagaagagaaagcccatccgggtcctgagcctgttcgatggcatcgccaccggtctgctggtgctgaaggacctgggcatccaggtggataggtacattgcctccgaggtgtgcgaggactccatcaccgtgggaatggtgcgtcatcagggcaagatcatgtacgtgggcgacgtgcggagcgtgacacagaagcatatccaggagtggggccctttcgacctggtgatcggcggcagcccttgcaatgacctgagcatcgtgaacccagcccggaagggcctgtacgagggaaccggcagactgttcttcgagttttacagactgctgcacgacgcccggcctaaggaaggcgacgaccggcccttcttttggctgttcgagaatgtggtggccatgggagtcagcgacaagcgggatattagccggttcctggagagcaaccccgtgatgatcgatgccaaggaagtgagcgccgcccaccgggccagatacttctggggcaatctgcctggcatgaacagacccctggccagcaccgtgaacgacaagctggagctgcaggagtgcctggagcacggccggatcgccaagttcagcaaggtgagaaccatcaccacccgaagcaacagcatcaaacaaggcaaggaccagcactttcctgtgttcatgaacgagaaggaggacatcctgtggtgtaccgagatggagagagtgttcgggttcccagtccactacacagatgtcagcaacatgtctagactggccagacagagactgctgggaagaagctggtccgtccctgtgatcagacacctgttcgcccctctgaaggagtacttcgcctgcgtgagcagcggcaacagcaacgccaacagccggggccccagcttctctagcggcctggtgccactgtccctgagagggagccacatgggccccatggagatctacaaaaccgtgagcgcctggaagcggcagcctgtgcgcgtgctgagcctgtttcggaatatcgataaagtcctgaaaagcctgggattcctggagagcggctctggctccggcggtggcaccctgaagtacgtggaggatgtgacaaacgtggtcagacgggatgtggagaagtggggccccttcgatctggtgtacggcagcacccaacccctgggcagctcttgtgaccggtgccctggctggtacatgtttcagttccaccggatcctgcagtacgccctgccgagacaggagtcccagcggccattcttttggattttcatggacaacttgctgctgaccgaggatgaccaggaaactaccactcggttcctgcagaccgaagccgtgaccctgcaggacgtgagaggccgggactaccagaacgccatgcgggtgtggtccaacatccctggactgaaaagcaagcacgcacctctgacccctaaagaagaggagtacctgcaggcccaggtgcggagcagaagcaagctggacgcccctaaggtggatctgctggtgaagaattgcctcctgcccctgagagagtacttcaagtatttcagccagaatagtctgcccctgggaggcagcggcggcggcgaccccgcccaggtgcccgtggccgccgacctgctgaccgaccacgaggagcagggctacgtgaccttcgaggacgtggccgtgtacttcagccaggaggagtggaggctgctggacgacgcccagaggctgctgtacaggaacgtgatgctggagaacttcaccctgctggccagcctgggcctggccagcagcaagacccacgagatcacccagctggagagctgggaggagcccttcatgggcggcccaagcagcggcgcccctcctcccagcggcggcaggcggcccaagcagcggcgcccctcctcccagcggcggcagcccagccggctccccaacctctaccgaggagggcacctctgagtccgccacccccgagagcggccctggcacctccaccgagcccagcgagggcagcgcacccggcagccctgccggcagccccacctccacagaggagggaaccagcaccgagcccagcgaaggcagcgccccaggcaccagcaccgagcctagtgagcaggagattaaacggatcaacaagatcagaagaagacttgtgaaagacagcaacaccaagaaggccggcaagacaggccccatgaaaaccctgctggttagagtgatgacacccgatctgagagagcggctggaaaacctgagaaagaagcctgaaaatatcccccagcccatcagcaatacatctagagccaacctgaataagctgctgaccgattacaccgaaatgaagaaggcgatcctgcatgtgtactgggaagagttccagaaggaccctgtgggcctgatgagccgggtggcccagcctgccagcaagaagatcgatcagaacaagctgaaacctgagatggacgagaagggcaacctgaccaccgccggctttgcctgctctcagtgtggccagcccctgttcgtgtacaagctggagcaggtgtctgagaagggcaaggcttacaccaactacttcggacggtgcaatgtggccgagcacgaaaagctgatcctgctggcccagctgaagcccgagaaggatagcgacgaagccgtgacatatagcctgggaaagtttgggcagagggccctggatttctacagcattcatgtgaccaaggagtccacccaccccgtgaagcccctggcccagatcgccggaaacagatacgcctccggacctgtgggaaaggccctgagcgacgcatgtatgggcacaatcgcctccttcctgtctaagtaccaggacatcatcatcgaacaccagaaggtggtgaagggcaaccagaagagactggagagcctgcgggagctggccggcaaggaaaacctggaataccctagcgtgaccctgccacctcagcctcacaccaaggagggcgttgatgcctacaacgaagtgatcgcccgggtgcgaatgtgggtgaacctgaacctgtggcagaagctgaagctaagcagagatgatgccaagcctctgctgagactgaagggattcccttcctttcctctggtcgagagacaggccaacgaagtggactggtgggacatggtgtgtaacgtgaagaagctgatcaacgagaaaaaggaggatggcaaggtgttttggcagaatctggctggctacaagagacaggaagccctgagaccatacctgagcagcgaggaagatcggaagaagggaaagaaattcgctcggtaccagctgggcgacctgctgctgcacctggaaaagaagcacggcgaggactggggaaaggtgtacgacgaggcctgggagcggattgacaagaaagtggaaggcctgagcaagcacatcaagctggaagaggaacggagaagcgaggacgcccagagcaaggccgccctgaccgactggctgcgggctaaggccagcttcgtgatcgagggcctgaaggaggccgacaaggacgagttctgcagatgcgagctgaagctgcagaagtggtacggggacctgcggggaaagcccttcgccatcgaagccgagaacagcatcctggacatcagcggcttcagcaagcagtacaactgtgccttcatctggcagaaggacggcgtgaagaagctgaacctgtacctgatcatcaactacttcaagggcggcaagctgcggttcaagaagatcaaacctgaagccttcgaagccaacagattctacaccgtgatcaacaaaaagagcggcgagatcgtgcccatggaggtgaacttcaacttcgacgaccccaacctgatcatcctgcctctggcctttggcaagagacagggcagagaattcatctggaacgacctgctgtccctggaaaccggcagcctgaagctggccaacggaagagtgatcgagaagacactgtacaacagaagaacccggcaggatgagcctgccctgttcgtggccctgaccttcgagcggcgggaggtcctggactcctccaatatcaaaccaatgaacctgatcggcgtggcaagaggcgaaaacatccccgccgtgatcgccctgaccgaccccgagggctgcccactgagccggtttaaggatagcctgggaaacccaacccacatcctgagaatcggcgagagctataaggagaagcagcggaccatccaggccaagaaggaggtggagcagcggagagccggcggctacagccggaagtacgccagcaaagccaagaatctggcagacgatatggtgagaaacaccgctagagatctgctgtactacgccgtgacccaggatgccatgctgatcttcgccaacctgagccggggcttcggccggcagggcaagcggaccttcatggccgagagacagtacacacggatggaggactggctgaccgccaagctggcctacgagggcctgagcaagacctacctgtccaagacactggcccagtacacctccaagacatgcagcaactgtgggtttaccatcaccagcgccgactacgacagggtgctggagaagctgaagaagacagcaacaggctggatgaccacaattaacggcaaggagctgaaggtggagggccagattacctactacaacagatacaagagacagaacgtagtcaaggacctgtccgtcgagctggatagactgagcgaagaatctgtgaacaacgacatctcctcctggacaaagggcagaagcggagaagctctgagcctcctgaagaaaagattctcccatagacccgtgcaggagaagttcgtgtgcctgaactgcggcttcgagacacacgcagccgagcaagccgccctgaacatcgccagatcctggctgttcctgcggagccaggagtacaagaaataccagacaaacaagacaaccggcaacaccgataagagagccttcgtcgagacctggcagtccttttaccggaagaagcttaaggaggtgtggaaacctgccgtgcggtctggcggatctggcggaggctccaccagccccaagaaaaagagaaaagtctaagctgccttctgcggggcttgccttctggccatgcccttcttctctcccttgcacctgtacctcttggtctttgaataaagcctgagtaggaaggctagcaaaaaaaaaaaaaaaaaaaaaaaaaaaaaaaaaaaaaaaaaaaaaaaaaaaaaaaaaaaaaaaaaaaaaaaaaaaaaaaagcccagccggctccccaacctctaccgaggagggcacctctgagtccgccacccccgagagcggccctggcacctccaccgagcccagcgagggcagcgcacccggcagccctgccggcagccccacctccacagaggagggaaccagcaccgagcccagcgaaggcagcgccccaggcaccagcaccgagcctagtgagcaggagattaaacggatcaacaagatcagaagaagacttgtgaaagacagcaacaccaagaaggccggcaagacaggccccatgaaaaccctgctggttagagtgatgacacccgatctgagagagcggctggaaaacctgagaaagaagcctgaaaatatcccccagcccatcagcaatacatctagagccaacctgaataagctgctgaccgattacaccgaaatgaagaaggcgatcctgcatgtgtactgggaagagttccagaaggaccctgtgggcctgatgagccgggtggcccagcctgccagcaagaagatcgatcagaacaagctgaaacctgagatggacgagaagggcaacctgaccaccgccggctttgcctgctctcagtgtggccagcccctgttcgtgtacaagctggagcaggtgtctgagaagggcaaggcttacaccaactacttcggacggtgcaatgtggccgagcacgaaaagctgatcctgctggcccagctgaagcccgagaaggatagcgacgaagccgtgacatatagcctgggaaagtttgggcagagggccctggatttctacagcattcatgtgaccaaggagtccacccaccccgtgaagcccctggcccagatcgccggaaacagatacgcctccggacctgtgggaaaggccctgagcgacgcatgtatgggcacaatcgcctccttcctgtctaagtaccaggacatcatcatcgaacaccagaaggtggtgaagggcaaccagaagagactggagagcctgcgggagctggccggcaaggaaaacctggaataccctagcgtgaccctgccacctcagcctcacaccaaggagggcgttgatgcctacaacgaagtgatcgcccgggtgcgaatgtgggtgaacctgaacctgtggcagaagctgaagctaagcagagatgatgccaagcctctgctgagactgaagggattcccttcctttcctctggtcgagagacaggccaacgaagtggactggtgggacatggtgtgtaacgtgaagaagctgatcaacgagaaaaaggaggatggcaaggtgttttggcagaatctggctggctacaagagacaggaagccctgagaccatacctgagcagcgaggaagatcggaagaagggaaagaaattcgctcggtaccagctgggcgacctgctgctgcacctggaaaagaagcacggcgaggactggggaaaggtgtacgacgaggcctgggagcggattgacaagaaagtggaaggcctgagcaagcacatcaagctggaagaggaacggagaagcgaggacgcccagagcaaggccgccctgaccgactggctgcgggctaaggccagcttcgtgatcgagggcctgaaggaggccgacaaggacgagttctgcagatgcgagctgaagctgcagaagtggtacggggacctgcggggaaagcccttcgccatcgaagccgagaacagcatcctggacatcagcggcttcagcaagcagtacaactgtgccttcatctggcagaaggacggcgtgaagaagctgaacctgtacctgatcatcaactacttcaagggcggcaagctgcggttcaagaagatcaaacctgaagccttcgaagccaacagattctacaccgtgatcaacaaaaagagcggcgagatcgtgcccatggaggtgaacttcaacttcgacgaccccaacctgatcatcctgcctctggcctttggcaagagacagggcagagaattcatctggaacgacctgctgtccctggaaaccggcagcctgaagctggccaacggaagagtgatcgagaagacactgtacaacagaagaacccggcaggatgagcctgccctgttcgtggccctgaccttcgagcggcgggaggtcctggactcctccaatatcaaaccaatgaacctgatcggcgtggcaagaggcgaaaacatccccgccgtgatcgccctgaccgaccccgagggctgcccactgagccggtttaaggatagcctgggaaacccaacccacatcctgagaatcggcgagagctataaggagaagcagcggaccatccaggccaagaaggaggtggagcagcggagagccggcggctacagccggaagtacgccagcaaagccaagaatctggcagacgatatggtgagaaacaccgctagagatctgctgtactacgccgtgacccaggatgccatgctgatcttcgccaacctgagccggggcttcggccggcagggcaagcggaccttcatggccgagagacagtacacacggatggaggactggctgaccgccaagctggcctacgagggcctgagcaagacctacctgtccaagacactggcccagtacacctccaagacatgcagcaactgtgggtttaccatcaccagcgccgactacgacagggtgctggagaagctgaagaagacagcaacaggctggatgaccacaattaacggcaaggagctgaaggtggagggccagattacctactacaacagatacaagagacagaacgtagtcaaggacctgtccgtcgagctggatagactgagcgaagaatctgtgaacaacgacatctcctcctggacaaagggcagaagcggagaagctctgagcctcctgaagaaaagattctcccatagacccgtgcaggagaagttcgtgtgcctgaactgcggcttcgagacacacgcagccgagcaagccgccctgaacatcgccagatcctggctgttcctgcggagccaggagtacaagaaataccagacaaacaagacaaccggcaacaccgataagagagccttcgtcgagacctggcagtccttttaccggaagaagcttaaggaggtgtggaaacctgccgtgcggtctggcggatctggcggaggctccaccagccccaagaaaaagagaaaagtctaagctgccttctgcggggcttgccttctggccatgcccttcttctctcccttgcacctgtacctcttggtctttgaataaagcctgagtaggaaggctagcaaaaaaaaaaaaaaaaaaaaaaaaaaaaaaaaaaaaaaaaaaaaaaaaaaaaaaaaaaaaaaaaaaaaaaaaaaaaaaaa

SEQ ID NO: 9563 - RNA, 8787 nt, synthetic construct
  source 1..8787: mol_type = other RNA
aggaaataagagagaaaagaagagtaagaagaaatataagagccaccatggcccctaagaagaagcgtaaagtgagccggatgaaccacgaccaggagttcgacccccctaaggtgtaccctcccgtccccgccgagaagagaaagcccatccgggtcctgagcctgttcgatggcatcgccaccggtctgctggtgctgaaggacctgggcatccaggtggataggtacattgcctccgaggtgtgcgaggactccatcaccgtgggaatggtgcgtcatcagggcaagatcatgtacgtgggcgacgtgcggagcgtgacacagaagcatatccaggagtggggccctttcgacctggtgatcggcggcagcccttgcaatgacctgagcatcgtgaacccagcccggaagggcctgtacgagggaaccggcagactgttcttcgagttttacagactgctgcacgacgcccggcctaaggaaggcgacgaccggcccttcttttggctgttcgagaatgtggtggccatgggagtcagcgacaagcgggatattagccggttcctggagagcaaccccgtgatgatcgatgccaaggaagtgagcgccgcccaccgggccagatacttctggggcaatctgcctggcatgaacagacccctggccagcaccgtgaacgacaagctggagctgcaggagtgcctggagcacggccggatcgccaagttcagcaaggtgagaaccatcaccacccgaagcaacagcatcaaacaaggcaaggaccagcactttcctgtgttcatgaacgagaaggaggacatcctgtggtgtaccgagatggagagagtgttcgggttcccagtccactacacagatgtcagcaacatgtctagactggccagacagagactgctgggaagaagctggtccgtccctgtgatcagacacctgttcgcccctctgaaggagtacttcgcctgcgtgagcagcggcaacagcaacgccaacagccggggccccagcttctctagcggcctggtgccactgtccctgagagggagccacatgggccccatggagatctacaaaaccgtgagcgcctggaagcggcagcctgtgcgcgtgctgagcctgtttcggaatatcgataaagtcctgaaaagcctgggattcctggagagcggctctggctccggcggtggcaccctgaagtacgtggaggatgtgacaaacgtggtcagacgggatgtggagaagtggggccccttcgatctggtgtacggcagcacccaacccctgggcagctcttgtgaccggtgccctggctggtacatgtttcagttccaccggatcctgcagtacgccctgccgagacaggagtcccagcggccattcttttggattttcatggacaacttgctgctgaccgaggatgaccaggaaactaccactcggttcctgcagaccgaagccgtgaccctgcaggacgtgagaggccgggactaccagaacgccatgcgggtgtggtccaacatccctggactgaaaagcaagcacgcacctctgacccctaaagaagaggagtacctgcaggcccaggtgcggagcagaagcaagctggacgcccctaaggtggatctgctggtgaagaattgcctcctgcccctgagagagtacttcaagtatttcagccagaatagtctgcccctgggaggcagcggcggcggccacagggtgggcctgatcaggagctacaacagcaagaccatgacctgcttccaggagctggtgaccttcagggacgtggccatcgacttcagcaggcaggagtgggagtacctggaccccaaccagagggacctgtacagggacgtgatgctggagaactacaggaacctggtgagcctgggcggccacagcatcagcaagcccgtggtggtggacctgctggagaggggcaaggagccctggggcggcccaagcagcggcgcccctcctcccagcggcggcaggcggcccaagcagcggcgcccctcctcccagcggcggcagcccagccggctccccaacctctaccgaggagggcacctctgagtccgccacccccgagagcggccctggcacctccaccgagcccagcgagggcagcgcacccggcagccctgccggcagccccacctccacagaggagggaaccagcaccgagcccagcgaaggcagcgccccaggcaccagcaccgagcctagtgagcaggagattaaacggatcaacaagatcagaagaagacttgtgaaagacagcaacaccaagaaggccggcaagacaggccccatgaaaaccctgctggttagagtgatgacacccgatctgagagagcggctggaaaacctgagaaagaagcctgaaaatatcccccagcccatcagcaatacatctagagccaacctgaataagctgctgaccgattacaccgaaatgaagaaggcgatcctgcatgtgtactgggaagagttccagaaggaccctgtgggcctgatgagccgggtggcccagcctgccagcaagaagatcgatcagaacaagctgaaacctgagatggacgagaagggcaacctgaccaccgccggctttgcctgctctcagtgtggccagcccctgttcgtgtacaagctggagcaggtgtctgagaagggcaaggcttacaccaactacttcggacggtgcaatgtggccgagcacgaaaagctgatcctgctggcccagctgaagcccgagaaggatagcgacgaagccgtgacatatagcctgggaaagtttgggcagagggccctggatttctacagcattcatgtgaccaaggagtccacccaccccgtgaagcccctggcccagatcgccggaaacagatacgcctccggacctgtgggaaaggccctgagcgacgcatgtatgggcacaatcgcctccttcctgtctaagtaccaggacatcatcatcgaacaccagaaggtggtgaagggcaaccagaagagactggagagcctgcgggagctggccggcaaggaaaacctggaataccctagcgtgaccctgccacctcagcctcacaccaaggagggcgttgatgcctacaacgaagtgatcgcccgggtgcgaatgtgggtgaacctgaacctgtggcagaagctgaagctaagcagagatgatgccaagcctctgctgagactgaagggattcccttcctttcctctggtcgagagacaggccaacgaagtggactggtgggacatggtgtgtaacgtgaagaagctgatcaacgagaaaaaggaggatggcaaggtgttttggcagaatctggctggctacaagagacaggaagccctgagaccatacctgagcagcgaggaagatcggaagaagggaaagaaattcgctcggtaccagctgggcgacctgctgctgcacctggaaaagaagcacggcgaggactggggaaaggtgtacgacgaggcctgggagcggattgacaagaaagtggaaggcctgagcaagcacatcaagctggaagaggaacggagaagcgaggacgcccagagcaaggccgccctgaccgactggctgcgggctaaggccagcttcgtgatcgagggcctgaaggaggccgacaaggacgagttctgcagatgcgagctgaagctgcagaagtggtacggggacctgcggggaaagcccttcgccatcgaagccgagaacagcatcctggacatcagcggcttcagcaagcagtacaactgtgccttcatctggcagaaggacggcgtgaagaagctgaacctgtacctgatcatcaactacttcaagggcggcaagctgcggttcaagaagatcaaacctgaagccttcgaagccaacagattctacaccgtgatcaacaaaaagagcggcgagatcgtgcccatggaggtgaacttcaacttcgacgaccccaacctgatcatcctgcctctggcctttggcaagagacagggcagagaattcatctggaacgacctgctgtccctggaaaccggcagcctgaagctggccaacggaagagtgatcgagaagacactgtacaacagaagaacccggcaggatgagcctgccctgttcgtggccctgaccttcgagcggcgggaggtcctggactcctccaatatcaaaccaatgaacctgatcggcgtggcaagaggcgaaaacatccccgccgtgatcgccctgaccgaccccgagggctgcccactgagccggtttaaggatagcctgggaaacccaacccacatcctgagaatcggcgagagctataaggagaagcagcggaccatccaggccaagaaggaggtggagcagcggagagccggcggctacagccggaagtacgccagcaaagccaagaatctggcagacgatatggtgagaaacaccgctagagatctgctgtactacgccgtgacccaggatgccatgctgatcttcgccaacctgagccggggcttcggccggcagggcaagcggaccttcatggccgagagacagtacacacggatggaggactggctgaccgccaagctggcctacgagggcctgagcaagacctacctgtccaagacactggcccagtacacctccaagacatgcagcaactgtgggtttaccatcaccagcgccgactacgacagggtgctggagaagctgaagaagacagcaacaggctggatgaccacaattaacggcaaggagctgaaggtggagggccagattacctactacaacagatacaagagacagaacgtagtcaaggacctgtccgtcgagctggatagactgagcgaagaatctgtgaacaacgacatctcctcctggacaaagggcagaagcggagaagctctgagcctcctgaagaaaagattctcccatagacccgtgcaggagaagttcgtgtgcctgaactgcggcttcgagacacacgcagccgagcaagccgccctgaacatcgccagatcctggctgttcctgcggagccaggagtacaagaaataccagacaaacaagacaaccggcaacaccgataagagagccttcgtcgagacctggcagtccttttaccggaagaagcttaaggaggtgtggaaacctgccgtgcggtctggcggatctggcggaggctccaccagccccaagaaaaagagaaaagtctaagctgccttctgcggggcttgccttctggccatgcccttcttctctcccttgcacctgtacctcttggtctttgaataaagcctgagtaggaaggctagcaaaaaaaaaaaaaaaaaaaaaaaaaaaaaaaaaaaaaaaaaaaaaaaaaaaaaaaaaaaaaaaaaaaaaaaaaaaaaaaagcccagccggctccccaacctctaccgaggagggcacctctgagtccgccacccccgagagcggccctggcacctccaccgagcccagcgagggcagcgcacccggcagccctgccggcagccccacctccacagaggagggaaccagcaccgagcccagcgaaggcagcgccccaggcaccagcaccgagcctagtgagcaggagattaaacggatcaacaagatcagaagaagacttgtgaaagacagcaacaccaagaaggccggcaagacaggccccatgaaaaccctgctggttagagtgatgacacccgatctgagagagcggctggaaaacctgagaaagaagcctgaaaatatcccccagcccatcagcaatacatctagagccaacctgaataagctgctgaccgattacaccgaaatgaagaaggcgatcctgcatgtgtactgggaagagttccagaaggaccctgtgggcctgatgagccgggtggcccagcctgccagcaagaagatcgatcagaacaagctgaaacctgagatggacgagaagggcaacctgaccaccgccggctttgcctgctctcagtgtggccagcccctgttcgtgtacaagctggagcaggtgtctgagaagggcaaggcttacaccaactacttcggacggtgcaatgtggccgagcacgaaaagctgatcctgctggcccagctgaagcccgagaaggatagcgacgaagccgtgacatatagcctgggaaagtttgggcagagggccctggatttctacagcattcatgtgaccaaggagtccacccaccccgtgaagcccctggcccagatcgccggaaacagatacgcctccggacctgtgggaaaggccctgagcgacgcatgtatgggcacaatcgcctccttcctgtctaagtaccaggacatcatcatcgaacaccagaaggtggtgaagggcaaccagaagagactggagagcctgcgggagctggccggcaaggaaaacctggaataccctagcgtgaccctgccacctcagcctcacaccaaggagggcgttgatgcctacaacgaagtgatcgcccgggtgcgaatgtgggtgaacctgaacctgtggcagaagctgaagctaagcagagatgatgccaagcctctgctgagactgaagggattcccttcctttcctctggtcgagagacaggccaacgaagtggactggtgggacatggtgtgtaacgtgaagaagctgatcaacgagaaaaaggaggatggcaaggtgttttggcagaatctggctggctacaagagacaggaagccctgagaccatacctgagcagcgaggaagatcggaagaagggaaagaaattcgctcggtaccagctgggcgacctgctgctgcacctggaaaagaagcacggcgaggactggggaaaggtgtacgacgaggcctgggagcggattgacaagaaagtggaaggcctgagcaagcacatcaagctggaagaggaacggagaagcgaggacgcccagagcaaggccgccctgaccgactggctgcgggctaaggccagcttcgtgatcgagggcctgaaggaggccgacaaggacgagttctgcagatgcgagctgaagctgcagaagtggtacggggacctgcggggaaagcccttcgccatcgaagccgagaacagcatcctggacatcagcggcttcagcaagcagtacaactgtgccttcatctggcagaaggacggcgtgaagaagctgaacctgtacctgatcatcaactacttcaagggcggcaagctgcggttcaagaagatcaaacctgaagccttcgaagccaacagattctacaccgtgatcaacaaaaagagcggcgagatcgtgcccatggaggtgaacttcaacttcgacgaccccaacctgatcatcctgcctctggcctttggcaagagacagggcagagaattcatctggaacgacctgctgtccctggaaaccggcagcctgaagctggccaacggaagagtgatcgagaagacactgtacaacagaagaacccggcaggatgagcctgccctgttcgtggccctgaccttcgagcggcgggaggtcctggactcctccaatatcaaaccaatgaacctgatcggcgtggcaagaggcgaaaacatccccgccgtgatcgccctgaccgaccccgagggctgcccactgagccggtttaaggatagcctgggaaacccaacccacatcctgagaatcggcgagagctataaggagaagcagcggaccatccaggccaagaaggaggtggagcagcggagagccggcggctacagccggaagtacgccagcaaagccaagaatctggcagacgatatggtgagaaacaccgctagagatctgctgtactacgccgtgacccaggatgccatgctgatcttcgccaacctgagccggggcttcggccggcagggcaagcggaccttcatggccgagagacagtacacacggatggaggactggctgaccgccaagctggcctacgagggcctgagcaagacctacctgtccaagacactggcccagtacacctccaagacatgcagcaactgtgggtttaccatcaccagcgccgactacgacagggtgctggagaagctgaagaagacagcaacaggctggatgaccacaattaacggcaaggagctgaaggtggagggccagattacctactacaacagatacaagagacagaacgtagtcaaggacctgtccgtcgagctggatagactgagcgaagaatctgtgaacaacgacatctcctcctggacaaagggcagaagcggagaagctctgagcctcctgaagaaaagattctcccatagacccgtgcaggagaagttcgtgtgcctgaactgcggcttcgagacacacgcagccgagcaagccgccctgaacatcgccagatcctggctgttcctgcggagccaggagtacaagaaataccagacaaacaagacaaccggcaacaccgataagagagccttcgtcgagacctggcagtccttttaccggaagaagcttaaggaggtgtggaaacctgccgtgcggtctggcggatctggcggaggctccaccagccccaagaaaaagagaaaagtctaagctgccttctgcggggcttgccttctggccatgcccttcttctctcccttgcacctgtacctcttggtctttgaataaagcctgagtaggaaggctagcaaaaaaaaaaaaaaaaaaaaaaaaaaaaaaaaaaaaaaaaaaaaaaaaaaaaaaaaaaaaaaaaaaaaaaaaaaaaaaaa

SEQ ID NO: 9564 - RNA, 8787 nt, synthetic construct
  source 1..8787: mol_type = other RNA
aggaaataagagagaaaagaagagtaagaagaaatataagagccaccatggcccctaagaagaagcgtaaagtgagccggatgaaccacgaccaggagttcgacccccctaaggtgtaccctcccgtccccgccgagaagagaaagcccatccgggtcctgagcctgttcgatggcatcgccaccggtctgctggtgctgaaggacctgggcatccaggtggataggtacattgcctccgaggtgtgcgaggactccatcaccgtgggaatggtgcgtcatcagggcaagatcatgtacgtgggcgacgtgcggagcgtgacacagaagcatatccaggagtggggccctttcgacctggtgatcggcggcagcccttgcaatgacctgagcatcgtgaacccagcccggaagggcctgtacgagggaaccggcagactgttcttcgagttttacagactgctgcacgacgcccggcctaaggaaggcgacgaccggcccttcttttggctgttcgagaatgtggtggccatgggagtcagcgacaagcgggatattagccggttcctggagagcaaccccgtgatgatcgatgccaaggaagtgagcgccgcccaccgggccagatacttctggggcaatctgcctggcatgaacagacccctggccagcaccgtgaacgacaagctggagctgcaggagtgcctggagcacggccggatcgccaagttcagcaaggtgagaaccatcaccacccgaagcaacagcatcaaacaaggcaaggaccagcactttcctgtgttcatgaacgagaaggaggacatcctgtggtgtaccgagatggagagagtgttcgggttcccagtccactacacagatgtcagcaacatgtctagactggccagacagagactgctgggaagaagctggtccgtccctgtgatcagacacctgttcgcccctctgaaggagtacttcgcctgcgtgagcagcggcaacagcaacgccaacagccggggccccagcttctctagcggcctggtgccactgtccctgagagggagccacatgggccccatggagatctacaaaaccgtgagcgcctggaagcggcagcctgtgcgcgtgctgagcctgtttcggaatatcgataaagtcctgaaaagcctgggattcctggagagcggctctggctccggcggtggcaccctgaagtacgtggaggatgtgacaaacgtggtcagacgggatgtggagaagtggggccccttcgatctggtgtacggcagcacccaacccctgggcagctcttgtgaccggtgccctggctggtacatgtttcagttccaccggatcctgcagtacgccctgccgagacaggagtcccagcggccattcttttggattttcatggacaacttgctgctgaccgaggatgaccaggaaactaccactcggttcctgcagaccgaagccgtgaccctgcaggacgtgagaggccgggactaccagaacgccatgcgggtgtggtccaacatccctggactgaaaagcaagcacgcacctctgacccctaaagaagaggagtacctgcaggcccaggtgcggagcagaagcaagctggacgcccctaaggtggatctgctggtgaagaattgcctcctgcccctgagagagtacttcaagtatttcagccagaatagtctgcccctgggaggcagcggcggcggcgtgcaggccagcctgagcttcgaggacgtggccgtgaggttcacctgggaggagtggcagctgctggaccccagccagaaggacctgtacaggaacgtgatgctggagaactactgcaacctggtgagcgtgggctaccagacccccaagcccgacagcctgttccagctggagcagggcgagcccccctggagggtggagggcgccggccagagccagacctgccccgaggagatctgggagggcggcccaagcagcggcgcccctcctcccagcggcggcaggcggcccaagcagcggcgcccctcctcccagcggcggcagcccagccggctccccaacctctaccgaggagggcacctctgagtccgccacccccgagagcggccctggcacctccaccgagcccagcgagggcagcgcacccggcagccctgccggcagccccacctccacagaggagggaaccagcaccgagcccagcgaaggcagcgccccaggcaccagcaccgagcctagtgagcaggagattaaacggatcaacaagatcagaagaagacttgtgaaagacagcaacaccaagaaggccggcaagacaggccccatgaaaaccctgctggttagagtgatgacacccgatctgagagagcggctggaaaacctgagaaagaagcctgaaaatatcccccagcccatcagcaatacatctagagccaacctgaataagctgctgaccgattacaccgaaatgaagaaggcgatcctgcatgtgtactgggaagagttccagaaggaccctgtgggcctgatgagccgggtggcccagcctgccagcaagaagatcgatcagaacaagctgaaacctgagatggacgagaagggcaacctgaccaccgccggctttgcctgctctcagtgtggccagcccctgttcgtgtacaagctggagcaggtgtctgagaagggcaaggcttacaccaactacttcggacggtgcaatgtggccgagcacgaaaagctgatcctgctggcccagctgaagcccgagaaggatagcgacgaagccgtgacatatagcctgggaaagtttgggcagagggccctggatttctacagcattcatgtgaccaaggagtccacccaccccgtgaagcccctggcccagatcgccggaaacagatacgcctccggacctgtgggaaaggccctgagcgacgcatgtatgggcacaatcgcctccttcctgtctaagtaccaggacatcatcatcgaacaccagaaggtggtgaagggcaaccagaagagactggagagcctgcgggagctggccggcaaggaaaacctggaataccctagcgtgaccctgccacctcagcctcacaccaaggagggcgttgatgcctacaacgaagtgatcgcccgggtgcgaatgtgggtgaacctgaacctgtggcagaagctgaagctaagcagagatgatgccaagcctctgctgagactgaagggattcccttcctttcctctggtcgagagacaggccaacgaagtggactggtgggacatggtgtgtaacgtgaagaagctgatcaacgagaaaaaggaggatggcaaggtgttttggcagaatctggctggctacaagagacaggaagccctgagaccatacctgagcagcgaggaagatcggaagaagggaaagaaattcgctcggtaccagctgggcgacctgctgctgcacctggaaaagaagcacggcgaggactggggaaaggtgtacgacgaggcctgggagcggattgacaagaaagtggaaggcctgagcaagcacatcaagctggaagaggaacggagaagcgaggacgcccagagcaaggccgccctgaccgactggctgcgggctaaggccagcttcgtgatcgagggcctgaaggaggccgacaaggacgagttctgcagatgcgagctgaagctgcagaagtggtacggggacctgcggggaaagcccttcgccatcgaagccgagaacagcatcctggacatcagcggcttcagcaagcagtacaactgtgccttcatctggcagaaggacggcgtgaagaagctgaacctgtacctgatcatcaactacttcaagggcggcaagctgcggttcaagaagatcaaacctgaagccttcgaagccaacagattctacaccgtgatcaacaaaaagagcggcgagatcgtgcccatggaggtgaacttcaacttcgacgaccccaacctgatcatcctgcctctggcctttggcaagagacagggcagagaattcatctggaacgacctgctgtccctggaaaccggcagcctgaagctggccaacggaagagtgatcgagaagacactgtacaacagaagaacccggcaggatgagcctgccctgttcgtggccctgaccttcgagcggcgggaggtcctggactcctccaatatcaaaccaatgaacctgatcggcgtggcaagaggcgaaaacatccccgccgtgatcgccctgaccgaccccgagggctgcccactgagccggtttaaggatagcctgggaaacccaacccacatcctgagaatcggcgagagctataaggagaagcagcggaccatccaggccaagaaggaggtggagcagcggagagccggcggctacagccggaagtacgccagcaaagccaagaatctggcagacgatatggtgagaaacaccgctagagatctgctgtactacgccgtgacccaggatgccatgctgatcttcgccaacctgagccggggcttcggccggcagggcaagcggaccttcatggccgagagacagtacacacggatggaggactggctgaccgccaagctggcctacgagggcctgagcaagacctacctgtccaagacactggcccagtacacctccaagacatgcagcaactgtgggtttaccatcaccagcgccgactacgacagggtgctggagaagctgaagaagacagcaacaggctggatgaccacaattaacggcaaggagctgaaggtggagggccagattacctactacaacagatacaagagacagaacgtagtcaaggacctgtccgtcgagctggatagactgagcgaagaatctgtgaacaacgacatctcctcctggacaaagggcagaagcggagaagctctgagcctcctgaagaaaagattctcccatagacccgtgcaggagaagttcgtgtgcctgaactgcggcttcgagacacacgcagccgagcaagccgccctgaacatcgccagatcctggctgttcctgcggagccaggagtacaagaaataccagacaaacaagacaaccggcaacaccgataagagagccttcgtcgagacctggcagtccttttaccggaagaagcttaaggaggtgtggaaacctgccgtgcggtctggcggatctggcggaggctccaccagccccaagaaaaagagaaaagtctaagctgccttctgcggggcttgccttctggccatgcccttcttctctcccttgcacctgtacctcttggtctttgaataaagcctgagtaggaaggctagcaaaaaaaaaaaaaaaaaaaaaaaaaaaaaaaaaaaaaaaaaaaaaaaaaaaaaaaaaaaaaaaaaaaaaaaaaaaaaaaagcccagccggctccccaacctctaccgaggagggcacctctgagtccgccacccccgagagcggccctggcacctccaccgagcccagcgagggcagcgcacccggcagccctgccggcagccccacctccacagaggagggaaccagcaccgagcccagcgaaggcagcgccccaggcaccagcaccgagcctagtgagcaggagattaaacggatcaacaagatcagaagaagacttgtgaaagacagcaacaccaagaaggccggcaagacaggccccatgaaaaccctgctggttagagtgatgacacccgatctgagagagcggctggaaaacctgagaaagaagcctgaaaatatcccccagcccatcagcaatacatctagagccaacctgaataagctgctgaccgattacaccgaaatgaagaaggcgatcctgcatgtgtactgggaagagttccagaaggaccctgtgggcctgatgagccgggtggcccagcctgccagcaagaagatcgatcagaacaagctgaaacctgagatggacgagaagggcaacctgaccaccgccggctttgcctgctctcagtgtggccagcccctgttcgtgtacaagctggagcaggtgtctgagaagggcaaggcttacaccaactacttcggacggtgcaatgtggccgagcacgaaaagctgatcctgctggcccagctgaagcccgagaaggatagcgacgaagccgtgacatatagcctgggaaagtttgggcagagggccctggatttctacagcattcatgtgaccaaggagtccacccaccccgtgaagcccctggcccagatcgccggaaacagatacgcctccggacctgtgggaaaggccctgagcgacgcatgtatgggcacaatcgcctccttcctgtctaagtaccaggacatcatcatcgaacaccagaaggtggtgaagggcaaccagaagagactggagagcctgcgggagctggccggcaaggaaaacctggaataccctagcgtgaccctgccacctcagcctcacaccaaggagggcgttgatgcctacaacgaagtgatcgcccgggtgcgaatgtgggtgaacctgaacctgtggcagaagctgaagctaagcagagatgatgccaagcctctgctgagactgaagggattcccttcctttcctctggtcgagagacaggccaacgaagtggactggtgggacatggtgtgtaacgtgaagaagctgatcaacgagaaaaaggaggatggcaaggtgttttggcagaatctggctggctacaagagacaggaagccctgagaccatacctgagcagcgaggaagatcggaagaagggaaagaaattcgctcggtaccagctgggcgacctgctgctgcacctggaaaagaagcacggcgaggactggggaaaggtgtacgacgaggcctgggagcggattgacaagaaagtggaaggcctgagcaagcacatcaagctggaagaggaacggagaagcgaggacgcccagagcaaggccgccctgaccgactggctgcgggctaaggccagcttcgtgatcgagggcctgaaggaggccgacaaggacgagttctgcagatgcgagctgaagctgcagaagtggtacggggacctgcggggaaagcccttcgccatcgaagccgagaacagcatcctggacatcagcggcttcagcaagcagtacaactgtgccttcatctggcagaaggacggcgtgaagaagctgaacctgtacctgatcatcaactacttcaagggcggcaagctgcggttcaagaagatcaaacctgaagccttcgaagccaacagattctacaccgtgatcaacaaaaagagcggcgagatcgtgcccatggaggtgaacttcaacttcgacgaccccaacctgatcatcctgcctctggcctttggcaagagacagggcagagaattcatctggaacgacctgctgtccctggaaaccggcagcctgaagctggccaacggaagagtgatcgagaagacactgtacaacagaagaacccggcaggatgagcctgccctgttcgtggccctgaccttcgagcggcgggaggtcctggactcctccaatatcaaaccaatgaacctgatcggcgtggcaagaggcgaaaacatccccgccgtgatcgccctgaccgaccccgagggctgcccactgagccggtttaaggatagcctgggaaacccaacccacatcctgagaatcggcgagagctataaggagaagcagcggaccatccaggccaagaaggaggtggagcagcggagagccggcggctacagccggaagtacgccagcaaagccaagaatctggcagacgatatggtgagaaacaccgctagagatctgctgtactacgccgtgacccaggatgccatgctgatcttcgccaacctgagccggggcttcggccggcagggcaagcggaccttcatggccgagagacagtacacacggatggaggactggctgaccgccaagctggcctacgagggcctgagcaagacctacctgtccaagacactggcccagtacacctccaagacatgcagcaactgtgggtttaccatcaccagcgccgactacgacagggtgctggagaagctgaagaagacagcaacaggctggatgaccacaattaacggcaaggagctgaaggtggagggccagattacctactacaacagatacaagagacagaacgtagtcaaggacctgtccgtcgagctggatagactgagcgaagaatctgtgaacaacgacatctcctcctggacaaagggcagaagcggagaagctctgagcctcctgaagaaaagattctcccatagacccgtgcaggagaagttcgtgtgcctgaactgcggcttcgagacacacgcagccgagcaagccgccctgaacatcgccagatcctggctgttcctgcggagccaggagtacaagaaataccagacaaacaagacaaccggcaacaccgataagagagccttcgtcgagacctggcagtccttttaccggaagaagcttaaggaggtgtggaaacctgccgtgcggtctggcggatctggcggaggctccaccagccccaagaaaaagagaaaagtctaagctgccttctgcggggcttgccttctggccatgcccttcttctctcccttgcacctgtacctcttggtctttgaataaagcctgagtaggaaggctagcaaaaaaaaaaaaaaaaaaaaaaaaaaaaaaaaaaaaaaaaaaaaaaaaaaaaaaaaaaaaaaaaaaaaaaaaaaaaaaaa

SEQ ID NO: 9565 - RNA, 8787 nt, synthetic construct
  source 1..8787: mol_type = other RNA
aggaaataagagagaaaagaagagtaagaagaaatataagagccaccatggcccctaagaagaagcgtaaagtgagccggatgaaccacgaccaggagttcgacccccctaaggtgtaccctcccgtccccgccgagaagagaaagcccatccgggtcctgagcctgttcgatggcatcgccaccggtctgctggtgctgaaggacctgggcatccaggtggataggtacattgcctccgaggtgtgcgaggactccatcaccgtgggaatggtgcgtcatcagggcaagatcatgtacgtgggcgacgtgcggagcgtgacacagaagcatatccaggagtggggccctttcgacctggtgatcggcggcagcccttgcaatgacctgagcatcgtgaacccagcccggaagggcctgtacgagggaaccggcagactgttcttcgagttttacagactgctgcacgacgcccggcctaaggaaggcgacgaccggcccttcttttggctgttcgagaatgtggtggccatgggagtcagcgacaagcgggatattagccggttcctggagagcaaccccgtgatgatcgatgccaaggaagtgagcgccgcccaccgggccagatacttctggggcaatctgcctggcatgaacagacccctggccagcaccgtgaacgacaagctggagctgcaggagtgcctggagcacggccggatcgccaagttcagcaaggtgagaaccatcaccacccgaagcaacagcatcaaacaaggcaaggaccagcactttcctgtgttcatgaacgagaaggaggacatcctgtggtgtaccgagatggagagagtgttcgggttcccagtccactacacagatgtcagcaacatgtctagactggccagacagagactgctgggaagaagctggtccgtccctgtgatcagacacctgttcgcccctctgaaggagtacttcgcctgcgtgagcagcggcaacagcaacgccaacagccggggccccagcttctctagcggcctggtgccactgtccctgagagggagccacatgggccccatggagatctacaaaaccgtgagcgcctggaagcggcagcctgtgcgcgtgctgagcctgtttcggaatatcgataaagtcctgaaaagcctgggattcctggagagcggctctggctccggcggtggcaccctgaagtacgtggaggatgtgacaaacgtggtcagacgggatgtggagaagtggggccccttcgatctggtgtacggcagcacccaacccctgggcagctcttgtgaccggtgccctggctggtacatgtttcagttccaccggatcctgcagtacgccctgccgagacaggagtcccagcggccattcttttggattttcatggacaacttgctgctgaccgaggatgaccaggaaactaccactcggttcctgcagaccgaagccgtgaccctgcaggacgtgagaggccgggactaccagaacgccatgcgggtgtggtccaacatccctggactgaaaagcaagcacgcacctctgacccctaaagaagaggagtacctgcaggcccaggtgcggagcagaagcaagctggacgcccctaaggtggatctgctggtgaagaattgcctcctgcccctgagagagtacttcaagtatttcagccagaatagtctgcccctgggaggcagcggcggcggcctgctgcacggctgctgcagcctggagacccacagcatcagggacaagaacgccgtgacctacggcgacgtgcacgtgaacttcacccaggaggagtgggccctgctggaccccagccagaagaagctgtacaaggacgtgatgctggagacctacaggaacctgaacgccatcggcttcaactgggacgacaagaacaccgaggagcactgccccagcaccaggaggtggaggaggtaccccggcggcccaagcagcggcgcccctcctcccagcggcggcaggcggcccaagcagcggcgcccctcctcccagcggcggcagcccagccggctccccaacctctaccgaggagggcacctctgagtccgccacccccgagagcggccctggcacctccaccgagcccagcgagggcagcgcacccggcagccctgccggcagccccacctccacagaggagggaaccagcaccgagcccagcgaaggcagcgccccaggcaccagcaccgagcctagtgagcaggagattaaacggatcaacaagatcagaagaagacttgtgaaagacagcaacaccaagaaggccggcaagacaggccccatgaaaaccctgctggttagagtgatgacacccgatctgagagagcggctggaaaacctgagaaagaagcctgaaaatatcccccagcccatcagcaatacatctagagccaacctgaataagctgctgaccgattacaccgaaatgaagaaggcgatcctgcatgtgtactgggaagagttccagaaggaccctgtgggcctgatgagccgggtggcccagcctgccagcaagaagatcgatcagaacaagctgaaacctgagatggacgagaagggcaacctgaccaccgccggctttgcctgctctcagtgtggccagcccctgttcgtgtacaagctggagcaggtgtctgagaagggcaaggcttacaccaactacttcggacggtgcaatgtggccgagcacgaaaagctgatcctgctggcccagctgaagcccgagaaggatagcgacgaagccgtgacatatagcctgggaaagtttgggcagagggccctggatttctacagcattcatgtgaccaaggagtccacccaccccgtgaagcccctggcccagatcgccggaaacagatacgcctccggacctgtgggaaaggccctgagcgacgcatgtatgggcacaatcgcctccttcctgtctaagtaccaggacatcatcatcgaacaccagaaggtggtgaagggcaaccagaagagactggagagcctgcgggagctggccggcaaggaaaacctggaataccctagcgtgaccctgccacctcagcctcacaccaaggagggcgttgatgcctacaacgaagtgatcgcccgggtgcgaatgtgggtgaacctgaacctgtggcagaagctgaagctaagcagagatgatgccaagcctctgctgagactgaagggattcccttcctttcctctggtcgagagacaggccaacgaagtggactggtgggacatggtgtgtaacgtgaagaagctgatcaacgagaaaaaggaggatggcaaggtgttttggcagaatctggctggctacaagagacaggaagccctgagaccatacctgagcagcgaggaagatcggaagaagggaaagaaattcgctcggtaccagctgggcgacctgctgctgcacctggaaaagaagcacggcgaggactggggaaaggtgtacgacgaggcctgggagcggattgacaagaaagtggaaggcctgagcaagcacatcaagctggaagaggaacggagaagcgaggacgcccagagcaaggccgccctgaccgactggctgcgggctaaggccagcttcgtgatcgagggcctgaaggaggccgacaaggacgagttctgcagatgcgagctgaagctgcagaagtggtacggggacctgcggggaaagcccttcgccatcgaagccgagaacagcatcctggacatcagcggcttcagcaagcagtacaactgtgccttcatctggcagaaggacggcgtgaagaagctgaacctgtacctgatcatcaactacttcaagggcggcaagctgcggttcaagaagatcaaacctgaagccttcgaagccaacagattctacaccgtgatcaacaaaaagagcggcgagatcgtgcccatggaggtgaacttcaacttcgacgaccccaacctgatcatcctgcctctggcctttggcaagagacagggcagagaattcatctggaacgacctgctgtccctggaaaccggcagcctgaagctggccaacggaagagtgatcgagaagacactgtacaacagaagaacccggcaggatgagcctgccctgttcgtggccctgaccttcgagcggcgggaggtcctggactcctccaatatcaaaccaatgaacctgatcggcgtggcaagaggcgaaaacatccccgccgtgatcgccctgaccgaccccgagggctgcccactgagccggtttaaggatagcctgggaaacccaacccacatcctgagaatcggcgagagctataaggagaagcagcggaccatccaggccaagaaggaggtggagcagcggagagccggcggctacagccggaagtacgccagcaaagccaagaatctggcagacgatatggtgagaaacaccgctagagatctgctgtactacgccgtgacccaggatgccatgctgatcttcgccaacctgagccggggcttcggccggcagggcaagcggaccttcatggccgagagacagtacacacggatggaggactggctgaccgccaagctggcctacgagggcctgagcaagacctacctgtccaagacactggcccagtacacctccaagacatgcagcaactgtgggtttaccatcaccagcgccgactacgacagggtgctggagaagctgaagaagacagcaacaggctggatgaccacaattaacggcaaggagctgaaggtggagggccagattacctactacaacagatacaagagacagaacgtagtcaaggacctgtccgtcgagctggatagactgagcgaagaatctgtgaacaacgacatctcctcctggacaaagggcagaagcggagaagctctgagcctcctgaagaaaagattctcccatagacccgtgcaggagaagttcgtgtgcctgaactgcggcttcgagacacacgcagccgagcaagccgccctgaacatcgccagatcctggctgttcctgcggagccaggagtacaagaaataccagacaaacaagacaaccggcaacaccgataagagagccttcgtcgagacctggcagtccttttaccggaagaagcttaaggaggtgtggaaacctgccgtgcggtctggcggatctggcggaggctccaccagccccaagaaaaagagaaaagtctaagctgccttctgcggggcttgccttctggccatgcccttcttctctcccttgcacctgtacctcttggtctttgaataaagcctgagtaggaaggctagcaaaaaaaaaaaaaaaaaaaaaaaaaaaaaaaaaaaaaaaaaaaaaaaaaaaaaaaaaaaaaaaaaaaaaaaaaaaaaaaagcccagccggctccccaacctctaccgaggagggcacctctgagtccgccacccccgagagcggccctggcacctccaccgagcccagcgagggcagcgcacccggcagccctgccggcagccccacctccacagaggagggaaccagcaccgagcccagcgaaggcagcgccccaggcaccagcaccgagcctagtgagcaggagattaaacggatcaacaagatcagaagaagacttgtgaaagacagcaacaccaagaaggccggcaagacaggccccatgaaaaccctgctggttagagtgatgacacccgatctgagagagcggctggaaaacctgagaaagaagcctgaaaatatcccccagcccatcagcaatacatctagagccaacctgaataagctgctgaccgattacaccgaaatgaagaaggcgatcctgcatgtgtactgggaagagttccagaaggaccctgtgggcctgatgagccgggtggcccagcctgccagcaagaagatcgatcagaacaagctgaaacctgagatggacgagaagggcaacctgaccaccgccggctttgcctgctctcagtgtggccagcccctgttcgtgtacaagctggagcaggtgtctgagaagggcaaggcttacaccaactacttcggacggtgcaatgtggccgagcacgaaaagctgatcctgctggcccagctgaagcccgagaaggatagcgacgaagccgtgacatatagcctgggaaagtttgggcagagggccctggatttctacagcattcatgtgaccaaggagtccacccaccccgtgaagcccctggcccagatcgccggaaacagatacgcctccggacctgtgggaaaggccctgagcgacgcatgtatgggcacaatcgcctccttcctgtctaagtaccaggacatcatcatcgaacaccagaaggtggtgaagggcaaccagaagagactggagagcctgcgggagctggccggcaaggaaaacctggaataccctagcgtgaccctgccacctcagcctcacaccaaggagggcgttgatgcctacaacgaagtgatcgcccgggtgcgaatgtgggtgaacctgaacctgtggcagaagctgaagctaagcagagatgatgccaagcctctgctgagactgaagggattcccttcctttcctctggtcgagagacaggccaacgaagtggactggtgggacatggtgtgtaacgtgaagaagctgatcaacgagaaaaaggaggatggcaaggtgttttggcagaatctggctggctacaagagacaggaagccctgagaccatacctgagcagcgaggaagatcggaagaagggaaagaaattcgctcggtaccagctgggcgacctgctgctgcacctggaaaagaagcacggcgaggactggggaaaggtgtacgacgaggcctgggagcggattgacaagaaagtggaaggcctgagcaagcacatcaagctggaagaggaacggagaagcgaggacgcccagagcaaggccgccctgaccgactggctgcgggctaaggccagcttcgtgatcgagggcctgaaggaggccgacaaggacgagttctgcagatgcgagctgaagctgcagaagtggtacggggacctgcggggaaagcccttcgccatcgaagccgagaacagcatcctggacatcagcggcttcagcaagcagtacaactgtgccttcatctggcagaaggacggcgtgaagaagctgaacctgtacctgatcatcaactacttcaagggcggcaagctgcggttcaagaagatcaaacctgaagccttcgaagccaacagattctacaccgtgatcaacaaaaagagcggcgagatcgtgcccatggaggtgaacttcaacttcgacgaccccaacctgatcatcctgcctctggcctttggcaagagacagggcagagaattcatctggaacgacctgctgtccctggaaaccggcagcctgaagctggccaacggaagagtgatcgagaagacactgtacaacagaagaacccggcaggatgagcctgccctgttcgtggccctgaccttcgagcggcgggaggtcctggactcctccaatatcaaaccaatgaacctgatcggcgtggcaagaggcgaaaacatccccgccgtgatcgccctgaccgaccccgagggctgcccactgagccggtttaaggatagcctgggaaacccaacccacatcctgagaatcggcgagagctataaggagaagcagcggaccatccaggccaagaaggaggtggagcagcggagagccggcggctacagccggaagtacgccagcaaagccaagaatctggcagacgatatggtgagaaacaccgctagagatctgctgtactacgccgtgacccaggatgccatgctgatcttcgccaacctgagccggggcttcggccggcagggcaagcggaccttcatggccgagagacagtacacacggatggaggactggctgaccgccaagctggcctacgagggcctgagcaagacctacctgtccaagacactggcccagtacacctccaagacatgcagcaactgtgggtttaccatcaccagcgccgactacgacagggtgctggagaagctgaagaagacagcaacaggctggatgaccacaattaacggcaaggagctgaaggtggagggccagattacctactacaacagatacaagagacagaacgtagtcaaggacctgtccgtcgagctggatagactgagcgaagaatctgtgaacaacgacatctcctcctggacaaagggcagaagcggagaagctctgagcctcctgaagaaaagattctcccatagacccgtgcaggagaagttcgtgtgcctgaactgcggcttcgagacacacgcagccgagcaagccgccctgaacatcgccagatcctggctgttcctgcggagccaggagtacaagaaataccagacaaacaagacaaccggcaacaccgataagagagccttcgtcgagacctggcagtccttttaccggaagaagcttaaggaggtgtggaaacctgccgtgcggtctggcggatctggcggaggctccaccagccccaagaaaaagagaaaagtctaagctgccttctgcggggcttgccttctggccatgcccttcttctctcccttgcacctgtacctcttggtctttgaataaagcctgagtaggaaggctagcaaaaaaaaaaaaaaaaaaaaaaaaaaaaaaaaaaaaaaaaaaaaaaaaaaaaaaaaaaaaaaaaaaaaaaaaaaaaaaaa

SEQ ID NO: 9566 - RNA, 8787 nt, synthetic construct
  source 1..8787: mol_type = other RNA
aggaaataagagagaaaagaagagtaagaagaaatataagagccaccatggcccctaagaagaagcgtaaagtgagccggatgaaccacgaccaggagttcgacccccctaaggtgtaccctcccgtccccgccgagaagagaaagcccatccgggtcctgagcctgttcgatggcatcgccaccggtctgctggtgctgaaggacctgggcatccaggtggataggtacattgcctccgaggtgtgcgaggactccatcaccgtgggaatggtgcgtcatcagggcaagatcatgtacgtgggcgacgtgcggagcgtgacacagaagcatatccaggagtggggccctttcgacctggtgatcggcggcagcccttgcaatgacctgagcatcgtgaacccagcccggaagggcctgtacgagggaaccggcagactgttcttcgagttttacagactgctgcacgacgcccggcctaaggaaggcgacgaccggcccttcttttggctgttcgagaatgtggtggccatgggagtcagcgacaagcgggatattagccggttcctggagagcaaccccgtgatgatcgatgccaaggaagtgagcgccgcccaccgggccagatacttctggggcaatctgcctggcatgaacagacccctggccagcaccgtgaacgacaagctggagctgcaggagtgcctggagcacggccggatcgccaagttcagcaaggtgagaaccatcaccacccgaagcaacagcatcaaacaaggcaaggaccagcactttcctgtgttcatgaacgagaaggaggacatcctgtggtgtaccgagatggagagagtgttcgggttcccagtccactacacagatgtcagcaacatgtctagactggccagacagagactgctgggaagaagctggtccgtccctgtgatcagacacctgttcgcccctctgaaggagtacttcgcctgcgtgagcagcggcaacagcaacgccaacagccggggccccagcttctctagcggcctggtgccactgtccctgagagggagccacatgggccccatggagatctacaaaaccgtgagcgcctggaagcggcagcctgtgcgcgtgctgagcctgtttcggaatatcgataaagtcctgaaaagcctgggattcctggagagcggctctggctccggcggtggcaccctgaagtacgtggaggatgtgacaaacgtggtcagacgggatgtggagaagtggggccccttcgatctggtgtacggcagcacccaacccctgggcagctcttgtgaccggtgccctggctggtacatgtttcagttccaccggatcctgcagtacgccctgccgagacaggagtcccagcggccattcttttggattttcatggacaacttgctgctgaccgaggatgaccaggaaactaccactcggttcctgcagaccgaagccgtgaccctgcaggacgtgagaggccgggactaccagaacgccatgcgggtgtggtccaacatccctggactgaaaagcaagcacgcacctctgacccctaaagaagaggagtacctgcaggcccaggtgcggagcagaagcaagctggacgcccctaaggtggatctgctggtgaagaattgcctcctgcccctgagagagtacttcaagtatttcagccagaatagtctgcccctgggaggcagcggcggcggcatgggcctgctgaccttcagggacgtggccatcgagttcagcctggaggagtggcagtgcctggacaccgcccagaagaacctgtacaggaacgtgatgctggagaactacaggaacctggccttcctgggcatcgccgtgagcaagcccgacctgatcatctgcctggagaaggagaaggagccctggaacatgaagaggcacgagatggtggacgagccccccgacatctgcccccacttcggcggcccaagcagcggcgcccctcctcccagcggcggcaggcggcccaagcagcggcgcccctcctcccagcggcggcagcccagccggctccccaacctctaccgaggagggcacctctgagtccgccacccccgagagcggccctggcacctccaccgagcccagcgagggcagcgcacccggcagccctgccggcagccccacctccacagaggagggaaccagcaccgagcccagcgaaggcagcgccccaggcaccagcaccgagcctagtgagcaggagattaaacggatcaacaagatcagaagaagacttgtgaaagacagcaacaccaagaaggccggcaagacaggccccatgaaaaccctgctggttagagtgatgacacccgatctgagagagcggctggaaaacctgagaaagaagcctgaaaatatcccccagcccatcagcaatacatctagagccaacctgaataagctgctgaccgattacaccgaaatgaagaaggcgatcctgcatgtgtactgggaagagttccagaaggaccctgtgggcctgatgagccgggtggcccagcctgccagcaagaagatcgatcagaacaagctgaaacctgagatggacgagaagggcaacctgaccaccgccggctttgcctgctctcagtgtggccagcccctgttcgtgtacaagctggagcaggtgtctgagaagggcaaggcttacaccaactacttcggacggtgcaatgtggccgagcacgaaaagctgatcctgctggcccagctgaagcccgagaaggatagcgacgaagccgtgacatatagcctgggaaagtttgggcagagggccctggatttctacagcattcatgtgaccaaggagtccacccaccccgtgaagcccctggcccagatcgccggaaacagatacgcctccggacctgtgggaaaggccctgagcgacgcatgtatgggcacaatcgcctccttcctgtctaagtaccaggacatcatcatcgaacaccagaaggtggtgaagggcaaccagaagagactggagagcctgcgggagctggccggcaaggaaaacctggaataccctagcgtgaccctgccacctcagcctcacaccaaggagggcgttgatgcctacaacgaagtgatcgcccgggtgcgaatgtgggtgaacctgaacctgtggcagaagctgaagctaagcagagatgatgccaagcctctgctgagactgaagggattcccttcctttcctctggtcgagagacaggccaacgaagtggactggtgggacatggtgtgtaacgtgaagaagctgatcaacgagaaaaaggaggatggcaaggtgttttggcagaatctggctggctacaagagacaggaagccctgagaccatacctgagcagcgaggaagatcggaagaagggaaagaaattcgctcggtaccagctgggcgacctgctgctgcacctggaaaagaagcacggcgaggactggggaaaggtgtacgacgaggcctgggagcggattgacaagaaagtggaaggcctgagcaagcacatcaagctggaagaggaacggagaagcgaggacgcccagagcaaggccgccctgaccgactggctgcgggctaaggccagcttcgtgatcgagggcctgaaggaggccgacaaggacgagttctgcagatgcgagctgaagctgcagaagtggtacggggacctgcggggaaagcccttcgccatcgaagccgagaacagcatcctggacatcagcggcttcagcaagcagtacaactgtgccttcatctggcagaaggacggcgtgaagaagctgaacctgtacctgatcatcaactacttcaagggcggcaagctgcggttcaagaagatcaaacctgaagccttcgaagccaacagattctacaccgtgatcaacaaaaagagcggcgagatcgtgcccatggaggtgaacttcaacttcgacgaccccaacctgatcatcctgcctctggcctttggcaagagacagggcagagaattcatctggaacgacctgctgtccctggaaaccggcagcctgaagctggccaacggaagagtgatcgagaagacactgtacaacagaagaacccggcaggatgagcctgccctgttcgtggccctgaccttcgagcggcgggaggtcctggactcctccaatatcaaaccaatgaacctgatcggcgtggcaagaggcgaaaacatccccgccgtgatcgccctgaccgaccccgagggctgcccactgagccggtttaaggatagcctgggaaacccaacccacatcctgagaatcggcgagagctataaggagaagcagcggaccatccaggccaagaaggaggtggagcagcggagagccggcggctacagccggaagtacgccagcaaagccaagaatctggcagacgatatggtgagaaacaccgctagagatctgctgtactacgccgtgacccaggatgccatgctgatcttcgccaacctgagccggggcttcggccggcagggcaagcggaccttcatggccgagagacagtacacacggatggaggactggctgaccgccaagctggcctacgagggcctgagcaagacctacctgtccaagacactggcccagtacacctccaagacatgcagcaactgtgggtttaccatcaccagcgccgactacgacagggtgctggagaagctgaagaagacagcaacaggctggatgaccacaattaacggcaaggagctgaaggtggagggccagattacctactacaacagatacaagagacagaacgtagtcaaggacctgtccgtcgagctggatagactgagcgaagaatctgtgaacaacgacatctcctcctggacaaagggcagaagcggagaagctctgagcctcctgaagaaaagattctcccatagacccgtgcaggagaagttcgtgtgcctgaactgcggcttcgagacacacgcagccgagcaagccgccctgaacatcgccagatcctggctgttcctgcggagccaggagtacaagaaataccagacaaacaagacaaccggcaacaccgataagagagccttcgtcgagacctggcagtccttttaccggaagaagcttaaggaggtgtggaaacctgccgtgcggtctggcggatctggcggaggctccaccagccccaagaaaaagagaaaagtctaagctgccttctgcggggcttgccttctggccatgcccttcttctctcccttgcacctgtacctcttggtctttgaataaagcctgagtaggaaggctagcaaaaaaaaaaaaaaaaaaaaaaaaaaaaaaaaaaaaaaaaaaaaaaaaaaaaaaaaaaaaaaaaaaaaaaaaaaaaaaaagcccagccggctccccaacctctaccgaggagggcacctctgagtccgccacccccgagagcggccctggcacctccaccgagcccagcgagggcagcgcacccggcagccctgccggcagccccacctccacagaggagggaaccagcaccgagcccagcgaaggcagcgccccaggcaccagcaccgagcctagtgagcaggagattaaacggatcaacaagatcagaagaagacttgtgaaagacagcaacaccaagaaggccggcaagacaggccccatgaaaaccctgctggttagagtgatgacacccgatctgagagagcggctggaaaacctgagaaagaagcctgaaaatatcccccagcccatcagcaatacatctagagccaacctgaataagctgctgaccgattacaccgaaatgaagaaggcgatcctgcatgtgtactgggaagagttccagaaggaccctgtgggcctgatgagccgggtggcccagcctgccagcaagaagatcgatcagaacaagctgaaacctgagatggacgagaagggcaacctgaccaccgccggctttgcctgctctcagtgtggccagcccctgttcgtgtacaagctggagcaggtgtctgagaagggcaaggcttacaccaactacttcggacggtgcaatgtggccgagcacgaaaagctgatcctgctggcccagctgaagcccgagaaggatagcgacgaagccgtgacatatagcctgggaaagtttgggcagagggccctggatttctacagcattcatgtgaccaaggagtccacccaccccgtgaagcccctggcccagatcgccggaaacagatacgcctccggacctgtgggaaaggccctgagcgacgcatgtatgggcacaatcgcctccttcctgtctaagtaccaggacatcatcatcgaacaccagaaggtggtgaagggcaaccagaagagactggagagcctgcgggagctggccggcaaggaaaacctggaataccctagcgtgaccctgccacctcagcctcacaccaaggagggcgttgatgcctacaacgaagtgatcgcccgggtgcgaatgtgggtgaacctgaacctgtggcagaagctgaagctaagcagagatgatgccaagcctctgctgagactgaagggattcccttcctttcctctggtcgagagacaggccaacgaagtggactggtgggacatggtgtgtaacgtgaagaagctgatcaacgagaaaaaggaggatggcaaggtgttttggcagaatctggctggctacaagagacaggaagccctgagaccatacctgagcagcgaggaagatcggaagaagggaaagaaattcgctcggtaccagctgggcgacctgctgctgcacctggaaaagaagcacggcgaggactggggaaaggtgtacgacgaggcctgggagcggattgacaagaaagtggaaggcctgagcaagcacatcaagctggaagaggaacggagaagcgaggacgcccagagcaaggccgccctgaccgactggctgcgggctaaggccagcttcgtgatcgagggcctgaaggaggccgacaaggacgagttctgcagatgcgagctgaagctgcagaagtggtacggggacctgcggggaaagcccttcgccatcgaagccgagaacagcatcctggacatcagcggcttcagcaagcagtacaactgtgccttcatctggcagaaggacggcgtgaagaagctgaacctgtacctgatcatcaactacttcaagggcggcaagctgcggttcaagaagatcaaacctgaagccttcgaagccaacagattctacaccgtgatcaacaaaaagagcggcgagatcgtgcccatggaggtgaacttcaacttcgacgaccccaacctgatcatcctgcctctggcctttggcaagagacagggcagagaattcatctggaacgacctgctgtccctggaaaccggcagcctgaagctggccaacggaagagtgatcgagaagacactgtacaacagaagaacccggcaggatgagcctgccctgttcgtggccctgaccttcgagcggcgggaggtcctggactcctccaatatcaaaccaatgaacctgatcggcgtggcaagaggcgaaaacatccccgccgtgatcgccctgaccgaccccgagggctgcccactgagccggtttaaggatagcctgggaaacccaacccacatcctgagaatcggcgagagctataaggagaagcagcggaccatccaggccaagaaggaggtggagcagcggagagccggcggctacagccggaagtacgccagcaaagccaagaatctggcagacgatatggtgagaaacaccgctagagatctgctgtactacgccgtgacccaggatgccatgctgatcttcgccaacctgagccggggcttcggccggcagggcaagcggaccttcatggccgagagacagtacacacggatggaggactggctgaccgccaagctggcctacgagggcctgagcaagacctacctgtccaagacactggcccagtacacctccaagacatgcagcaactgtgggtttaccatcaccagcgccgactacgacagggtgctggagaagctgaagaagacagcaacaggctggatgaccacaattaacggcaaggagctgaaggtggagggccagattacctactacaacagatacaagagacagaacgtagtcaaggacctgtccgtcgagctggatagactgagcgaagaatctgtgaacaacgacatctcctcctggacaaagggcagaagcggagaagctctgagcctcctgaagaaaagattctcccatagacccgtgcaggagaagttcgtgtgcctgaactgcggcttcgagacacacgcagccgagcaagccgccctgaacatcgccagatcctggctgttcctgcggagccaggagtacaagaaataccagacaaacaagacaaccggcaacaccgataagagagccttcgtcgagacctggcagtccttttaccggaagaagcttaaggaggtgtggaaacctgccgtgcggtctggcggatctggcggaggctccaccagccccaagaaaaagagaaaagtctaagctgccttctgcggggcttgccttctggccatgcccttcttctctcccttgcacctgtacctcttggtctttgaataaagcctgagtaggaaggctagcaaaaaaaaaaaaaaaaaaaaaaaaaaaaaaaaaaaaaaaaaaaaaaaaaaaaaaaaaaaaaaaaaaaaaaaaaaaaaaaa

SEQ ID NO: 9567 - RNA, 8796 nt, synthetic construct
  source 1..8796: mol_type = other RNA
aggaaataagagagaaaagaagagtaagaagaaatataagagccaccatggcccctaagaagaagcgtaaagtgagccggatgaaccacgaccaggagttcgacccccctaaggtgtaccctcccgtccccgccgagaagagaaagcccatccgggtcctgagcctgttcgatggcatcgccaccggtctgctggtgctgaaggacctgggcatccaggtggataggtacattgcctccgaggtgtgcgaggactccatcaccgtgggaatggtgcgtcatcagggcaagatcatgtacgtgggcgacgtgcggagcgtgacacagaagcatatccaggagtggggccctttcgacctggtgatcggcggcagcccttgcaatgacctgagcatcgtgaacccagcccggaagggcctgtacgagggaaccggcagactgttcttcgagttttacagactgctgcacgacgcccggcctaaggaaggcgacgaccggcccttcttttggctgttcgagaatgtggtggccatgggagtcagcgacaagcgggatattagccggttcctggagagcaaccccgtgatgatcgatgccaaggaagtgagcgccgcccaccgggccagatacttctggggcaatctgcctggcatgaacagacccctggccagcaccgtgaacgacaagctggagctgcaggagtgcctggagcacggccggatcgccaagttcagcaaggtgagaaccatcaccacccgaagcaacagcatcaaacaaggcaaggaccagcactttcctgtgttcatgaacgagaaggaggacatcctgtggtgtaccgagatggagagagtgttcgggttcccagtccactacacagatgtcagcaacatgtctagactggccagacagagactgctgggaagaagctggtccgtccctgtgatcagacacctgttcgcccctctgaaggagtacttcgcctgcgtgagcagcggcaacagcaacgccaacagccggggccccagcttctctagcggcctggtgccactgtccctgagagggagccacatgggccccatggagatctacaaaaccgtgagcgcctggaagcggcagcctgtgcgcgtgctgagcctgtttcggaatatcgataaagtcctgaaaagcctgggattcctggagagcggctctggctccggcggtggcaccctgaagtacgtggaggatgtgacaaacgtggtcagacgggatgtggagaagtggggccccttcgatctggtgtacggcagcacccaacccctgggcagctcttgtgaccggtgccctggctggtacatgtttcagttccaccggatcctgcagtacgccctgccgagacaggagtcccagcggccattcttttggattttcatggacaacttgctgctgaccgaggatgaccaggaaactaccactcggttcctgcagaccgaagccgtgaccctgcaggacgtgagaggccgggactaccagaacgccatgcgggtgtggtccaacatccctggactgaaaagcaagcacgcacctctgacccctaaagaagaggagtacctgcaggcccaggtgcggagcagaagcaagctggacgcccctaaggtggatctgctggtgaagaattgcctcctgcccctgagagagtacttcaagtatttcagccagaatagtctgcccctgggaggcagcggcggcggcgtgacctacgaggacgtgcacgtgaacttcagccacgaggagtgggccctgctggacagcagccagaagagcctgtacagggacgtgatgctggagacctgcaggaacctgatggccatcggctacaggctggaggaccacaacatcgaggagcactgccagagcagcaggaggcccggcaggtacaacatctgcaactgcggctacaagccctgcgagaacgaggaccacggcaagaagcagtgcaccttcggcggcccaagcagcggcgcccctcctcccagcggcggcaggcggcccaagcagcggcgcccctcctcccagcggcggcagcccagccggctccccaacctctaccgaggagggcacctctgagtccgccacccccgagagcggccctggcacctccaccgagcccagcgagggcagcgcacccggcagccctgccggcagccccacctccacagaggagggaaccagcaccgagcccagcgaaggcagcgccccaggcaccagcaccgagcctagtgagcaggagattaaacggatcaacaagatcagaagaagacttgtgaaagacagcaacaccaagaaggccggcaagacaggccccatgaaaaccctgctggttagagtgatgacacccgatctgagagagcggctggaaaacctgagaaagaagcctgaaaatatcccccagcccatcagcaatacatctagagccaacctgaataagctgctgaccgattacaccgaaatgaagaaggcgatcctgcatgtgtactgggaagagttccagaaggaccctgtgggcctgatgagccgggtggcccagcctgccagcaagaagatcgatcagaacaagctgaaacctgagatggacgagaagggcaacctgaccaccgccggctttgcctgctctcagtgtggccagcccctgttcgtgtacaagctggagcaggtgtctgagaagggcaaggcttacaccaactacttcggacggtgcaatgtggccgagcacgaaaagctgatcctgctggcccagctgaagcccgagaaggatagcgacgaagccgtgacatatagcctgggaaagtttgggcagagggccctggatttctacagcattcatgtgaccaaggagtccacccaccccgtgaagcccctggcccagatcgccggaaacagatacgcctccggacctgtgggaaaggccctgagcgacgcatgtatgggcacaatcgcctccttcctgtctaagtaccaggacatcatcatcgaacaccagaaggtggtgaagggcaaccagaagagactggagagcctgcgggagctggccggcaaggaaaacctggaataccctagcgtgaccctgccacctcagcctcacaccaaggagggcgttgatgcctacaacgaagtgatcgcccgggtgcgaatgtgggtgaacctgaacctgtggcagaagctgaagctaagcagagatgatgccaagcctctgctgagactgaagggattcccttcctttcctctggtcgagagacaggccaacgaagtggactggtgggacatggtgtgtaacgtgaagaagctgatcaacgagaaaaaggaggatggcaaggtgttttggcagaatctggctggctacaagagacaggaagccctgagaccatacctgagcagcgaggaagatcggaagaagggaaagaaattcgctcggtaccagctgggcgacctgctgctgcacctggaaaagaagcacggcgaggactggggaaaggtgtacgacgaggcctgggagcggattgacaagaaagtggaaggcctgagcaagcacatcaagctggaagaggaacggagaagcgaggacgcccagagcaaggccgccctgaccgactggctgcgggctaaggccagcttcgtgatcgagggcctgaaggaggccgacaaggacgagttctgcagatgcgagctgaagctgcagaagtggtacggggacctgcggggaaagcccttcgccatcgaagccgagaacagcatcctggacatcagcggcttcagcaagcagtacaactgtgccttcatctggcagaaggacggcgtgaagaagctgaacctgtacctgatcatcaactacttcaagggcggcaagctgcggttcaagaagatcaaacctgaagccttcgaagccaacagattctacaccgtgatcaacaaaaagagcggcgagatcgtgcccatggaggtgaacttcaacttcgacgaccccaacctgatcatcctgcctctggcctttggcaagagacagggcagagaattcatctggaacgacctgctgtccctggaaaccggcagcctgaagctggccaacggaagagtgatcgagaagacactgtacaacagaagaacccggcaggatgagcctgccctgttcgtggccctgaccttcgagcggcgggaggtcctggactcctccaatatcaaaccaatgaacctgatcggcgtggcaagaggcgaaaacatccccgccgtgatcgccctgaccgaccccgagggctgcccactgagccggtttaaggatagcctgggaaacccaacccacatcctgagaatcggcgagagctataaggagaagcagcggaccatccaggccaagaaggaggtggagcagcggagagccggcggctacagccggaagtacgccagcaaagccaagaatctggcagacgatatggtgagaaacaccgctagagatctgctgtactacgccgtgacccaggatgccatgctgatcttcgccaacctgagccggggcttcggccggcagggcaagcggaccttcatggccgagagacagtacacacggatggaggactggctgaccgccaagctggcctacgagggcctgagcaagacctacctgtccaagacactggcccagtacacctccaagacatgcagcaactgtgggtttaccatcaccagcgccgactacgacagggtgctggagaagctgaagaagacagcaacaggctggatgaccacaattaacggcaaggagctgaaggtggagggccagattacctactacaacagatacaagagacagaacgtagtcaaggacctgtccgtcgagctggatagactgagcgaagaatctgtgaacaacgacatctcctcctggacaaagggcagaagcggagaagctctgagcctcctgaagaaaagattctcccatagacccgtgcaggagaagttcgtgtgcctgaactgcggcttcgagacacacgcagccgagcaagccgccctgaacatcgccagatcctggctgttcctgcggagccaggagtacaagaaataccagacaaacaagacaaccggcaacaccgataagagagccttcgtcgagacctggcagtccttttaccggaagaagcttaaggaggtgtggaaacctgccgtgcggtctggcggatctggcggaggctccaccagccccaagaaaaagagaaaagtctaagctgccttctgcggggcttgccttctggccatgcccttcttctctcccttgcacctgtacctcttggtctttgaataaagcctgagtaggaaggctagcaaaaaaaaaaaaaaaaaaaaaaaaaaaaaaaaaaaaaaaaaaaaaaaaaaaaaaaaaaaaaaaaaaaaaaaaaaaaaaaagcccagccggctccccaacctctaccgaggagggcacctctgagtccgccacccccgagagcggccctggcacctccaccgagcccagcgagggcagcgcacccggcagccctgccggcagccccacctccacagaggagggaaccagcaccgagcccagcgaaggcagcgccccaggcaccagcaccgagcctagtgagcaggagattaaacggatcaacaagatcagaagaagacttgtgaaagacagcaacaccaagaaggccggcaagacaggccccatgaaaaccctgctggttagagtgatgacacccgatctgagagagcggctggaaaacctgagaaagaagcctgaaaatatcccccagcccatcagcaatacatctagagccaacctgaataagctgctgaccgattacaccgaaatgaagaaggcgatcctgcatgtgtactgggaagagttccagaaggaccctgtgggcctgatgagccgggtggcccagcctgccagcaagaagatcgatcagaacaagctgaaacctgagatggacgagaagggcaacctgaccaccgccggctttgcctgctctcagtgtggccagcccctgttcgtgtacaagctggagcaggtgtctgagaagggcaaggcttacaccaactacttcggacggtgcaatgtggccgagcacgaaaagctgatcctgctggcccagctgaagcccgagaaggatagcgacgaagccgtgacatatagcctgggaaagtttgggcagagggccctggatttctacagcattcatgtgaccaaggagtccacccaccccgtgaagcccctggcccagatcgccggaaacagatacgcctccggacctgtgggaaaggccctgagcgacgcatgtatgggcacaatcgcctccttcctgtctaagtaccaggacatcatcatcgaacaccagaaggtggtgaagggcaaccagaagagactggagagcctgcgggagctggccggcaaggaaaacctggaataccctagcgtgaccctgccacctcagcctcacaccaaggagggcgttgatgcctacaacgaagtgatcgcccgggtgcgaatgtgggtgaacctgaacctgtggcagaagctgaagctaagcagagatgatgccaagcctctgctgagactgaagggattcccttcctttcctctggtcgagagacaggccaacgaagtggactggtgggacatggtgtgtaacgtgaagaagctgatcaacgagaaaaaggaggatggcaaggtgttttggcagaatctggctggctacaagagacaggaagccctgagaccatacctgagcagcgaggaagatcggaagaagggaaagaaattcgctcggtaccagctgggcgacctgctgctgcacctggaaaagaagcacggcgaggactggggaaaggtgtacgacgaggcctgggagcggattgacaagaaagtggaaggcctgagcaagcacatcaagctggaagaggaacggagaagcgaggacgcccagagcaaggccgccctgaccgactggctgcgggctaaggccagcttcgtgatcgagggcctgaaggaggccgacaaggacgagttctgcagatgcgagctgaagctgcagaagtggtacggggacctgcggggaaagcccttcgccatcgaagccgagaacagcatcctggacatcagcggcttcagcaagcagtacaactgtgccttcatctggcagaaggacggcgtgaagaagctgaacctgtacctgatcatcaactacttcaagggcggcaagctgcggttcaagaagatcaaacctgaagccttcgaagccaacagattctacaccgtgatcaacaaaaagagcggcgagatcgtgcccatggaggtgaacttcaacttcgacgaccccaacctgatcatcctgcctctggcctttggcaagagacagggcagagaattcatctggaacgacctgctgtccctggaaaccggcagcctgaagctggccaacggaagagtgatcgagaagacactgtacaacagaagaacccggcaggatgagcctgccctgttcgtggccctgaccttcgagcggcgggaggtcctggactcctccaatatcaaaccaatgaacctgatcggcgtggcaagaggcgaaaacatccccgccgtgatcgccctgaccgaccccgagggctgcccactgagccggtttaaggatagcctgggaaacccaacccacatcctgagaatcggcgagagctataaggagaagcagcggaccatccaggccaagaaggaggtggagcagcggagagccggcggctacagccggaagtacgccagcaaagccaagaatctggcagacgatatggtgagaaacaccgctagagatctgctgtactacgccgtgacccaggatgccatgctgatcttcgccaacctgagccggggcttcggccggcagggcaagcggaccttcatggccgagagacagtacacacggatggaggactggctgaccgccaagctggcctacgagggcctgagcaagacctacctgtccaagacactggcccagtacacctccaagacatgcagcaactgtgggtttaccatcaccagcgccgactacgacagggtgctggagaagctgaagaagacagcaacaggctggatgaccacaattaacggcaaggagctgaaggtggagggccagattacctactacaacagatacaagagacagaacgtagtcaaggacctgtccgtcgagctggatagactgagcgaagaatctgtgaacaacgacatctcctcctggacaaagggcagaagcggagaagctctgagcctcctgaagaaaagattctcccatagacccgtgcaggagaagttcgtgtgcctgaactgcggcttcgagacacacgcagccgagcaagccgccctgaacatcgccagatcctggctgttcctgcggagccaggagtacaagaaataccagacaaacaagacaaccggcaacaccgataagagagccttcgtcgagacctggcagtccttttaccggaagaagcttaaggaggtgtggaaacctgccgtgcggtctggcggatctggcggaggctccaccagccccaagaaaaagagaaaagtctaagctgccttctgcggggcttgccttctggccatgcccttcttctctcccttgcacctgtacctcttggtctttgaataaagcctgagtaggaaggctagcaaaaaaaaaaaaaaaaaaaaaaaaaaaaaaaaaaaaaaaaaaaaaaaaaaaaaaaaaaaaaaaaaaaaaaaaaaaaaaaa

SEQ ID NO: 9568 - RNA, 8796 nt, synthetic construct
  source 1..8796: mol_type = other RNA
aggaaataagagagaaaagaagagtaagaagaaatataagagccaccatggcccctaagaagaagcgtaaagtgagccggatgaaccacgaccaggagttcgacccccctaaggtgtaccctcccgtccccgccgagaagagaaagcccatccgggtcctgagcctgttcgatggcatcgccaccggtctgctggtgctgaaggacctgggcatccaggtggataggtacattgcctccgaggtgtgcgaggactccatcaccgtgggaatggtgcgtcatcagggcaagatcatgtacgtgggcgacgtgcggagcgtgacacagaagcatatccaggagtggggccctttcgacctggtgatcggcggcagcccttgcaatgacctgagcatcgtgaacccagcccggaagggcctgtacgagggaaccggcagactgttcttcgagttttacagactgctgcacgacgcccggcctaaggaaggcgacgaccggcccttcttttggctgttcgagaatgtggtggccatgggagtcagcgacaagcgggatattagccggttcctggagagcaaccccgtgatgatcgatgccaaggaagtgagcgccgcccaccgggccagatacttctggggcaatctgcctggcatgaacagacccctggccagcaccgtgaacgacaagctggagctgcaggagtgcctggagcacggccggatcgccaagttcagcaaggtgagaaccatcaccacccgaagcaacagcatcaaacaaggcaaggaccagcactttcctgtgttcatgaacgagaaggaggacatcctgtggtgtaccgagatggagagagtgttcgggttcccagtccactacacagatgtcagcaacatgtctagactggccagacagagactgctgggaagaagctggtccgtccctgtgatcagacacctgttcgcccctctgaaggagtacttcgcctgcgtgagcagcggcaacagcaacgccaacagccggggccccagcttctctagcggcctggtgccactgtccctgagagggagccacatgggccccatggagatctacaaaaccgtgagcgcctggaagcggcagcctgtgcgcgtgctgagcctgtttcggaatatcgataaagtcctgaaaagcctgggattcctggagagcggctctggctccggcggtggcaccctgaagtacgtggaggatgtgacaaacgtggtcagacgggatgtggagaagtggggccccttcgatctggtgtacggcagcacccaacccctgggcagctcttgtgaccggtgccctggctggtacatgtttcagttccaccggatcctgcagtacgccctgccgagacaggagtcccagcggccattcttttggattttcatggacaacttgctgctgaccgaggatgaccaggaaactaccactcggttcctgcagaccgaagccgtgaccctgcaggacgtgagaggccgggactaccagaacgccatgcgggtgtggtccaacatccctggactgaaaagcaagcacgcacctctgacccctaaagaagaggagtacctgcaggcccaggtgcggagcagaagcaagctggacgcccctaaggtggatctgctggtgaagaattgcctcctgcccctgagagagtacttcaagtatttcagccagaatagtctgcccctgggaggcagcggcggcggcctgacctacgacgacgtgtacgtgaacttcacccaggaggagtgggccctgctgaaccccagccagaagagcctgtacaaggacgtgatgctggagacctacaggaacctgatcgccgtgggctacaactgggaggaccacaacatcgaggagcactgccagagcagcaggaggcacggcaggaacgagaggatcctgaccggcgagaacccctacgagggcatccagtgcggcgaggccttcgtgcaccacggcggcccaagcagcggcgcccctcctcccagcggcggcaggcggcccaagcagcggcgcccctcctcccagcggcggcagcccagccggctccccaacctctaccgaggagggcacctctgagtccgccacccccgagagcggccctggcacctccaccgagcccagcgagggcagcgcacccggcagccctgccggcagccccacctccacagaggagggaaccagcaccgagcccagcgaaggcagcgccccaggcaccagcaccgagcctagtgagcaggagattaaacggatcaacaagatcagaagaagacttgtgaaagacagcaacaccaagaaggccggcaagacaggccccatgaaaaccctgctggttagagtgatgacacccgatctgagagagcggctggaaaacctgagaaagaagcctgaaaatatcccccagcccatcagcaatacatctagagccaacctgaataagctgctgaccgattacaccgaaatgaagaaggcgatcctgcatgtgtactgggaagagttccagaaggaccctgtgggcctgatgagccgggtggcccagcctgccagcaagaagatcgatcagaacaagctgaaacctgagatggacgagaagggcaacctgaccaccgccggctttgcctgctctcagtgtggccagcccctgttcgtgtacaagctggagcaggtgtctgagaagggcaaggcttacaccaactacttcggacggtgcaatgtggccgagcacgaaaagctgatcctgctggcccagctgaagcccgagaaggatagcgacgaagccgtgacatatagcctgggaaagtttgggcagagggccctggatttctacagcattcatgtgaccaaggagtccacccaccccgtgaagcccctggcccagatcgccggaaacagatacgcctccggacctgtgggaaaggccctgagcgacgcatgtatgggcacaatcgcctccttcctgtctaagtaccaggacatcatcatcgaacaccagaaggtggtgaagggcaaccagaagagactggagagcctgcgggagctggccggcaaggaaaacctggaataccctagcgtgaccctgccacctcagcctcacaccaaggagggcgttgatgcctacaacgaagtgatcgcccgggtgcgaatgtgggtgaacctgaacctgtggcagaagctgaagctaagcagagatgatgccaagcctctgctgagactgaagggattcccttcctttcctctggtcgagagacaggccaacgaagtggactggtgggacatggtgtgtaacgtgaagaagctgatcaacgagaaaaaggaggatggcaaggtgttttggcagaatctggctggctacaagagacaggaagccctgagaccatacctgagcagcgaggaagatcggaagaagggaaagaaattcgctcggtaccagctgggcgacctgctgctgcacctggaaaagaagcacggcgaggactggggaaaggtgtacgacgaggcctgggagcggattgacaagaaagtggaaggcctgagcaagcacatcaagctggaagaggaacggagaagcgaggacgcccagagcaaggccgccctgaccgactggctgcgggctaaggccagcttcgtgatcgagggcctgaaggaggccgacaaggacgagttctgcagatgcgagctgaagctgcagaagtggtacggggacctgcggggaaagcccttcgccatcgaagccgagaacagcatcctggacatcagcggcttcagcaagcagtacaactgtgccttcatctggcagaaggacggcgtgaagaagctgaacctgtacctgatcatcaactacttcaagggcggcaagctgcggttcaagaagatcaaacctgaagccttcgaagccaacagattctacaccgtgatcaacaaaaagagcggcgagatcgtgcccatggaggtgaacttcaacttcgacgaccccaacctgatcatcctgcctctggcctttggcaagagacagggcagagaattcatctggaacgacctgctgtccctggaaaccggcagcctgaagctggccaacggaagagtgatcgagaagacactgtacaacagaagaacccggcaggatgagcctgccctgttcgtggccctgaccttcgagcggcgggaggtcctggactcctccaatatcaaaccaatgaacctgatcggcgtggcaagaggcgaaaacatccccgccgtgatcgccctgaccgaccccgagggctgcccactgagccggtttaaggatagcctgggaaacccaacccacatcctgagaatcggcgagagctataaggagaagcagcggaccatccaggccaagaaggaggtggagcagcggagagccggcggctacagccggaagtacgccagcaaagccaagaatctggcagacgatatggtgagaaacaccgctagagatctgctgtactacgccgtgacccaggatgccatgctgatcttcgccaacctgagccggggcttcggccggcagggcaagcggaccttcatggccgagagacagtacacacggatggaggactggctgaccgccaagctggcctacgagggcctgagcaagacctacctgtccaagacactggcccagtacacctccaagacatgcagcaactgtgggtttaccatcaccagcgccgactacgacagggtgctggagaagctgaagaagacagcaacaggctggatgaccacaattaacggcaaggagctgaaggtggagggccagattacctactacaacagatacaagagacagaacgtagtcaaggacctgtccgtcgagctggatagactgagcgaagaatctgtgaacaacgacatctcctcctggacaaagggcagaagcggagaagctctgagcctcctgaagaaaagattctcccatagacccgtgcaggagaagttcgtgtgcctgaactgcggcttcgagacacacgcagccgagcaagccgccctgaacatcgccagatcctggctgttcctgcggagccaggagtacaagaaataccagacaaacaagacaaccggcaacaccgataagagagccttcgtcgagacctggcagtccttttaccggaagaagcttaaggaggtgtggaaacctgccgtgcggtctggcggatctggcggaggctccaccagccccaagaaaaagagaaaagtctaagctgccttctgcggggcttgccttctggccatgcccttcttctctcccttgcacctgtacctcttggtctttgaataaagcctgagtaggaaggctagcaaaaaaaaaaaaaaaaaaaaaaaaaaaaaaaaaaaaaaaaaaaaaaaaaaaaaaaaaaaaaaaaaaaaaaaaaaaaaaaagcccagccggctccccaacctctaccgaggagggcacctctgagtccgccacccccgagagcggccctggcacctccaccgagcccagcgagggcagcgcacccggcagccctgccggcagccccacctccacagaggagggaaccagcaccgagcccagcgaaggcagcgccccaggcaccagcaccgagcctagtgagcaggagattaaacggatcaacaagatcagaagaagacttgtgaaagacagcaacaccaagaaggccggcaagacaggccccatgaaaaccctgctggttagagtgatgacacccgatctgagagagcggctggaaaacctgagaaagaagcctgaaaatatcccccagcccatcagcaatacatctagagccaacctgaataagctgctgaccgattacaccgaaatgaagaaggcgatcctgcatgtgtactgggaagagttccagaaggaccctgtgggcctgatgagccgggtggcccagcctgccagcaagaagatcgatcagaacaagctgaaacctgagatggacgagaagggcaacctgaccaccgccggctttgcctgctctcagtgtggccagcccctgttcgtgtacaagctggagcaggtgtctgagaagggcaaggcttacaccaactacttcggacggtgcaatgtggccgagcacgaaaagctgatcctgctggcccagctgaagcccgagaaggatagcgacgaagccgtgacatatagcctgggaaagtttgggcagagggccctggatttctacagcattcatgtgaccaaggagtccacccaccccgtgaagcccctggcccagatcgccggaaacagatacgcctccggacctgtgggaaaggccctgagcgacgcatgtatgggcacaatcgcctccttcctgtctaagtaccaggacatcatcatcgaacaccagaaggtggtgaagggcaaccagaagagactggagagcctgcgggagctggccggcaaggaaaacctggaataccctagcgtgaccctgccacctcagcctcacaccaaggagggcgttgatgcctacaacgaagtgatcgcccgggtgcgaatgtgggtgaacctgaacctgtggcagaagctgaagctaagcagagatgatgccaagcctctgctgagactgaagggattcccttcctttcctctggtcgagagacaggccaacgaagtggactggtgggacatggtgtgtaacgtgaagaagctgatcaacgagaaaaaggaggatggcaaggtgttttggcagaatctggctggctacaagagacaggaagccctgagaccatacctgagcagcgaggaagatcggaagaagggaaagaaattcgctcggtaccagctgggcgacctgctgctgcacctggaaaagaagcacggcgaggactggggaaaggtgtacgacgaggcctgggagcggattgacaagaaagtggaaggcctgagcaagcacatcaagctggaagaggaacggagaagcgaggacgcccagagcaaggccgccctgaccgactggctgcgggctaaggccagcttcgtgatcgagggcctgaaggaggccgacaaggacgagttctgcagatgcgagctgaagctgcagaagtggtacggggacctgcggggaaagcccttcgccatcgaagccgagaacagcatcctggacatcagcggcttcagcaagcagtacaactgtgccttcatctggcagaaggacggcgtgaagaagctgaacctgtacctgatcatcaactacttcaagggcggcaagctgcggttcaagaagatcaaacctgaagccttcgaagccaacagattctacaccgtgatcaacaaaaagagcggcgagatcgtgcccatggaggtgaacttcaacttcgacgaccccaacctgatcatcctgcctctggcctttggcaagagacagggcagagaattcatctggaacgacctgctgtccctggaaaccggcagcctgaagctggccaacggaagagtgatcgagaagacactgtacaacagaagaacccggcaggatgagcctgccctgttcgtggccctgaccttcgagcggcgggaggtcctggactcctccaatatcaaaccaatgaacctgatcggcgtggcaagaggcgaaaacatccccgccgtgatcgccctgaccgaccccgagggctgcccactgagccggtttaaggatagcctgggaaacccaacccacatcctgagaatcggcgagagctataaggagaagcagcggaccatccaggccaagaaggaggtggagcagcggagagccggcggctacagccggaagtacgccagcaaagccaagaatctggcagacgatatggtgagaaacaccgctagagatctgctgtactacgccgtgacccaggatgccatgctgatcttcgccaacctgagccggggcttcggccggcagggcaagcggaccttcatggccgagagacagtacacacggatggaggactggctgaccgccaagctggcctacgagggcctgagcaagacctacctgtccaagacactggcccagtacacctccaagacatgcagcaactgtgggtttaccatcaccagcgccgactacgacagggtgctggagaagctgaagaagacagcaacaggctggatgaccacaattaacggcaaggagctgaaggtggagggccagattacctactacaacagatacaagagacagaacgtagtcaaggacctgtccgtcgagctggatagactgagcgaagaatctgtgaacaacgacatctcctcctggacaaagggcagaagcggagaagctctgagcctcctgaagaaaagattctcccatagacccgtgcaggagaagttcgtgtgcctgaactgcggcttcgagacacacgcagccgagcaagccgccctgaacatcgccagatcctggctgttcctgcggagccaggagtacaagaaataccagacaaacaagacaaccggcaacaccgataagagagccttcgtcgagacctggcagtccttttaccggaagaagcttaaggaggtgtggaaacctgccgtgcggtctggcggatctggcggaggctccaccagccccaagaaaaagagaaaagtctaagctgccttctgcggggcttgccttctggccatgcccttcttctctcccttgcacctgtacctcttggtctttgaataaagcctgagtaggaaggctagcaaaaaaaaaaaaaaaaaaaaaaaaaaaaaaaaaaaaaaaaaaaaaaaaaaaaaaaaaaaaaaaaaaaaaaaaaaaaaaaa

SEQ ID NO: 9569 - RNA, 8787 nt, synthetic construct
  source 1..8787: mol_type = other RNA
aggaaataagagagaaaagaagagtaagaagaaatataagagccaccatggcccctaagaagaagcgtaaagtgagccggatgaaccacgaccaggagttcgacccccctaaggtgtaccctcccgtccccgccgagaagagaaagcccatccgggtcctgagcctgttcgatggcatcgccaccggtctgctggtgctgaaggacctgggcatccaggtggataggtacattgcctccgaggtgtgcgaggactccatcaccgtgggaatggtgcgtcatcagggcaagatcatgtacgtgggcgacgtgcggagcgtgacacagaagcatatccaggagtggggccctttcgacctggtgatcggcggcagcccttgcaatgacctgagcatcgtgaacccagcccggaagggcctgtacgagggaaccggcagactgttcttcgagttttacagactgctgcacgacgcccggcctaaggaaggcgacgaccggcccttcttttggctgttcgagaatgtggtggccatgggagtcagcgacaagcgggatattagccggttcctggagagcaaccccgtgatgatcgatgccaaggaagtgagcgccgcccaccgggccagatacttctggggcaatctgcctggcatgaacagacccctggccagcaccgtgaacgacaagctggagctgcaggagtgcctggagcacggccggatcgccaagttcagcaaggtgagaaccatcaccacccgaagcaacagcatcaaacaaggcaaggaccagcactttcctgtgttcatgaacgagaaggaggacatcctgtggtgtaccgagatggagagagtgttcgggttcccagtccactacacagatgtcagcaacatgtctagactggccagacagagactgctgggaagaagctggtccgtccctgtgatcagacacctgttcgcccctctgaaggagtacttcgcctgcgtgagcagcggcaacagcaacgccaacagccggggccccagcttctctagcggcctggtgccactgtccctgagagggagccacatgggccccatggagatctacaaaaccgtgagcgcctggaagcggcagcctgtgcgcgtgctgagcctgtttcggaatatcgataaagtcctgaaaagcctgggattcctggagagcggctctggctccggcggtggcaccctgaagtacgtggaggatgtgacaaacgtggtcagacgggatgtggagaagtggggccccttcgatctggtgtacggcagcacccaacccctgggcagctcttgtgaccggtgccctggctggtacatgtttcagttccaccggatcctgcagtacgccctgccgagacaggagtcccagcggccattcttttggattttcatggacaacttgctgctgaccgaggatgaccaggaaactaccactcggttcctgcagaccgaagccgtgaccctgcaggacgtgagaggccgggactaccagaacgccatgcgggtgtggtccaacatccctggactgaaaagcaagcacgcacctctgacccctaaagaagaggagtacctgcaggcccaggtgcggagcagaagcaagctggacgcccctaaggtggatctgctggtgaagaattgcctcctgcccctgagagagtacttcaagtatttcagccagaatagtctgcccctgggaggcagcggcggcggcctggagggcctggtgaccttcgaggaggtggccgtgtacttcaccgagagcgagtggagcctgctggaccccgcccagagggccctgtacagggacgtgatggaggagaactacgagaacgtgaccagcctgggcttccccgtgagcaagcccgacgtgatcagctggctggagaggggcgaggacccctgggtgcccgacctgcaggaccccgagaagagggagaccctgagggaggcctgcggcggcccaagcagcggcgcccctcctcccagcggcggcaggcggcccaagcagcggcgcccctcctcccagcggcggcagcccagccggctccccaacctctaccgaggagggcacctctgagtccgccacccccgagagcggccctggcacctccaccgagcccagcgagggcagcgcacccggcagccctgccggcagccccacctccacagaggagggaaccagcaccgagcccagcgaaggcagcgccccaggcaccagcaccgagcctagtgagcaggagattaaacggatcaacaagatcagaagaagacttgtgaaagacagcaacaccaagaaggccggcaagacaggccccatgaaaaccctgctggttagagtgatgacacccgatctgagagagcggctggaaaacctgagaaagaagcctgaaaatatcccccagcccatcagcaatacatctagagccaacctgaataagctgctgaccgattacaccgaaatgaagaaggcgatcctgcatgtgtactgggaagagttccagaaggaccctgtgggcctgatgagccgggtggcccagcctgccagcaagaagatcgatcagaacaagctgaaacctgagatggacgagaagggcaacctgaccaccgccggctttgcctgctctcagtgtggccagcccctgttcgtgtacaagctggagcaggtgtctgagaagggcaaggcttacaccaactacttcggacggtgcaatgtggccgagcacgaaaagctgatcctgctggcccagctgaagcccgagaaggatagcgacgaagccgtgacatatagcctgggaaagtttgggcagagggccctggatttctacagcattcatgtgaccaaggagtccacccaccccgtgaagcccctggcccagatcgccggaaacagatacgcctccggacctgtgggaaaggccctgagcgacgcatgtatgggcacaatcgcctccttcctgtctaagtaccaggacatcatcatcgaacaccagaaggtggtgaagggcaaccagaagagactggagagcctgcgggagctggccggcaaggaaaacctggaataccctagcgtgaccctgccacctcagcctcacaccaaggagggcgttgatgcctacaacgaagtgatcgcccgggtgcgaatgtgggtgaacctgaacctgtggcagaagctgaagctaagcagagatgatgccaagcctctgctgagactgaagggattcccttcctttcctctggtcgagagacaggccaacgaagtggactggtgggacatggtgtgtaacgtgaagaagctgatcaacgagaaaaaggaggatggcaaggtgttttggcagaatctggctggctacaagagacaggaagccctgagaccatacctgagcagcgaggaagatcggaagaagggaaagaaattcgctcggtaccagctgggcgacctgctgctgcacctggaaaagaagcacggcgaggactggggaaaggtgtacgacgaggcctgggagcggattgacaagaaagtggaaggcctgagcaagcacatcaagctggaagaggaacggagaagcgaggacgcccagagcaaggccgccctgaccgactggctgcgggctaaggccagcttcgtgatcgagggcctgaaggaggccgacaaggacgagttctgcagatgcgagctgaagctgcagaagtggtacggggacctgcggggaaagcccttcgccatcgaagccgagaacagcatcctggacatcagcggcttcagcaagcagtacaactgtgccttcatctggcagaaggacggcgtgaagaagctgaacctgtacctgatcatcaactacttcaagggcggcaagctgcggttcaagaagatcaaacctgaagccttcgaagccaacagattctacaccgtgatcaacaaaaagagcggcgagatcgtgcccatggaggtgaacttcaacttcgacgaccccaacctgatcatcctgcctctggcctttggcaagagacagggcagagaattcatctggaacgacctgctgtccctggaaaccggcagcctgaagctggccaacggaagagtgatcgagaagacactgtacaacagaagaacccggcaggatgagcctgccctgttcgtggccctgaccttcgagcggcgggaggtcctggactcctccaatatcaaaccaatgaacctgatcggcgtggcaagaggcgaaaacatccccgccgtgatcgccctgaccgaccccgagggctgcccactgagccggtttaaggatagcctgggaaacccaacccacatcctgagaatcggcgagagctataaggagaagcagcggaccatccaggccaagaaggaggtggagcagcggagagccggcggctacagccggaagtacgccagcaaagccaagaatctggcagacgatatggtgagaaacaccgctagagatctgctgtactacgccgtgacccaggatgccatgctgatcttcgccaacctgagccggggcttcggccggcagggcaagcggaccttcatggccgagagacagtacacacggatggaggactggctgaccgccaagctggcctacgagggcctgagcaagacctacctgtccaagacactggcccagtacacctccaagacatgcagcaactgtgggtttaccatcaccagcgccgactacgacagggtgctggagaagctgaagaagacagcaacaggctggatgaccacaattaacggcaaggagctgaaggtggagggccagattacctactacaacagatacaagagacagaacgtagtcaaggacctgtccgtcgagctggatagactgagcgaagaatctgtgaacaacgacatctcctcctggacaaagggcagaagcggagaagctctgagcctcctgaagaaaagattctcccatagacccgtgcaggagaagttcgtgtgcctgaactgcggcttcgagacacacgcagccgagcaagccgccctgaacatcgccagatcctggctgttcctgcggagccaggagtacaagaaataccagacaaacaagacaaccggcaacaccgataagagagccttcgtcgagacctggcagtccttttaccggaagaagcttaaggaggtgtggaaacctgccgtgcggtctggcggatctggcggaggctccaccagccccaagaaaaagagaaaagtctaagctgccttctgcggggcttgccttctggccatgcccttcttctctcccttgcacctgtacctcttggtctttgaataaagcctgagtaggaaggctagcaaaaaaaaaaaaaaaaaaaaaaaaaaaaaaaaaaaaaaaaaaaaaaaaaaaaaaaaaaaaaaaaaaaaaaaaaaaaaaaagcccagccggctccccaacctctaccgaggagggcacctctgagtccgccacccccgagagcggccctggcacctccaccgagcccagcgagggcagcgcacccggcagccctgccggcagccccacctccacagaggagggaaccagcaccgagcccagcgaaggcagcgccccaggcaccagcaccgagcctagtgagcaggagattaaacggatcaacaagatcagaagaagacttgtgaaagacagcaacaccaagaaggccggcaagacaggccccatgaaaaccctgctggttagagtgatgacacccgatctgagagagcggctggaaaacctgagaaagaagcctgaaaatatcccccagcccatcagcaatacatctagagccaacctgaataagctgctgaccgattacaccgaaatgaagaaggcgatcctgcatgtgtactgggaagagttccagaaggaccctgtgggcctgatgagccgggtggcccagcctgccagcaagaagatcgatcagaacaagctgaaacctgagatggacgagaagggcaacctgaccaccgccggctttgcctgctctcagtgtggccagcccctgttcgtgtacaagctggagcaggtgtctgagaagggcaaggcttacaccaactacttcggacggtgcaatgtggccgagcacgaaaagctgatcctgctggcccagctgaagcccgagaaggatagcgacgaagccgtgacatatagcctgggaaagtttgggcagagggccctggatttctacagcattcatgtgaccaaggagtccacccaccccgtgaagcccctggcccagatcgccggaaacagatacgcctccggacctgtgggaaaggccctgagcgacgcatgtatgggcacaatcgcctccttcctgtctaagtaccaggacatcatcatcgaacaccagaaggtggtgaagggcaaccagaagagactggagagcctgcgggagctggccggcaaggaaaacctggaataccctagcgtgaccctgccacctcagcctcacaccaaggagggcgttgatgcctacaacgaagtgatcgcccgggtgcgaatgtgggtgaacctgaacctgtggcagaagctgaagctaagcagagatgatgccaagcctctgctgagactgaagggattcccttcctttcctctggtcgagagacaggccaacgaagtggactggtgggacatggtgtgtaacgtgaagaagctgatcaacgagaaaaaggaggatggcaaggtgttttggcagaatctggctggctacaagagacaggaagccctgagaccatacctgagcagcgaggaagatcggaagaagggaaagaaattcgctcggtaccagctgggcgacctgctgctgcacctggaaaagaagcacggcgaggactggggaaaggtgtacgacgaggcctgggagcggattgacaagaaagtggaaggcctgagcaagcacatcaagctggaagaggaacggagaagcgaggacgcccagagcaaggccgccctgaccgactggctgcgggctaaggccagcttcgtgatcgagggcctgaaggaggccgacaaggacgagttctgcagatgcgagctgaagctgcagaagtggtacggggacctgcggggaaagcccttcgccatcgaagccgagaacagcatcctggacatcagcggcttcagcaagcagtacaactgtgccttcatctggcagaaggacggcgtgaagaagctgaacctgtacctgatcatcaactacttcaagggcggcaagctgcggttcaagaagatcaaacctgaagccttcgaagccaacagattctacaccgtgatcaacaaaaagagcggcgagatcgtgcccatggaggtgaacttcaacttcgacgaccccaacctgatcatcctgcctctggcctttggcaagagacagggcagagaattcatctggaacgacctgctgtccctggaaaccggcagcctgaagctggccaacggaagagtgatcgagaagacactgtacaacagaagaacccggcaggatgagcctgccctgttcgtggccctgaccttcgagcggcgggaggtcctggactcctccaatatcaaaccaatgaacctgatcggcgtggcaagaggcgaaaacatccccgccgtgatcgccctgaccgaccccgagggctgcccactgagccggtttaaggatagcctgggaaacccaacccacatcctgagaatcggcgagagctataaggagaagcagcggaccatccaggccaagaaggaggtggagcagcggagagccggcggctacagccggaagtacgccagcaaagccaagaatctggcagacgatatggtgagaaacaccgctagagatctgctgtactacgccgtgacccaggatgccatgctgatcttcgccaacctgagccggggcttcggccggcagggcaagcggaccttcatggccgagagacagtacacacggatggaggactggctgaccgccaagctggcctacgagggcctgagcaagacctacctgtccaagacactggcccagtacacctccaagacatgcagcaactgtgggtttaccatcaccagcgccgactacgacagggtgctggagaagctgaagaagacagcaacaggctggatgaccacaattaacggcaaggagctgaaggtggagggccagattacctactacaacagatacaagagacagaacgtagtcaaggacctgtccgtcgagctggatagactgagcgaagaatctgtgaacaacgacatctcctcctggacaaagggcagaagcggagaagctctgagcctcctgaagaaaagattctcccatagacccgtgcaggagaagttcgtgtgcctgaactgcggcttcgagacacacgcagccgagcaagccgccctgaacatcgccagatcctggctgttcctgcggagccaggagtacaagaaataccagacaaacaagacaaccggcaacaccgataagagagccttcgtcgagacctggcagtccttttaccggaagaagcttaaggaggtgtggaaacctgccgtgcggtctggcggatctggcggaggctccaccagccccaagaaaaagagaaaagtctaagctgccttctgcggggcttgccttctggccatgcccttcttctctcccttgcacctgtacctcttggtctttgaataaagcctgagtaggaaggctagcaaaaaaaaaaaaaaaaaaaaaaaaaaaaaaaaaaaaaaaaaaaaaaaaaaaaaaaaaaaaaaaaaaaaaaaaaaaaaaaa

SEQ ID NO: 9570 - RNA, 8787 nt, synthetic construct
  source 1..8787: mol_type = other RNA
aggaaataagagagaaaagaagagtaagaagaaatataagagccaccatggcccctaagaagaagcgtaaagtgagccggatgaaccacgaccaggagttcgacccccctaaggtgtaccctcccgtccccgccgagaagagaaagcccatccgggtcctgagcctgttcgatggcatcgccaccggtctgctggtgctgaaggacctgggcatccaggtggataggtacattgcctccgaggtgtgcgaggactccatcaccgtgggaatggtgcgtcatcagggcaagatcatgtacgtgggcgacgtgcggagcgtgacacagaagcatatccaggagtggggccctttcgacctggtgatcggcggcagcccttgcaatgacctgagcatcgtgaacccagcccggaagggcctgtacgagggaaccggcagactgttcttcgagttttacagactgctgcacgacgcccggcctaaggaaggcgacgaccggcccttcttttggctgttcgagaatgtggtggccatgggagtcagcgacaagcgggatattagccggttcctggagagcaaccccgtgatgatcgatgccaaggaagtgagcgccgcccaccgggccagatacttctggggcaatctgcctggcatgaacagacccctggccagcaccgtgaacgacaagctggagctgcaggagtgcctggagcacggccggatcgccaagttcagcaaggtgagaaccatcaccacccgaagcaacagcatcaaacaaggcaaggaccagcactttcctgtgttcatgaacgagaaggaggacatcctgtggtgtaccgagatggagagagtgttcgggttcccagtccactacacagatgtcagcaacatgtctagactggccagacagagactgctgggaagaagctggtccgtccctgtgatcagacacctgttcgcccctctgaaggagtacttcgcctgcgtgagcagcggcaacagcaacgccaacagccggggccccagcttctctagcggcctggtgccactgtccctgagagggagccacatgggccccatggagatctacaaaaccgtgagcgcctggaagcggcagcctgtgcgcgtgctgagcctgtttcggaatatcgataaagtcctgaaaagcctgggattcctggagagcggctctggctccggcggtggcaccctgaagtacgtggaggatgtgacaaacgtggtcagacgggatgtggagaagtggggccccttcgatctggtgtacggcagcacccaacccctgggcagctcttgtgaccggtgccctggctggtacatgtttcagttccaccggatcctgcagtacgccctgccgagacaggagtcccagcggccattcttttggattttcatggacaacttgctgctgaccgaggatgaccaggaaactaccactcggttcctgcagaccgaagccgtgaccctgcaggacgtgagaggccgggactaccagaacgccatgcgggtgtggtccaacatccctggactgaaaagcaagcacgcacctctgacccctaaagaagaggagtacctgcaggcccaggtgcggagcagaagcaagctggacgcccctaaggtggatctgctggtgaagaattgcctcctgcccctgagagagtacttcaagtatttcagccagaatagtctgcccctgggaggcagcggcggcggcatccaggagagcgtgaccttcaaggacgtgagcgtggacttcacctgggaggagtggaggcacctggaccccgcccagagggacctgtacaggaacgtgatgctggagaactacgagaacctggtgagcgtgggcatcagcgtgagcaccgtggacatgatcagcctgctggagaagagggacggcccctggatgcccgagggcgaggtgagcggcgccatctgccccgacagcctgaacgagggcggcccaagcagcggcgcccctcctcccagcggcggcaggcggcccaagcagcggcgcccctcctcccagcggcggcagcccagccggctccccaacctctaccgaggagggcacctctgagtccgccacccccgagagcggccctggcacctccaccgagcccagcgagggcagcgcacccggcagccctgccggcagccccacctccacagaggagggaaccagcaccgagcccagcgaaggcagcgccccaggcaccagcaccgagcctagtgagcaggagattaaacggatcaacaagatcagaagaagacttgtgaaagacagcaacaccaagaaggccggcaagacaggccccatgaaaaccctgctggttagagtgatgacacccgatctgagagagcggctggaaaacctgagaaagaagcctgaaaatatcccccagcccatcagcaatacatctagagccaacctgaataagctgctgaccgattacaccgaaatgaagaaggcgatcctgcatgtgtactgggaagagttccagaaggaccctgtgggcctgatgagccgggtggcccagcctgccagcaagaagatcgatcagaacaagctgaaacctgagatggacgagaagggcaacctgaccaccgccggctttgcctgctctcagtgtggccagcccctgttcgtgtacaagctggagcaggtgtctgagaagggcaaggcttacaccaactacttcggacggtgcaatgtggccgagcacgaaaagctgatcctgctggcccagctgaagcccgagaaggatagcgacgaagccgtgacatatagcctgggaaagtttgggcagagggccctggatttctacagcattcatgtgaccaaggagtccacccaccccgtgaagcccctggcccagatcgccggaaacagatacgcctccggacctgtgggaaaggccctgagcgacgcatgtatgggcacaatcgcctccttcctgtctaagtaccaggacatcatcatcgaacaccagaaggtggtgaagggcaaccagaagagactggagagcctgcgggagctggccggcaaggaaaacctggaataccctagcgtgaccctgccacctcagcctcacaccaaggagggcgttgatgcctacaacgaagtgatcgcccgggtgcgaatgtgggtgaacctgaacctgtggcagaagctgaagctaagcagagatgatgccaagcctctgctgagactgaagggattcccttcctttcctctggtcgagagacaggccaacgaagtggactggtgggacatggtgtgtaacgtgaagaagctgatcaacgagaaaaaggaggatggcaaggtgttttggcagaatctggctggctacaagagacaggaagccctgagaccatacctgagcagcgaggaagatcggaagaagggaaagaaattcgctcggtaccagctgggcgacctgctgctgcacctggaaaagaagcacggcgaggactggggaaaggtgtacgacgaggcctgggagcggattgacaagaaagtggaaggcctgagcaagcacatcaagctggaagaggaacggagaagcgaggacgcccagagcaaggccgccctgaccgactggctgcgggctaaggccagcttcgtgatcgagggcctgaaggaggccgacaaggacgagttctgcagatgcgagctgaagctgcagaagtggtacggggacctgcggggaaagcccttcgccatcgaagccgagaacagcatcctggacatcagcggcttcagcaagcagtacaactgtgccttcatctggcagaaggacggcgtgaagaagctgaacctgtacctgatcatcaactacttcaagggcggcaagctgcggttcaagaagatcaaacctgaagccttcgaagccaacagattctacaccgtgatcaacaaaaagagcggcgagatcgtgcccatggaggtgaacttcaacttcgacgaccccaacctgatcatcctgcctctggcctttggcaagagacagggcagagaattcatctggaacgacctgctgtccctggaaaccggcagcctgaagctggccaacggaagagtgatcgagaagacactgtacaacagaagaacccggcaggatgagcctgccctgttcgtggccctgaccttcgagcggcgggaggtcctggactcctccaatatcaaaccaatgaacctgatcggcgtggcaagaggcgaaaacatccccgccgtgatcgccctgaccgaccccgagggctgcccactgagccggtttaaggatagcctgggaaacccaacccacatcctgagaatcggcgagagctataaggagaagcagcggaccatccaggccaagaaggaggtggagcagcggagagccggcggctacagccggaagtacgccagcaaagccaagaatctggcagacgatatggtgagaaacaccgctagagatctgctgtactacgccgtgacccaggatgccatgctgatcttcgccaacctgagccggggcttcggccggcagggcaagcggaccttcatggccgagagacagtacacacggatggaggactggctgaccgccaagctggcctacgagggcctgagcaagacctacctgtccaagacactggcccagtacacctccaagacatgcagcaactgtgggtttaccatcaccagcgccgactacgacagggtgctggagaagctgaagaagacagcaacaggctggatgaccacaattaacggcaaggagctgaaggtggagggccagattacctactacaacagatacaagagacagaacgtagtcaaggacctgtccgtcgagctggatagactgagcgaagaatctgtgaacaacgacatctcctcctggacaaagggcagaagcggagaagctctgagcctcctgaagaaaagattctcccatagacccgtgcaggagaagttcgtgtgcctgaactgcggcttcgagacacacgcagccgagcaagccgccctgaacatcgccagatcctggctgttcctgcggagccaggagtacaagaaataccagacaaacaagacaaccggcaacaccgataagagagccttcgtcgagacctggcagtccttttaccggaagaagcttaaggaggtgtggaaacctgccgtgcggtctggcggatctggcggaggctccaccagccccaagaaaaagagaaaagtctaagctgccttctgcggggcttgccttctggccatgcccttcttctctcccttgcacctgtacctcttggtctttgaataaagcctgagtaggaaggctagcaaaaaaaaaaaaaaaaaaaaaaaaaaaaaaaaaaaaaaaaaaaaaaaaaaaaaaaaaaaaaaaaaaaaaaaaaaaaaaaagcccagccggctccccaacctctaccgaggagggcacctctgagtccgccacccccgagagcggccctggcacctccaccgagcccagcgagggcagcgcacccggcagccctgccggcagccccacctccacagaggagggaaccagcaccgagcccagcgaaggcagcgccccaggcaccagcaccgagcctagtgagcaggagattaaacggatcaacaagatcagaagaagacttgtgaaagacagcaacaccaagaaggccggcaagacaggccccatgaaaaccctgctggttagagtgatgacacccgatctgagagagcggctggaaaacctgagaaagaagcctgaaaatatcccccagcccatcagcaatacatctagagccaacctgaataagctgctgaccgattacaccgaaatgaagaaggcgatcctgcatgtgtactgggaagagttccagaaggaccctgtgggcctgatgagccgggtggcccagcctgccagcaagaagatcgatcagaacaagctgaaacctgagatggacgagaagggcaacctgaccaccgccggctttgcctgctctcagtgtggccagcccctgttcgtgtacaagctggagcaggtgtctgagaagggcaaggcttacaccaactacttcggacggtgcaatgtggccgagcacgaaaagctgatcctgctggcccagctgaagcccgagaaggatagcgacgaagccgtgacatatagcctgggaaagtttgggcagagggccctggatttctacagcattcatgtgaccaaggagtccacccaccccgtgaagcccctggcccagatcgccggaaacagatacgcctccggacctgtgggaaaggccctgagcgacgcatgtatgggcacaatcgcctccttcctgtctaagtaccaggacatcatcatcgaacaccagaaggtggtgaagggcaaccagaagagactggagagcctgcgggagctggccggcaaggaaaacctggaataccctagcgtgaccctgccacctcagcctcacaccaaggagggcgttgatgcctacaacgaagtgatcgcccgggtgcgaatgtgggtgaacctgaacctgtggcagaagctgaagctaagcagagatgatgccaagcctctgctgagactgaagggattcccttcctttcctctggtcgagagacaggccaacgaagtggactggtgggacatggtgtgtaacgtgaagaagctgatcaacgagaaaaaggaggatggcaaggtgttttggcagaatctggctggctacaagagacaggaagccctgagaccatacctgagcagcgaggaagatcggaagaagggaaagaaattcgctcggtaccagctgggcgacctgctgctgcacctggaaaagaagcacggcgaggactggggaaaggtgtacgacgaggcctgggagcggattgacaagaaagtggaaggcctgagcaagcacatcaagctggaagaggaacggagaagcgaggacgcccagagcaaggccgccctgaccgactggctgcgggctaaggccagcttcgtgatcgagggcctgaaggaggccgacaaggacgagttctgcagatgcgagctgaagctgcagaagtggtacggggacctgcggggaaagcccttcgccatcgaagccgagaacagcatcctggacatcagcggcttcagcaagcagtacaactgtgccttcatctggcagaaggacggcgtgaagaagctgaacctgtacctgatcatcaactacttcaagggcggcaagctgcggttcaagaagatcaaacctgaagccttcgaagccaacagattctacaccgtgatcaacaaaaagagcggcgagatcgtgcccatggaggtgaacttcaacttcgacgaccccaacctgatcatcctgcctctggcctttggcaagagacagggcagagaattcatctggaacgacctgctgtccctggaaaccggcagcctgaagctggccaacggaagagtgatcgagaagacactgtacaacagaagaacccggcaggatgagcctgccctgttcgtggccctgaccttcgagcggcgggaggtcctggactcctccaatatcaaaccaatgaacctgatcggcgtggcaagaggcgaaaacatccccgccgtgatcgccctgaccgaccccgagggctgcccactgagccggtttaaggatagcctgggaaacccaacccacatcctgagaatcggcgagagctataaggagaagcagcggaccatccaggccaagaaggaggtggagcagcggagagccggcggctacagccggaagtacgccagcaaagccaagaatctggcagacgatatggtgagaaacaccgctagagatctgctgtactacgccgtgacccaggatgccatgctgatcttcgccaacctgagccggggcttcggccggcagggcaagcggaccttcatggccgagagacagtacacacggatggaggactggctgaccgccaagctggcctacgagggcctgagcaagacctacctgtccaagacactggcccagtacacctccaagacatgcagcaactgtgggtttaccatcaccagcgccgactacgacagggtgctggagaagctgaagaagacagcaacaggctggatgaccacaattaacggcaaggagctgaaggtggagggccagattacctactacaacagatacaagagacagaacgtagtcaaggacctgtccgtcgagctggatagactgagcgaagaatctgtgaacaacgacatctcctcctggacaaagggcagaagcggagaagctctgagcctcctgaagaaaagattctcccatagacccgtgcaggagaagttcgtgtgcctgaactgcggcttcgagacacacgcagccgagcaagccgccctgaacatcgccagatcctggctgttcctgcggagccaggagtacaagaaataccagacaaacaagacaaccggcaacaccgataagagagccttcgtcgagacctggcagtccttttaccggaagaagcttaaggaggtgtggaaacctgccgtgcggtctggcggatctggcggaggctccaccagccccaagaaaaagagaaaagtctaagctgccttctgcggggcttgccttctggccatgcccttcttctctcccttgcacctgtacctcttggtctttgaataaagcctgagtaggaaggctagcaaaaaaaaaaaaaaaaaaaaaaaaaaaaaaaaaaaaaaaaaaaaaaaaaaaaaaaaaaaaaaaaaaaaaaaaaaaaaaaa

SEQ ID NO: 9571 - RNA, 8787 nt, synthetic construct
  source 1..8787: mol_type = other RNA
aggaaataagagagaaaagaagagtaagaagaaatataagagccaccatggcccctaagaagaagcgtaaagtgagccggatgaaccacgaccaggagttcgacccccctaaggtgtaccctcccgtccccgccgagaagagaaagcccatccgggtcctgagcctgttcgatggcatcgccaccggtctgctggtgctgaaggacctgggcatccaggtggataggtacattgcctccgaggtgtgcgaggactccatcaccgtgggaatggtgcgtcatcagggcaagatcatgtacgtgggcgacgtgcggagcgtgacacagaagcatatccaggagtggggccctttcgacctggtgatcggcggcagcccttgcaatgacctgagcatcgtgaacccagcccggaagggcctgtacgagggaaccggcagactgttcttcgagttttacagactgctgcacgacgcccggcctaaggaaggcgacgaccggcccttcttttggctgttcgagaatgtggtggccatgggagtcagcgacaagcgggatattagccggttcctggagagcaaccccgtgatgatcgatgccaaggaagtgagcgccgcccaccgggccagatacttctggggcaatctgcctggcatgaacagacccctggccagcaccgtgaacgacaagctggagctgcaggagtgcctggagcacggccggatcgccaagttcagcaaggtgagaaccatcaccacccgaagcaacagcatcaaacaaggcaaggaccagcactttcctgtgttcatgaacgagaaggaggacatcctgtggtgtaccgagatggagagagtgttcgggttcccagtccactacacagatgtcagcaacatgtctagactggccagacagagactgctgggaagaagctggtccgtccctgtgatcagacacctgttcgcccctctgaaggagtacttcgcctgcgtgagcagcggcaacagcaacgccaacagccggggccccagcttctctagcggcctggtgccactgtccctgagagggagccacatgggccccatggagatctacaaaaccgtgagcgcctggaagcggcagcctgtgcgcgtgctgagcctgtttcggaatatcgataaagtcctgaaaagcctgggattcctggagagcggctctggctccggcggtggcaccctgaagtacgtggaggatgtgacaaacgtggtcagacgggatgtggagaagtggggccccttcgatctggtgtacggcagcacccaacccctgggcagctcttgtgaccggtgccctggctggtacatgtttcagttccaccggatcctgcagtacgccctgccgagacaggagtcccagcggccattcttttggattttcatggacaacttgctgctgaccgaggatgaccaggaaactaccactcggttcctgcagaccgaagccgtgaccctgcaggacgtgagaggccgggactaccagaacgccatgcgggtgtggtccaacatccctggactgaaaagcaagcacgcacctctgacccctaaagaagaggagtacctgcaggcccaggtgcggagcagaagcaagctggacgcccctaaggtggatctgctggtgaagaattgcctcctgcccctgagagagtacttcaagtatttcagccagaatagtctgcccctgggaggcagcggcggcggcaagacccaggtgagcctggagttcaacgacgtggccgtggagttcgcctgggaggagtggcagctgctggaccccgcccagaaggacctgtacagggaggtgatgctggagaacttccacaacctggtgagcgtgggctgccaggtgggcaagcccgacgtgctgttcaggctggagagggagcccccctggagcctggaggacgagatccacagccagaacttcagcgagatccaggaggtgggcggcccaagcagcggcgcccctcctcccagcggcggcaggcggcccaagcagcggcgcccctcctcccagcggcggcagcccagccggctccccaacctctaccgaggagggcacctctgagtccgccacccccgagagcggccctggcacctccaccgagcccagcgagggcagcgcacccggcagccctgccggcagccccacctccacagaggagggaaccagcaccgagcccagcgaaggcagcgccccaggcaccagcaccgagcctagtgagcaggagattaaacggatcaacaagatcagaagaagacttgtgaaagacagcaacaccaagaaggccggcaagacaggccccatgaaaaccctgctggttagagtgatgacacccgatctgagagagcggctggaaaacctgagaaagaagcctgaaaatatcccccagcccatcagcaatacatctagagccaacctgaataagctgctgaccgattacaccgaaatgaagaaggcgatcctgcatgtgtactgggaagagttccagaaggaccctgtgggcctgatgagccgggtggcccagcctgccagcaagaagatcgatcagaacaagctgaaacctgagatggacgagaagggcaacctgaccaccgccggctttgcctgctctcagtgtggccagcccctgttcgtgtacaagctggagcaggtgtctgagaagggcaaggcttacaccaactacttcggacggtgcaatgtggccgagcacgaaaagctgatcctgctggcccagctgaagcccgagaaggatagcgacgaagccgtgacatatagcctgggaaagtttgggcagagggccctggatttctacagcattcatgtgaccaaggagtccacccaccccgtgaagcccctggcccagatcgccggaaacagatacgcctccggacctgtgggaaaggccctgagcgacgcatgtatgggcacaatcgcctccttcctgtctaagtaccaggacatcatcatcgaacaccagaaggtggtgaagggcaaccagaagagactggagagcctgcgggagctggccggcaaggaaaacctggaataccctagcgtgaccctgccacctcagcctcacaccaaggagggcgttgatgcctacaacgaagtgatcgcccgggtgcgaatgtgggtgaacctgaacctgtggcagaagctgaagctaagcagagatgatgccaagcctctgctgagactgaagggattcccttcctttcctctggtcgagagacaggccaacgaagtggactggtgggacatggtgtgtaacgtgaagaagctgatcaacgagaaaaaggaggatggcaaggtgttttggcagaatctggctggctacaagagacaggaagccctgagaccatacctgagcagcgaggaagatcggaagaagggaaagaaattcgctcggtaccagctgggcgacctgctgctgcacctggaaaagaagcacggcgaggactggggaaaggtgtacgacgaggcctgggagcggattgacaagaaagtggaaggcctgagcaagcacatcaagctggaagaggaacggagaagcgaggacgcccagagcaaggccgccctgaccgactggctgcgggctaaggccagcttcgtgatcgagggcctgaaggaggccgacaaggacgagttctgcagatgcgagctgaagctgcagaagtggtacggggacctgcggggaaagcccttcgccatcgaagccgagaacagcatcctggacatcagcggcttcagcaagcagtacaactgtgccttcatctggcagaaggacggcgtgaagaagctgaacctgtacctgatcatcaactacttcaagggcggcaagctgcggttcaagaagatcaaacctgaagccttcgaagccaacagattctacaccgtgatcaacaaaaagagcggcgagatcgtgcccatggaggtgaacttcaacttcgacgaccccaacctgatcatcctgcctctggcctttggcaagagacagggcagagaattcatctggaacgacctgctgtccctggaaaccggcagcctgaagctggccaacggaagagtgatcgagaagacactgtacaacagaagaacccggcaggatgagcctgccctgttcgtggccctgaccttcgagcggcgggaggtcctggactcctccaatatcaaaccaatgaacctgatcggcgtggcaagaggcgaaaacatccccgccgtgatcgccctgaccgaccccgagggctgcccactgagccggtttaaggatagcctgggaaacccaacccacatcctgagaatcggcgagagctataaggagaagcagcggaccatccaggccaagaaggaggtggagcagcggagagccggcggctacagccggaagtacgccagcaaagccaagaatctggcagacgatatggtgagaaacaccgctagagatctgctgtactacgccgtgacccaggatgccatgctgatcttcgccaacctgagccggggcttcggccggcagggcaagcggaccttcatggccgagagacagtacacacggatggaggactggctgaccgccaagctggcctacgagggcctgagcaagacctacctgtccaagacactggcccagtacacctccaagacatgcagcaactgtgggtttaccatcaccagcgccgactacgacagggtgctggagaagctgaagaagacagcaacaggctggatgaccacaattaacggcaaggagctgaaggtggagggccagattacctactacaacagatacaagagacagaacgtagtcaaggacctgtccgtcgagctggatagactgagcgaagaatctgtgaacaacgacatctcctcctggacaaagggcagaagcggagaagctctgagcctcctgaagaaaagattctcccatagacccgtgcaggagaagttcgtgtgcctgaactgcggcttcgagacacacgcagccgagcaagccgccctgaacatcgccagatcctggctgttcctgcggagccaggagtacaagaaataccagacaaacaagacaaccggcaacaccgataagagagccttcgtcgagacctggcagtccttttaccggaagaagcttaaggaggtgtggaaacctgccgtgcggtctggcggatctggcggaggctccaccagccccaagaaaaagagaaaagtctaagctgccttctgcggggcttgccttctggccatgcccttcttctctcccttgcacctgtacctcttggtctttgaataaagcctgagtaggaaggctagcaaaaaaaaaaaaaaaaaaaaaaaaaaaaaaaaaaaaaaaaaaaaaaaaaaaaaaaaaaaaaaaaaaaaaaaaaaaaaaaagcccagccggctccccaacctctaccgaggagggcacctctgagtccgccacccccgagagcggccctggcacctccaccgagcccagcgagggcagcgcacccggcagccctgccggcagccccacctccacagaggagggaaccagcaccgagcccagcgaaggcagcgccccaggcaccagcaccgagcctagtgagcaggagattaaacggatcaacaagatcagaagaagacttgtgaaagacagcaacaccaagaaggccggcaagacaggccccatgaaaaccctgctggttagagtgatgacacccgatctgagagagcggctggaaaacctgagaaagaagcctgaaaatatcccccagcccatcagcaatacatctagagccaacctgaataagctgctgaccgattacaccgaaatgaagaaggcgatcctgcatgtgtactgggaagagttccagaaggaccctgtgggcctgatgagccgggtggcccagcctgccagcaagaagatcgatcagaacaagctgaaacctgagatggacgagaagggcaacctgaccaccgccggctttgcctgctctcagtgtggccagcccctgttcgtgtacaagctggagcaggtgtctgagaagggcaaggcttacaccaactacttcggacggtgcaatgtggccgagcacgaaaagctgatcctgctggcccagctgaagcccgagaaggatagcgacgaagccgtgacatatagcctgggaaagtttgggcagagggccctggatttctacagcattcatgtgaccaaggagtccacccaccccgtgaagcccctggcccagatcgccggaaacagatacgcctccggacctgtgggaaaggccctgagcgacgcatgtatgggcacaatcgcctccttcctgtctaagtaccaggacatcatcatcgaacaccagaaggtggtgaagggcaaccagaagagactggagagcctgcgggagctggccggcaaggaaaacctggaataccctagcgtgaccctgccacctcagcctcacaccaaggagggcgttgatgcctacaacgaagtgatcgcccgggtgcgaatgtgggtgaacctgaacctgtggcagaagctgaagctaagcagagatgatgccaagcctctgctgagactgaagggattcccttcctttcctctggtcgagagacaggccaacgaagtggactggtgggacatggtgtgtaacgtgaagaagctgatcaacgagaaaaaggaggatggcaaggtgttttggcagaatctggctggctacaagagacaggaagccctgagaccatacctgagcagcgaggaagatcggaagaagggaaagaaattcgctcggtaccagctgggcgacctgctgctgcacctggaaaagaagcacggcgaggactggggaaaggtgtacgacgaggcctgggagcggattgacaagaaagtggaaggcctgagcaagcacatcaagctggaagaggaacggagaagcgaggacgcccagagcaaggccgccctgaccgactggctgcgggctaaggccagcttcgtgatcgagggcctgaaggaggccgacaaggacgagttctgcagatgcgagctgaagctgcagaagtggtacggggacctgcggggaaagcccttcgccatcgaagccgagaacagcatcctggacatcagcggcttcagcaagcagtacaactgtgccttcatctggcagaaggacggcgtgaagaagctgaacctgtacctgatcatcaactacttcaagggcggcaagctgcggttcaagaagatcaaacctgaagccttcgaagccaacagattctacaccgtgatcaacaaaaagagcggcgagatcgtgcccatggaggtgaacttcaacttcgacgaccccaacctgatcatcctgcctctggcctttggcaagagacagggcagagaattcatctggaacgacctgctgtccctggaaaccggcagcctgaagctggccaacggaagagtgatcgagaagacactgtacaacagaagaacccggcaggatgagcctgccctgttcgtggccctgaccttcgagcggcgggaggtcctggactcctccaatatcaaaccaatgaacctgatcggcgtggcaagaggcgaaaacatccccgccgtgatcgccctgaccgaccccgagggctgcccactgagccggtttaaggatagcctgggaaacccaacccacatcctgagaatcggcgagagctataaggagaagcagcggaccatccaggccaagaaggaggtggagcagcggagagccggcggctacagccggaagtacgccagcaaagccaagaatctggcagacgatatggtgagaaacaccgctagagatctgctgtactacgccgtgacccaggatgccatgctgatcttcgccaacctgagccggggcttcggccggcagggcaagcggaccttcatggccgagagacagtacacacggatggaggactggctgaccgccaagctggcctacgagggcctgagcaagacctacctgtccaagacactggcccagtacacctccaagacatgcagcaactgtgggtttaccatcaccagcgccgactacgacagggtgctggagaagctgaagaagacagcaacaggctggatgaccacaattaacggcaaggagctgaaggtggagggccagattacctactacaacagatacaagagacagaacgtagtcaaggacctgtccgtcgagctggatagactgagcgaagaatctgtgaacaacgacatctcctcctggacaaagggcagaagcggagaagctctgagcctcctgaagaaaagattctcccatagacccgtgcaggagaagttcgtgtgcctgaactgcggcttcgagacacacgcagccgagcaagccgccctgaacatcgccagatcctggctgttcctgcggagccaggagtacaagaaataccagacaaacaagacaaccggcaacaccgataagagagccttcgtcgagacctggcagtccttttaccggaagaagcttaaggaggtgtggaaacctgccgtgcggtctggcggatctggcggaggctccaccagccccaagaaaaagagaaaagtctaagctgccttctgcggggcttgccttctggccatgcccttcttctctcccttgcacctgtacctcttggtctttgaataaagcctgagtaggaaggctagcaaaaaaaaaaaaaaaaaaaaaaaaaaaaaaaaaaaaaaaaaaaaaaaaaaaaaaaaaaaaaaaaaaaaaaaaaaaaaaaa

SEQ ID NO: 9572 - RNA, 8787 nt, synthetic construct
  source 1..8787: mol_type = other RNA
aggaaataagagagaaaagaagagtaagaagaaatataagagccaccatggcccctaagaagaagcgtaaagtgagccggatgaaccacgaccaggagttcgacccccctaaggtgtaccctcccgtccccgccgagaagagaaagcccatccgggtcctgagcctgttcgatggcatcgccaccggtctgctggtgctgaaggacctgggcatccaggtggataggtacattgcctccgaggtgtgcgaggactccatcaccgtgggaatggtgcgtcatcagggcaagatcatgtacgtgggcgacgtgcggagcgtgacacagaagcatatccaggagtggggccctttcgacctggtgatcggcggcagcccttgcaatgacctgagcatcgtgaacccagcccggaagggcctgtacgagggaaccggcagactgttcttcgagttttacagactgctgcacgacgcccggcctaaggaaggcgacgaccggcccttcttttggctgttcgagaatgtggtggccatgggagtcagcgacaagcgggatattagccggttcctggagagcaaccccgtgatgatcgatgccaaggaagtgagcgccgcccaccgggccagatacttctggggcaatctgcctggcatgaacagacccctggccagcaccgtgaacgacaagctggagctgcaggagtgcctggagcacggccggatcgccaagttcagcaaggtgagaaccatcaccacccgaagcaacagcatcaaacaaggcaaggaccagcactttcctgtgttcatgaacgagaaggaggacatcctgtggtgtaccgagatggagagagtgttcgggttcccagtccactacacagatgtcagcaacatgtctagactggccagacagagactgctgggaagaagctggtccgtccctgtgatcagacacctgttcgcccctctgaaggagtacttcgcctgcgtgagcagcggcaacagcaacgccaacagccggggccccagcttctctagcggcctggtgccactgtccctgagagggagccacatgggccccatggagatctacaaaaccgtgagcgcctggaagcggcagcctgtgcgcgtgctgagcctgtttcggaatatcgataaagtcctgaaaagcctgggattcctggagagcggctctggctccggcggtggcaccctgaagtacgtggaggatgtgacaaacgtggtcagacgggatgtggagaagtggggccccttcgatctggtgtacggcagcacccaacccctgggcagctcttgtgaccggtgccctggctggtacatgtttcagttccaccggatcctgcagtacgccctgccgagacaggagtcccagcggccattcttttggattttcatggacaacttgctgctgaccgaggatgaccaggaaactaccactcggttcctgcagaccgaagccgtgaccctgcaggacgtgagaggccgggactaccagaacgccatgcgggtgtggtccaacatccctggactgaaaagcaagcacgcacctctgacccctaaagaagaggagtacctgcaggcccaggtgcggagcagaagcaagctggacgcccctaaggtggatctgctggtgaagaattgcctcctgcccctgagagagtacttcaagtatttcagccagaatagtctgcccctgggaggcagcggcggcggctgcgagggcagcgtgagcttcgaggacgtgaccatggacttcagcagggaggagtggcagcagctggaccccgcccagaggtgcctgtaccaggacgtgatgctggagatctacagccacctgctgttcgtgggctacaacatccccaaccccgagatcatcagcaggatggagaagggcgaggagccctggatgagggaggtgcagctgccccaccagaggcacagggagagggccttcggcggcggcccaagcagcggcgcccctcctcccagcggcggcaggcggcccaagcagcggcgcccctcctcccagcggcggcagcccagccggctccccaacctctaccgaggagggcacctctgagtccgccacccccgagagcggccctggcacctccaccgagcccagcgagggcagcgcacccggcagccctgccggcagccccacctccacagaggagggaaccagcaccgagcccagcgaaggcagcgccccaggcaccagcaccgagcctagtgagcaggagattaaacggatcaacaagatcagaagaagacttgtgaaagacagcaacaccaagaaggccggcaagacaggccccatgaaaaccctgctggttagagtgatgacacccgatctgagagagcggctggaaaacctgagaaagaagcctgaaaatatcccccagcccatcagcaatacatctagagccaacctgaataagctgctgaccgattacaccgaaatgaagaaggcgatcctgcatgtgtactgggaagagttccagaaggaccctgtgggcctgatgagccgggtggcccagcctgccagcaagaagatcgatcagaacaagctgaaacctgagatggacgagaagggcaacctgaccaccgccggctttgcctgctctcagtgtggccagcccctgttcgtgtacaagctggagcaggtgtctgagaagggcaaggcttacaccaactacttcggacggtgcaatgtggccgagcacgaaaagctgatcctgctggcccagctgaagcccgagaaggatagcgacgaagccgtgacatatagcctgggaaagtttgggcagagggccctggatttctacagcattcatgtgaccaaggagtccacccaccccgtgaagcccctggcccagatcgccggaaacagatacgcctccggacctgtgggaaaggccctgagcgacgcatgtatgggcacaatcgcctccttcctgtctaagtaccaggacatcatcatcgaacaccagaaggtggtgaagggcaaccagaagagactggagagcctgcgggagctggccggcaaggaaaacctggaataccctagcgtgaccctgccacctcagcctcacaccaaggagggcgttgatgcctacaacgaagtgatcgcccgggtgcgaatgtgggtgaacctgaacctgtggcagaagctgaagctaagcagagatgatgccaagcctctgctgagactgaagggattcccttcctttcctctggtcgagagacaggccaacgaagtggactggtgggacatggtgtgtaacgtgaagaagctgatcaacgagaaaaaggaggatggcaaggtgttttggcagaatctggctggctacaagagacaggaagccctgagaccatacctgagcagcgaggaagatcggaagaagggaaagaaattcgctcggtaccagctgggcgacctgctgctgcacctggaaaagaagcacggcgaggactggggaaaggtgtacgacgaggcctgggagcggattgacaagaaagtggaaggcctgagcaagcacatcaagctggaagaggaacggagaagcgaggacgcccagagcaaggccgccctgaccgactggctgcgggctaaggccagcttcgtgatcgagggcctgaaggaggccgacaaggacgagttctgcagatgcgagctgaagctgcagaagtggtacggggacctgcggggaaagcccttcgccatcgaagccgagaacagcatcctggacatcagcggcttcagcaagcagtacaactgtgccttcatctggcagaaggacggcgtgaagaagctgaacctgtacctgatcatcaactacttcaagggcggcaagctgcggttcaagaagatcaaacctgaagccttcgaagccaacagattctacaccgtgatcaacaaaaagagcggcgagatcgtgcccatggaggtgaacttcaacttcgacgaccccaacctgatcatcctgcctctggcctttggcaagagacagggcagagaattcatctggaacgacctgctgtccctggaaaccggcagcctgaagctggccaacggaagagtgatcgagaagacactgtacaacagaagaacccggcaggatgagcctgccctgttcgtggccctgaccttcgagcggcgggaggtcctggactcctccaatatcaaaccaatgaacctgatcggcgtggcaagaggcgaaaacatccccgccgtgatcgccctgaccgaccccgagggctgcccactgagccggtttaaggatagcctgggaaacccaacccacatcctgagaatcggcgagagctataaggagaagcagcggaccatccaggccaagaaggaggtggagcagcggagagccggcggctacagccggaagtacgccagcaaagccaagaatctggcagacgatatggtgagaaacaccgctagagatctgctgtactacgccgtgacccaggatgccatgctgatcttcgccaacctgagccggggcttcggccggcagggcaagcggaccttcatggccgagagacagtacacacggatggaggactggctgaccgccaagctggcctacgagggcctgagcaagacctacctgtccaagacactggcccagtacacctccaagacatgcagcaactgtgggtttaccatcaccagcgccgactacgacagggtgctggagaagctgaagaagacagcaacaggctggatgaccacaattaacggcaaggagctgaaggtggagggccagattacctactacaacagatacaagagacagaacgtagtcaaggacctgtccgtcgagctggatagactgagcgaagaatctgtgaacaacgacatctcctcctggacaaagggcagaagcggagaagctctgagcctcctgaagaaaagattctcccatagacccgtgcaggagaagttcgtgtgcctgaactgcggcttcgagacacacgcagccgagcaagccgccctgaacatcgccagatcctggctgttcctgcggagccaggagtacaagaaataccagacaaacaagacaaccggcaacaccgataagagagccttcgtcgagacctggcagtccttttaccggaagaagcttaaggaggtgtggaaacctgccgtgcggtctggcggatctggcggaggctccaccagccccaagaaaaagagaaaagtctaagctgccttctgcggggcttgccttctggccatgcccttcttctctcccttgcacctgtacctcttggtctttgaataaagcctgagtaggaaggctagcaaaaaaaaaaaaaaaaaaaaaaaaaaaaaaaaaaaaaaaaaaaaaaaaaaaaaaaaaaaaaaaaaaaaaaaaaaaaaaaagcccagccggctccccaacctctaccgaggagggcacctctgagtccgccacccccgagagcggccctggcacctccaccgagcccagcgagggcagcgcacccggcagccctgccggcagccccacctccacagaggagggaaccagcaccgagcccagcgaaggcagcgccccaggcaccagcaccgagcctagtgagcaggagattaaacggatcaacaagatcagaagaagacttgtgaaagacagcaacaccaagaaggccggcaagacaggccccatgaaaaccctgctggttagagtgatgacacccgatctgagagagcggctggaaaacctgagaaagaagcctgaaaatatcccccagcccatcagcaatacatctagagccaacctgaataagctgctgaccgattacaccgaaatgaagaaggcgatcctgcatgtgtactgggaagagttccagaaggaccctgtgggcctgatgagccgggtggcccagcctgccagcaagaagatcgatcagaacaagctgaaacctgagatggacgagaagggcaacctgaccaccgccggctttgcctgctctcagtgtggccagcccctgttcgtgtacaagctggagcaggtgtctgagaagggcaaggcttacaccaactacttcggacggtgcaatgtggccgagcacgaaaagctgatcctgctggcccagctgaagcccgagaaggatagcgacgaagccgtgacatatagcctgggaaagtttgggcagagggccctggatttctacagcattcatgtgaccaaggagtccacccaccccgtgaagcccctggcccagatcgccggaaacagatacgcctccggacctgtgggaaaggccctgagcgacgcatgtatgggcacaatcgcctccttcctgtctaagtaccaggacatcatcatcgaacaccagaaggtggtgaagggcaaccagaagagactggagagcctgcgggagctggccggcaaggaaaacctggaataccctagcgtgaccctgccacctcagcctcacaccaaggagggcgttgatgcctacaacgaagtgatcgcccgggtgcgaatgtgggtgaacctgaacctgtggcagaagctgaagctaagcagagatgatgccaagcctctgctgagactgaagggattcccttcctttcctctggtcgagagacaggccaacgaagtggactggtgggacatggtgtgtaacgtgaagaagctgatcaacgagaaaaaggaggatggcaaggtgttttggcagaatctggctggctacaagagacaggaagccctgagaccatacctgagcagcgaggaagatcggaagaagggaaagaaattcgctcggtaccagctgggcgacctgctgctgcacctggaaaagaagcacggcgaggactggggaaaggtgtacgacgaggcctgggagcggattgacaagaaagtggaaggcctgagcaagcacatcaagctggaagaggaacggagaagcgaggacgcccagagcaaggccgccctgaccgactggctgcgggctaaggccagcttcgtgatcgagggcctgaaggaggccgacaaggacgagttctgcagatgcgagctgaagctgcagaagtggtacggggacctgcggggaaagcccttcgccatcgaagccgagaacagcatcctggacatcagcggcttcagcaagcagtacaactgtgccttcatctggcagaaggacggcgtgaagaagctgaacctgtacctgatcatcaactacttcaagggcggcaagctgcggttcaagaagatcaaacctgaagccttcgaagccaacagattctacaccgtgatcaacaaaaagagcggcgagatcgtgcccatggaggtgaacttcaacttcgacgaccccaacctgatcatcctgcctctggcctttggcaagagacagggcagagaattcatctggaacgacctgctgtccctggaaaccggcagcctgaagctggccaacggaagagtgatcgagaagacactgtacaacagaagaacccggcaggatgagcctgccctgttcgtggccctgaccttcgagcggcgggaggtcctggactcctccaatatcaaaccaatgaacctgatcggcgtggcaagaggcgaaaacatccccgccgtgatcgccctgaccgaccccgagggctgcccactgagccggtttaaggatagcctgggaaacccaacccacatcctgagaatcggcgagagctataaggagaagcagcggaccatccaggccaagaaggaggtggagcagcggagagccggcggctacagccggaagtacgccagcaaagccaagaatctggcagacgatatggtgagaaacaccgctagagatctgctgtactacgccgtgacccaggatgccatgctgatcttcgccaacctgagccggggcttcggccggcagggcaagcggaccttcatggccgagagacagtacacacggatggaggactggctgaccgccaagctggcctacgagggcctgagcaagacctacctgtccaagacactggcccagtacacctccaagacatgcagcaactgtgggtttaccatcaccagcgccgactacgacagggtgctggagaagctgaagaagacagcaacaggctggatgaccacaattaacggcaaggagctgaaggtggagggccagattacctactacaacagatacaagagacagaacgtagtcaaggacctgtccgtcgagctggatagactgagcgaagaatctgtgaacaacgacatctcctcctggacaaagggcagaagcggagaagctctgagcctcctgaagaaaagattctcccatagacccgtgcaggagaagttcgtgtgcctgaactgcggcttcgagacacacgcagccgagcaagccgccctgaacatcgccagatcctggctgttcctgcggagccaggagtacaagaaataccagacaaacaagacaaccggcaacaccgataagagagccttcgtcgagacctggcagtccttttaccggaagaagcttaaggaggtgtggaaacctgccgtgcggtctggcggatctggcggaggctccaccagccccaagaaaaagagaaaagtctaagctgccttctgcggggcttgccttctggccatgcccttcttctctcccttgcacctgtacctcttggtctttgaataaagcctgagtaggaaggctagcaaaaaaaaaaaaaaaaaaaaaaaaaaaaaaaaaaaaaaaaaaaaaaaaaaaaaaaaaaaaaaaaaaaaaaaaaaaaaaaa

SEQ ID NO: 9573 - RNA, 8787 nt, synthetic construct
  source 1..8787: mol_type = other RNA
aggaaataagagagaaaagaagagtaagaagaaatataagagccaccatggcccctaagaagaagcgtaaagtgagccggatgaaccacgaccaggagttcgacccccctaaggtgtaccctcccgtccccgccgagaagagaaagcccatccgggtcctgagcctgttcgatggcatcgccaccggtctgctggtgctgaaggacctgggcatccaggtggataggtacattgcctccgaggtgtgcgaggactccatcaccgtgggaatggtgcgtcatcagggcaagatcatgtacgtgggcgacgtgcggagcgtgacacagaagcatatccaggagtggggccctttcgacctggtgatcggcggcagcccttgcaatgacctgagcatcgtgaacccagcccggaagggcctgtacgagggaaccggcagactgttcttcgagttttacagactgctgcacgacgcccggcctaaggaaggcgacgaccggcccttcttttggctgttcgagaatgtggtggccatgggagtcagcgacaagcgggatattagccggttcctggagagcaaccccgtgatgatcgatgccaaggaagtgagcgccgcccaccgggccagatacttctggggcaatctgcctggcatgaacagacccctggccagcaccgtgaacgacaagctggagctgcaggagtgcctggagcacggccggatcgccaagttcagcaaggtgagaaccatcaccacccgaagcaacagcatcaaacaaggcaaggaccagcactttcctgtgttcatgaacgagaaggaggacatcctgtggtgtaccgagatggagagagtgttcgggttcccagtccactacacagatgtcagcaacatgtctagactggccagacagagactgctgggaagaagctggtccgtccctgtgatcagacacctgttcgcccctctgaaggagtacttcgcctgcgtgagcagcggcaacagcaacgccaacagccggggccccagcttctctagcggcctggtgccactgtccctgagagggagccacatgggccccatggagatctacaaaaccgtgagcgcctggaagcggcagcctgtgcgcgtgctgagcctgtttcggaatatcgataaagtcctgaaaagcctgggattcctggagagcggctctggctccggcggtggcaccctgaagtacgtggaggatgtgacaaacgtggtcagacgggatgtggagaagtggggccccttcgatctggtgtacggcagcacccaacccctgggcagctcttgtgaccggtgccctggctggtacatgtttcagttccaccggatcctgcagtacgccctgccgagacaggagtcccagcggccattcttttggattttcatggacaacttgctgctgaccgaggatgaccaggaaactaccactcggttcctgcagaccgaagccgtgaccctgcaggacgtgagaggccgggactaccagaacgccatgcgggtgtggtccaacatccctggactgaaaagcaagcacgcacctctgacccctaaagaagaggagtacctgcaggcccaggtgcggagcagaagcaagctggacgcccctaaggtggatctgctggtgaagaattgcctcctgcccctgagagagtacttcaagtatttcagccagaatagtctgcccctgggaggcagcggcggcggcctgcaggagagcgtgaccttcagcgacgtggccgtggacttcaccctggaggagtggggctgcctgtgccccccccagaaggagatgtacagggaggtgatgctggagaactacggcaacctggtgtgcctgggcctggccatgagcaagcccgacgtgatcagcaggctggagaggggcgaggcccccaggagccccggcggcgacctgggcagcgccgactggggcaccgagagcggcgccggcggcccaagcagcggcgcccctcctcccagcggcggcaggcggcccaagcagcggcgcccctcctcccagcggcggcagcccagccggctccccaacctctaccgaggagggcacctctgagtccgccacccccgagagcggccctggcacctccaccgagcccagcgagggcagcgcacccggcagccctgccggcagccccacctccacagaggagggaaccagcaccgagcccagcgaaggcagcgccccaggcaccagcaccgagcctagtgagcaggagattaaacggatcaacaagatcagaagaagacttgtgaaagacagcaacaccaagaaggccggcaagacaggccccatgaaaaccctgctggttagagtgatgacacccgatctgagagagcggctggaaaacctgagaaagaagcctgaaaatatcccccagcccatcagcaatacatctagagccaacctgaataagctgctgaccgattacaccgaaatgaagaaggcgatcctgcatgtgtactgggaagagttccagaaggaccctgtgggcctgatgagccgggtggcccagcctgccagcaagaagatcgatcagaacaagctgaaacctgagatggacgagaagggcaacctgaccaccgccggctttgcctgctctcagtgtggccagcccctgttcgtgtacaagctggagcaggtgtctgagaagggcaaggcttacaccaactacttcggacggtgcaatgtggccgagcacgaaaagctgatcctgctggcccagctgaagcccgagaaggatagcgacgaagccgtgacatatagcctgggaaagtttgggcagagggccctggatttctacagcattcatgtgaccaaggagtccacccaccccgtgaagcccctggcccagatcgccggaaacagatacgcctccggacctgtgggaaaggccctgagcgacgcatgtatgggcacaatcgcctccttcctgtctaagtaccaggacatcatcatcgaacaccagaaggtggtgaagggcaaccagaagagactggagagcctgcgggagctggccggcaaggaaaacctggaataccctagcgtgaccctgccacctcagcctcacaccaaggagggcgttgatgcctacaacgaagtgatcgcccgggtgcgaatgtgggtgaacctgaacctgtggcagaagctgaagctaagcagagatgatgccaagcctctgctgagactgaagggattcccttcctttcctctggtcgagagacaggccaacgaagtggactggtgggacatggtgtgtaacgtgaagaagctgatcaacgagaaaaaggaggatggcaaggtgttttggcagaatctggctggctacaagagacaggaagccctgagaccatacctgagcagcgaggaagatcggaagaagggaaagaaattcgctcggtaccagctgggcgacctgctgctgcacctggaaaagaagcacggcgaggactggggaaaggtgtacgacgaggcctgggagcggattgacaagaaagtggaaggcctgagcaagcacatcaagctggaagaggaacggagaagcgaggacgcccagagcaaggccgccctgaccgactggctgcgggctaaggccagcttcgtgatcgagggcctgaaggaggccgacaaggacgagttctgcagatgcgagctgaagctgcagaagtggtacggggacctgcggggaaagcccttcgccatcgaagccgagaacagcatcctggacatcagcggcttcagcaagcagtacaactgtgccttcatctggcagaaggacggcgtgaagaagctgaacctgtacctgatcatcaactacttcaagggcggcaagctgcggttcaagaagatcaaacctgaagccttcgaagccaacagattctacaccgtgatcaacaaaaagagcggcgagatcgtgcccatggaggtgaacttcaacttcgacgaccccaacctgatcatcctgcctctggcctttggcaagagacagggcagagaattcatctggaacgacctgctgtccctggaaaccggcagcctgaagctggccaacggaagagtgatcgagaagacactgtacaacagaagaacccggcaggatgagcctgccctgttcgtggccctgaccttcgagcggcgggaggtcctggactcctccaatatcaaaccaatgaacctgatcggcgtggcaagaggcgaaaacatccccgccgtgatcgccctgaccgaccccgagggctgcccactgagccggtttaaggatagcctgggaaacccaacccacatcctgagaatcggcgagagctataaggagaagcagcggaccatccaggccaagaaggaggtggagcagcggagagccggcggctacagccggaagtacgccagcaaagccaagaatctggcagacgatatggtgagaaacaccgctagagatctgctgtactacgccgtgacccaggatgccatgctgatcttcgccaacctgagccggggcttcggccggcagggcaagcggaccttcatggccgagagacagtacacacggatggaggactggctgaccgccaagctggcctacgagggcctgagcaagacctacctgtccaagacactggcccagtacacctccaagacatgcagcaactgtgggtttaccatcaccagcgccgactacgacagggtgctggagaagctgaagaagacagcaacaggctggatgaccacaattaacggcaaggagctgaaggtggagggccagattacctactacaacagatacaagagacagaacgtagtcaaggacctgtccgtcgagctggatagactgagcgaagaatctgtgaacaacgacatctcctcctggacaaagggcagaagcggagaagctctgagcctcctgaagaaaagattctcccatagacccgtgcaggagaagttcgtgtgcctgaactgcggcttcgagacacacgcagccgagcaagccgccctgaacatcgccagatcctggctgttcctgcggagccaggagtacaagaaataccagacaaacaagacaaccggcaacaccgataagagagccttcgtcgagacctggcagtccttttaccggaagaagcttaaggaggtgtggaaacctgccgtgcggtctggcggatctggcggaggctccaccagccccaagaaaaagagaaaagtctaagctgccttctgcggggcttgccttctggccatgcccttcttctctcccttgcacctgtacctcttggtctttgaataaagcctgagtaggaaggctagcaaaaaaaaaaaaaaaaaaaaaaaaaaaaaaaaaaaaaaaaaaaaaaaaaaaaaaaaaaaaaaaaaaaaaaaaaaaaaaaagcccagccggctccccaacctctaccgaggagggcacctctgagtccgccacccccgagagcggccctggcacctccaccgagcccagcgagggcagcgcacccggcagccctgccggcagccccacctccacagaggagggaaccagcaccgagcccagcgaaggcagcgccccaggcaccagcaccgagcctagtgagcaggagattaaacggatcaacaagatcagaagaagacttgtgaaagacagcaacaccaagaaggccggcaagacaggccccatgaaaaccctgctggttagagtgatgacacccgatctgagagagcggctggaaaacctgagaaagaagcctgaaaatatcccccagcccatcagcaatacatctagagccaacctgaataagctgctgaccgattacaccgaaatgaagaaggcgatcctgcatgtgtactgggaagagttccagaaggaccctgtgggcctgatgagccgggtggcccagcctgccagcaagaagatcgatcagaacaagctgaaacctgagatggacgagaagggcaacctgaccaccgccggctttgcctgctctcagtgtggccagcccctgttcgtgtacaagctggagcaggtgtctgagaagggcaaggcttacaccaactacttcggacggtgcaatgtggccgagcacgaaaagctgatcctgctggcccagctgaagcccgagaaggatagcgacgaagccgtgacatatagcctgggaaagtttgggcagagggccctggatttctacagcattcatgtgaccaaggagtccacccaccccgtgaagcccctggcccagatcgccggaaacagatacgcctccggacctgtgggaaaggccctgagcgacgcatgtatgggcacaatcgcctccttcctgtctaagtaccaggacatcatcatcgaacaccagaaggtggtgaagggcaaccagaagagactggagagcctgcgggagctggccggcaaggaaaacctggaataccctagcgtgaccctgccacctcagcctcacaccaaggagggcgttgatgcctacaacgaagtgatcgcccgggtgcgaatgtgggtgaacctgaacctgtggcagaagctgaagctaagcagagatgatgccaagcctctgctgagactgaagggattcccttcctttcctctggtcgagagacaggccaacgaagtggactggtgggacatggtgtgtaacgtgaagaagctgatcaacgagaaaaaggaggatggcaaggtgttttggcagaatctggctggctacaagagacaggaagccctgagaccatacctgagcagcgaggaagatcggaagaagggaaagaaattcgctcggtaccagctgggcgacctgctgctgcacctggaaaagaagcacggcgaggactggggaaaggtgtacgacgaggcctgggagcggattgacaagaaagtggaaggcctgagcaagcacatcaagctggaagaggaacggagaagcgaggacgcccagagcaaggccgccctgaccgactggctgcgggctaaggccagcttcgtgatcgagggcctgaaggaggccgacaaggacgagttctgcagatgcgagctgaagctgcagaagtggtacggggacctgcggggaaagcccttcgccatcgaagccgagaacagcatcctggacatcagcggcttcagcaagcagtacaactgtgccttcatctggcagaaggacggcgtgaagaagctgaacctgtacctgatcatcaactacttcaagggcggcaagctgcggttcaagaagatcaaacctgaagccttcgaagccaacagattctacaccgtgatcaacaaaaagagcggcgagatcgtgcccatggaggtgaacttcaacttcgacgaccccaacctgatcatcctgcctctggcctttggcaagagacagggcagagaattcatctggaacgacctgctgtccctggaaaccggcagcctgaagctggccaacggaagagtgatcgagaagacactgtacaacagaagaacccggcaggatgagcctgccctgttcgtggccctgaccttcgagcggcgggaggtcctggactcctccaatatcaaaccaatgaacctgatcggcgtggcaagaggcgaaaacatccccgccgtgatcgccctgaccgaccccgagggctgcccactgagccggtttaaggatagcctgggaaacccaacccacatcctgagaatcggcgagagctataaggagaagcagcggaccatccaggccaagaaggaggtggagcagcggagagccggcggctacagccggaagtacgccagcaaagccaagaatctggcagacgatatggtgagaaacaccgctagagatctgctgtactacgccgtgacccaggatgccatgctgatcttcgccaacctgagccggggcttcggccggcagggcaagcggaccttcatggccgagagacagtacacacggatggaggactggctgaccgccaagctggcctacgagggcctgagcaagacctacctgtccaagacactggcccagtacacctccaagacatgcagcaactgtgggtttaccatcaccagcgccgactacgacagggtgctggagaagctgaagaagacagcaacaggctggatgaccacaattaacggcaaggagctgaaggtggagggccagattacctactacaacagatacaagagacagaacgtagtcaaggacctgtccgtcgagctggatagactgagcgaagaatctgtgaacaacgacatctcctcctggacaaagggcagaagcggagaagctctgagcctcctgaagaaaagattctcccatagacccgtgcaggagaagttcgtgtgcctgaactgcggcttcgagacacacgcagccgagcaagccgccctgaacatcgccagatcctggctgttcctgcggagccaggagtacaagaaataccagacaaacaagacaaccggcaacaccgataagagagccttcgtcgagacctggcagtccttttaccggaagaagcttaaggaggtgtggaaacctgccgtgcggtctggcggatctggcggaggctccaccagccccaagaaaaagagaaaagtctaagctgccttctgcggggcttgccttctggccatgcccttcttctctcccttgcacctgtacctcttggtctttgaataaagcctgagtaggaaggctagcaaaaaaaaaaaaaaaaaaaaaaaaaaaaaaaaaaaaaaaaaaaaaaaaaaaaaaaaaaaaaaaaaaaaaaaaaaaaaaaa

SEQ ID NO: 9574 - RNA, 8787 nt, synthetic construct
  source 1..8787: mol_type = other RNA
aggaaataagagagaaaagaagagtaagaagaaatataagagccaccatggcccctaagaagaagcgtaaagtgagccggatgaaccacgaccaggagttcgacccccctaaggtgtaccctcccgtccccgccgagaagagaaagcccatccgggtcctgagcctgttcgatggcatcgccaccggtctgctggtgctgaaggacctgggcatccaggtggataggtacattgcctccgaggtgtgcgaggactccatcaccgtgggaatggtgcgtcatcagggcaagatcatgtacgtgggcgacgtgcggagcgtgacacagaagcatatccaggagtggggccctttcgacctggtgatcggcggcagcccttgcaatgacctgagcatcgtgaacccagcccggaagggcctgtacgagggaaccggcagactgttcttcgagttttacagactgctgcacgacgcccggcctaaggaaggcgacgaccggcccttcttttggctgttcgagaatgtggtggccatgggagtcagcgacaagcgggatattagccggttcctggagagcaaccccgtgatgatcgatgccaaggaagtgagcgccgcccaccgggccagatacttctggggcaatctgcctggcatgaacagacccctggccagcaccgtgaacgacaagctggagctgcaggagtgcctggagcacggccggatcgccaagttcagcaaggtgagaaccatcaccacccgaagcaacagcatcaaacaaggcaaggaccagcactttcctgtgttcatgaacgagaaggaggacatcctgtggtgtaccgagatggagagagtgttcgggttcccagtccactacacagatgtcagcaacatgtctagactggccagacagagactgctgggaagaagctggtccgtccctgtgatcagacacctgttcgcccctctgaaggagtacttcgcctgcgtgagcagcggcaacagcaacgccaacagccggggccccagcttctctagcggcctggtgccactgtccctgagagggagccacatgggccccatggagatctacaaaaccgtgagcgcctggaagcggcagcctgtgcgcgtgctgagcctgtttcggaatatcgataaagtcctgaaaagcctgggattcctggagagcggctctggctccggcggtggcaccctgaagtacgtggaggatgtgacaaacgtggtcagacgggatgtggagaagtggggccccttcgatctggtgtacggcagcacccaacccctgggcagctcttgtgaccggtgccctggctggtacatgtttcagttccaccggatcctgcagtacgccctgccgagacaggagtcccagcggccattcttttggattttcatggacaacttgctgctgaccgaggatgaccaggaaactaccactcggttcctgcagaccgaagccgtgaccctgcaggacgtgagaggccgggactaccagaacgccatgcgggtgtggtccaacatccctggactgaaaagcaagcacgcacctctgacccctaaagaagaggagtacctgcaggcccaggtgcggagcagaagcaagctggacgcccctaaggtggatctgctggtgaagaattgcctcctgcccctgagagagtacttcaagtatttcagccagaatagtctgcccctgggaggcagcggcggcggcagctgggccagcgtggtgttcgaggacgtggccgtgaacttcacccccgaggagtgggccctgctgaacaggggccagaggaagctgtacagggacgtgatgctggagacctgcaggaacctgagcgccgtggagaagaggaagttccacagcagcggcgacctgaccaggatgcaggagggcctgctgaggagccccctggtggagagcgtgtgcgagaggatcgagggcgacccctgcggcggcggcccaagcagcggcgcccctcctcccagcggcggcaggcggcccaagcagcggcgcccctcctcccagcggcggcagcccagccggctccccaacctctaccgaggagggcacctctgagtccgccacccccgagagcggccctggcacctccaccgagcccagcgagggcagcgcacccggcagccctgccggcagccccacctccacagaggagggaaccagcaccgagcccagcgaaggcagcgccccaggcaccagcaccgagcctagtgagcaggagattaaacggatcaacaagatcagaagaagacttgtgaaagacagcaacaccaagaaggccggcaagacaggccccatgaaaaccctgctggttagagtgatgacacccgatctgagagagcggctggaaaacctgagaaagaagcctgaaaatatcccccagcccatcagcaatacatctagagccaacctgaataagctgctgaccgattacaccgaaatgaagaaggcgatcctgcatgtgtactgggaagagttccagaaggaccctgtgggcctgatgagccgggtggcccagcctgccagcaagaagatcgatcagaacaagctgaaacctgagatggacgagaagggcaacctgaccaccgccggctttgcctgctctcagtgtggccagcccctgttcgtgtacaagctggagcaggtgtctgagaagggcaaggcttacaccaactacttcggacggtgcaatgtggccgagcacgaaaagctgatcctgctggcccagctgaagcccgagaaggatagcgacgaagccgtgacatatagcctgggaaagtttgggcagagggccctggatttctacagcattcatgtgaccaaggagtccacccaccccgtgaagcccctggcccagatcgccggaaacagatacgcctccggacctgtgggaaaggccctgagcgacgcatgtatgggcacaatcgcctccttcctgtctaagtaccaggacatcatcatcgaacaccagaaggtggtgaagggcaaccagaagagactggagagcctgcgggagctggccggcaaggaaaacctggaataccctagcgtgaccctgccacctcagcctcacaccaaggagggcgttgatgcctacaacgaagtgatcgcccgggtgcgaatgtgggtgaacctgaacctgtggcagaagctgaagctaagcagagatgatgccaagcctctgctgagactgaagggattcccttcctttcctctggtcgagagacaggccaacgaagtggactggtgggacatggtgtgtaacgtgaagaagctgatcaacgagaaaaaggaggatggcaaggtgttttggcagaatctggctggctacaagagacaggaagccctgagaccatacctgagcagcgaggaagatcggaagaagggaaagaaattcgctcggtaccagctgggcgacctgctgctgcacctggaaaagaagcacggcgaggactggggaaaggtgtacgacgaggcctgggagcggattgacaagaaagtggaaggcctgagcaagcacatcaagctggaagaggaacggagaagcgaggacgcccagagcaaggccgccctgaccgactggctgcgggctaaggccagcttcgtgatcgagggcctgaaggaggccgacaaggacgagttctgcagatgcgagctgaagctgcagaagtggtacggggacctgcggggaaagcccttcgccatcgaagccgagaacagcatcctggacatcagcggcttcagcaagcagtacaactgtgccttcatctggcagaaggacggcgtgaagaagctgaacctgtacctgatcatcaactacttcaagggcggcaagctgcggttcaagaagatcaaacctgaagccttcgaagccaacagattctacaccgtgatcaacaaaaagagcggcgagatcgtgcccatggaggtgaacttcaacttcgacgaccccaacctgatcatcctgcctctggcctttggcaagagacagggcagagaattcatctggaacgacctgctgtccctggaaaccggcagcctgaagctggccaacggaagagtgatcgagaagacactgtacaacagaagaacccggcaggatgagcctgccctgttcgtggccctgaccttcgagcggcgggaggtcctggactcctccaatatcaaaccaatgaacctgatcggcgtggcaagaggcgaaaacatccccgccgtgatcgccctgaccgaccccgagggctgcccactgagccggtttaaggatagcctgggaaacccaacccacatcctgagaatcggcgagagctataaggagaagcagcggaccatccaggccaagaaggaggtggagcagcggagagccggcggctacagccggaagtacgccagcaaagccaagaatctggcagacgatatggtgagaaacaccgctagagatctgctgtactacgccgtgacccaggatgccatgctgatcttcgccaacctgagccggggcttcggccggcagggcaagcggaccttcatggccgagagacagtacacacggatggaggactggctgaccgccaagctggcctacgagggcctgagcaagacctacctgtccaagacactggcccagtacacctccaagacatgcagcaactgtgggtttaccatcaccagcgccgactacgacagggtgctggagaagctgaagaagacagcaacaggctggatgaccacaattaacggcaaggagctgaaggtggagggccagattacctactacaacagatacaagagacagaacgtagtcaaggacctgtccgtcgagctggatagactgagcgaagaatctgtgaacaacgacatctcctcctggacaaagggcagaagcggagaagctctgagcctcctgaagaaaagattctcccatagacccgtgcaggagaagttcgtgtgcctgaactgcggcttcgagacacacgcagccgagcaagccgccctgaacatcgccagatcctggctgttcctgcggagccaggagtacaagaaataccagacaaacaagacaaccggcaacaccgataagagagccttcgtcgagacctggcagtccttttaccggaagaagcttaaggaggtgtggaaacctgccgtgcggtctggcggatctggcggaggctccaccagccccaagaaaaagagaaaagtctaagctgccttctgcggggcttgccttctggccatgcccttcttctctcccttgcacctgtacctcttggtctttgaataaagcctgagtaggaaggctagcaaaaaaaaaaaaaaaaaaaaaaaaaaaaaaaaaaaaaaaaaaaaaaaaaaaaaaaaaaaaaaaaaaaaaaaaaaaaaaaagcccagccggctccccaacctctaccgaggagggcacctctgagtccgccacccccgagagcggccctggcacctccaccgagcccagcgagggcagcgcacccggcagccctgccggcagccccacctccacagaggagggaaccagcaccgagcccagcgaaggcagcgccccaggcaccagcaccgagcctagtgagcaggagattaaacggatcaacaagatcagaagaagacttgtgaaagacagcaacaccaagaaggccggcaagacaggccccatgaaaaccctgctggttagagtgatgacacccgatctgagagagcggctggaaaacctgagaaagaagcctgaaaatatcccccagcccatcagcaatacatctagagccaacctgaataagctgctgaccgattacaccgaaatgaagaaggcgatcctgcatgtgtactgggaagagttccagaaggaccctgtgggcctgatgagccgggtggcccagcctgccagcaagaagatcgatcagaacaagctgaaacctgagatggacgagaagggcaacctgaccaccgccggctttgcctgctctcagtgtggccagcccctgttcgtgtacaagctggagcaggtgtctgagaagggcaaggcttacaccaactacttcggacggtgcaatgtggccgagcacgaaaagctgatcctgctggcccagctgaagcccgagaaggatagcgacgaagccgtgacatatagcctgggaaagtttgggcagagggccctggatttctacagcattcatgtgaccaaggagtccacccaccccgtgaagcccctggcccagatcgccggaaacagatacgcctccggacctgtgggaaaggccctgagcgacgcatgtatgggcacaatcgcctccttcctgtctaagtaccaggacatcatcatcgaacaccagaaggtggtgaagggcaaccagaagagactggagagcctgcgggagctggccggcaaggaaaacctggaataccctagcgtgaccctgccacctcagcctcacaccaaggagggcgttgatgcctacaacgaagtgatcgcccgggtgcgaatgtgggtgaacctgaacctgtggcagaagctgaagctaagcagagatgatgccaagcctctgctgagactgaagggattcccttcctttcctctggtcgagagacaggccaacgaagtggactggtgggacatggtgtgtaacgtgaagaagctgatcaacgagaaaaaggaggatggcaaggtgttttggcagaatctggctggctacaagagacaggaagccctgagaccatacctgagcagcgaggaagatcggaagaagggaaagaaattcgctcggtaccagctgggcgacctgctgctgcacctggaaaagaagcacggcgaggactggggaaaggtgtacgacgaggcctgggagcggattgacaagaaagtggaaggcctgagcaagcacatcaagctggaagaggaacggagaagcgaggacgcccagagcaaggccgccctgaccgactggctgcgggctaaggccagcttcgtgatcgagggcctgaaggaggccgacaaggacgagttctgcagatgcgagctgaagctgcagaagtggtacggggacctgcggggaaagcccttcgccatcgaagccgagaacagcatcctggacatcagcggcttcagcaagcagtacaactgtgccttcatctggcagaaggacggcgtgaagaagctgaacctgtacctgatcatcaactacttcaagggcggcaagctgcggttcaagaagatcaaacctgaagccttcgaagccaacagattctacaccgtgatcaacaaaaagagcggcgagatcgtgcccatggaggtgaacttcaacttcgacgaccccaacctgatcatcctgcctctggcctttggcaagagacagggcagagaattcatctggaacgacctgctgtccctggaaaccggcagcctgaagctggccaacggaagagtgatcgagaagacactgtacaacagaagaacccggcaggatgagcctgccctgttcgtggccctgaccttcgagcggcgggaggtcctggactcctccaatatcaaaccaatgaacctgatcggcgtggcaagaggcgaaaacatccccgccgtgatcgccctgaccgaccccgagggctgcccactgagccggtttaaggatagcctgggaaacccaacccacatcctgagaatcggcgagagctataaggagaagcagcggaccatccaggccaagaaggaggtggagcagcggagagccggcggctacagccggaagtacgccagcaaagccaagaatctggcagacgatatggtgagaaacaccgctagagatctgctgtactacgccgtgacccaggatgccatgctgatcttcgccaacctgagccggggcttcggccggcagggcaagcggaccttcatggccgagagacagtacacacggatggaggactggctgaccgccaagctggcctacgagggcctgagcaagacctacctgtccaagacactggcccagtacacctccaagacatgcagcaactgtgggtttaccatcaccagcgccgactacgacagggtgctggagaagctgaagaagacagcaacaggctggatgaccacaattaacggcaaggagctgaaggtggagggccagattacctactacaacagatacaagagacagaacgtagtcaaggacctgtccgtcgagctggatagactgagcgaagaatctgtgaacaacgacatctcctcctggacaaagggcagaagcggagaagctctgagcctcctgaagaaaagattctcccatagacccgtgcaggagaagttcgtgtgcctgaactgcggcttcgagacacacgcagccgagcaagccgccctgaacatcgccagatcctggctgttcctgcggagccaggagtacaagaaataccagacaaacaagacaaccggcaacaccgataagagagccttcgtcgagacctggcagtccttttaccggaagaagcttaaggaggtgtggaaacctgccgtgcggtctggcggatctggcggaggctccaccagccccaagaaaaagagaaaagtctaagctgccttctgcggggcttgccttctggccatgcccttcttctctcccttgcacctgtacctcttggtctttgaataaagcctgagtaggaaggctagcaaaaaaaaaaaaaaaaaaaaaaaaaaaaaaaaaaaaaaaaaaaaaaaaaaaaaaaaaaaaaaaaaaaaaaaaaaaaaaaa

SEQ ID NO: 9575 - RNA, 8787 nt, synthetic construct
  source 1..8787: mol_type = other RNA
aggaaataagagagaaaagaagagtaagaagaaatataagagccaccatggcccctaagaagaagcgtaaagtgagccggatgaaccacgaccaggagttcgacccccctaaggtgtaccctcccgtccccgccgagaagagaaagcccatccgggtcctgagcctgttcgatggcatcgccaccggtctgctggtgctgaaggacctgggcatccaggtggataggtacattgcctccgaggtgtgcgaggactccatcaccgtgggaatggtgcgtcatcagggcaagatcatgtacgtgggcgacgtgcggagcgtgacacagaagcatatccaggagtggggccctttcgacctggtgatcggcggcagcccttgcaatgacctgagcatcgtgaacccagcccggaagggcctgtacgagggaaccggcagactgttcttcgagttttacagactgctgcacgacgcccggcctaaggaaggcgacgaccggcccttcttttggctgttcgagaatgtggtggccatgggagtcagcgacaagcgggatattagccggttcctggagagcaaccccgtgatgatcgatgccaaggaagtgagcgccgcccaccgggccagatacttctggggcaatctgcctggcatgaacagacccctggccagcaccgtgaacgacaagctggagctgcaggagtgcctggagcacggccggatcgccaagttcagcaaggtgagaaccatcaccacccgaagcaacagcatcaaacaaggcaaggaccagcactttcctgtgttcatgaacgagaaggaggacatcctgtggtgtaccgagatggagagagtgttcgggttcccagtccactacacagatgtcagcaacatgtctagactggccagacagagactgctgggaagaagctggtccgtccctgtgatcagacacctgttcgcccctctgaaggagtacttcgcctgcgtgagcagcggcaacagcaacgccaacagccggggccccagcttctctagcggcctggtgccactgtccctgagagggagccacatgggccccatggagatctacaaaaccgtgagcgcctggaagcggcagcctgtgcgcgtgctgagcctgtttcggaatatcgataaagtcctgaaaagcctgggattcctggagagcggctctggctccggcggtggcaccctgaagtacgtggaggatgtgacaaacgtggtcagacgggatgtggagaagtggggccccttcgatctggtgtacggcagcacccaacccctgggcagctcttgtgaccggtgccctggctggtacatgtttcagttccaccggatcctgcagtacgccctgccgagacaggagtcccagcggccattcttttggattttcatggacaacttgctgctgaccgaggatgaccaggaaactaccactcggttcctgcagaccgaagccgtgaccctgcaggacgtgagaggccgggactaccagaacgccatgcgggtgtggtccaacatccctggactgaaaagcaagcacgcacctctgacccctaaagaagaggagtacctgcaggcccaggtgcggagcagaagcaagctggacgcccctaaggtggatctgctggtgaagaattgcctcctgcccctgagagagtacttcaagtatttcagccagaatagtctgcccctgggaggcagcggcggcggcgcccaggagagcctgaccctggaggacgtggccgtggacttcagcagggaggagtggaggctgctggcccccgcccagaaggacctgtacagggacgtgatgctggagaactacaggaacctggtgagcgtgggccaccaggccagcaagcccgacgtgctggccaggctggagaggggcgaggagccctgggccatcgaggaggaggtgaggagcggcaccagccccgagaccggcaaggtgggcggcccaagcagcggcgcccctcctcccagcggcggcaggcggcccaagcagcggcgcccctcctcccagcggcggcagcccagccggctccccaacctctaccgaggagggcacctctgagtccgccacccccgagagcggccctggcacctccaccgagcccagcgagggcagcgcacccggcagccctgccggcagccccacctccacagaggagggaaccagcaccgagcccagcgaaggcagcgccccaggcaccagcaccgagcctagtgagcaggagattaaacggatcaacaagatcagaagaagacttgtgaaagacagcaacaccaagaaggccggcaagacaggccccatgaaaaccctgctggttagagtgatgacacccgatctgagagagcggctggaaaacctgagaaagaagcctgaaaatatcccccagcccatcagcaatacatctagagccaacctgaataagctgctgaccgattacaccgaaatgaagaaggcgatcctgcatgtgtactgggaagagttccagaaggaccctgtgggcctgatgagccgggtggcccagcctgccagcaagaagatcgatcagaacaagctgaaacctgagatggacgagaagggcaacctgaccaccgccggctttgcctgctctcagtgtggccagcccctgttcgtgtacaagctggagcaggtgtctgagaagggcaaggcttacaccaactacttcggacggtgcaatgtggccgagcacgaaaagctgatcctgctggcccagctgaagcccgagaaggatagcgacgaagccgtgacatatagcctgggaaagtttgggcagagggccctggatttctacagcattcatgtgaccaaggagtccacccaccccgtgaagcccctggcccagatcgccggaaacagatacgcctccggacctgtgggaaaggccctgagcgacgcatgtatgggcacaatcgcctccttcctgtctaagtaccaggacatcatcatcgaacaccagaaggtggtgaagggcaaccagaagagactggagagcctgcgggagctggccggcaaggaaaacctggaataccctagcgtgaccctgccacctcagcctcacaccaaggagggcgttgatgcctacaacgaagtgatcgcccgggtgcgaatgtgggtgaacctgaacctgtggcagaagctgaagctaagcagagatgatgccaagcctctgctgagactgaagggattcccttcctttcctctggtcgagagacaggccaacgaagtggactggtgggacatggtgtgtaacgtgaagaagctgatcaacgagaaaaaggaggatggcaaggtgttttggcagaatctggctggctacaagagacaggaagccctgagaccatacctgagcagcgaggaagatcggaagaagggaaagaaattcgctcggtaccagctgggcgacctgctgctgcacctggaaaagaagcacggcgaggactggggaaaggtgtacgacgaggcctgggagcggattgacaagaaagtggaaggcctgagcaagcacatcaagctggaagaggaacggagaagcgaggacgcccagagcaaggccgccctgaccgactggctgcgggctaaggccagcttcgtgatcgagggcctgaaggaggccgacaaggacgagttctgcagatgcgagctgaagctgcagaagtggtacggggacctgcggggaaagcccttcgccatcgaagccgagaacagcatcctggacatcagcggcttcagcaagcagtacaactgtgccttcatctggcagaaggacggcgtgaagaagctgaacctgtacctgatcatcaactacttcaagggcggcaagctgcggttcaagaagatcaaacctgaagccttcgaagccaacagattctacaccgtgatcaacaaaaagagcggcgagatcgtgcccatggaggtgaacttcaacttcgacgaccccaacctgatcatcctgcctctggcctttggcaagagacagggcagagaattcatctggaacgacctgctgtccctggaaaccggcagcctgaagctggccaacggaagagtgatcgagaagacactgtacaacagaagaacccggcaggatgagcctgccctgttcgtggccctgaccttcgagcggcgggaggtcctggactcctccaatatcaaaccaatgaacctgatcggcgtggcaagaggcgaaaacatccccgccgtgatcgccctgaccgaccccgagggctgcccactgagccggtttaaggatagcctgggaaacccaacccacatcctgagaatcggcgagagctataaggagaagcagcggaccatccaggccaagaaggaggtggagcagcggagagccggcggctacagccggaagtacgccagcaaagccaagaatctggcagacgatatggtgagaaacaccgctagagatctgctgtactacgccgtgacccaggatgccatgctgatcttcgccaacctgagccggggcttcggccggcagggcaagcggaccttcatggccgagagacagtacacacggatggaggactggctgaccgccaagctggcctacgagggcctgagcaagacctacctgtccaagacactggcccagtacacctccaagacatgcagcaactgtgggtttaccatcaccagcgccgactacgacagggtgctggagaagctgaagaagacagcaacaggctggatgaccacaattaacggcaaggagctgaaggtggagggccagattacctactacaacagatacaagagacagaacgtagtcaaggacctgtccgtcgagctggatagactgagcgaagaatctgtgaacaacgacatctcctcctggacaaagggcagaagcggagaagctctgagcctcctgaagaaaagattctcccatagacccgtgcaggagaagttcgtgtgcctgaactgcggcttcgagacacacgcagccgagcaagccgccctgaacatcgccagatcctggctgttcctgcggagccaggagtacaagaaataccagacaaacaagacaaccggcaacaccgataagagagccttcgtcgagacctggcagtccttttaccggaagaagcttaaggaggtgtggaaacctgccgtgcggtctggcggatctggcggaggctccaccagccccaagaaaaagagaaaagtctaagctgccttctgcggggcttgccttctggccatgcccttcttctctcccttgcacctgtacctcttggtctttgaataaagcctgagtaggaaggctagcaaaaaaaaaaaaaaaaaaaaaaaaaaaaaaaaaaaaaaaaaaaaaaaaaaaaaaaaaaaaaaaaaaaaaaaaaaaaaaaagcccagccggctccccaacctctaccgaggagggcacctctgagtccgccacccccgagagcggccctggcacctccaccgagcccagcgagggcagcgcacccggcagccctgccggcagccccacctccacagaggagggaaccagcaccgagcccagcgaaggcagcgccccaggcaccagcaccgagcctagtgagcaggagattaaacggatcaacaagatcagaagaagacttgtgaaagacagcaacaccaagaaggccggcaagacaggccccatgaaaaccctgctggttagagtgatgacacccgatctgagagagcggctggaaaacctgagaaagaagcctgaaaatatcccccagcccatcagcaatacatctagagccaacctgaataagctgctgaccgattacaccgaaatgaagaaggcgatcctgcatgtgtactgggaagagttccagaaggaccctgtgggcctgatgagccgggtggcccagcctgccagcaagaagatcgatcagaacaagctgaaacctgagatggacgagaagggcaacctgaccaccgccggctttgcctgctctcagtgtggccagcccctgttcgtgtacaagctggagcaggtgtctgagaagggcaaggcttacaccaactacttcggacggtgcaatgtggccgagcacgaaaagctgatcctgctggcccagctgaagcccgagaaggatagcgacgaagccgtgacatatagcctgggaaagtttgggcagagggccctggatttctacagcattcatgtgaccaaggagtccacccaccccgtgaagcccctggcccagatcgccggaaacagatacgcctccggacctgtgggaaaggccctgagcgacgcatgtatgggcacaatcgcctccttcctgtctaagtaccaggacatcatcatcgaacaccagaaggtggtgaagggcaaccagaagagactggagagcctgcgggagctggccggcaaggaaaacctggaataccctagcgtgaccctgccacctcagcctcacaccaaggagggcgttgatgcctacaacgaagtgatcgcccgggtgcgaatgtgggtgaacctgaacctgtggcagaagctgaagctaagcagagatgatgccaagcctctgctgagactgaagggattcccttcctttcctctggtcgagagacaggccaacgaagtggactggtgggacatggtgtgtaacgtgaagaagctgatcaacgagaaaaaggaggatggcaaggtgttttggcagaatctggctggctacaagagacaggaagccctgagaccatacctgagcagcgaggaagatcggaagaagggaaagaaattcgctcggtaccagctgggcgacctgctgctgcacctggaaaagaagcacggcgaggactggggaaaggtgtacgacgaggcctgggagcggattgacaagaaagtggaaggcctgagcaagcacatcaagctggaagaggaacggagaagcgaggacgcccagagcaaggccgccctgaccgactggctgcgggctaaggccagcttcgtgatcgagggcctgaaggaggccgacaaggacgagttctgcagatgcgagctgaagctgcagaagtggtacggggacctgcggggaaagcccttcgccatcgaagccgagaacagcatcctggacatcagcggcttcagcaagcagtacaactgtgccttcatctggcagaaggacggcgtgaagaagctgaacctgtacctgatcatcaactacttcaagggcggcaagctgcggttcaagaagatcaaacctgaagccttcgaagccaacagattctacaccgtgatcaacaaaaagagcggcgagatcgtgcccatggaggtgaacttcaacttcgacgaccccaacctgatcatcctgcctctggcctttggcaagagacagggcagagaattcatctggaacgacctgctgtccctggaaaccggcagcctgaagctggccaacggaagagtgatcgagaagacactgtacaacagaagaacccggcaggatgagcctgccctgttcgtggccctgaccttcgagcggcgggaggtcctggactcctccaatatcaaaccaatgaacctgatcggcgtggcaagaggcgaaaacatccccgccgtgatcgccctgaccgaccccgagggctgcccactgagccggtttaaggatagcctgggaaacccaacccacatcctgagaatcggcgagagctataaggagaagcagcggaccatccaggccaagaaggaggtggagcagcggagagccggcggctacagccggaagtacgccagcaaagccaagaatctggcagacgatatggtgagaaacaccgctagagatctgctgtactacgccgtgacccaggatgccatgctgatcttcgccaacctgagccggggcttcggccggcagggcaagcggaccttcatggccgagagacagtacacacggatggaggactggctgaccgccaagctggcctacgagggcctgagcaagacctacctgtccaagacactggcccagtacacctccaagacatgcagcaactgtgggtttaccatcaccagcgccgactacgacagggtgctggagaagctgaagaagacagcaacaggctggatgaccacaattaacggcaaggagctgaaggtggagggccagattacctactacaacagatacaagagacagaacgtagtcaaggacctgtccgtcgagctggatagactgagcgaagaatctgtgaacaacgacatctcctcctggacaaagggcagaagcggagaagctctgagcctcctgaagaaaagattctcccatagacccgtgcaggagaagttcgtgtgcctgaactgcggcttcgagacacacgcagccgagcaagccgccctgaacatcgccagatcctggctgttcctgcggagccaggagtacaagaaataccagacaaacaagacaaccggcaacaccgataagagagccttcgtcgagacctggcagtccttttaccggaagaagcttaaggaggtgtggaaacctgccgtgcggtctggcggatctggcggaggctccaccagccccaagaaaaagagaaaagtctaagctgccttctgcggggcttgccttctggccatgcccttcttctctcccttgcacctgtacctcttggtctttgaataaagcctgagtaggaaggctagcaaaaaaaaaaaaaaaaaaaaaaaaaaaaaaaaaaaaaaaaaaaaaaaaaaaaaaaaaaaaaaaaaaaaaaaaaaaaaaaa

SEQ ID NO: 9576 - RNA, 8787 nt, synthetic construct
  source 1..8787: mol_type = other RNA
aggaaataagagagaaaagaagagtaagaagaaatataagagccaccatggcccctaagaagaagcgtaaagtgagccggatgaaccacgaccaggagttcgacccccctaaggtgtaccctcccgtccccgccgagaagagaaagcccatccgggtcctgagcctgttcgatggcatcgccaccggtctgctggtgctgaaggacctgggcatccaggtggataggtacattgcctccgaggtgtgcgaggactccatcaccgtgggaatggtgcgtcatcagggcaagatcatgtacgtgggcgacgtgcggagcgtgacacagaagcatatccaggagtggggccctttcgacctggtgatcggcggcagcccttgcaatgacctgagcatcgtgaacccagcccggaagggcctgtacgagggaaccggcagactgttcttcgagttttacagactgctgcacgacgcccggcctaaggaaggcgacgaccggcccttcttttggctgttcgagaatgtggtggccatgggagtcagcgacaagcgggatattagccggttcctggagagcaaccccgtgatgatcgatgccaaggaagtgagcgccgcccaccgggccagatacttctggggcaatctgcctggcatgaacagacccctggccagcaccgtgaacgacaagctggagctgcaggagtgcctggagcacggccggatcgccaagttcagcaaggtgagaaccatcaccacccgaagcaacagcatcaaacaaggcaaggaccagcactttcctgtgttcatgaacgagaaggaggacatcctgtggtgtaccgagatggagagagtgttcgggttcccagtccactacacagatgtcagcaacatgtctagactggccagacagagactgctgggaagaagctggtccgtccctgtgatcagacacctgttcgcccctctgaaggagtacttcgcctgcgtgagcagcggcaacagcaacgccaacagccggggccccagcttctctagcggcctggtgccactgtccctgagagggagccacatgggccccatggagatctacaaaaccgtgagcgcctggaagcggcagcctgtgcgcgtgctgagcctgtttcggaatatcgataaagtcctgaaaagcctgggattcctggagagcggctctggctccggcggtggcaccctgaagtacgtggaggatgtgacaaacgtggtcagacgggatgtggagaagtggggccccttcgatctggtgtacggcagcacccaacccctgggcagctcttgtgaccggtgccctggctggtacatgtttcagttccaccggatcctgcagtacgccctgccgagacaggagtcccagcggccattcttttggattttcatggacaacttgctgctgaccgaggatgaccaggaaactaccactcggttcctgcagaccgaagccgtgaccctgcaggacgtgagaggccgggactaccagaacgccatgcgggtgtggtccaacatccctggactgaaaagcaagcacgcacctctgacccctaaagaagaggagtacctgcaggcccaggtgcggagcagaagcaagctggacgcccctaaggtggatctgctggtgaagaattgcctcctgcccctgagagagtacttcaagtatttcagccagaatagtctgcccctgggaggcagcggcggcggccaggagagcgtgaccttcaaggacgtggccgtggacttcacccaggaggagtggcaccacatggaccccacccagaggatcctgtacagggacgtgatgctggagacctacagccacctggtgagcctgggctaccaggtgagcaagcccgaggtgatcttcaagctggagcagggcgaggagccctggatcagcgaggaggagatccagaggcccttctgccccgactgggagatcaggcccggcggcccaagcagcggcgcccctcctcccagcggcggcaggcggcccaagcagcggcgcccctcctcccagcggcggcagcccagccggctccccaacctctaccgaggagggcacctctgagtccgccacccccgagagcggccctggcacctccaccgagcccagcgagggcagcgcacccggcagccctgccggcagccccacctccacagaggagggaaccagcaccgagcccagcgaaggcagcgccccaggcaccagcaccgagcctagtgagcaggagattaaacggatcaacaagatcagaagaagacttgtgaaagacagcaacaccaagaaggccggcaagacaggccccatgaaaaccctgctggttagagtgatgacacccgatctgagagagcggctggaaaacctgagaaagaagcctgaaaatatcccccagcccatcagcaatacatctagagccaacctgaataagctgctgaccgattacaccgaaatgaagaaggcgatcctgcatgtgtactgggaagagttccagaaggaccctgtgggcctgatgagccgggtggcccagcctgccagcaagaagatcgatcagaacaagctgaaacctgagatggacgagaagggcaacctgaccaccgccggctttgcctgctctcagtgtggccagcccctgttcgtgtacaagctggagcaggtgtctgagaagggcaaggcttacaccaactacttcggacggtgcaatgtggccgagcacgaaaagctgatcctgctggcccagctgaagcccgagaaggatagcgacgaagccgtgacatatagcctgggaaagtttgggcagagggccctggatttctacagcattcatgtgaccaaggagtccacccaccccgtgaagcccctggcccagatcgccggaaacagatacgcctccggacctgtgggaaaggccctgagcgacgcatgtatgggcacaatcgcctccttcctgtctaagtaccaggacatcatcatcgaacaccagaaggtggtgaagggcaaccagaagagactggagagcctgcgggagctggccggcaaggaaaacctggaataccctagcgtgaccctgccacctcagcctcacaccaaggagggcgttgatgcctacaacgaagtgatcgcccgggtgcgaatgtgggtgaacctgaacctgtggcagaagctgaagctaagcagagatgatgccaagcctctgctgagactgaagggattcccttcctttcctctggtcgagagacaggccaacgaagtggactggtgggacatggtgtgtaacgtgaagaagctgatcaacgagaaaaaggaggatggcaaggtgttttggcagaatctggctggctacaagagacaggaagccctgagaccatacctgagcagcgaggaagatcggaagaagggaaagaaattcgctcggtaccagctgggcgacctgctgctgcacctggaaaagaagcacggcgaggactggggaaaggtgtacgacgaggcctgggagcggattgacaagaaagtggaaggcctgagcaagcacatcaagctggaagaggaacggagaagcgaggacgcccagagcaaggccgccctgaccgactggctgcgggctaaggccagcttcgtgatcgagggcctgaaggaggccgacaaggacgagttctgcagatgcgagctgaagctgcagaagtggtacggggacctgcggggaaagcccttcgccatcgaagccgagaacagcatcctggacatcagcggcttcagcaagcagtacaactgtgccttcatctggcagaaggacggcgtgaagaagctgaacctgtacctgatcatcaactacttcaagggcggcaagctgcggttcaagaagatcaaacctgaagccttcgaagccaacagattctacaccgtgatcaacaaaaagagcggcgagatcgtgcccatggaggtgaacttcaacttcgacgaccccaacctgatcatcctgcctctggcctttggcaagagacagggcagagaattcatctggaacgacctgctgtccctggaaaccggcagcctgaagctggccaacggaagagtgatcgagaagacactgtacaacagaagaacccggcaggatgagcctgccctgttcgtggccctgaccttcgagcggcgggaggtcctggactcctccaatatcaaaccaatgaacctgatcggcgtggcaagaggcgaaaacatccccgccgtgatcgccctgaccgaccccgagggctgcccactgagccggtttaaggatagcctgggaaacccaacccacatcctgagaatcggcgagagctataaggagaagcagcggaccatccaggccaagaaggaggtggagcagcggagagccggcggctacagccggaagtacgccagcaaagccaagaatctggcagacgatatggtgagaaacaccgctagagatctgctgtactacgccgtgacccaggatgccatgctgatcttcgccaacctgagccggggcttcggccggcagggcaagcggaccttcatggccgagagacagtacacacggatggaggactggctgaccgccaagctggcctacgagggcctgagcaagacctacctgtccaagacactggcccagtacacctccaagacatgcagcaactgtgggtttaccatcaccagcgccgactacgacagggtgctggagaagctgaagaagacagcaacaggctggatgaccacaattaacggcaaggagctgaaggtggagggccagattacctactacaacagatacaagagacagaacgtagtcaaggacctgtccgtcgagctggatagactgagcgaagaatctgtgaacaacgacatctcctcctggacaaagggcagaagcggagaagctctgagcctcctgaagaaaagattctcccatagacccgtgcaggagaagttcgtgtgcctgaactgcggcttcgagacacacgcagccgagcaagccgccctgaacatcgccagatcctggctgttcctgcggagccaggagtacaagaaataccagacaaacaagacaaccggcaacaccgataagagagccttcgtcgagacctggcagtccttttaccggaagaagcttaaggaggtgtggaaacctgccgtgcggtctggcggatctggcggaggctccaccagccccaagaaaaagagaaaagtctaagctgccttctgcggggcttgccttctggccatgcccttcttctctcccttgcacctgtacctcttggtctttgaataaagcctgagtaggaaggctagcaaaaaaaaaaaaaaaaaaaaaaaaaaaaaaaaaaaaaaaaaaaaaaaaaaaaaaaaaaaaaaaaaaaaaaaaaaaaaaaagcccagccggctccccaacctctaccgaggagggcacctctgagtccgccacccccgagagcggccctggcacctccaccgagcccagcgagggcagcgcacccggcagccctgccggcagccccacctccacagaggagggaaccagcaccgagcccagcgaaggcagcgccccaggcaccagcaccgagcctagtgagcaggagattaaacggatcaacaagatcagaagaagacttgtgaaagacagcaacaccaagaaggccggcaagacaggccccatgaaaaccctgctggttagagtgatgacacccgatctgagagagcggctggaaaacctgagaaagaagcctgaaaatatcccccagcccatcagcaatacatctagagccaacctgaataagctgctgaccgattacaccgaaatgaagaaggcgatcctgcatgtgtactgggaagagttccagaaggaccctgtgggcctgatgagccgggtggcccagcctgccagcaagaagatcgatcagaacaagctgaaacctgagatggacgagaagggcaacctgaccaccgccggctttgcctgctctcagtgtggccagcccctgttcgtgtacaagctggagcaggtgtctgagaagggcaaggcttacaccaactacttcggacggtgcaatgtggccgagcacgaaaagctgatcctgctggcccagctgaagcccgagaaggatagcgacgaagccgtgacatatagcctgggaaagtttgggcagagggccctggatttctacagcattcatgtgaccaaggagtccacccaccccgtgaagcccctggcccagatcgccggaaacagatacgcctccggacctgtgggaaaggccctgagcgacgcatgtatgggcacaatcgcctccttcctgtctaagtaccaggacatcatcatcgaacaccagaaggtggtgaagggcaaccagaagagactggagagcctgcgggagctggccggcaaggaaaacctggaataccctagcgtgaccctgccacctcagcctcacaccaaggagggcgttgatgcctacaacgaagtgatcgcccgggtgcgaatgtgggtgaacctgaacctgtggcagaagctgaagctaagcagagatgatgccaagcctctgctgagactgaagggattcccttcctttcctctggtcgagagacaggccaacgaagtggactggtgggacatggtgtgtaacgtgaagaagctgatcaacgagaaaaaggaggatggcaaggtgttttggcagaatctggctggctacaagagacaggaagccctgagaccatacctgagcagcgaggaagatcggaagaagggaaagaaattcgctcggtaccagctgggcgacctgctgctgcacctggaaaagaagcacggcgaggactggggaaaggtgtacgacgaggcctgggagcggattgacaagaaagtggaaggcctgagcaagcacatcaagctggaagaggaacggagaagcgaggacgcccagagcaaggccgccctgaccgactggctgcgggctaaggccagcttcgtgatcgagggcctgaaggaggccgacaaggacgagttctgcagatgcgagctgaagctgcagaagtggtacggggacctgcggggaaagcccttcgccatcgaagccgagaacagcatcctggacatcagcggcttcagcaagcagtacaactgtgccttcatctggcagaaggacggcgtgaagaagctgaacctgtacctgatcatcaactacttcaagggcggcaagctgcggttcaagaagatcaaacctgaagccttcgaagccaacagattctacaccgtgatcaacaaaaagagcggcgagatcgtgcccatggaggtgaacttcaacttcgacgaccccaacctgatcatcctgcctctggcctttggcaagagacagggcagagaattcatctggaacgacctgctgtccctggaaaccggcagcctgaagctggccaacggaagagtgatcgagaagacactgtacaacagaagaacccggcaggatgagcctgccctgttcgtggccctgaccttcgagcggcgggaggtcctggactcctccaatatcaaaccaatgaacctgatcggcgtggcaagaggcgaaaacatccccgccgtgatcgccctgaccgaccccgagggctgcccactgagccggtttaaggatagcctgggaaacccaacccacatcctgagaatcggcgagagctataaggagaagcagcggaccatccaggccaagaaggaggtggagcagcggagagccggcggctacagccggaagtacgccagcaaagccaagaatctggcagacgatatggtgagaaacaccgctagagatctgctgtactacgccgtgacccaggatgccatgctgatcttcgccaacctgagccggggcttcggccggcagggcaagcggaccttcatggccgagagacagtacacacggatggaggactggctgaccgccaagctggcctacgagggcctgagcaagacctacctgtccaagacactggcccagtacacctccaagacatgcagcaactgtgggtttaccatcaccagcgccgactacgacagggtgctggagaagctgaagaagacagcaacaggctggatgaccacaattaacggcaaggagctgaaggtggagggccagattacctactacaacagatacaagagacagaacgtagtcaaggacctgtccgtcgagctggatagactgagcgaagaatctgtgaacaacgacatctcctcctggacaaagggcagaagcggagaagctctgagcctcctgaagaaaagattctcccatagacccgtgcaggagaagttcgtgtgcctgaactgcggcttcgagacacacgcagccgagcaagccgccctgaacatcgccagatcctggctgttcctgcggagccaggagtacaagaaataccagacaaacaagacaaccggcaacaccgataagagagccttcgtcgagacctggcagtccttttaccggaagaagcttaaggaggtgtggaaacctgccgtgcggtctggcggatctggcggaggctccaccagccccaagaaaaagagaaaagtctaagctgccttctgcggggcttgccttctggccatgcccttcttctctcccttgcacctgtacctcttggtctttgaataaagcctgagtaggaaggctagcaaaaaaaaaaaaaaaaaaaaaaaaaaaaaaaaaaaaaaaaaaaaaaaaaaaaaaaaaaaaaaaaaaaaaaaaaaaaaaaa

SEQ ID NO: 9577 - RNA, 8787 nt, synthetic construct
  source 1..8787: mol_type = other RNA
aggaaataagagagaaaagaagagtaagaagaaatataagagccaccatggcccctaagaagaagcgtaaagtgagccggatgaaccacgaccaggagttcgacccccctaaggtgtaccctcccgtccccgccgagaagagaaagcccatccgggtcctgagcctgttcgatggcatcgccaccggtctgctggtgctgaaggacctgggcatccaggtggataggtacattgcctccgaggtgtgcgaggactccatcaccgtgggaatggtgcgtcatcagggcaagatcatgtacgtgggcgacgtgcggagcgtgacacagaagcatatccaggagtggggccctttcgacctggtgatcggcggcagcccttgcaatgacctgagcatcgtgaacccagcccggaagggcctgtacgagggaaccggcagactgttcttcgagttttacagactgctgcacgacgcccggcctaaggaaggcgacgaccggcccttcttttggctgttcgagaatgtggtggccatgggagtcagcgacaagcgggatattagccggttcctggagagcaaccccgtgatgatcgatgccaaggaagtgagcgccgcccaccgggccagatacttctggggcaatctgcctggcatgaacagacccctggccagcaccgtgaacgacaagctggagctgcaggagtgcctggagcacggccggatcgccaagttcagcaaggtgagaaccatcaccacccgaagcaacagcatcaaacaaggcaaggaccagcactttcctgtgttcatgaacgagaaggaggacatcctgtggtgtaccgagatggagagagtgttcgggttcccagtccactacacagatgtcagcaacatgtctagactggccagacagagactgctgggaagaagctggtccgtccctgtgatcagacacctgttcgcccctctgaaggagtacttcgcctgcgtgagcagcggcaacagcaacgccaacagccggggccccagcttctctagcggcctggtgccactgtccctgagagggagccacatgggccccatggagatctacaaaaccgtgagcgcctggaagcggcagcctgtgcgcgtgctgagcctgtttcggaatatcgataaagtcctgaaaagcctgggattcctggagagcggctctggctccggcggtggcaccctgaagtacgtggaggatgtgacaaacgtggtcagacgggatgtggagaagtggggccccttcgatctggtgtacggcagcacccaacccctgggcagctcttgtgaccggtgccctggctggtacatgtttcagttccaccggatcctgcagtacgccctgccgagacaggagtcccagcggccattcttttggattttcatggacaacttgctgctgaccgaggatgaccaggaaactaccactcggttcctgcagaccgaagccgtgaccctgcaggacgtgagaggccgggactaccagaacgccatgcgggtgtggtccaacatccctggactgaaaagcaagcacgcacctctgacccctaaagaagaggagtacctgcaggcccaggtgcggagcagaagcaagctggacgcccctaaggtggatctgctggtgaagaattgcctcctgcccctgagagagtacttcaagtatttcagccagaatagtctgcccctgggaggcagcggcggcggcgccagggacctggtgatgttcagggacgtggccgtggacttcagccaggaggagtgggagtgcctgaacagctaccagaggaacctgtacagggacgtgatcctggagaactacagcaacctggtgagcctgggctgcagcatcagcaagcccgacgtgatcaccctgctggagcagggcaaggagccctggctggtggtgagggacgagaagaggaggtggagcctgggccccaccttcaagggcggcccaagcagcggcgcccctcctcccagcggcggcaggcggcccaagcagcggcgcccctcctcccagcggcggcagcccagccggctccccaacctctaccgaggagggcacctctgagtccgccacccccgagagcggccctggcacctccaccgagcccagcgagggcagcgcacccggcagccctgccggcagccccacctccacagaggagggaaccagcaccgagcccagcgaaggcagcgccccaggcaccagcaccgagcctagtgagcaggagattaaacggatcaacaagatcagaagaagacttgtgaaagacagcaacaccaagaaggccggcaagacaggccccatgaaaaccctgctggttagagtgatgacacccgatctgagagagcggctggaaaacctgagaaagaagcctgaaaatatcccccagcccatcagcaatacatctagagccaacctgaataagctgctgaccgattacaccgaaatgaagaaggcgatcctgcatgtgtactgggaagagttccagaaggaccctgtgggcctgatgagccgggtggcccagcctgccagcaagaagatcgatcagaacaagctgaaacctgagatggacgagaagggcaacctgaccaccgccggctttgcctgctctcagtgtggccagcccctgttcgtgtacaagctggagcaggtgtctgagaagggcaaggcttacaccaactacttcggacggtgcaatgtggccgagcacgaaaagctgatcctgctggcccagctgaagcccgagaaggatagcgacgaagccgtgacatatagcctgggaaagtttgggcagagggccctggatttctacagcattcatgtgaccaaggagtccacccaccccgtgaagcccctggcccagatcgccggaaacagatacgcctccggacctgtgggaaaggccctgagcgacgcatgtatgggcacaatcgcctccttcctgtctaagtaccaggacatcatcatcgaacaccagaaggtggtgaagggcaaccagaagagactggagagcctgcgggagctggccggcaaggaaaacctggaataccctagcgtgaccctgccacctcagcctcacaccaaggagggcgttgatgcctacaacgaagtgatcgcccgggtgcgaatgtgggtgaacctgaacctgtggcagaagctgaagctaagcagagatgatgccaagcctctgctgagactgaagggattcccttcctttcctctggtcgagagacaggccaacgaagtggactggtgggacatggtgtgtaacgtgaagaagctgatcaacgagaaaaaggaggatggcaaggtgttttggcagaatctggctggctacaagagacaggaagccctgagaccatacctgagcagcgaggaagatcggaagaagggaaagaaattcgctcggtaccagctgggcgacctgctgctgcacctggaaaagaagcacggcgaggactggggaaaggtgtacgacgaggcctgggagcggattgacaagaaagtggaaggcctgagcaagcacatcaagctggaagaggaacggagaagcgaggacgcccagagcaaggccgccctgaccgactggctgcgggctaaggccagcttcgtgatcgagggcctgaaggaggccgacaaggacgagttctgcagatgcgagctgaagctgcagaagtggtacggggacctgcggggaaagcccttcgccatcgaagccgagaacagcatcctggacatcagcggcttcagcaagcagtacaactgtgccttcatctggcagaaggacggcgtgaagaagctgaacctgtacctgatcatcaactacttcaagggcggcaagctgcggttcaagaagatcaaacctgaagccttcgaagccaacagattctacaccgtgatcaacaaaaagagcggcgagatcgtgcccatggaggtgaacttcaacttcgacgaccccaacctgatcatcctgcctctggcctttggcaagagacagggcagagaattcatctggaacgacctgctgtccctggaaaccggcagcctgaagctggccaacggaagagtgatcgagaagacactgtacaacagaagaacccggcaggatgagcctgccctgttcgtggccctgaccttcgagcggcgggaggtcctggactcctccaatatcaaaccaatgaacctgatcggcgtggcaagaggcgaaaacatccccgccgtgatcgccctgaccgaccccgagggctgcccactgagccggtttaaggatagcctgggaaacccaacccacatcctgagaatcggcgagagctataaggagaagcagcggaccatccaggccaagaaggaggtggagcagcggagagccggcggctacagccggaagtacgccagcaaagccaagaatctggcagacgatatggtgagaaacaccgctagagatctgctgtactacgccgtgacccaggatgccatgctgatcttcgccaacctgagccggggcttcggccggcagggcaagcggaccttcatggccgagagacagtacacacggatggaggactggctgaccgccaagctggcctacgagggcctgagcaagacctacctgtccaagacactggcccagtacacctccaagacatgcagcaactgtgggtttaccatcaccagcgccgactacgacagggtgctggagaagctgaagaagacagcaacaggctggatgaccacaattaacggcaaggagctgaaggtggagggccagattacctactacaacagatacaagagacagaacgtagtcaaggacctgtccgtcgagctggatagactgagcgaagaatctgtgaacaacgacatctcctcctggacaaagggcagaagcggagaagctctgagcctcctgaagaaaagattctcccatagacccgtgcaggagaagttcgtgtgcctgaactgcggcttcgagacacacgcagccgagcaagccgccctgaacatcgccagatcctggctgttcctgcggagccaggagtacaagaaataccagacaaacaagacaaccggcaacaccgataagagagccttcgtcgagacctggcagtccttttaccggaagaagcttaaggaggtgtggaaacctgccgtgcggtctggcggatctggcggaggctccaccagccccaagaaaaagagaaaagtctaagctgccttctgcggggcttgccttctggccatgcccttcttctctcccttgcacctgtacctcttggtctttgaataaagcctgagtaggaaggctagcaaaaaaaaaaaaaaaaaaaaaaaaaaaaaaaaaaaaaaaaaaaaaaaaaaaaaaaaaaaaaaaaaaaaaaaaaaaaaaaagcccagccggctccccaacctctaccgaggagggcacctctgagtccgccacccccgagagcggccctggcacctccaccgagcccagcgagggcagcgcacccggcagccctgccggcagccccacctccacagaggagggaaccagcaccgagcccagcgaaggcagcgccccaggcaccagcaccgagcctagtgagcaggagattaaacggatcaacaagatcagaagaagacttgtgaaagacagcaacaccaagaaggccggcaagacaggccccatgaaaaccctgctggttagagtgatgacacccgatctgagagagcggctggaaaacctgagaaagaagcctgaaaatatcccccagcccatcagcaatacatctagagccaacctgaataagctgctgaccgattacaccgaaatgaagaaggcgatcctgcatgtgtactgggaagagttccagaaggaccctgtgggcctgatgagccgggtggcccagcctgccagcaagaagatcgatcagaacaagctgaaacctgagatggacgagaagggcaacctgaccaccgccggctttgcctgctctcagtgtggccagcccctgttcgtgtacaagctggagcaggtgtctgagaagggcaaggcttacaccaactacttcggacggtgcaatgtggccgagcacgaaaagctgatcctgctggcccagctgaagcccgagaaggatagcgacgaagccgtgacatatagcctgggaaagtttgggcagagggccctggatttctacagcattcatgtgaccaaggagtccacccaccccgtgaagcccctggcccagatcgccggaaacagatacgcctccggacctgtgggaaaggccctgagcgacgcatgtatgggcacaatcgcctccttcctgtctaagtaccaggacatcatcatcgaacaccagaaggtggtgaagggcaaccagaagagactggagagcctgcgggagctggccggcaaggaaaacctggaataccctagcgtgaccctgccacctcagcctcacaccaaggagggcgttgatgcctacaacgaagtgatcgcccgggtgcgaatgtgggtgaacctgaacctgtggcagaagctgaagctaagcagagatgatgccaagcctctgctgagactgaagggattcccttcctttcctctggtcgagagacaggccaacgaagtggactggtgggacatggtgtgtaacgtgaagaagctgatcaacgagaaaaaggaggatggcaaggtgttttggcagaatctggctggctacaagagacaggaagccctgagaccatacctgagcagcgaggaagatcggaagaagggaaagaaattcgctcggtaccagctgggcgacctgctgctgcacctggaaaagaagcacggcgaggactggggaaaggtgtacgacgaggcctgggagcggattgacaagaaagtggaaggcctgagcaagcacatcaagctggaagaggaacggagaagcgaggacgcccagagcaaggccgccctgaccgactggctgcgggctaaggccagcttcgtgatcgagggcctgaaggaggccgacaaggacgagttctgcagatgcgagctgaagctgcagaagtggtacggggacctgcggggaaagcccttcgccatcgaagccgagaacagcatcctggacatcagcggcttcagcaagcagtacaactgtgccttcatctggcagaaggacggcgtgaagaagctgaacctgtacctgatcatcaactacttcaagggcggcaagctgcggttcaagaagatcaaacctgaagccttcgaagccaacagattctacaccgtgatcaacaaaaagagcggcgagatcgtgcccatggaggtgaacttcaacttcgacgaccccaacctgatcatcctgcctctggcctttggcaagagacagggcagagaattcatctggaacgacctgctgtccctggaaaccggcagcctgaagctggccaacggaagagtgatcgagaagacactgtacaacagaagaacccggcaggatgagcctgccctgttcgtggccctgaccttcgagcggcgggaggtcctggactcctccaatatcaaaccaatgaacctgatcggcgtggcaagaggcgaaaacatccccgccgtgatcgccctgaccgaccccgagggctgcccactgagccggtttaaggatagcctgggaaacccaacccacatcctgagaatcggcgagagctataaggagaagcagcggaccatccaggccaagaaggaggtggagcagcggagagccggcggctacagccggaagtacgccagcaaagccaagaatctggcagacgatatggtgagaaacaccgctagagatctgctgtactacgccgtgacccaggatgccatgctgatcttcgccaacctgagccggggcttcggccggcagggcaagcggaccttcatggccgagagacagtacacacggatggaggactggctgaccgccaagctggcctacgagggcctgagcaagacctacctgtccaagacactggcccagtacacctccaagacatgcagcaactgtgggtttaccatcaccagcgccgactacgacagggtgctggagaagctgaagaagacagcaacaggctggatgaccacaattaacggcaaggagctgaaggtggagggccagattacctactacaacagatacaagagacagaacgtagtcaaggacctgtccgtcgagctggatagactgagcgaagaatctgtgaacaacgacatctcctcctggacaaagggcagaagcggagaagctctgagcctcctgaagaaaagattctcccatagacccgtgcaggagaagttcgtgtgcctgaactgcggcttcgagacacacgcagccgagcaagccgccctgaacatcgccagatcctggctgttcctgcggagccaggagtacaagaaataccagacaaacaagacaaccggcaacaccgataagagagccttcgtcgagacctggcagtccttttaccggaagaagcttaaggaggtgtggaaacctgccgtgcggtctggcggatctggcggaggctccaccagccccaagaaaaagagaaaagtctaagctgccttctgcggggcttgccttctggccatgcccttcttctctcccttgcacctgtacctcttggtctttgaataaagcctgagtaggaaggctagcaaaaaaaaaaaaaaaaaaaaaaaaaaaaaaaaaaaaaaaaaaaaaaaaaaaaaaaaaaaaaaaaaaaaaaaaaaaaaaaa

SEQ ID NO: 9578 - RNA, 8787 nt, synthetic construct
  source 1..8787: mol_type = other RNA
aggaaataagagagaaaagaagagtaagaagaaatataagagccaccatggcccctaagaagaagcgtaaagtgagccggatgaaccacgaccaggagttcgacccccctaaggtgtaccctcccgtccccgccgagaagagaaagcccatccgggtcctgagcctgttcgatggcatcgccaccggtctgctggtgctgaaggacctgggcatccaggtggataggtacattgcctccgaggtgtgcgaggactccatcaccgtgggaatggtgcgtcatcagggcaagatcatgtacgtgggcgacgtgcggagcgtgacacagaagcatatccaggagtggggccctttcgacctggtgatcggcggcagcccttgcaatgacctgagcatcgtgaacccagcccggaagggcctgtacgagggaaccggcagactgttcttcgagttttacagactgctgcacgacgcccggcctaaggaaggcgacgaccggcccttcttttggctgttcgagaatgtggtggccatgggagtcagcgacaagcgggatattagccggttcctggagagcaaccccgtgatgatcgatgccaaggaagtgagcgccgcccaccgggccagatacttctggggcaatctgcctggcatgaacagacccctggccagcaccgtgaacgacaagctggagctgcaggagtgcctggagcacggccggatcgccaagttcagcaaggtgagaaccatcaccacccgaagcaacagcatcaaacaaggcaaggaccagcactttcctgtgttcatgaacgagaaggaggacatcctgtggtgtaccgagatggagagagtgttcgggttcccagtccactacacagatgtcagcaacatgtctagactggccagacagagactgctgggaagaagctggtccgtccctgtgatcagacacctgttcgcccctctgaaggagtacttcgcctgcgtgagcagcggcaacagcaacgccaacagccggggccccagcttctctagcggcctggtgccactgtccctgagagggagccacatgggccccatggagatctacaaaaccgtgagcgcctggaagcggcagcctgtgcgcgtgctgagcctgtttcggaatatcgataaagtcctgaaaagcctgggattcctggagagcggctctggctccggcggtggcaccctgaagtacgtggaggatgtgacaaacgtggtcagacgggatgtggagaagtggggccccttcgatctggtgtacggcagcacccaacccctgggcagctcttgtgaccggtgccctggctggtacatgtttcagttccaccggatcctgcagtacgccctgccgagacaggagtcccagcggccattcttttggattttcatggacaacttgctgctgaccgaggatgaccaggaaactaccactcggttcctgcagaccgaagccgtgaccctgcaggacgtgagaggccgggactaccagaacgccatgcgggtgtggtccaacatccctggactgaaaagcaagcacgcacctctgacccctaaagaagaggagtacctgcaggcccaggtgcggagcagaagcaagctggacgcccctaaggtggatctgctggtgaagaattgcctcctgcccctgagagagtacttcaagtatttcagccagaatagtctgcccctgggaggcagcggcggcggcagccagggcaggctgaccttccaggacgtggccatcgacttcacccaggaggagtgggagtgcctggacctgggccagagggagctgtacagggacgtgatgctggagaactacggcaacctggccagcctgggcctggtgatcagcaagcccgacctggtgaccttcctggagcagatgaaggacccctgggacaccaggaggatggagacccccgccgtgcaccccgccgtgagcagccacggcggcccaagcagcggcgcccctcctcccagcggcggcaggcggcccaagcagcggcgcccctcctcccagcggcggcagcccagccggctccccaacctctaccgaggagggcacctctgagtccgccacccccgagagcggccctggcacctccaccgagcccagcgagggcagcgcacccggcagccctgccggcagccccacctccacagaggagggaaccagcaccgagcccagcgaaggcagcgccccaggcaccagcaccgagcctagtgagcaggagattaaacggatcaacaagatcagaagaagacttgtgaaagacagcaacaccaagaaggccggcaagacaggccccatgaaaaccctgctggttagagtgatgacacccgatctgagagagcggctggaaaacctgagaaagaagcctgaaaatatcccccagcccatcagcaatacatctagagccaacctgaataagctgctgaccgattacaccgaaatgaagaaggcgatcctgcatgtgtactgggaagagttccagaaggaccctgtgggcctgatgagccgggtggcccagcctgccagcaagaagatcgatcagaacaagctgaaacctgagatggacgagaagggcaacctgaccaccgccggctttgcctgctctcagtgtggccagcccctgttcgtgtacaagctggagcaggtgtctgagaagggcaaggcttacaccaactacttcggacggtgcaatgtggccgagcacgaaaagctgatcctgctggcccagctgaagcccgagaaggatagcgacgaagccgtgacatatagcctgggaaagtttgggcagagggccctggatttctacagcattcatgtgaccaaggagtccacccaccccgtgaagcccctggcccagatcgccggaaacagatacgcctccggacctgtgggaaaggccctgagcgacgcatgtatgggcacaatcgcctccttcctgtctaagtaccaggacatcatcatcgaacaccagaaggtggtgaagggcaaccagaagagactggagagcctgcgggagctggccggcaaggaaaacctggaataccctagcgtgaccctgccacctcagcctcacaccaaggagggcgttgatgcctacaacgaagtgatcgcccgggtgcgaatgtgggtgaacctgaacctgtggcagaagctgaagctaagcagagatgatgccaagcctctgctgagactgaagggattcccttcctttcctctggtcgagagacaggccaacgaagtggactggtgggacatggtgtgtaacgtgaagaagctgatcaacgagaaaaaggaggatggcaaggtgttttggcagaatctggctggctacaagagacaggaagccctgagaccatacctgagcagcgaggaagatcggaagaagggaaagaaattcgctcggtaccagctgggcgacctgctgctgcacctggaaaagaagcacggcgaggactggggaaaggtgtacgacgaggcctgggagcggattgacaagaaagtggaaggcctgagcaagcacatcaagctggaagaggaacggagaagcgaggacgcccagagcaaggccgccctgaccgactggctgcgggctaaggccagcttcgtgatcgagggcctgaaggaggccgacaaggacgagttctgcagatgcgagctgaagctgcagaagtggtacggggacctgcggggaaagcccttcgccatcgaagccgagaacagcatcctggacatcagcggcttcagcaagcagtacaactgtgccttcatctggcagaaggacggcgtgaagaagctgaacctgtacctgatcatcaactacttcaagggcggcaagctgcggttcaagaagatcaaacctgaagccttcgaagccaacagattctacaccgtgatcaacaaaaagagcggcgagatcgtgcccatggaggtgaacttcaacttcgacgaccccaacctgatcatcctgcctctggcctttggcaagagacagggcagagaattcatctggaacgacctgctgtccctggaaaccggcagcctgaagctggccaacggaagagtgatcgagaagacactgtacaacagaagaacccggcaggatgagcctgccctgttcgtggccctgaccttcgagcggcgggaggtcctggactcctccaatatcaaaccaatgaacctgatcggcgtggcaagaggcgaaaacatccccgccgtgatcgccctgaccgaccccgagggctgcccactgagccggtttaaggatagcctgggaaacccaacccacatcctgagaatcggcgagagctataaggagaagcagcggaccatccaggccaagaaggaggtggagcagcggagagccggcggctacagccggaagtacgccagcaaagccaagaatctggcagacgatatggtgagaaacaccgctagagatctgctgtactacgccgtgacccaggatgccatgctgatcttcgccaacctgagccggggcttcggccggcagggcaagcggaccttcatggccgagagacagtacacacggatggaggactggctgaccgccaagctggcctacgagggcctgagcaagacctacctgtccaagacactggcccagtacacctccaagacatgcagcaactgtgggtttaccatcaccagcgccgactacgacagggtgctggagaagctgaagaagacagcaacaggctggatgaccacaattaacggcaaggagctgaaggtggagggccagattacctactacaacagatacaagagacagaacgtagtcaaggacctgtccgtcgagctggatagactgagcgaagaatctgtgaacaacgacatctcctcctggacaaagggcagaagcggagaagctctgagcctcctgaagaaaagattctcccatagacccgtgcaggagaagttcgtgtgcctgaactgcggcttcgagacacacgcagccgagcaagccgccctgaacatcgccagatcctggctgttcctgcggagccaggagtacaagaaataccagacaaacaagacaaccggcaacaccgataagagagccttcgtcgagacctggcagtccttttaccggaagaagcttaaggaggtgtggaaacctgccgtgcggtctggcggatctggcggaggctccaccagccccaagaaaaagagaaaagtctaagctgccttctgcggggcttgccttctggccatgcccttcttctctcccttgcacctgtacctcttggtctttgaataaagcctgagtaggaaggctagcaaaaaaaaaaaaaaaaaaaaaaaaaaaaaaaaaaaaaaaaaaaaaaaaaaaaaaaaaaaaaaaaaaaaaaaaaaaaaaaagcccagccggctccccaacctctaccgaggagggcacctctgagtccgccacccccgagagcggccctggcacctccaccgagcccagcgagggcagcgcacccggcagccctgccggcagccccacctccacagaggagggaaccagcaccgagcccagcgaaggcagcgccccaggcaccagcaccgagcctagtgagcaggagattaaacggatcaacaagatcagaagaagacttgtgaaagacagcaacaccaagaaggccggcaagacaggccccatgaaaaccctgctggttagagtgatgacacccgatctgagagagcggctggaaaacctgagaaagaagcctgaaaatatcccccagcccatcagcaatacatctagagccaacctgaataagctgctgaccgattacaccgaaatgaagaaggcgatcctgcatgtgtactgggaagagttccagaaggaccctgtgggcctgatgagccgggtggcccagcctgccagcaagaagatcgatcagaacaagctgaaacctgagatggacgagaagggcaacctgaccaccgccggctttgcctgctctcagtgtggccagcccctgttcgtgtacaagctggagcaggtgtctgagaagggcaaggcttacaccaactacttcggacggtgcaatgtggccgagcacgaaaagctgatcctgctggcccagctgaagcccgagaaggatagcgacgaagccgtgacatatagcctgggaaagtttgggcagagggccctggatttctacagcattcatgtgaccaaggagtccacccaccccgtgaagcccctggcccagatcgccggaaacagatacgcctccggacctgtgggaaaggccctgagcgacgcatgtatgggcacaatcgcctccttcctgtctaagtaccaggacatcatcatcgaacaccagaaggtggtgaagggcaaccagaagagactggagagcctgcgggagctggccggcaaggaaaacctggaataccctagcgtgaccctgccacctcagcctcacaccaaggagggcgttgatgcctacaacgaagtgatcgcccgggtgcgaatgtgggtgaacctgaacctgtggcagaagctgaagctaagcagagatgatgccaagcctctgctgagactgaagggattcccttcctttcctctggtcgagagacaggccaacgaagtggactggtgggacatggtgtgtaacgtgaagaagctgatcaacgagaaaaaggaggatggcaaggtgttttggcagaatctggctggctacaagagacaggaagccctgagaccatacctgagcagcgaggaagatcggaagaagggaaagaaattcgctcggtaccagctgggcgacctgctgctgcacctggaaaagaagcacggcgaggactggggaaaggtgtacgacgaggcctgggagcggattgacaagaaagtggaaggcctgagcaagcacatcaagctggaagaggaacggagaagcgaggacgcccagagcaaggccgccctgaccgactggctgcgggctaaggccagcttcgtgatcgagggcctgaaggaggccgacaaggacgagttctgcagatgcgagctgaagctgcagaagtggtacggggacctgcggggaaagcccttcgccatcgaagccgagaacagcatcctggacatcagcggcttcagcaagcagtacaactgtgccttcatctggcagaaggacggcgtgaagaagctgaacctgtacctgatcatcaactacttcaagggcggcaagctgcggttcaagaagatcaaacctgaagccttcgaagccaacagattctacaccgtgatcaacaaaaagagcggcgagatcgtgcccatggaggtgaacttcaacttcgacgaccccaacctgatcatcctgcctctggcctttggcaagagacagggcagagaattcatctggaacgacctgctgtccctggaaaccggcagcctgaagctggccaacggaagagtgatcgagaagacactgtacaacagaagaacccggcaggatgagcctgccctgttcgtggccctgaccttcgagcggcgggaggtcctggactcctccaatatcaaaccaatgaacctgatcggcgtggcaagaggcgaaaacatccccgccgtgatcgccctgaccgaccccgagggctgcccactgagccggtttaaggatagcctgggaaacccaacccacatcctgagaatcggcgagagctataaggagaagcagcggaccatccaggccaagaaggaggtggagcagcggagagccggcggctacagccggaagtacgccagcaaagccaagaatctggcagacgatatggtgagaaacaccgctagagatctgctgtactacgccgtgacccaggatgccatgctgatcttcgccaacctgagccggggcttcggccggcagggcaagcggaccttcatggccgagagacagtacacacggatggaggactggctgaccgccaagctggcctacgagggcctgagcaagacctacctgtccaagacactggcccagtacacctccaagacatgcagcaactgtgggtttaccatcaccagcgccgactacgacagggtgctggagaagctgaagaagacagcaacaggctggatgaccacaattaacggcaaggagctgaaggtggagggccagattacctactacaacagatacaagagacagaacgtagtcaaggacctgtccgtcgagctggatagactgagcgaagaatctgtgaacaacgacatctcctcctggacaaagggcagaagcggagaagctctgagcctcctgaagaaaagattctcccatagacccgtgcaggagaagttcgtgtgcctgaactgcggcttcgagacacacgcagccgagcaagccgccctgaacatcgccagatcctggctgttcctgcggagccaggagtacaagaaataccagacaaacaagacaaccggcaacaccgataagagagccttcgtcgagacctggcagtccttttaccggaagaagcttaaggaggtgtggaaacctgccgtgcggtctggcggatctggcggaggctccaccagccccaagaaaaagagaaaagtctaagctgccttctgcggggcttgccttctggccatgcccttcttctctcccttgcacctgtacctcttggtctttgaataaagcctgagtaggaaggctagcaaaaaaaaaaaaaaaaaaaaaaaaaaaaaaaaaaaaaaaaaaaaaaaaaaaaaaaaaaaaaaaaaaaaaaaaaaaaaaaa

SEQ ID NO: 9579 - RNA, 8787 nt, synthetic construct
  source 1..8787: mol_type = other RNA
aggaaataagagagaaaagaagagtaagaagaaatataagagccaccatggcccctaagaagaagcgtaaagtgagccggatgaaccacgaccaggagttcgacccccctaaggtgtaccctcccgtccccgccgagaagagaaagcccatccgggtcctgagcctgttcgatggcatcgccaccggtctgctggtgctgaaggacctgggcatccaggtggataggtacattgcctccgaggtgtgcgaggactccatcaccgtgggaatggtgcgtcatcagggcaagatcatgtacgtgggcgacgtgcggagcgtgacacagaagcatatccaggagtggggccctttcgacctggtgatcggcggcagcccttgcaatgacctgagcatcgtgaacccagcccggaagggcctgtacgagggaaccggcagactgttcttcgagttttacagactgctgcacgacgcccggcctaaggaaggcgacgaccggcccttcttttggctgttcgagaatgtggtggccatgggagtcagcgacaagcgggatattagccggttcctggagagcaaccccgtgatgatcgatgccaaggaagtgagcgccgcccaccgggccagatacttctggggcaatctgcctggcatgaacagacccctggccagcaccgtgaacgacaagctggagctgcaggagtgcctggagcacggccggatcgccaagttcagcaaggtgagaaccatcaccacccgaagcaacagcatcaaacaaggcaaggaccagcactttcctgtgttcatgaacgagaaggaggacatcctgtggtgtaccgagatggagagagtgttcgggttcccagtccactacacagatgtcagcaacatgtctagactggccagacagagactgctgggaagaagctggtccgtccctgtgatcagacacctgttcgcccctctgaaggagtacttcgcctgcgtgagcagcggcaacagcaacgccaacagccggggccccagcttctctagcggcctggtgccactgtccctgagagggagccacatgggccccatggagatctacaaaaccgtgagcgcctggaagcggcagcctgtgcgcgtgctgagcctgtttcggaatatcgataaagtcctgaaaagcctgggattcctggagagcggctctggctccggcggtggcaccctgaagtacgtggaggatgtgacaaacgtggtcagacgggatgtggagaagtggggccccttcgatctggtgtacggcagcacccaacccctgggcagctcttgtgaccggtgccctggctggtacatgtttcagttccaccggatcctgcagtacgccctgccgagacaggagtcccagcggccattcttttggattttcatggacaacttgctgctgaccgaggatgaccaggaaactaccactcggttcctgcagaccgaagccgtgaccctgcaggacgtgagaggccgggactaccagaacgccatgcgggtgtggtccaacatccctggactgaaaagcaagcacgcacctctgacccctaaagaagaggagtacctgcaggcccaggtgcggagcagaagcaagctggacgcccctaaggtggatctgctggtgaagaattgcctcctgcccctgagagagtacttcaagtatttcagccagaatagtctgcccctgggaggcagcggcggcggcatgcaggtgaagttcgaggacgtggccgtgagcttcagccaggaggagtgggagtacctggacgagggccagaaggagctgtacagggaggtgatgaaggagaactacgagaccctgctgagcctgggcctgaagtgcctgcagaagatccacgagagcgacaggcccttcacctaccccgcctgcggcaagagcttcaaccaccagagcaacctgaggaagcacaagaggaaccacaccggcggcggcccaagcagcggcgcccctcctcccagcggcggcaggcggcccaagcagcggcgcccctcctcccagcggcggcagcccagccggctccccaacctctaccgaggagggcacctctgagtccgccacccccgagagcggccctggcacctccaccgagcccagcgagggcagcgcacccggcagccctgccggcagccccacctccacagaggagggaaccagcaccgagcccagcgaaggcagcgccccaggcaccagcaccgagcctagtgagcaggagattaaacggatcaacaagatcagaagaagacttgtgaaagacagcaacaccaagaaggccggcaagacaggccccatgaaaaccctgctggttagagtgatgacacccgatctgagagagcggctggaaaacctgagaaagaagcctgaaaatatcccccagcccatcagcaatacatctagagccaacctgaataagctgctgaccgattacaccgaaatgaagaaggcgatcctgcatgtgtactgggaagagttccagaaggaccctgtgggcctgatgagccgggtggcccagcctgccagcaagaagatcgatcagaacaagctgaaacctgagatggacgagaagggcaacctgaccaccgccggctttgcctgctctcagtgtggccagcccctgttcgtgtacaagctggagcaggtgtctgagaagggcaaggcttacaccaactacttcggacggtgcaatgtggccgagcacgaaaagctgatcctgctggcccagctgaagcccgagaaggatagcgacgaagccgtgacatatagcctgggaaagtttgggcagagggccctggatttctacagcattcatgtgaccaaggagtccacccaccccgtgaagcccctggcccagatcgccggaaacagatacgcctccggacctgtgggaaaggccctgagcgacgcatgtatgggcacaatcgcctccttcctgtctaagtaccaggacatcatcatcgaacaccagaaggtggtgaagggcaaccagaagagactggagagcctgcgggagctggccggcaaggaaaacctggaataccctagcgtgaccctgccacctcagcctcacaccaaggagggcgttgatgcctacaacgaagtgatcgcccgggtgcgaatgtgggtgaacctgaacctgtggcagaagctgaagctaagcagagatgatgccaagcctctgctgagactgaagggattcccttcctttcctctggtcgagagacaggccaacgaagtggactggtgggacatggtgtgtaacgtgaagaagctgatcaacgagaaaaaggaggatggcaaggtgttttggcagaatctggctggctacaagagacaggaagccctgagaccatacctgagcagcgaggaagatcggaagaagggaaagaaattcgctcggtaccagctgggcgacctgctgctgcacctggaaaagaagcacggcgaggactggggaaaggtgtacgacgaggcctgggagcggattgacaagaaagtggaaggcctgagcaagcacatcaagctggaagaggaacggagaagcgaggacgcccagagcaaggccgccctgaccgactggctgcgggctaaggccagcttcgtgatcgagggcctgaaggaggccgacaaggacgagttctgcagatgcgagctgaagctgcagaagtggtacggggacctgcggggaaagcccttcgccatcgaagccgagaacagcatcctggacatcagcggcttcagcaagcagtacaactgtgccttcatctggcagaaggacggcgtgaagaagctgaacctgtacctgatcatcaactacttcaagggcggcaagctgcggttcaagaagatcaaacctgaagccttcgaagccaacagattctacaccgtgatcaacaaaaagagcggcgagatcgtgcccatggaggtgaacttcaacttcgacgaccccaacctgatcatcctgcctctggcctttggcaagagacagggcagagaattcatctggaacgacctgctgtccctggaaaccggcagcctgaagctggccaacggaagagtgatcgagaagacactgtacaacagaagaacccggcaggatgagcctgccctgttcgtggccctgaccttcgagcggcgggaggtcctggactcctccaatatcaaaccaatgaacctgatcggcgtggcaagaggcgaaaacatccccgccgtgatcgccctgaccgaccccgagggctgcccactgagccggtttaaggatagcctgggaaacccaacccacatcctgagaatcggcgagagctataaggagaagcagcggaccatccaggccaagaaggaggtggagcagcggagagccggcggctacagccggaagtacgccagcaaagccaagaatctggcagacgatatggtgagaaacaccgctagagatctgctgtactacgccgtgacccaggatgccatgctgatcttcgccaacctgagccggggcttcggccggcagggcaagcggaccttcatggccgagagacagtacacacggatggaggactggctgaccgccaagctggcctacgagggcctgagcaagacctacctgtccaagacactggcccagtacacctccaagacatgcagcaactgtgggtttaccatcaccagcgccgactacgacagggtgctggagaagctgaagaagacagcaacaggctggatgaccacaattaacggcaaggagctgaaggtggagggccagattacctactacaacagatacaagagacagaacgtagtcaaggacctgtccgtcgagctggatagactgagcgaagaatctgtgaacaacgacatctcctcctggacaaagggcagaagcggagaagctctgagcctcctgaagaaaagattctcccatagacccgtgcaggagaagttcgtgtgcctgaactgcggcttcgagacacacgcagccgagcaagccgccctgaacatcgccagatcctggctgttcctgcggagccaggagtacaagaaataccagacaaacaagacaaccggcaacaccgataagagagccttcgtcgagacctggcagtccttttaccggaagaagcttaaggaggtgtggaaacctgccgtgcggtctggcggatctggcggaggctccaccagccccaagaaaaagagaaaagtctaagctgccttctgcggggcttgccttctggccatgcccttcttctctcccttgcacctgtacctcttggtctttgaataaagcctgagtaggaaggctagcaaaaaaaaaaaaaaaaaaaaaaaaaaaaaaaaaaaaaaaaaaaaaaaaaaaaaaaaaaaaaaaaaaaaaaaaaaaaaaaagcccagccggctccccaacctctaccgaggagggcacctctgagtccgccacccccgagagcggccctggcacctccaccgagcccagcgagggcagcgcacccggcagccctgccggcagccccacctccacagaggagggaaccagcaccgagcccagcgaaggcagcgccccaggcaccagcaccgagcctagtgagcaggagattaaacggatcaacaagatcagaagaagacttgtgaaagacagcaacaccaagaaggccggcaagacaggccccatgaaaaccctgctggttagagtgatgacacccgatctgagagagcggctggaaaacctgagaaagaagcctgaaaatatcccccagcccatcagcaatacatctagagccaacctgaataagctgctgaccgattacaccgaaatgaagaaggcgatcctgcatgtgtactgggaagagttccagaaggaccctgtgggcctgatgagccgggtggcccagcctgccagcaagaagatcgatcagaacaagctgaaacctgagatggacgagaagggcaacctgaccaccgccggctttgcctgctctcagtgtggccagcccctgttcgtgtacaagctggagcaggtgtctgagaagggcaaggcttacaccaactacttcggacggtgcaatgtggccgagcacgaaaagctgatcctgctggcccagctgaagcccgagaaggatagcgacgaagccgtgacatatagcctgggaaagtttgggcagagggccctggatttctacagcattcatgtgaccaaggagtccacccaccccgtgaagcccctggcccagatcgccggaaacagatacgcctccggacctgtgggaaaggccctgagcgacgcatgtatgggcacaatcgcctccttcctgtctaagtaccaggacatcatcatcgaacaccagaaggtggtgaagggcaaccagaagagactggagagcctgcgggagctggccggcaaggaaaacctggaataccctagcgtgaccctgccacctcagcctcacaccaaggagggcgttgatgcctacaacgaagtgatcgcccgggtgcgaatgtgggtgaacctgaacctgtggcagaagctgaagctaagcagagatgatgccaagcctctgctgagactgaagggattcccttcctttcctctggtcgagagacaggccaacgaagtggactggtgggacatggtgtgtaacgtgaagaagctgatcaacgagaaaaaggaggatggcaaggtgttttggcagaatctggctggctacaagagacaggaagccctgagaccatacctgagcagcgaggaagatcggaagaagggaaagaaattcgctcggtaccagctgggcgacctgctgctgcacctggaaaagaagcacggcgaggactggggaaaggtgtacgacgaggcctgggagcggattgacaagaaagtggaaggcctgagcaagcacatcaagctggaagaggaacggagaagcgaggacgcccagagcaaggccgccctgaccgactggctgcgggctaaggccagcttcgtgatcgagggcctgaaggaggccgacaaggacgagttctgcagatgcgagctgaagctgcagaagtggtacggggacctgcggggaaagcccttcgccatcgaagccgagaacagcatcctggacatcagcggcttcagcaagcagtacaactgtgccttcatctggcagaaggacggcgtgaagaagctgaacctgtacctgatcatcaactacttcaagggcggcaagctgcggttcaagaagatcaaacctgaagccttcgaagccaacagattctacaccgtgatcaacaaaaagagcggcgagatcgtgcccatggaggtgaacttcaacttcgacgaccccaacctgatcatcctgcctctggcctttggcaagagacagggcagagaattcatctggaacgacctgctgtccctggaaaccggcagcctgaagctggccaacggaagagtgatcgagaagacactgtacaacagaagaacccggcaggatgagcctgccctgttcgtggccctgaccttcgagcggcgggaggtcctggactcctccaatatcaaaccaatgaacctgatcggcgtggcaagaggcgaaaacatccccgccgtgatcgccctgaccgaccccgagggctgcccactgagccggtttaaggatagcctgggaaacccaacccacatcctgagaatcggcgagagctataaggagaagcagcggaccatccaggccaagaaggaggtggagcagcggagagccggcggctacagccggaagtacgccagcaaagccaagaatctggcagacgatatggtgagaaacaccgctagagatctgctgtactacgccgtgacccaggatgccatgctgatcttcgccaacctgagccggggcttcggccggcagggcaagcggaccttcatggccgagagacagtacacacggatggaggactggctgaccgccaagctggcctacgagggcctgagcaagacctacctgtccaagacactggcccagtacacctccaagacatgcagcaactgtgggtttaccatcaccagcgccgactacgacagggtgctggagaagctgaagaagacagcaacaggctggatgaccacaattaacggcaaggagctgaaggtggagggccagattacctactacaacagatacaagagacagaacgtagtcaaggacctgtccgtcgagctggatagactgagcgaagaatctgtgaacaacgacatctcctcctggacaaagggcagaagcggagaagctctgagcctcctgaagaaaagattctcccatagacccgtgcaggagaagttcgtgtgcctgaactgcggcttcgagacacacgcagccgagcaagccgccctgaacatcgccagatcctggctgttcctgcggagccaggagtacaagaaataccagacaaacaagacaaccggcaacaccgataagagagccttcgtcgagacctggcagtccttttaccggaagaagcttaaggaggtgtggaaacctgccgtgcggtctggcggatctggcggaggctccaccagccccaagaaaaagagaaaagtctaagctgccttctgcggggcttgccttctggccatgcccttcttctctcccttgcacctgtacctcttggtctttgaataaagcctgagtaggaaggctagcaaaaaaaaaaaaaaaaaaaaaaaaaaaaaaaaaaaaaaaaaaaaaaaaaaaaaaaaaaaaaaaaaaaaaaaaaaaaaaaa

SEQ ID NO: 9580 - RNA, 8787 nt, synthetic construct
  source 1..8787: mol_type = other RNA
aggaaataagagagaaaagaagagtaagaagaaatataagagccaccatggcccctaagaagaagcgtaaagtgagccggatgaaccacgaccaggagttcgacccccctaaggtgtaccctcccgtccccgccgagaagagaaagcccatccgggtcctgagcctgttcgatggcatcgccaccggtctgctggtgctgaaggacctgggcatccaggtggataggtacattgcctccgaggtgtgcgaggactccatcaccgtgggaatggtgcgtcatcagggcaagatcatgtacgtgggcgacgtgcggagcgtgacacagaagcatatccaggagtggggccctttcgacctggtgatcggcggcagcccttgcaatgacctgagcatcgtgaacccagcccggaagggcctgtacgagggaaccggcagactgttcttcgagttttacagactgctgcacgacgcccggcctaaggaaggcgacgaccggcccttcttttggctgttcgagaatgtggtggccatgggagtcagcgacaagcgggatattagccggttcctggagagcaaccccgtgatgatcgatgccaaggaagtgagcgccgcccaccgggccagatacttctggggcaatctgcctggcatgaacagacccctggccagcaccgtgaacgacaagctggagctgcaggagtgcctggagcacggccggatcgccaagttcagcaaggtgagaaccatcaccacccgaagcaacagcatcaaacaaggcaaggaccagcactttcctgtgttcatgaacgagaaggaggacatcctgtggtgtaccgagatggagagagtgttcgggttcccagtccactacacagatgtcagcaacatgtctagactggccagacagagactgctgggaagaagctggtccgtccctgtgatcagacacctgttcgcccctctgaaggagtacttcgcctgcgtgagcagcggcaacagcaacgccaacagccggggccccagcttctctagcggcctggtgccactgtccctgagagggagccacatgggccccatggagatctacaaaaccgtgagcgcctggaagcggcagcctgtgcgcgtgctgagcctgtttcggaatatcgataaagtcctgaaaagcctgggattcctggagagcggctctggctccggcggtggcaccctgaagtacgtggaggatgtgacaaacgtggtcagacgggatgtggagaagtggggccccttcgatctggtgtacggcagcacccaacccctgggcagctcttgtgaccggtgccctggctggtacatgtttcagttccaccggatcctgcagtacgccctgccgagacaggagtcccagcggccattcttttggattttcatggacaacttgctgctgaccgaggatgaccaggaaactaccactcggttcctgcagaccgaagccgtgaccctgcaggacgtgagaggccgggactaccagaacgccatgcgggtgtggtccaacatccctggactgaaaagcaagcacgcacctctgacccctaaagaagaggagtacctgcaggcccaggtgcggagcagaagcaagctggacgcccctaaggtggatctgctggtgaagaattgcctcctgcccctgagagagtacttcaagtatttcagccagaatagtctgcccctgggaggcagcggcggcggcaggaagaggggcagcctgaccctggaggacgtggccgtggacttcacctgggaggagtggcagctgctggcccccgcccagaaggccctgtacagggacgtgatgctggagaactacggcaacctggtgttcgtgggctaccaggccagcaagcccgccgccctgagcaggctggagaggggcgagccctggcccgtggaggacgaggtgcacagccagctgtgccccgagatgaggaaggacggcggcccaagcagcggcgcccctcctcccagcggcggcaggcggcccaagcagcggcgcccctcctcccagcggcggcagcccagccggctccccaacctctaccgaggagggcacctctgagtccgccacccccgagagcggccctggcacctccaccgagcccagcgagggcagcgcacccggcagccctgccggcagccccacctccacagaggagggaaccagcaccgagcccagcgaaggcagcgccccaggcaccagcaccgagcctagtgagcaggagattaaacggatcaacaagatcagaagaagacttgtgaaagacagcaacaccaagaaggccggcaagacaggccccatgaaaaccctgctggttagagtgatgacacccgatctgagagagcggctggaaaacctgagaaagaagcctgaaaatatcccccagcccatcagcaatacatctagagccaacctgaataagctgctgaccgattacaccgaaatgaagaaggcgatcctgcatgtgtactgggaagagttccagaaggaccctgtgggcctgatgagccgggtggcccagcctgccagcaagaagatcgatcagaacaagctgaaacctgagatggacgagaagggcaacctgaccaccgccggctttgcctgctctcagtgtggccagcccctgttcgtgtacaagctggagcaggtgtctgagaagggcaaggcttacaccaactacttcggacggtgcaatgtggccgagcacgaaaagctgatcctgctggcccagctgaagcccgagaaggatagcgacgaagccgtgacatatagcctgggaaagtttgggcagagggccctggatttctacagcattcatgtgaccaaggagtccacccaccccgtgaagcccctggcccagatcgccggaaacagatacgcctccggacctgtgggaaaggccctgagcgacgcatgtatgggcacaatcgcctccttcctgtctaagtaccaggacatcatcatcgaacaccagaaggtggtgaagggcaaccagaagagactggagagcctgcgggagctggccggcaaggaaaacctggaataccctagcgtgaccctgccacctcagcctcacaccaaggagggcgttgatgcctacaacgaagtgatcgcccgggtgcgaatgtgggtgaacctgaacctgtggcagaagctgaagctaagcagagatgatgccaagcctctgctgagactgaagggattcccttcctttcctctggtcgagagacaggccaacgaagtggactggtgggacatggtgtgtaacgtgaagaagctgatcaacgagaaaaaggaggatggcaaggtgttttggcagaatctggctggctacaagagacaggaagccctgagaccatacctgagcagcgaggaagatcggaagaagggaaagaaattcgctcggtaccagctgggcgacctgctgctgcacctggaaaagaagcacggcgaggactggggaaaggtgtacgacgaggcctgggagcggattgacaagaaagtggaaggcctgagcaagcacatcaagctggaagaggaacggagaagcgaggacgcccagagcaaggccgccctgaccgactggctgcgggctaaggccagcttcgtgatcgagggcctgaaggaggccgacaaggacgagttctgcagatgcgagctgaagctgcagaagtggtacggggacctgcggggaaagcccttcgccatcgaagccgagaacagcatcctggacatcagcggcttcagcaagcagtacaactgtgccttcatctggcagaaggacggcgtgaagaagctgaacctgtacctgatcatcaactacttcaagggcggcaagctgcggttcaagaagatcaaacctgaagccttcgaagccaacagattctacaccgtgatcaacaaaaagagcggcgagatcgtgcccatggaggtgaacttcaacttcgacgaccccaacctgatcatcctgcctctggcctttggcaagagacagggcagagaattcatctggaacgacctgctgtccctggaaaccggcagcctgaagctggccaacggaagagtgatcgagaagacactgtacaacagaagaacccggcaggatgagcctgccctgttcgtggccctgaccttcgagcggcgggaggtcctggactcctccaatatcaaaccaatgaacctgatcggcgtggcaagaggcgaaaacatccccgccgtgatcgccctgaccgaccccgagggctgcccactgagccggtttaaggatagcctgggaaacccaacccacatcctgagaatcggcgagagctataaggagaagcagcggaccatccaggccaagaaggaggtggagcagcggagagccggcggctacagccggaagtacgccagcaaagccaagaatctggcagacgatatggtgagaaacaccgctagagatctgctgtactacgccgtgacccaggatgccatgctgatcttcgccaacctgagccggggcttcggccggcagggcaagcggaccttcatggccgagagacagtacacacggatggaggactggctgaccgccaagctggcctacgagggcctgagcaagacctacctgtccaagacactggcccagtacacctccaagacatgcagcaactgtgggtttaccatcaccagcgccgactacgacagggtgctggagaagctgaagaagacagcaacaggctggatgaccacaattaacggcaaggagctgaaggtggagggccagattacctactacaacagatacaagagacagaacgtagtcaaggacctgtccgtcgagctggatagactgagcgaagaatctgtgaacaacgacatctcctcctggacaaagggcagaagcggagaagctctgagcctcctgaagaaaagattctcccatagacccgtgcaggagaagttcgtgtgcctgaactgcggcttcgagacacacgcagccgagcaagccgccctgaacatcgccagatcctggctgttcctgcggagccaggagtacaagaaataccagacaaacaagacaaccggcaacaccgataagagagccttcgtcgagacctggcagtccttttaccggaagaagcttaaggaggtgtggaaacctgccgtgcggtctggcggatctggcggaggctccaccagccccaagaaaaagagaaaagtctaagctgccttctgcggggcttgccttctggccatgcccttcttctctcccttgcacctgtacctcttggtctttgaataaagcctgagtaggaaggctagcaaaaaaaaaaaaaaaaaaaaaaaaaaaaaaaaaaaaaaaaaaaaaaaaaaaaaaaaaaaaaaaaaaaaaaaaaaaaaaaagcccagccggctccccaacctctaccgaggagggcacctctgagtccgccacccccgagagcggccctggcacctccaccgagcccagcgagggcagcgcacccggcagccctgccggcagccccacctccacagaggagggaaccagcaccgagcccagcgaaggcagcgccccaggcaccagcaccgagcctagtgagcaggagattaaacggatcaacaagatcagaagaagacttgtgaaagacagcaacaccaagaaggccggcaagacaggccccatgaaaaccctgctggttagagtgatgacacccgatctgagagagcggctggaaaacctgagaaagaagcctgaaaatatcccccagcccatcagcaatacatctagagccaacctgaataagctgctgaccgattacaccgaaatgaagaaggcgatcctgcatgtgtactgggaagagttccagaaggaccctgtgggcctgatgagccgggtggcccagcctgccagcaagaagatcgatcagaacaagctgaaacctgagatggacgagaagggcaacctgaccaccgccggctttgcctgctctcagtgtggccagcccctgttcgtgtacaagctggagcaggtgtctgagaagggcaaggcttacaccaactacttcggacggtgcaatgtggccgagcacgaaaagctgatcctgctggcccagctgaagcccgagaaggatagcgacgaagccgtgacatatagcctgggaaagtttgggcagagggccctggatttctacagcattcatgtgaccaaggagtccacccaccccgtgaagcccctggcccagatcgccggaaacagatacgcctccggacctgtgggaaaggccctgagcgacgcatgtatgggcacaatcgcctccttcctgtctaagtaccaggacatcatcatcgaacaccagaaggtggtgaagggcaaccagaagagactggagagcctgcgggagctggccggcaaggaaaacctggaataccctagcgtgaccctgccacctcagcctcacaccaaggagggcgttgatgcctacaacgaagtgatcgcccgggtgcgaatgtgggtgaacctgaacctgtggcagaagctgaagctaagcagagatgatgccaagcctctgctgagactgaagggattcccttcctttcctctggtcgagagacaggccaacgaagtggactggtgggacatggtgtgtaacgtgaagaagctgatcaacgagaaaaaggaggatggcaaggtgttttggcagaatctggctggctacaagagacaggaagccctgagaccatacctgagcagcgaggaagatcggaagaagggaaagaaattcgctcggtaccagctgggcgacctgctgctgcacctggaaaagaagcacggcgaggactggggaaaggtgtacgacgaggcctgggagcggattgacaagaaagtggaaggcctgagcaagcacatcaagctggaagaggaacggagaagcgaggacgcccagagcaaggccgccctgaccgactggctgcgggctaaggccagcttcgtgatcgagggcctgaaggaggccgacaaggacgagttctgcagatgcgagctgaagctgcagaagtggtacggggacctgcggggaaagcccttcgccatcgaagccgagaacagcatcctggacatcagcggcttcagcaagcagtacaactgtgccttcatctggcagaaggacggcgtgaagaagctgaacctgtacctgatcatcaactacttcaagggcggcaagctgcggttcaagaagatcaaacctgaagccttcgaagccaacagattctacaccgtgatcaacaaaaagagcggcgagatcgtgcccatggaggtgaacttcaacttcgacgaccccaacctgatcatcctgcctctggcctttggcaagagacagggcagagaattcatctggaacgacctgctgtccctggaaaccggcagcctgaagctggccaacggaagagtgatcgagaagacactgtacaacagaagaacccggcaggatgagcctgccctgttcgtggccctgaccttcgagcggcgggaggtcctggactcctccaatatcaaaccaatgaacctgatcggcgtggcaagaggcgaaaacatccccgccgtgatcgccctgaccgaccccgagggctgcccactgagccggtttaaggatagcctgggaaacccaacccacatcctgagaatcggcgagagctataaggagaagcagcggaccatccaggccaagaaggaggtggagcagcggagagccggcggctacagccggaagtacgccagcaaagccaagaatctggcagacgatatggtgagaaacaccgctagagatctgctgtactacgccgtgacccaggatgccatgctgatcttcgccaacctgagccggggcttcggccggcagggcaagcggaccttcatggccgagagacagtacacacggatggaggactggctgaccgccaagctggcctacgagggcctgagcaagacctacctgtccaagacactggcccagtacacctccaagacatgcagcaactgtgggtttaccatcaccagcgccgactacgacagggtgctggagaagctgaagaagacagcaacaggctggatgaccacaattaacggcaaggagctgaaggtggagggccagattacctactacaacagatacaagagacagaacgtagtcaaggacctgtccgtcgagctggatagactgagcgaagaatctgtgaacaacgacatctcctcctggacaaagggcagaagcggagaagctctgagcctcctgaagaaaagattctcccatagacccgtgcaggagaagttcgtgtgcctgaactgcggcttcgagacacacgcagccgagcaagccgccctgaacatcgccagatcctggctgttcctgcggagccaggagtacaagaaataccagacaaacaagacaaccggcaacaccgataagagagccttcgtcgagacctggcagtccttttaccggaagaagcttaaggaggtgtggaaacctgccgtgcggtctggcggatctggcggaggctccaccagccccaagaaaaagagaaaagtctaagctgccttctgcggggcttgccttctggccatgcccttcttctctcccttgcacctgtacctcttggtctttgaataaagcctgagtaggaaggctagcaaaaaaaaaaaaaaaaaaaaaaaaaaaaaaaaaaaaaaaaaaaaaaaaaaaaaaaaaaaaaaaaaaaaaaaaaaaaaaaa

SEQ ID NO: 9581 - RNA, 8787 nt, synthetic construct
  source 1..8787: mol_type = other RNA
aggaaataagagagaaaagaagagtaagaagaaatataagagccaccatggcccctaagaagaagcgtaaagtgagccggatgaaccacgaccaggagttcgacccccctaaggtgtaccctcccgtccccgccgagaagagaaagcccatccgggtcctgagcctgttcgatggcatcgccaccggtctgctggtgctgaaggacctgggcatccaggtggataggtacattgcctccgaggtgtgcgaggactccatcaccgtgggaatggtgcgtcatcagggcaagatcatgtacgtgggcgacgtgcggagcgtgacacagaagcatatccaggagtggggccctttcgacctggtgatcggcggcagcccttgcaatgacctgagcatcgtgaacccagcccggaagggcctgtacgagggaaccggcagactgttcttcgagttttacagactgctgcacgacgcccggcctaaggaaggcgacgaccggcccttcttttggctgttcgagaatgtggtggccatgggagtcagcgacaagcgggatattagccggttcctggagagcaaccccgtgatgatcgatgccaaggaagtgagcgccgcccaccgggccagatacttctggggcaatctgcctggcatgaacagacccctggccagcaccgtgaacgacaagctggagctgcaggagtgcctggagcacggccggatcgccaagttcagcaaggtgagaaccatcaccacccgaagcaacagcatcaaacaaggcaaggaccagcactttcctgtgttcatgaacgagaaggaggacatcctgtggtgtaccgagatggagagagtgttcgggttcccagtccactacacagatgtcagcaacatgtctagactggccagacagagactgctgggaagaagctggtccgtccctgtgatcagacacctgttcgcccctctgaaggagtacttcgcctgcgtgagcagcggcaacagcaacgccaacagccggggccccagcttctctagcggcctggtgccactgtccctgagagggagccacatgggccccatggagatctacaaaaccgtgagcgcctggaagcggcagcctgtgcgcgtgctgagcctgtttcggaatatcgataaagtcctgaaaagcctgggattcctggagagcggctctggctccggcggtggcaccctgaagtacgtggaggatgtgacaaacgtggtcagacgggatgtggagaagtggggccccttcgatctggtgtacggcagcacccaacccctgggcagctcttgtgaccggtgccctggctggtacatgtttcagttccaccggatcctgcagtacgccctgccgagacaggagtcccagcggccattcttttggattttcatggacaacttgctgctgaccgaggatgaccaggaaactaccactcggttcctgcagaccgaagccgtgaccctgcaggacgtgagaggccgggactaccagaacgccatgcgggtgtggtccaacatccctggactgaaaagcaagcacgcacctctgacccctaaagaagaggagtacctgcaggcccaggtgcggagcagaagcaagctggacgcccctaaggtggatctgctggtgaagaattgcctcctgcccctgagagagtacttcaagtatttcagccagaatagtctgcccctgggaggcagcggcggcggcagcatgggcagcgacctgttcagggacgtggccgtggtgttcagcagggaggagtgggagaggctggcccccgcccagagggacctgtacagggacgtgatgctggagacctacagccacctgaggagcctggacctggccatcagcaagcccgacgtgatcgccttcctggagcagggcgaggagccctggagggccgaggaggccgccagggacggcctgtgccccgtggactgggagtgcggcggcccaagcagcggcgcccctcctcccagcggcggcaggcggcccaagcagcggcgcccctcctcccagcggcggcagcccagccggctccccaacctctaccgaggagggcacctctgagtccgccacccccgagagcggccctggcacctccaccgagcccagcgagggcagcgcacccggcagccctgccggcagccccacctccacagaggagggaaccagcaccgagcccagcgaaggcagcgccccaggcaccagcaccgagcctagtgagcaggagattaaacggatcaacaagatcagaagaagacttgtgaaagacagcaacaccaagaaggccggcaagacaggccccatgaaaaccctgctggttagagtgatgacacccgatctgagagagcggctggaaaacctgagaaagaagcctgaaaatatcccccagcccatcagcaatacatctagagccaacctgaataagctgctgaccgattacaccgaaatgaagaaggcgatcctgcatgtgtactgggaagagttccagaaggaccctgtgggcctgatgagccgggtggcccagcctgccagcaagaagatcgatcagaacaagctgaaacctgagatggacgagaagggcaacctgaccaccgccggctttgcctgctctcagtgtggccagcccctgttcgtgtacaagctggagcaggtgtctgagaagggcaaggcttacaccaactacttcggacggtgcaatgtggccgagcacgaaaagctgatcctgctggcccagctgaagcccgagaaggatagcgacgaagccgtgacatatagcctgggaaagtttgggcagagggccctggatttctacagcattcatgtgaccaaggagtccacccaccccgtgaagcccctggcccagatcgccggaaacagatacgcctccggacctgtgggaaaggccctgagcgacgcatgtatgggcacaatcgcctccttcctgtctaagtaccaggacatcatcatcgaacaccagaaggtggtgaagggcaaccagaagagactggagagcctgcgggagctggccggcaaggaaaacctggaataccctagcgtgaccctgccacctcagcctcacaccaaggagggcgttgatgcctacaacgaagtgatcgcccgggtgcgaatgtgggtgaacctgaacctgtggcagaagctgaagctaagcagagatgatgccaagcctctgctgagactgaagggattcccttcctttcctctggtcgagagacaggccaacgaagtggactggtgggacatggtgtgtaacgtgaagaagctgatcaacgagaaaaaggaggatggcaaggtgttttggcagaatctggctggctacaagagacaggaagccctgagaccatacctgagcagcgaggaagatcggaagaagggaaagaaattcgctcggtaccagctgggcgacctgctgctgcacctggaaaagaagcacggcgaggactggggaaaggtgtacgacgaggcctgggagcggattgacaagaaagtggaaggcctgagcaagcacatcaagctggaagaggaacggagaagcgaggacgcccagagcaaggccgccctgaccgactggctgcgggctaaggccagcttcgtgatcgagggcctgaaggaggccgacaaggacgagttctgcagatgcgagctgaagctgcagaagtggtacggggacctgcggggaaagcccttcgccatcgaagccgagaacagcatcctggacatcagcggcttcagcaagcagtacaactgtgccttcatctggcagaaggacggcgtgaagaagctgaacctgtacctgatcatcaactacttcaagggcggcaagctgcggttcaagaagatcaaacctgaagccttcgaagccaacagattctacaccgtgatcaacaaaaagagcggcgagatcgtgcccatggaggtgaacttcaacttcgacgaccccaacctgatcatcctgcctctggcctttggcaagagacagggcagagaattcatctggaacgacctgctgtccctggaaaccggcagcctgaagctggccaacggaagagtgatcgagaagacactgtacaacagaagaacccggcaggatgagcctgccctgttcgtggccctgaccttcgagcggcgggaggtcctggactcctccaatatcaaaccaatgaacctgatcggcgtggcaagaggcgaaaacatccccgccgtgatcgccctgaccgaccccgagggctgcccactgagccggtttaaggatagcctgggaaacccaacccacatcctgagaatcggcgagagctataaggagaagcagcggaccatccaggccaagaaggaggtggagcagcggagagccggcggctacagccggaagtacgccagcaaagccaagaatctggcagacgatatggtgagaaacaccgctagagatctgctgtactacgccgtgacccaggatgccatgctgatcttcgccaacctgagccggggcttcggccggcagggcaagcggaccttcatggccgagagacagtacacacggatggaggactggctgaccgccaagctggcctacgagggcctgagcaagacctacctgtccaagacactggcccagtacacctccaagacatgcagcaactgtgggtttaccatcaccagcgccgactacgacagggtgctggagaagctgaagaagacagcaacaggctggatgaccacaattaacggcaaggagctgaaggtggagggccagattacctactacaacagatacaagagacagaacgtagtcaaggacctgtccgtcgagctggatagactgagcgaagaatctgtgaacaacgacatctcctcctggacaaagggcagaagcggagaagctctgagcctcctgaagaaaagattctcccatagacccgtgcaggagaagttcgtgtgcctgaactgcggcttcgagacacacgcagccgagcaagccgccctgaacatcgccagatcctggctgttcctgcggagccaggagtacaagaaataccagacaaacaagacaaccggcaacaccgataagagagccttcgtcgagacctggcagtccttttaccggaagaagcttaaggaggtgtggaaacctgccgtgcggtctggcggatctggcggaggctccaccagccccaagaaaaagagaaaagtctaagctgccttctgcggggcttgccttctggccatgcccttcttctctcccttgcacctgtacctcttggtctttgaataaagcctgagtaggaaggctagcaaaaaaaaaaaaaaaaaaaaaaaaaaaaaaaaaaaaaaaaaaaaaaaaaaaaaaaaaaaaaaaaaaaaaaaaaaaaaaaagcccagccggctccccaacctctaccgaggagggcacctctgagtccgccacccccgagagcggccctggcacctccaccgagcccagcgagggcagcgcacccggcagccctgccggcagccccacctccacagaggagggaaccagcaccgagcccagcgaaggcagcgccccaggcaccagcaccgagcctagtgagcaggagattaaacggatcaacaagatcagaagaagacttgtgaaagacagcaacaccaagaaggccggcaagacaggccccatgaaaaccctgctggttagagtgatgacacccgatctgagagagcggctggaaaacctgagaaagaagcctgaaaatatcccccagcccatcagcaatacatctagagccaacctgaataagctgctgaccgattacaccgaaatgaagaaggcgatcctgcatgtgtactgggaagagttccagaaggaccctgtgggcctgatgagccgggtggcccagcctgccagcaagaagatcgatcagaacaagctgaaacctgagatggacgagaagggcaacctgaccaccgccggctttgcctgctctcagtgtggccagcccctgttcgtgtacaagctggagcaggtgtctgagaagggcaaggcttacaccaactacttcggacggtgcaatgtggccgagcacgaaaagctgatcctgctggcccagctgaagcccgagaaggatagcgacgaagccgtgacatatagcctgggaaagtttgggcagagggccctggatttctacagcattcatgtgaccaaggagtccacccaccccgtgaagcccctggcccagatcgccggaaacagatacgcctccggacctgtgggaaaggccctgagcgacgcatgtatgggcacaatcgcctccttcctgtctaagtaccaggacatcatcatcgaacaccagaaggtggtgaagggcaaccagaagagactggagagcctgcgggagctggccggcaaggaaaacctggaataccctagcgtgaccctgccacctcagcctcacaccaaggagggcgttgatgcctacaacgaagtgatcgcccgggtgcgaatgtgggtgaacctgaacctgtggcagaagctgaagctaagcagagatgatgccaagcctctgctgagactgaagggattcccttcctttcctctggtcgagagacaggccaacgaagtggactggtgggacatggtgtgtaacgtgaagaagctgatcaacgagaaaaaggaggatggcaaggtgttttggcagaatctggctggctacaagagacaggaagccctgagaccatacctgagcagcgaggaagatcggaagaagggaaagaaattcgctcggtaccagctgggcgacctgctgctgcacctggaaaagaagcacggcgaggactggggaaaggtgtacgacgaggcctgggagcggattgacaagaaagtggaaggcctgagcaagcacatcaagctggaagaggaacggagaagcgaggacgcccagagcaaggccgccctgaccgactggctgcgggctaaggccagcttcgtgatcgagggcctgaaggaggccgacaaggacgagttctgcagatgcgagctgaagctgcagaagtggtacggggacctgcggggaaagcccttcgccatcgaagccgagaacagcatcctggacatcagcggcttcagcaagcagtacaactgtgccttcatctggcagaaggacggcgtgaagaagctgaacctgtacctgatcatcaactacttcaagggcggcaagctgcggttcaagaagatcaaacctgaagccttcgaagccaacagattctacaccgtgatcaacaaaaagagcggcgagatcgtgcccatggaggtgaacttcaacttcgacgaccccaacctgatcatcctgcctctggcctttggcaagagacagggcagagaattcatctggaacgacctgctgtccctggaaaccggcagcctgaagctggccaacggaagagtgatcgagaagacactgtacaacagaagaacccggcaggatgagcctgccctgttcgtggccctgaccttcgagcggcgggaggtcctggactcctccaatatcaaaccaatgaacctgatcggcgtggcaagaggcgaaaacatccccgccgtgatcgccctgaccgaccccgagggctgcccactgagccggtttaaggatagcctgggaaacccaacccacatcctgagaatcggcgagagctataaggagaagcagcggaccatccaggccaagaaggaggtggagcagcggagagccggcggctacagccggaagtacgccagcaaagccaagaatctggcagacgatatggtgagaaacaccgctagagatctgctgtactacgccgtgacccaggatgccatgctgatcttcgccaacctgagccggggcttcggccggcagggcaagcggaccttcatggccgagagacagtacacacggatggaggactggctgaccgccaagctggcctacgagggcctgagcaagacctacctgtccaagacactggcccagtacacctccaagacatgcagcaactgtgggtttaccatcaccagcgccgactacgacagggtgctggagaagctgaagaagacagcaacaggctggatgaccacaattaacggcaaggagctgaaggtggagggccagattacctactacaacagatacaagagacagaacgtagtcaaggacctgtccgtcgagctggatagactgagcgaagaatctgtgaacaacgacatctcctcctggacaaagggcagaagcggagaagctctgagcctcctgaagaaaagattctcccatagacccgtgcaggagaagttcgtgtgcctgaactgcggcttcgagacacacgcagccgagcaagccgccctgaacatcgccagatcctggctgttcctgcggagccaggagtacaagaaataccagacaaacaagacaaccggcaacaccgataagagagccttcgtcgagacctggcagtccttttaccggaagaagcttaaggaggtgtggaaacctgccgtgcggtctggcggatctggcggaggctccaccagccccaagaaaaagagaaaagtctaagctgccttctgcggggcttgccttctggccatgcccttcttctctcccttgcacctgtacctcttggtctttgaataaagcctgagtaggaaggctagcaaaaaaaaaaaaaaaaaaaaaaaaaaaaaaaaaaaaaaaaaaaaaaaaaaaaaaaaaaaaaaaaaaaaaaaaaaaaaaaa

SEQ ID NO: 9582 - RNA, 8787 nt, synthetic construct
  source 1..8787: mol_type = other RNA
aggaaataagagagaaaagaagagtaagaagaaatataagagccaccatggcccctaagaagaagcgtaaagtgagccggatgaaccacgaccaggagttcgacccccctaaggtgtaccctcccgtccccgccgagaagagaaagcccatccgggtcctgagcctgttcgatggcatcgccaccggtctgctggtgctgaaggacctgggcatccaggtggataggtacattgcctccgaggtgtgcgaggactccatcaccgtgggaatggtgcgtcatcagggcaagatcatgtacgtgggcgacgtgcggagcgtgacacagaagcatatccaggagtggggccctttcgacctggtgatcggcggcagcccttgcaatgacctgagcatcgtgaacccagcccggaagggcctgtacgagggaaccggcagactgttcttcgagttttacagactgctgcacgacgcccggcctaaggaaggcgacgaccggcccttcttttggctgttcgagaatgtggtggccatgggagtcagcgacaagcgggatattagccggttcctggagagcaaccccgtgatgatcgatgccaaggaagtgagcgccgcccaccgggccagatacttctggggcaatctgcctggcatgaacagacccctggccagcaccgtgaacgacaagctggagctgcaggagtgcctggagcacggccggatcgccaagttcagcaaggtgagaaccatcaccacccgaagcaacagcatcaaacaaggcaaggaccagcactttcctgtgttcatgaacgagaaggaggacatcctgtggtgtaccgagatggagagagtgttcgggttcccagtccactacacagatgtcagcaacatgtctagactggccagacagagactgctgggaagaagctggtccgtccctgtgatcagacacctgttcgcccctctgaaggagtacttcgcctgcgtgagcagcggcaacagcaacgccaacagccggggccccagcttctctagcggcctggtgccactgtccctgagagggagccacatgggccccatggagatctacaaaaccgtgagcgcctggaagcggcagcctgtgcgcgtgctgagcctgtttcggaatatcgataaagtcctgaaaagcctgggattcctggagagcggctctggctccggcggtggcaccctgaagtacgtggaggatgtgacaaacgtggtcagacgggatgtggagaagtggggccccttcgatctggtgtacggcagcacccaacccctgggcagctcttgtgaccggtgccctggctggtacatgtttcagttccaccggatcctgcagtacgccctgccgagacaggagtcccagcggccattcttttggattttcatggacaacttgctgctgaccgaggatgaccaggaaactaccactcggttcctgcagaccgaagccgtgaccctgcaggacgtgagaggccgggactaccagaacgccatgcgggtgtggtccaacatccctggactgaaaagcaagcacgcacctctgacccctaaagaagaggagtacctgcaggcccaggtgcggagcagaagcaagctggacgcccctaaggtggatctgctggtgaagaattgcctcctgcccctgagagagtacttcaagtatttcagccagaatagtctgcccctgggaggcagcggcggcggcggcagcgtgagcttcgacgaggtgagcgtgaggttcagcaacgaggagtgggccctgctggaccccggccagagggccctgtacgaggaggtgatggaggagatcagggagatgatgaccagcgtgggcgacgtgagcgagttcctgaccgagggcgagcagagcgagcccagcagggagggcgccgaggagcagaaggagcagaggaagcagagggtgcaggtgggcacctacaggaaggagggcggcccaagcagcggcgcccctcctcccagcggcggcaggcggcccaagcagcggcgcccctcctcccagcggcggcagcccagccggctccccaacctctaccgaggagggcacctctgagtccgccacccccgagagcggccctggcacctccaccgagcccagcgagggcagcgcacccggcagccctgccggcagccccacctccacagaggagggaaccagcaccgagcccagcgaaggcagcgccccaggcaccagcaccgagcctagtgagcaggagattaaacggatcaacaagatcagaagaagacttgtgaaagacagcaacaccaagaaggccggcaagacaggccccatgaaaaccctgctggttagagtgatgacacccgatctgagagagcggctggaaaacctgagaaagaagcctgaaaatatcccccagcccatcagcaatacatctagagccaacctgaataagctgctgaccgattacaccgaaatgaagaaggcgatcctgcatgtgtactgggaagagttccagaaggaccctgtgggcctgatgagccgggtggcccagcctgccagcaagaagatcgatcagaacaagctgaaacctgagatggacgagaagggcaacctgaccaccgccggctttgcctgctctcagtgtggccagcccctgttcgtgtacaagctggagcaggtgtctgagaagggcaaggcttacaccaactacttcggacggtgcaatgtggccgagcacgaaaagctgatcctgctggcccagctgaagcccgagaaggatagcgacgaagccgtgacatatagcctgggaaagtttgggcagagggccctggatttctacagcattcatgtgaccaaggagtccacccaccccgtgaagcccctggcccagatcgccggaaacagatacgcctccggacctgtgggaaaggccctgagcgacgcatgtatgggcacaatcgcctccttcctgtctaagtaccaggacatcatcatcgaacaccagaaggtggtgaagggcaaccagaagagactggagagcctgcgggagctggccggcaaggaaaacctggaataccctagcgtgaccctgccacctcagcctcacaccaaggagggcgttgatgcctacaacgaagtgatcgcccgggtgcgaatgtgggtgaacctgaacctgtggcagaagctgaagctaagcagagatgatgccaagcctctgctgagactgaagggattcccttcctttcctctggtcgagagacaggccaacgaagtggactggtgggacatggtgtgtaacgtgaagaagctgatcaacgagaaaaaggaggatggcaaggtgttttggcagaatctggctggctacaagagacaggaagccctgagaccatacctgagcagcgaggaagatcggaagaagggaaagaaattcgctcggtaccagctgggcgacctgctgctgcacctggaaaagaagcacggcgaggactggggaaaggtgtacgacgaggcctgggagcggattgacaagaaagtggaaggcctgagcaagcacatcaagctggaagaggaacggagaagcgaggacgcccagagcaaggccgccctgaccgactggctgcgggctaaggccagcttcgtgatcgagggcctgaaggaggccgacaaggacgagttctgcagatgcgagctgaagctgcagaagtggtacggggacctgcggggaaagcccttcgccatcgaagccgagaacagcatcctggacatcagcggcttcagcaagcagtacaactgtgccttcatctggcagaaggacggcgtgaagaagctgaacctgtacctgatcatcaactacttcaagggcggcaagctgcggttcaagaagatcaaacctgaagccttcgaagccaacagattctacaccgtgatcaacaaaaagagcggcgagatcgtgcccatggaggtgaacttcaacttcgacgaccccaacctgatcatcctgcctctggcctttggcaagagacagggcagagaattcatctggaacgacctgctgtccctggaaaccggcagcctgaagctggccaacggaagagtgatcgagaagacactgtacaacagaagaacccggcaggatgagcctgccctgttcgtggccctgaccttcgagcggcgggaggtcctggactcctccaatatcaaaccaatgaacctgatcggcgtggcaagaggcgaaaacatccccgccgtgatcgccctgaccgaccccgagggctgcccactgagccggtttaaggatagcctgggaaacccaacccacatcctgagaatcggcgagagctataaggagaagcagcggaccatccaggccaagaaggaggtggagcagcggagagccggcggctacagccggaagtacgccagcaaagccaagaatctggcagacgatatggtgagaaacaccgctagagatctgctgtactacgccgtgacccaggatgccatgctgatcttcgccaacctgagccggggcttcggccggcagggcaagcggaccttcatggccgagagacagtacacacggatggaggactggctgaccgccaagctggcctacgagggcctgagcaagacctacctgtccaagacactggcccagtacacctccaagacatgcagcaactgtgggtttaccatcaccagcgccgactacgacagggtgctggagaagctgaagaagacagcaacaggctggatgaccacaattaacggcaaggagctgaaggtggagggccagattacctactacaacagatacaagagacagaacgtagtcaaggacctgtccgtcgagctggatagactgagcgaagaatctgtgaacaacgacatctcctcctggacaaagggcagaagcggagaagctctgagcctcctgaagaaaagattctcccatagacccgtgcaggagaagttcgtgtgcctgaactgcggcttcgagacacacgcagccgagcaagccgccctgaacatcgccagatcctggctgttcctgcggagccaggagtacaagaaataccagacaaacaagacaaccggcaacaccgataagagagccttcgtcgagacctggcagtccttttaccggaagaagcttaaggaggtgtggaaacctgccgtgcggtctggcggatctggcggaggctccaccagccccaagaaaaagagaaaagtctaagctgccttctgcggggcttgccttctggccatgcccttcttctctcccttgcacctgtacctcttggtctttgaataaagcctgagtaggaaggctagcaaaaaaaaaaaaaaaaaaaaaaaaaaaaaaaaaaaaaaaaaaaaaaaaaaaaaaaaaaaaaaaaaaaaaaaaaaaaaaaagcccagccggctccccaacctctaccgaggagggcacctctgagtccgccacccccgagagcggccctggcacctccaccgagcccagcgagggcagcgcacccggcagccctgccggcagccccacctccacagaggagggaaccagcaccgagcccagcgaaggcagcgccccaggcaccagcaccgagcctagtgagcaggagattaaacggatcaacaagatcagaagaagacttgtgaaagacagcaacaccaagaaggccggcaagacaggccccatgaaaaccctgctggttagagtgatgacacccgatctgagagagcggctggaaaacctgagaaagaagcctgaaaatatcccccagcccatcagcaatacatctagagccaacctgaataagctgctgaccgattacaccgaaatgaagaaggcgatcctgcatgtgtactgggaagagttccagaaggaccctgtgggcctgatgagccgggtggcccagcctgccagcaagaagatcgatcagaacaagctgaaacctgagatggacgagaagggcaacctgaccaccgccggctttgcctgctctcagtgtggccagcccctgttcgtgtacaagctggagcaggtgtctgagaagggcaaggcttacaccaactacttcggacggtgcaatgtggccgagcacgaaaagctgatcctgctggcccagctgaagcccgagaaggatagcgacgaagccgtgacatatagcctgggaaagtttgggcagagggccctggatttctacagcattcatgtgaccaaggagtccacccaccccgtgaagcccctggcccagatcgccggaaacagatacgcctccggacctgtgggaaaggccctgagcgacgcatgtatgggcacaatcgcctccttcctgtctaagtaccaggacatcatcatcgaacaccagaaggtggtgaagggcaaccagaagagactggagagcctgcgggagctggccggcaaggaaaacctggaataccctagcgtgaccctgccacctcagcctcacaccaaggagggcgttgatgcctacaacgaagtgatcgcccgggtgcgaatgtgggtgaacctgaacctgtggcagaagctgaagctaagcagagatgatgccaagcctctgctgagactgaagggattcccttcctttcctctggtcgagagacaggccaacgaagtggactggtgggacatggtgtgtaacgtgaagaagctgatcaacgagaaaaaggaggatggcaaggtgttttggcagaatctggctggctacaagagacaggaagccctgagaccatacctgagcagcgaggaagatcggaagaagggaaagaaattcgctcggtaccagctgggcgacctgctgctgcacctggaaaagaagcacggcgaggactggggaaaggtgtacgacgaggcctgggagcggattgacaagaaagtggaaggcctgagcaagcacatcaagctggaagaggaacggagaagcgaggacgcccagagcaaggccgccctgaccgactggctgcgggctaaggccagcttcgtgatcgagggcctgaaggaggccgacaaggacgagttctgcagatgcgagctgaagctgcagaagtggtacggggacctgcggggaaagcccttcgccatcgaagccgagaacagcatcctggacatcagcggcttcagcaagcagtacaactgtgccttcatctggcagaaggacggcgtgaagaagctgaacctgtacctgatcatcaactacttcaagggcggcaagctgcggttcaagaagatcaaacctgaagccttcgaagccaacagattctacaccgtgatcaacaaaaagagcggcgagatcgtgcccatggaggtgaacttcaacttcgacgaccccaacctgatcatcctgcctctggcctttggcaagagacagggcagagaattcatctggaacgacctgctgtccctggaaaccggcagcctgaagctggccaacggaagagtgatcgagaagacactgtacaacagaagaacccggcaggatgagcctgccctgttcgtggccctgaccttcgagcggcgggaggtcctggactcctccaatatcaaaccaatgaacctgatcggcgtggcaagaggcgaaaacatccccgccgtgatcgccctgaccgaccccgagggctgcccactgagccggtttaaggatagcctgggaaacccaacccacatcctgagaatcggcgagagctataaggagaagcagcggaccatccaggccaagaaggaggtggagcagcggagagccggcggctacagccggaagtacgccagcaaagccaagaatctggcagacgatatggtgagaaacaccgctagagatctgctgtactacgccgtgacccaggatgccatgctgatcttcgccaacctgagccggggcttcggccggcagggcaagcggaccttcatggccgagagacagtacacacggatggaggactggctgaccgccaagctggcctacgagggcctgagcaagacctacctgtccaagacactggcccagtacacctccaagacatgcagcaactgtgggtttaccatcaccagcgccgactacgacagggtgctggagaagctgaagaagacagcaacaggctggatgaccacaattaacggcaaggagctgaaggtggagggccagattacctactacaacagatacaagagacagaacgtagtcaaggacctgtccgtcgagctggatagactgagcgaagaatctgtgaacaacgacatctcctcctggacaaagggcagaagcggagaagctctgagcctcctgaagaaaagattctcccatagacccgtgcaggagaagttcgtgtgcctgaactgcggcttcgagacacacgcagccgagcaagccgccctgaacatcgccagatcctggctgttcctgcggagccaggagtacaagaaataccagacaaacaagacaaccggcaacaccgataagagagccttcgtcgagacctggcagtccttttaccggaagaagcttaaggaggtgtggaaacctgccgtgcggtctggcggatctggcggaggctccaccagccccaagaaaaagagaaaagtctaagctgccttctgcggggcttgccttctggccatgcccttcttctctcccttgcacctgtacctcttggtctttgaataaagcctgagtaggaaggctagcaaaaaaaaaaaaaaaaaaaaaaaaaaaaaaaaaaaaaaaaaaaaaaaaaaaaaaaaaaaaaaaaaaaaaaaaaaaaaaaa

SEQ ID NO: 9583 - RNA, 8787 nt, synthetic construct
  source 1..8787: mol_type = other RNA
aggaaataagagagaaaagaagagtaagaagaaatataagagccaccatggcccctaagaagaagcgtaaagtgagccggatgaaccacgaccaggagttcgacccccctaaggtgtaccctcccgtccccgccgagaagagaaagcccatccgggtcctgagcctgttcgatggcatcgccaccggtctgctggtgctgaaggacctgggcatccaggtggataggtacattgcctccgaggtgtgcgaggactccatcaccgtgggaatggtgcgtcatcagggcaagatcatgtacgtgggcgacgtgcggagcgtgacacagaagcatatccaggagtggggccctttcgacctggtgatcggcggcagcccttgcaatgacctgagcatcgtgaacccagcccggaagggcctgtacgagggaaccggcagactgttcttcgagttttacagactgctgcacgacgcccggcctaaggaaggcgacgaccggcccttcttttggctgttcgagaatgtggtggccatgggagtcagcgacaagcgggatattagccggttcctggagagcaaccccgtgatgatcgatgccaaggaagtgagcgccgcccaccgggccagatacttctggggcaatctgcctggcatgaacagacccctggccagcaccgtgaacgacaagctggagctgcaggagtgcctggagcacggccggatcgccaagttcagcaaggtgagaaccatcaccacccgaagcaacagcatcaaacaaggcaaggaccagcactttcctgtgttcatgaacgagaaggaggacatcctgtggtgtaccgagatggagagagtgttcgggttcccagtccactacacagatgtcagcaacatgtctagactggccagacagagactgctgggaagaagctggtccgtccctgtgatcagacacctgttcgcccctctgaaggagtacttcgcctgcgtgagcagcggcaacagcaacgccaacagccggggccccagcttctctagcggcctggtgccactgtccctgagagggagccacatgggccccatggagatctacaaaaccgtgagcgcctggaagcggcagcctgtgcgcgtgctgagcctgtttcggaatatcgataaagtcctgaaaagcctgggattcctggagagcggctctggctccggcggtggcaccctgaagtacgtggaggatgtgacaaacgtggtcagacgggatgtggagaagtggggccccttcgatctggtgtacggcagcacccaacccctgggcagctcttgtgaccggtgccctggctggtacatgtttcagttccaccggatcctgcagtacgccctgccgagacaggagtcccagcggccattcttttggattttcatggacaacttgctgctgaccgaggatgaccaggaaactaccactcggttcctgcagaccgaagccgtgaccctgcaggacgtgagaggccgggactaccagaacgccatgcgggtgtggtccaacatccctggactgaaaagcaagcacgcacctctgacccctaaagaagaggagtacctgcaggcccaggtgcggagcagaagcaagctggacgcccctaaggtggatctgctggtgaagaattgcctcctgcccctgagagagtacttcaagtatttcagccagaatagtctgcccctgggaggcagcggcggcggcttccaggaggccgtgaccttcaaggacgtggccgtggtgttcagcgaggaggagctgggcctgctggaccccgcccagaggaagctgtacagggacgtgatgctggagaacttcaggaacctggtgagcgtgggccacagcagcagcaagcccgacatgatcagccagctggagagggaggagaagctgtgcgtgaaggagatccacaccgagaggggcggcaggaaccccaacgaggccgagggcggcccaagcagcggcgcccctcctcccagcggcggcaggcggcccaagcagcggcgcccctcctcccagcggcggcagcccagccggctccccaacctctaccgaggagggcacctctgagtccgccacccccgagagcggccctggcacctccaccgagcccagcgagggcagcgcacccggcagccctgccggcagccccacctccacagaggagggaaccagcaccgagcccagcgaaggcagcgccccaggcaccagcaccgagcctagtgagcaggagattaaacggatcaacaagatcagaagaagacttgtgaaagacagcaacaccaagaaggccggcaagacaggccccatgaaaaccctgctggttagagtgatgacacccgatctgagagagcggctggaaaacctgagaaagaagcctgaaaatatcccccagcccatcagcaatacatctagagccaacctgaataagctgctgaccgattacaccgaaatgaagaaggcgatcctgcatgtgtactgggaagagttccagaaggaccctgtgggcctgatgagccgggtggcccagcctgccagcaagaagatcgatcagaacaagctgaaacctgagatggacgagaagggcaacctgaccaccgccggctttgcctgctctcagtgtggccagcccctgttcgtgtacaagctggagcaggtgtctgagaagggcaaggcttacaccaactacttcggacggtgcaatgtggccgagcacgaaaagctgatcctgctggcccagctgaagcccgagaaggatagcgacgaagccgtgacatatagcctgggaaagtttgggcagagggccctggatttctacagcattcatgtgaccaaggagtccacccaccccgtgaagcccctggcccagatcgccggaaacagatacgcctccggacctgtgggaaaggccctgagcgacgcatgtatgggcacaatcgcctccttcctgtctaagtaccaggacatcatcatcgaacaccagaaggtggtgaagggcaaccagaagagactggagagcctgcgggagctggccggcaaggaaaacctggaataccctagcgtgaccctgccacctcagcctcacaccaaggagggcgttgatgcctacaacgaagtgatcgcccgggtgcgaatgtgggtgaacctgaacctgtggcagaagctgaagctaagcagagatgatgccaagcctctgctgagactgaagggattcccttcctttcctctggtcgagagacaggccaacgaagtggactggtgggacatggtgtgtaacgtgaagaagctgatcaacgagaaaaaggaggatggcaaggtgttttggcagaatctggctggctacaagagacaggaagccctgagaccatacctgagcagcgaggaagatcggaagaagggaaagaaattcgctcggtaccagctgggcgacctgctgctgcacctggaaaagaagcacggcgaggactggggaaaggtgtacgacgaggcctgggagcggattgacaagaaagtggaaggcctgagcaagcacatcaagctggaagaggaacggagaagcgaggacgcccagagcaaggccgccctgaccgactggctgcgggctaaggccagcttcgtgatcgagggcctgaaggaggccgacaaggacgagttctgcagatgcgagctgaagctgcagaagtggtacggggacctgcggggaaagcccttcgccatcgaagccgagaacagcatcctggacatcagcggcttcagcaagcagtacaactgtgccttcatctggcagaaggacggcgtgaagaagctgaacctgtacctgatcatcaactacttcaagggcggcaagctgcggttcaagaagatcaaacctgaagccttcgaagccaacagattctacaccgtgatcaacaaaaagagcggcgagatcgtgcccatggaggtgaacttcaacttcgacgaccccaacctgatcatcctgcctctggcctttggcaagagacagggcagagaattcatctggaacgacctgctgtccctggaaaccggcagcctgaagctggccaacggaagagtgatcgagaagacactgtacaacagaagaacccggcaggatgagcctgccctgttcgtggccctgaccttcgagcggcgggaggtcctggactcctccaatatcaaaccaatgaacctgatcggcgtggcaagaggcgaaaacatccccgccgtgatcgccctgaccgaccccgagggctgcccactgagccggtttaaggatagcctgggaaacccaacccacatcctgagaatcggcgagagctataaggagaagcagcggaccatccaggccaagaaggaggtggagcagcggagagccggcggctacagccggaagtacgccagcaaagccaagaatctggcagacgatatggtgagaaacaccgctagagatctgctgtactacgccgtgacccaggatgccatgctgatcttcgccaacctgagccggggcttcggccggcagggcaagcggaccttcatggccgagagacagtacacacggatggaggactggctgaccgccaagctggcctacgagggcctgagcaagacctacctgtccaagacactggcccagtacacctccaagacatgcagcaactgtgggtttaccatcaccagcgccgactacgacagggtgctggagaagctgaagaagacagcaacaggctggatgaccacaattaacggcaaggagctgaaggtggagggccagattacctactacaacagatacaagagacagaacgtagtcaaggacctgtccgtcgagctggatagactgagcgaagaatctgtgaacaacgacatctcctcctggacaaagggcagaagcggagaagctctgagcctcctgaagaaaagattctcccatagacccgtgcaggagaagttcgtgtgcctgaactgcggcttcgagacacacgcagccgagcaagccgccctgaacatcgccagatcctggctgttcctgcggagccaggagtacaagaaataccagacaaacaagacaaccggcaacaccgataagagagccttcgtcgagacctggcagtccttttaccggaagaagcttaaggaggtgtggaaacctgccgtgcggtctggcggatctggcggaggctccaccagccccaagaaaaagagaaaagtctaagctgccttctgcggggcttgccttctggccatgcccttcttctctcccttgcacctgtacctcttggtctttgaataaagcctgagtaggaaggctagcaaaaaaaaaaaaaaaaaaaaaaaaaaaaaaaaaaaaaaaaaaaaaaaaaaaaaaaaaaaaaaaaaaaaaaaaaaaaaaaagcccagccggctccccaacctctaccgaggagggcacctctgagtccgccacccccgagagcggccctggcacctccaccgagcccagcgagggcagcgcacccggcagccctgccggcagccccacctccacagaggagggaaccagcaccgagcccagcgaaggcagcgccccaggcaccagcaccgagcctagtgagcaggagattaaacggatcaacaagatcagaagaagacttgtgaaagacagcaacaccaagaaggccggcaagacaggccccatgaaaaccctgctggttagagtgatgacacccgatctgagagagcggctggaaaacctgagaaagaagcctgaaaatatcccccagcccatcagcaatacatctagagccaacctgaataagctgctgaccgattacaccgaaatgaagaaggcgatcctgcatgtgtactgggaagagttccagaaggaccctgtgggcctgatgagccgggtggcccagcctgccagcaagaagatcgatcagaacaagctgaaacctgagatggacgagaagggcaacctgaccaccgccggctttgcctgctctcagtgtggccagcccctgttcgtgtacaagctggagcaggtgtctgagaagggcaaggcttacaccaactacttcggacggtgcaatgtggccgagcacgaaaagctgatcctgctggcccagctgaagcccgagaaggatagcgacgaagccgtgacatatagcctgggaaagtttgggcagagggccctggatttctacagcattcatgtgaccaaggagtccacccaccccgtgaagcccctggcccagatcgccggaaacagatacgcctccggacctgtgggaaaggccctgagcgacgcatgtatgggcacaatcgcctccttcctgtctaagtaccaggacatcatcatcgaacaccagaaggtggtgaagggcaaccagaagagactggagagcctgcgggagctggccggcaaggaaaacctggaataccctagcgtgaccctgccacctcagcctcacaccaaggagggcgttgatgcctacaacgaagtgatcgcccgggtgcgaatgtgggtgaacctgaacctgtggcagaagctgaagctaagcagagatgatgccaagcctctgctgagactgaagggattcccttcctttcctctggtcgagagacaggccaacgaagtggactggtgggacatggtgtgtaacgtgaagaagctgatcaacgagaaaaaggaggatggcaaggtgttttggcagaatctggctggctacaagagacaggaagccctgagaccatacctgagcagcgaggaagatcggaagaagggaaagaaattcgctcggtaccagctgggcgacctgctgctgcacctggaaaagaagcacggcgaggactggggaaaggtgtacgacgaggcctgggagcggattgacaagaaagtggaaggcctgagcaagcacatcaagctggaagaggaacggagaagcgaggacgcccagagcaaggccgccctgaccgactggctgcgggctaaggccagcttcgtgatcgagggcctgaaggaggccgacaaggacgagttctgcagatgcgagctgaagctgcagaagtggtacggggacctgcggggaaagcccttcgccatcgaagccgagaacagcatcctggacatcagcggcttcagcaagcagtacaactgtgccttcatctggcagaaggacggcgtgaagaagctgaacctgtacctgatcatcaactacttcaagggcggcaagctgcggttcaagaagatcaaacctgaagccttcgaagccaacagattctacaccgtgatcaacaaaaagagcggcgagatcgtgcccatggaggtgaacttcaacttcgacgaccccaacctgatcatcctgcctctggcctttggcaagagacagggcagagaattcatctggaacgacctgctgtccctggaaaccggcagcctgaagctggccaacggaagagtgatcgagaagacactgtacaacagaagaacccggcaggatgagcctgccctgttcgtggccctgaccttcgagcggcgggaggtcctggactcctccaatatcaaaccaatgaacctgatcggcgtggcaagaggcgaaaacatccccgccgtgatcgccctgaccgaccccgagggctgcccactgagccggtttaaggatagcctgggaaacccaacccacatcctgagaatcggcgagagctataaggagaagcagcggaccatccaggccaagaaggaggtggagcagcggagagccggcggctacagccggaagtacgccagcaaagccaagaatctggcagacgatatggtgagaaacaccgctagagatctgctgtactacgccgtgacccaggatgccatgctgatcttcgccaacctgagccggggcttcggccggcagggcaagcggaccttcatggccgagagacagtacacacggatggaggactggctgaccgccaagctggcctacgagggcctgagcaagacctacctgtccaagacactggcccagtacacctccaagacatgcagcaactgtgggtttaccatcaccagcgccgactacgacagggtgctggagaagctgaagaagacagcaacaggctggatgaccacaattaacggcaaggagctgaaggtggagggccagattacctactacaacagatacaagagacagaacgtagtcaaggacctgtccgtcgagctggatagactgagcgaagaatctgtgaacaacgacatctcctcctggacaaagggcagaagcggagaagctctgagcctcctgaagaaaagattctcccatagacccgtgcaggagaagttcgtgtgcctgaactgcggcttcgagacacacgcagccgagcaagccgccctgaacatcgccagatcctggctgttcctgcggagccaggagtacaagaaataccagacaaacaagacaaccggcaacaccgataagagagccttcgtcgagacctggcagtccttttaccggaagaagcttaaggaggtgtggaaacctgccgtgcggtctggcggatctggcggaggctccaccagccccaagaaaaagagaaaagtctaagctgccttctgcggggcttgccttctggccatgcccttcttctctcccttgcacctgtacctcttggtctttgaataaagcctgagtaggaaggctagcaaaaaaaaaaaaaaaaaaaaaaaaaaaaaaaaaaaaaaaaaaaaaaaaaaaaaaaaaaaaaaaaaaaaaaaaaaaaaaaa

SEQ ID NO: 9584 - RNA, 8787 nt, synthetic construct
  source 1..8787: mol_type = other RNA
aggaaataagagagaaaagaagagtaagaagaaatataagagccaccatggcccctaagaagaagcgtaaagtgagccggatgaaccacgaccaggagttcgacccccctaaggtgtaccctcccgtccccgccgagaagagaaagcccatccgggtcctgagcctgttcgatggcatcgccaccggtctgctggtgctgaaggacctgggcatccaggtggataggtacattgcctccgaggtgtgcgaggactccatcaccgtgggaatggtgcgtcatcagggcaagatcatgtacgtgggcgacgtgcggagcgtgacacagaagcatatccaggagtggggccctttcgacctggtgatcggcggcagcccttgcaatgacctgagcatcgtgaacccagcccggaagggcctgtacgagggaaccggcagactgttcttcgagttttacagactgctgcacgacgcccggcctaaggaaggcgacgaccggcccttcttttggctgttcgagaatgtggtggccatgggagtcagcgacaagcgggatattagccggttcctggagagcaaccccgtgatgatcgatgccaaggaagtgagcgccgcccaccgggccagatacttctggggcaatctgcctggcatgaacagacccctggccagcaccgtgaacgacaagctggagctgcaggagtgcctggagcacggccggatcgccaagttcagcaaggtgagaaccatcaccacccgaagcaacagcatcaaacaaggcaaggaccagcactttcctgtgttcatgaacgagaaggaggacatcctgtggtgtaccgagatggagagagtgttcgggttcccagtccactacacagatgtcagcaacatgtctagactggccagacagagactgctgggaagaagctggtccgtccctgtgatcagacacctgttcgcccctctgaaggagtacttcgcctgcgtgagcagcggcaacagcaacgccaacagccggggccccagcttctctagcggcctggtgccactgtccctgagagggagccacatgggccccatggagatctacaaaaccgtgagcgcctggaagcggcagcctgtgcgcgtgctgagcctgtttcggaatatcgataaagtcctgaaaagcctgggattcctggagagcggctctggctccggcggtggcaccctgaagtacgtggaggatgtgacaaacgtggtcagacgggatgtggagaagtggggccccttcgatctggtgtacggcagcacccaacccctgggcagctcttgtgaccggtgccctggctggtacatgtttcagttccaccggatcctgcagtacgccctgccgagacaggagtcccagcggccattcttttggattttcatggacaacttgctgctgaccgaggatgaccaggaaactaccactcggttcctgcagaccgaagccgtgaccctgcaggacgtgagaggccgggactaccagaacgccatgcgggtgtggtccaacatccctggactgaaaagcaagcacgcacctctgacccctaaagaagaggagtacctgcaggcccaggtgcggagcagaagcaagctggacgcccctaaggtggatctgctggtgaagaattgcctcctgcccctgagagagtacttcaagtatttcagccagaatagtctgcccctgggaggcagcggcggcggcctgcaggtgagcgtgagcttcgaggacgtgaccgtgaacttcagcagggaggagtggcagaggctggaccccgcccagaggaggctgtacagggacgtgaccctggagaactacagccacctgaggagcgtgggctaccaggtgcccaagcccgaggtgatcttcaagctggagcagggcgagggcccctggaccctggagggcgagaccccccaccagagctgcagcggcgaggacatcggcggcggcccaagcagcggcgcccctcctcccagcggcggcaggcggcccaagcagcggcgcccctcctcccagcggcggcagcccagccggctccccaacctctaccgaggagggcacctctgagtccgccacccccgagagcggccctggcacctccaccgagcccagcgagggcagcgcacccggcagccctgccggcagccccacctccacagaggagggaaccagcaccgagcccagcgaaggcagcgccccaggcaccagcaccgagcctagtgagcaggagattaaacggatcaacaagatcagaagaagacttgtgaaagacagcaacaccaagaaggccggcaagacaggccccatgaaaaccctgctggttagagtgatgacacccgatctgagagagcggctggaaaacctgagaaagaagcctgaaaatatcccccagcccatcagcaatacatctagagccaacctgaataagctgctgaccgattacaccgaaatgaagaaggcgatcctgcatgtgtactgggaagagttccagaaggaccctgtgggcctgatgagccgggtggcccagcctgccagcaagaagatcgatcagaacaagctgaaacctgagatggacgagaagggcaacctgaccaccgccggctttgcctgctctcagtgtggccagcccctgttcgtgtacaagctggagcaggtgtctgagaagggcaaggcttacaccaactacttcggacggtgcaatgtggccgagcacgaaaagctgatcctgctggcccagctgaagcccgagaaggatagcgacgaagccgtgacatatagcctgggaaagtttgggcagagggccctggatttctacagcattcatgtgaccaaggagtccacccaccccgtgaagcccctggcccagatcgccggaaacagatacgcctccggacctgtgggaaaggccctgagcgacgcatgtatgggcacaatcgcctccttcctgtctaagtaccaggacatcatcatcgaacaccagaaggtggtgaagggcaaccagaagagactggagagcctgcgggagctggccggcaaggaaaacctggaataccctagcgtgaccctgccacctcagcctcacaccaaggagggcgttgatgcctacaacgaagtgatcgcccgggtgcgaatgtgggtgaacctgaacctgtggcagaagctgaagctaagcagagatgatgccaagcctctgctgagactgaagggattcccttcctttcctctggtcgagagacaggccaacgaagtggactggtgggacatggtgtgtaacgtgaagaagctgatcaacgagaaaaaggaggatggcaaggtgttttggcagaatctggctggctacaagagacaggaagccctgagaccatacctgagcagcgaggaagatcggaagaagggaaagaaattcgctcggtaccagctgggcgacctgctgctgcacctggaaaagaagcacggcgaggactggggaaaggtgtacgacgaggcctgggagcggattgacaagaaagtggaaggcctgagcaagcacatcaagctggaagaggaacggagaagcgaggacgcccagagcaaggccgccctgaccgactggctgcgggctaaggccagcttcgtgatcgagggcctgaaggaggccgacaaggacgagttctgcagatgcgagctgaagctgcagaagtggtacggggacctgcggggaaagcccttcgccatcgaagccgagaacagcatcctggacatcagcggcttcagcaagcagtacaactgtgccttcatctggcagaaggacggcgtgaagaagctgaacctgtacctgatcatcaactacttcaagggcggcaagctgcggttcaagaagatcaaacctgaagccttcgaagccaacagattctacaccgtgatcaacaaaaagagcggcgagatcgtgcccatggaggtgaacttcaacttcgacgaccccaacctgatcatcctgcctctggcctttggcaagagacagggcagagaattcatctggaacgacctgctgtccctggaaaccggcagcctgaagctggccaacggaagagtgatcgagaagacactgtacaacagaagaacccggcaggatgagcctgccctgttcgtggccctgaccttcgagcggcgggaggtcctggactcctccaatatcaaaccaatgaacctgatcggcgtggcaagaggcgaaaacatccccgccgtgatcgccctgaccgaccccgagggctgcccactgagccggtttaaggatagcctgggaaacccaacccacatcctgagaatcggcgagagctataaggagaagcagcggaccatccaggccaagaaggaggtggagcagcggagagccggcggctacagccggaagtacgccagcaaagccaagaatctggcagacgatatggtgagaaacaccgctagagatctgctgtactacgccgtgacccaggatgccatgctgatcttcgccaacctgagccggggcttcggccggcagggcaagcggaccttcatggccgagagacagtacacacggatggaggactggctgaccgccaagctggcctacgagggcctgagcaagacctacctgtccaagacactggcccagtacacctccaagacatgcagcaactgtgggtttaccatcaccagcgccgactacgacagggtgctggagaagctgaagaagacagcaacaggctggatgaccacaattaacggcaaggagctgaaggtggagggccagattacctactacaacagatacaagagacagaacgtagtcaaggacctgtccgtcgagctggatagactgagcgaagaatctgtgaacaacgacatctcctcctggacaaagggcagaagcggagaagctctgagcctcctgaagaaaagattctcccatagacccgtgcaggagaagttcgtgtgcctgaactgcggcttcgagacacacgcagccgagcaagccgccctgaacatcgccagatcctggctgttcctgcggagccaggagtacaagaaataccagacaaacaagacaaccggcaacaccgataagagagccttcgtcgagacctggcagtccttttaccggaagaagcttaaggaggtgtggaaacctgccgtgcggtctggcggatctggcggaggctccaccagccccaagaaaaagagaaaagtctaagctgccttctgcggggcttgccttctggccatgcccttcttctctcccttgcacctgtacctcttggtctttgaataaagcctgagtaggaaggctagcaaaaaaaaaaaaaaaaaaaaaaaaaaaaaaaaaaaaaaaaaaaaaaaaaaaaaaaaaaaaaaaaaaaaaaaaaaaaaaaagcccagccggctccccaacctctaccgaggagggcacctctgagtccgccacccccgagagcggccctggcacctccaccgagcccagcgagggcagcgcacccggcagccctgccggcagccccacctccacagaggagggaaccagcaccgagcccagcgaaggcagcgccccaggcaccagcaccgagcctagtgagcaggagattaaacggatcaacaagatcagaagaagacttgtgaaagacagcaacaccaagaaggccggcaagacaggccccatgaaaaccctgctggttagagtgatgacacccgatctgagagagcggctggaaaacctgagaaagaagcctgaaaatatcccccagcccatcagcaatacatctagagccaacctgaataagctgctgaccgattacaccgaaatgaagaaggcgatcctgcatgtgtactgggaagagttccagaaggaccctgtgggcctgatgagccgggtggcccagcctgccagcaagaagatcgatcagaacaagctgaaacctgagatggacgagaagggcaacctgaccaccgccggctttgcctgctctcagtgtggccagcccctgttcgtgtacaagctggagcaggtgtctgagaagggcaaggcttacaccaactacttcggacggtgcaatgtggccgagcacgaaaagctgatcctgctggcccagctgaagcccgagaaggatagcgacgaagccgtgacatatagcctgggaaagtttgggcagagggccctggatttctacagcattcatgtgaccaaggagtccacccaccccgtgaagcccctggcccagatcgccggaaacagatacgcctccggacctgtgggaaaggccctgagcgacgcatgtatgggcacaatcgcctccttcctgtctaagtaccaggacatcatcatcgaacaccagaaggtggtgaagggcaaccagaagagactggagagcctgcgggagctggccggcaaggaaaacctggaataccctagcgtgaccctgccacctcagcctcacaccaaggagggcgttgatgcctacaacgaagtgatcgcccgggtgcgaatgtgggtgaacctgaacctgtggcagaagctgaagctaagcagagatgatgccaagcctctgctgagactgaagggattcccttcctttcctctggtcgagagacaggccaacgaagtggactggtgggacatggtgtgtaacgtgaagaagctgatcaacgagaaaaaggaggatggcaaggtgttttggcagaatctggctggctacaagagacaggaagccctgagaccatacctgagcagcgaggaagatcggaagaagggaaagaaattcgctcggtaccagctgggcgacctgctgctgcacctggaaaagaagcacggcgaggactggggaaaggtgtacgacgaggcctgggagcggattgacaagaaagtggaaggcctgagcaagcacatcaagctggaagaggaacggagaagcgaggacgcccagagcaaggccgccctgaccgactggctgcgggctaaggccagcttcgtgatcgagggcctgaaggaggccgacaaggacgagttctgcagatgcgagctgaagctgcagaagtggtacggggacctgcggggaaagcccttcgccatcgaagccgagaacagcatcctggacatcagcggcttcagcaagcagtacaactgtgccttcatctggcagaaggacggcgtgaagaagctgaacctgtacctgatcatcaactacttcaagggcggcaagctgcggttcaagaagatcaaacctgaagccttcgaagccaacagattctacaccgtgatcaacaaaaagagcggcgagatcgtgcccatggaggtgaacttcaacttcgacgaccccaacctgatcatcctgcctctggcctttggcaagagacagggcagagaattcatctggaacgacctgctgtccctggaaaccggcagcctgaagctggccaacggaagagtgatcgagaagacactgtacaacagaagaacccggcaggatgagcctgccctgttcgtggccctgaccttcgagcggcgggaggtcctggactcctccaatatcaaaccaatgaacctgatcggcgtggcaagaggcgaaaacatccccgccgtgatcgccctgaccgaccccgagggctgcccactgagccggtttaaggatagcctgggaaacccaacccacatcctgagaatcggcgagagctataaggagaagcagcggaccatccaggccaagaaggaggtggagcagcggagagccggcggctacagccggaagtacgccagcaaagccaagaatctggcagacgatatggtgagaaacaccgctagagatctgctgtactacgccgtgacccaggatgccatgctgatcttcgccaacctgagccggggcttcggccggcagggcaagcggaccttcatggccgagagacagtacacacggatggaggactggctgaccgccaagctggcctacgagggcctgagcaagacctacctgtccaagacactggcccagtacacctccaagacatgcagcaactgtgggtttaccatcaccagcgccgactacgacagggtgctggagaagctgaagaagacagcaacaggctggatgaccacaattaacggcaaggagctgaaggtggagggccagattacctactacaacagatacaagagacagaacgtagtcaaggacctgtccgtcgagctggatagactgagcgaagaatctgtgaacaacgacatctcctcctggacaaagggcagaagcggagaagctctgagcctcctgaagaaaagattctcccatagacccgtgcaggagaagttcgtgtgcctgaactgcggcttcgagacacacgcagccgagcaagccgccctgaacatcgccagatcctggctgttcctgcggagccaggagtacaagaaataccagacaaacaagacaaccggcaacaccgataagagagccttcgtcgagacctggcagtccttttaccggaagaagcttaaggaggtgtggaaacctgccgtgcggtctggcggatctggcggaggctccaccagccccaagaaaaagagaaaagtctaagctgccttctgcggggcttgccttctggccatgcccttcttctctcccttgcacctgtacctcttggtctttgaataaagcctgagtaggaaggctagcaaaaaaaaaaaaaaaaaaaaaaaaaaaaaaaaaaaaaaaaaaaaaaaaaaaaaaaaaaaaaaaaaaaaaaaaaaaaaaaa

SEQ ID NO: 9585 - RNA, 8787 nt, synthetic construct
  source 1..8787: mol_type = other RNA
aggaaataagagagaaaagaagagtaagaagaaatataagagccaccatggcccctaagaagaagcgtaaagtgagccggatgaaccacgaccaggagttcgacccccctaaggtgtaccctcccgtccccgccgagaagagaaagcccatccgggtcctgagcctgttcgatggcatcgccaccggtctgctggtgctgaaggacctgggcatccaggtggataggtacattgcctccgaggtgtgcgaggactccatcaccgtgggaatggtgcgtcatcagggcaagatcatgtacgtgggcgacgtgcggagcgtgacacagaagcatatccaggagtggggccctttcgacctggtgatcggcggcagcccttgcaatgacctgagcatcgtgaacccagcccggaagggcctgtacgagggaaccggcagactgttcttcgagttttacagactgctgcacgacgcccggcctaaggaaggcgacgaccggcccttcttttggctgttcgagaatgtggtggccatgggagtcagcgacaagcgggatattagccggttcctggagagcaaccccgtgatgatcgatgccaaggaagtgagcgccgcccaccgggccagatacttctggggcaatctgcctggcatgaacagacccctggccagcaccgtgaacgacaagctggagctgcaggagtgcctggagcacggccggatcgccaagttcagcaaggtgagaaccatcaccacccgaagcaacagcatcaaacaaggcaaggaccagcactttcctgtgttcatgaacgagaaggaggacatcctgtggtgtaccgagatggagagagtgttcgggttcccagtccactacacagatgtcagcaacatgtctagactggccagacagagactgctgggaagaagctggtccgtccctgtgatcagacacctgttcgcccctctgaaggagtacttcgcctgcgtgagcagcggcaacagcaacgccaacagccggggccccagcttctctagcggcctggtgccactgtccctgagagggagccacatgggccccatggagatctacaaaaccgtgagcgcctggaagcggcagcctgtgcgcgtgctgagcctgtttcggaatatcgataaagtcctgaaaagcctgggattcctggagagcggctctggctccggcggtggcaccctgaagtacgtggaggatgtgacaaacgtggtcagacgggatgtggagaagtggggccccttcgatctggtgtacggcagcacccaacccctgggcagctcttgtgaccggtgccctggctggtacatgtttcagttccaccggatcctgcagtacgccctgccgagacaggagtcccagcggccattcttttggattttcatggacaacttgctgctgaccgaggatgaccaggaaactaccactcggttcctgcagaccgaagccgtgaccctgcaggacgtgagaggccgggactaccagaacgccatgcgggtgtggtccaacatccctggactgaaaagcaagcacgcacctctgacccctaaagaagaggagtacctgcaggcccaggtgcggagcagaagcaagctggacgcccctaaggtggatctgctggtgaagaattgcctcctgcccctgagagagtacttcaagtatttcagccagaatagtctgcccctgggaggcagcggcggcggcgcccagggcctggtgaccttcagggacgtggccatcgagttcagccaggaggagtggaagtgcctggagcccgcccagaggaacctgtacagggacgtgaccctggagaacttcagcaacctggtgagcctgggcctgagcatcagcaagcccgacctgatcagcctgctggagcagggcagggagccctggatgatcgccaacgacatgaccggcccctggtgccccgagctggagagcaggggcggcccaagcagcggcgcccctcctcccagcggcggcaggcggcccaagcagcggcgcccctcctcccagcggcggcagcccagccggctccccaacctctaccgaggagggcacctctgagtccgccacccccgagagcggccctggcacctccaccgagcccagcgagggcagcgcacccggcagccctgccggcagccccacctccacagaggagggaaccagcaccgagcccagcgaaggcagcgccccaggcaccagcaccgagcctagtgagcaggagattaaacggatcaacaagatcagaagaagacttgtgaaagacagcaacaccaagaaggccggcaagacaggccccatgaaaaccctgctggttagagtgatgacacccgatctgagagagcggctggaaaacctgagaaagaagcctgaaaatatcccccagcccatcagcaatacatctagagccaacctgaataagctgctgaccgattacaccgaaatgaagaaggcgatcctgcatgtgtactgggaagagttccagaaggaccctgtgggcctgatgagccgggtggcccagcctgccagcaagaagatcgatcagaacaagctgaaacctgagatggacgagaagggcaacctgaccaccgccggctttgcctgctctcagtgtggccagcccctgttcgtgtacaagctggagcaggtgtctgagaagggcaaggcttacaccaactacttcggacggtgcaatgtggccgagcacgaaaagctgatcctgctggcccagctgaagcccgagaaggatagcgacgaagccgtgacatatagcctgggaaagtttgggcagagggccctggatttctacagcattcatgtgaccaaggagtccacccaccccgtgaagcccctggcccagatcgccggaaacagatacgcctccggacctgtgggaaaggccctgagcgacgcatgtatgggcacaatcgcctccttcctgtctaagtaccaggacatcatcatcgaacaccagaaggtggtgaagggcaaccagaagagactggagagcctgcgggagctggccggcaaggaaaacctggaataccctagcgtgaccctgccacctcagcctcacaccaaggagggcgttgatgcctacaacgaagtgatcgcccgggtgcgaatgtgggtgaacctgaacctgtggcagaagctgaagctaagcagagatgatgccaagcctctgctgagactgaagggattcccttcctttcctctggtcgagagacaggccaacgaagtggactggtgggacatggtgtgtaacgtgaagaagctgatcaacgagaaaaaggaggatggcaaggtgttttggcagaatctggctggctacaagagacaggaagccctgagaccatacctgagcagcgaggaagatcggaagaagggaaagaaattcgctcggtaccagctgggcgacctgctgctgcacctggaaaagaagcacggcgaggactggggaaaggtgtacgacgaggcctgggagcggattgacaagaaagtggaaggcctgagcaagcacatcaagctggaagaggaacggagaagcgaggacgcccagagcaaggccgccctgaccgactggctgcgggctaaggccagcttcgtgatcgagggcctgaaggaggccgacaaggacgagttctgcagatgcgagctgaagctgcagaagtggtacggggacctgcggggaaagcccttcgccatcgaagccgagaacagcatcctggacatcagcggcttcagcaagcagtacaactgtgccttcatctggcagaaggacggcgtgaagaagctgaacctgtacctgatcatcaactacttcaagggcggcaagctgcggttcaagaagatcaaacctgaagccttcgaagccaacagattctacaccgtgatcaacaaaaagagcggcgagatcgtgcccatggaggtgaacttcaacttcgacgaccccaacctgatcatcctgcctctggcctttggcaagagacagggcagagaattcatctggaacgacctgctgtccctggaaaccggcagcctgaagctggccaacggaagagtgatcgagaagacactgtacaacagaagaacccggcaggatgagcctgccctgttcgtggccctgaccttcgagcggcgggaggtcctggactcctccaatatcaaaccaatgaacctgatcggcgtggcaagaggcgaaaacatccccgccgtgatcgccctgaccgaccccgagggctgcccactgagccggtttaaggatagcctgggaaacccaacccacatcctgagaatcggcgagagctataaggagaagcagcggaccatccaggccaagaaggaggtggagcagcggagagccggcggctacagccggaagtacgccagcaaagccaagaatctggcagacgatatggtgagaaacaccgctagagatctgctgtactacgccgtgacccaggatgccatgctgatcttcgccaacctgagccggggcttcggccggcagggcaagcggaccttcatggccgagagacagtacacacggatggaggactggctgaccgccaagctggcctacgagggcctgagcaagacctacctgtccaagacactggcccagtacacctccaagacatgcagcaactgtgggtttaccatcaccagcgccgactacgacagggtgctggagaagctgaagaagacagcaacaggctggatgaccacaattaacggcaaggagctgaaggtggagggccagattacctactacaacagatacaagagacagaacgtagtcaaggacctgtccgtcgagctggatagactgagcgaagaatctgtgaacaacgacatctcctcctggacaaagggcagaagcggagaagctctgagcctcctgaagaaaagattctcccatagacccgtgcaggagaagttcgtgtgcctgaactgcggcttcgagacacacgcagccgagcaagccgccctgaacatcgccagatcctggctgttcctgcggagccaggagtacaagaaataccagacaaacaagacaaccggcaacaccgataagagagccttcgtcgagacctggcagtccttttaccggaagaagcttaaggaggtgtggaaacctgccgtgcggtctggcggatctggcggaggctccaccagccccaagaaaaagagaaaagtctaagctgccttctgcggggcttgccttctggccatgcccttcttctctcccttgcacctgtacctcttggtctttgaataaagcctgagtaggaaggctagcaaaaaaaaaaaaaaaaaaaaaaaaaaaaaaaaaaaaaaaaaaaaaaaaaaaaaaaaaaaaaaaaaaaaaaaaaaaaaaaagcccagccggctccccaacctctaccgaggagggcacctctgagtccgccacccccgagagcggccctggcacctccaccgagcccagcgagggcagcgcacccggcagccctgccggcagccccacctccacagaggagggaaccagcaccgagcccagcgaaggcagcgccccaggcaccagcaccgagcctagtgagcaggagattaaacggatcaacaagatcagaagaagacttgtgaaagacagcaacaccaagaaggccggcaagacaggccccatgaaaaccctgctggttagagtgatgacacccgatctgagagagcggctggaaaacctgagaaagaagcctgaaaatatcccccagcccatcagcaatacatctagagccaacctgaataagctgctgaccgattacaccgaaatgaagaaggcgatcctgcatgtgtactgggaagagttccagaaggaccctgtgggcctgatgagccgggtggcccagcctgccagcaagaagatcgatcagaacaagctgaaacctgagatggacgagaagggcaacctgaccaccgccggctttgcctgctctcagtgtggccagcccctgttcgtgtacaagctggagcaggtgtctgagaagggcaaggcttacaccaactacttcggacggtgcaatgtggccgagcacgaaaagctgatcctgctggcccagctgaagcccgagaaggatagcgacgaagccgtgacatatagcctgggaaagtttgggcagagggccctggatttctacagcattcatgtgaccaaggagtccacccaccccgtgaagcccctggcccagatcgccggaaacagatacgcctccggacctgtgggaaaggccctgagcgacgcatgtatgggcacaatcgcctccttcctgtctaagtaccaggacatcatcatcgaacaccagaaggtggtgaagggcaaccagaagagactggagagcctgcgggagctggccggcaaggaaaacctggaataccctagcgtgaccctgccacctcagcctcacaccaaggagggcgttgatgcctacaacgaagtgatcgcccgggtgcgaatgtgggtgaacctgaacctgtggcagaagctgaagctaagcagagatgatgccaagcctctgctgagactgaagggattcccttcctttcctctggtcgagagacaggccaacgaagtggactggtgggacatggtgtgtaacgtgaagaagctgatcaacgagaaaaaggaggatggcaaggtgttttggcagaatctggctggctacaagagacaggaagccctgagaccatacctgagcagcgaggaagatcggaagaagggaaagaaattcgctcggtaccagctgggcgacctgctgctgcacctggaaaagaagcacggcgaggactggggaaaggtgtacgacgaggcctgggagcggattgacaagaaagtggaaggcctgagcaagcacatcaagctggaagaggaacggagaagcgaggacgcccagagcaaggccgccctgaccgactggctgcgggctaaggccagcttcgtgatcgagggcctgaaggaggccgacaaggacgagttctgcagatgcgagctgaagctgcagaagtggtacggggacctgcggggaaagcccttcgccatcgaagccgagaacagcatcctggacatcagcggcttcagcaagcagtacaactgtgccttcatctggcagaaggacggcgtgaagaagctgaacctgtacctgatcatcaactacttcaagggcggcaagctgcggttcaagaagatcaaacctgaagccttcgaagccaacagattctacaccgtgatcaacaaaaagagcggcgagatcgtgcccatggaggtgaacttcaacttcgacgaccccaacctgatcatcctgcctctggcctttggcaagagacagggcagagaattcatctggaacgacctgctgtccctggaaaccggcagcctgaagctggccaacggaagagtgatcgagaagacactgtacaacagaagaacccggcaggatgagcctgccctgttcgtggccctgaccttcgagcggcgggaggtcctggactcctccaatatcaaaccaatgaacctgatcggcgtggcaagaggcgaaaacatccccgccgtgatcgccctgaccgaccccgagggctgcccactgagccggtttaaggatagcctgggaaacccaacccacatcctgagaatcggcgagagctataaggagaagcagcggaccatccaggccaagaaggaggtggagcagcggagagccggcggctacagccggaagtacgccagcaaagccaagaatctggcagacgatatggtgagaaacaccgctagagatctgctgtactacgccgtgacccaggatgccatgctgatcttcgccaacctgagccggggcttcggccggcagggcaagcggaccttcatggccgagagacagtacacacggatggaggactggctgaccgccaagctggcctacgagggcctgagcaagacctacctgtccaagacactggcccagtacacctccaagacatgcagcaactgtgggtttaccatcaccagcgccgactacgacagggtgctggagaagctgaagaagacagcaacaggctggatgaccacaattaacggcaaggagctgaaggtggagggccagattacctactacaacagatacaagagacagaacgtagtcaaggacctgtccgtcgagctggatagactgagcgaagaatctgtgaacaacgacatctcctcctggacaaagggcagaagcggagaagctctgagcctcctgaagaaaagattctcccatagacccgtgcaggagaagttcgtgtgcctgaactgcggcttcgagacacacgcagccgagcaagccgccctgaacatcgccagatcctggctgttcctgcggagccaggagtacaagaaataccagacaaacaagacaaccggcaacaccgataagagagccttcgtcgagacctggcagtccttttaccggaagaagcttaaggaggtgtggaaacctgccgtgcggtctggcggatctggcggaggctccaccagccccaagaaaaagagaaaagtctaagctgccttctgcggggcttgccttctggccatgcccttcttctctcccttgcacctgtacctcttggtctttgaataaagcctgagtaggaaggctagcaaaaaaaaaaaaaaaaaaaaaaaaaaaaaaaaaaaaaaaaaaaaaaaaaaaaaaaaaaaaaaaaaaaaaaaaaaaaaaaa

SEQ ID NO: 9586 - RNA, 8787 nt, synthetic construct
  source 1..8787: mol_type = other RNA
aggaaataagagagaaaagaagagtaagaagaaatataagagccaccatggcccctaagaagaagcgtaaagtgagccggatgaaccacgaccaggagttcgacccccctaaggtgtaccctcccgtccccgccgagaagagaaagcccatccgggtcctgagcctgttcgatggcatcgccaccggtctgctggtgctgaaggacctgggcatccaggtggataggtacattgcctccgaggtgtgcgaggactccatcaccgtgggaatggtgcgtcatcagggcaagatcatgtacgtgggcgacgtgcggagcgtgacacagaagcatatccaggagtggggccctttcgacctggtgatcggcggcagcccttgcaatgacctgagcatcgtgaacccagcccggaagggcctgtacgagggaaccggcagactgttcttcgagttttacagactgctgcacgacgcccggcctaaggaaggcgacgaccggcccttcttttggctgttcgagaatgtggtggccatgggagtcagcgacaagcgggatattagccggttcctggagagcaaccccgtgatgatcgatgccaaggaagtgagcgccgcccaccgggccagatacttctggggcaatctgcctggcatgaacagacccctggccagcaccgtgaacgacaagctggagctgcaggagtgcctggagcacggccggatcgccaagttcagcaaggtgagaaccatcaccacccgaagcaacagcatcaaacaaggcaaggaccagcactttcctgtgttcatgaacgagaaggaggacatcctgtggtgtaccgagatggagagagtgttcgggttcccagtccactacacagatgtcagcaacatgtctagactggccagacagagactgctgggaagaagctggtccgtccctgtgatcagacacctgttcgcccctctgaaggagtacttcgcctgcgtgagcagcggcaacagcaacgccaacagccggggccccagcttctctagcggcctggtgccactgtccctgagagggagccacatgggccccatggagatctacaaaaccgtgagcgcctggaagcggcagcctgtgcgcgtgctgagcctgtttcggaatatcgataaagtcctgaaaagcctgggattcctggagagcggctctggctccggcggtggcaccctgaagtacgtggaggatgtgacaaacgtggtcagacgggatgtggagaagtggggccccttcgatctggtgtacggcagcacccaacccctgggcagctcttgtgaccggtgccctggctggtacatgtttcagttccaccggatcctgcagtacgccctgccgagacaggagtcccagcggccattcttttggattttcatggacaacttgctgctgaccgaggatgaccaggaaactaccactcggttcctgcagaccgaagccgtgaccctgcaggacgtgagaggccgggactaccagaacgccatgcgggtgtggtccaacatccctggactgaaaagcaagcacgcacctctgacccctaaagaagaggagtacctgcaggcccaggtgcggagcagaagcaagctggacgcccctaaggtggatctgctggtgaagaattgcctcctgcccctgagagagtacttcaagtatttcagccagaatagtctgcccctgggaggcagcggcggcggcgcccacgtgagcctgagcttcagggacgtggccatcgacctgagccaggaggagtgggagtgcctggaccccgtgcagagggccctgtacagggacgtgatgctggagaactacagcaacctggtgagcctgggctgcagcagccccaagcccgacgtgatcaccctgctggagcaggagaaggagccctggaccgtgatgagggagggcaccaggagctggtacaccgacctggagagcaagggcggcccaagcagcggcgcccctcctcccagcggcggcaggcggcccaagcagcggcgcccctcctcccagcggcggcagcccagccggctccccaacctctaccgaggagggcacctctgagtccgccacccccgagagcggccctggcacctccaccgagcccagcgagggcagcgcacccggcagccctgccggcagccccacctccacagaggagggaaccagcaccgagcccagcgaaggcagcgccccaggcaccagcaccgagcctagtgagcaggagattaaacggatcaacaagatcagaagaagacttgtgaaagacagcaacaccaagaaggccggcaagacaggccccatgaaaaccctgctggttagagtgatgacacccgatctgagagagcggctggaaaacctgagaaagaagcctgaaaatatcccccagcccatcagcaatacatctagagccaacctgaataagctgctgaccgattacaccgaaatgaagaaggcgatcctgcatgtgtactgggaagagttccagaaggaccctgtgggcctgatgagccgggtggcccagcctgccagcaagaagatcgatcagaacaagctgaaacctgagatggacgagaagggcaacctgaccaccgccggctttgcctgctctcagtgtggccagcccctgttcgtgtacaagctggagcaggtgtctgagaagggcaaggcttacaccaactacttcggacggtgcaatgtggccgagcacgaaaagctgatcctgctggcccagctgaagcccgagaaggatagcgacgaagccgtgacatatagcctgggaaagtttgggcagagggccctggatttctacagcattcatgtgaccaaggagtccacccaccccgtgaagcccctggcccagatcgccggaaacagatacgcctccggacctgtgggaaaggccctgagcgacgcatgtatgggcacaatcgcctccttcctgtctaagtaccaggacatcatcatcgaacaccagaaggtggtgaagggcaaccagaagagactggagagcctgcgggagctggccggcaaggaaaacctggaataccctagcgtgaccctgccacctcagcctcacaccaaggagggcgttgatgcctacaacgaagtgatcgcccgggtgcgaatgtgggtgaacctgaacctgtggcagaagctgaagctaagcagagatgatgccaagcctctgctgagactgaagggattcccttcctttcctctggtcgagagacaggccaacgaagtggactggtgggacatggtgtgtaacgtgaagaagctgatcaacgagaaaaaggaggatggcaaggtgttttggcagaatctggctggctacaagagacaggaagccctgagaccatacctgagcagcgaggaagatcggaagaagggaaagaaattcgctcggtaccagctgggcgacctgctgctgcacctggaaaagaagcacggcgaggactggggaaaggtgtacgacgaggcctgggagcggattgacaagaaagtggaaggcctgagcaagcacatcaagctggaagaggaacggagaagcgaggacgcccagagcaaggccgccctgaccgactggctgcgggctaaggccagcttcgtgatcgagggcctgaaggaggccgacaaggacgagttctgcagatgcgagctgaagctgcagaagtggtacggggacctgcggggaaagcccttcgccatcgaagccgagaacagcatcctggacatcagcggcttcagcaagcagtacaactgtgccttcatctggcagaaggacggcgtgaagaagctgaacctgtacctgatcatcaactacttcaagggcggcaagctgcggttcaagaagatcaaacctgaagccttcgaagccaacagattctacaccgtgatcaacaaaaagagcggcgagatcgtgcccatggaggtgaacttcaacttcgacgaccccaacctgatcatcctgcctctggcctttggcaagagacagggcagagaattcatctggaacgacctgctgtccctggaaaccggcagcctgaagctggccaacggaagagtgatcgagaagacactgtacaacagaagaacccggcaggatgagcctgccctgttcgtggccctgaccttcgagcggcgggaggtcctggactcctccaatatcaaaccaatgaacctgatcggcgtggcaagaggcgaaaacatccccgccgtgatcgccctgaccgaccccgagggctgcccactgagccggtttaaggatagcctgggaaacccaacccacatcctgagaatcggcgagagctataaggagaagcagcggaccatccaggccaagaaggaggtggagcagcggagagccggcggctacagccggaagtacgccagcaaagccaagaatctggcagacgatatggtgagaaacaccgctagagatctgctgtactacgccgtgacccaggatgccatgctgatcttcgccaacctgagccggggcttcggccggcagggcaagcggaccttcatggccgagagacagtacacacggatggaggactggctgaccgccaagctggcctacgagggcctgagcaagacctacctgtccaagacactggcccagtacacctccaagacatgcagcaactgtgggtttaccatcaccagcgccgactacgacagggtgctggagaagctgaagaagacagcaacaggctggatgaccacaattaacggcaaggagctgaaggtggagggccagattacctactacaacagatacaagagacagaacgtagtcaaggacctgtccgtcgagctggatagactgagcgaagaatctgtgaacaacgacatctcctcctggacaaagggcagaagcggagaagctctgagcctcctgaagaaaagattctcccatagacccgtgcaggagaagttcgtgtgcctgaactgcggcttcgagacacacgcagccgagcaagccgccctgaacatcgccagatcctggctgttcctgcggagccaggagtacaagaaataccagacaaacaagacaaccggcaacaccgataagagagccttcgtcgagacctggcagtccttttaccggaagaagcttaaggaggtgtggaaacctgccgtgcggtctggcggatctggcggaggctccaccagccccaagaaaaagagaaaagtctaagctgccttctgcggggcttgccttctggccatgcccttcttctctcccttgcacctgtacctcttggtctttgaataaagcctgagtaggaaggctagcaaaaaaaaaaaaaaaaaaaaaaaaaaaaaaaaaaaaaaaaaaaaaaaaaaaaaaaaaaaaaaaaaaaaaaaaaaaaaaaagcccagccggctccccaacctctaccgaggagggcacctctgagtccgccacccccgagagcggccctggcacctccaccgagcccagcgagggcagcgcacccggcagccctgccggcagccccacctccacagaggagggaaccagcaccgagcccagcgaaggcagcgccccaggcaccagcaccgagcctagtgagcaggagattaaacggatcaacaagatcagaagaagacttgtgaaagacagcaacaccaagaaggccggcaagacaggccccatgaaaaccctgctggttagagtgatgacacccgatctgagagagcggctggaaaacctgagaaagaagcctgaaaatatcccccagcccatcagcaatacatctagagccaacctgaataagctgctgaccgattacaccgaaatgaagaaggcgatcctgcatgtgtactgggaagagttccagaaggaccctgtgggcctgatgagccgggtggcccagcctgccagcaagaagatcgatcagaacaagctgaaacctgagatggacgagaagggcaacctgaccaccgccggctttgcctgctctcagtgtggccagcccctgttcgtgtacaagctggagcaggtgtctgagaagggcaaggcttacaccaactacttcggacggtgcaatgtggccgagcacgaaaagctgatcctgctggcccagctgaagcccgagaaggatagcgacgaagccgtgacatatagcctgggaaagtttgggcagagggccctggatttctacagcattcatgtgaccaaggagtccacccaccccgtgaagcccctggcccagatcgccggaaacagatacgcctccggacctgtgggaaaggccctgagcgacgcatgtatgggcacaatcgcctccttcctgtctaagtaccaggacatcatcatcgaacaccagaaggtggtgaagggcaaccagaagagactggagagcctgcgggagctggccggcaaggaaaacctggaataccctagcgtgaccctgccacctcagcctcacaccaaggagggcgttgatgcctacaacgaagtgatcgcccgggtgcgaatgtgggtgaacctgaacctgtggcagaagctgaagctaagcagagatgatgccaagcctctgctgagactgaagggattcccttcctttcctctggtcgagagacaggccaacgaagtggactggtgggacatggtgtgtaacgtgaagaagctgatcaacgagaaaaaggaggatggcaaggtgttttggcagaatctggctggctacaagagacaggaagccctgagaccatacctgagcagcgaggaagatcggaagaagggaaagaaattcgctcggtaccagctgggcgacctgctgctgcacctggaaaagaagcacggcgaggactggggaaaggtgtacgacgaggcctgggagcggattgacaagaaagtggaaggcctgagcaagcacatcaagctggaagaggaacggagaagcgaggacgcccagagcaaggccgccctgaccgactggctgcgggctaaggccagcttcgtgatcgagggcctgaaggaggccgacaaggacgagttctgcagatgcgagctgaagctgcagaagtggtacggggacctgcggggaaagcccttcgccatcgaagccgagaacagcatcctggacatcagcggcttcagcaagcagtacaactgtgccttcatctggcagaaggacggcgtgaagaagctgaacctgtacctgatcatcaactacttcaagggcggcaagctgcggttcaagaagatcaaacctgaagccttcgaagccaacagattctacaccgtgatcaacaaaaagagcggcgagatcgtgcccatggaggtgaacttcaacttcgacgaccccaacctgatcatcctgcctctggcctttggcaagagacagggcagagaattcatctggaacgacctgctgtccctggaaaccggcagcctgaagctggccaacggaagagtgatcgagaagacactgtacaacagaagaacccggcaggatgagcctgccctgttcgtggccctgaccttcgagcggcgggaggtcctggactcctccaatatcaaaccaatgaacctgatcggcgtggcaagaggcgaaaacatccccgccgtgatcgccctgaccgaccccgagggctgcccactgagccggtttaaggatagcctgggaaacccaacccacatcctgagaatcggcgagagctataaggagaagcagcggaccatccaggccaagaaggaggtggagcagcggagagccggcggctacagccggaagtacgccagcaaagccaagaatctggcagacgatatggtgagaaacaccgctagagatctgctgtactacgccgtgacccaggatgccatgctgatcttcgccaacctgagccggggcttcggccggcagggcaagcggaccttcatggccgagagacagtacacacggatggaggactggctgaccgccaagctggcctacgagggcctgagcaagacctacctgtccaagacactggcccagtacacctccaagacatgcagcaactgtgggtttaccatcaccagcgccgactacgacagggtgctggagaagctgaagaagacagcaacaggctggatgaccacaattaacggcaaggagctgaaggtggagggccagattacctactacaacagatacaagagacagaacgtagtcaaggacctgtccgtcgagctggatagactgagcgaagaatctgtgaacaacgacatctcctcctggacaaagggcagaagcggagaagctctgagcctcctgaagaaaagattctcccatagacccgtgcaggagaagttcgtgtgcctgaactgcggcttcgagacacacgcagccgagcaagccgccctgaacatcgccagatcctggctgttcctgcggagccaggagtacaagaaataccagacaaacaagacaaccggcaacaccgataagagagccttcgtcgagacctggcagtccttttaccggaagaagcttaaggaggtgtggaaacctgccgtgcggtctggcggatctggcggaggctccaccagccccaagaaaaagagaaaagtctaagctgccttctgcggggcttgccttctggccatgcccttcttctctcccttgcacctgtacctcttggtctttgaataaagcctgagtaggaaggctagcaaaaaaaaaaaaaaaaaaaaaaaaaaaaaaaaaaaaaaaaaaaaaaaaaaaaaaaaaaaaaaaaaaaaaaaaaaaaaaaa

SEQ ID NO: 9587 - RNA, 8787 nt, synthetic construct
  source 1..8787: mol_type = other RNA
aggaaataagagagaaaagaagagtaagaagaaatataagagccaccatggcccctaagaagaagcgtaaagtgagccggatgaaccacgaccaggagttcgacccccctaaggtgtaccctcccgtccccgccgagaagagaaagcccatccgggtcctgagcctgttcgatggcatcgccaccggtctgctggtgctgaaggacctgggcatccaggtggataggtacattgcctccgaggtgtgcgaggactccatcaccgtgggaatggtgcgtcatcagggcaagatcatgtacgtgggcgacgtgcggagcgtgacacagaagcatatccaggagtggggccctttcgacctggtgatcggcggcagcccttgcaatgacctgagcatcgtgaacccagcccggaagggcctgtacgagggaaccggcagactgttcttcgagttttacagactgctgcacgacgcccggcctaaggaaggcgacgaccggcccttcttttggctgttcgagaatgtggtggccatgggagtcagcgacaagcgggatattagccggttcctggagagcaaccccgtgatgatcgatgccaaggaagtgagcgccgcccaccgggccagatacttctggggcaatctgcctggcatgaacagacccctggccagcaccgtgaacgacaagctggagctgcaggagtgcctggagcacggccggatcgccaagttcagcaaggtgagaaccatcaccacccgaagcaacagcatcaaacaaggcaaggaccagcactttcctgtgttcatgaacgagaaggaggacatcctgtggtgtaccgagatggagagagtgttcgggttcccagtccactacacagatgtcagcaacatgtctagactggccagacagagactgctgggaagaagctggtccgtccctgtgatcagacacctgttcgcccctctgaaggagtacttcgcctgcgtgagcagcggcaacagcaacgccaacagccggggccccagcttctctagcggcctggtgccactgtccctgagagggagccacatgggccccatggagatctacaaaaccgtgagcgcctggaagcggcagcctgtgcgcgtgctgagcctgtttcggaatatcgataaagtcctgaaaagcctgggattcctggagagcggctctggctccggcggtggcaccctgaagtacgtggaggatgtgacaaacgtggtcagacgggatgtggagaagtggggccccttcgatctggtgtacggcagcacccaacccctgggcagctcttgtgaccggtgccctggctggtacatgtttcagttccaccggatcctgcagtacgccctgccgagacaggagtcccagcggccattcttttggattttcatggacaacttgctgctgaccgaggatgaccaggaaactaccactcggttcctgcagaccgaagccgtgaccctgcaggacgtgagaggccgggactaccagaacgccatgcgggtgtggtccaacatccctggactgaaaagcaagcacgcacctctgacccctaaagaagaggagtacctgcaggcccaggtgcggagcagaagcaagctggacgcccctaaggtggatctgctggtgaagaattgcctcctgcccctgagagagtacttcaagtatttcagccagaatagtctgcccctgggaggcagcggcggcggccaccagggcctgctgaccttcagggacgtggccgtggagttcagcctggaggagtggggcaggctgacccacacccagaggcagctgtacagggacgtgatgctggagaactacggccacctgctgttcctgggcctgatcgtgagcaagcccgacctggtgagcttcctggagcagaagaaggagccctggaacctgaagaggaagaagaccgtggccttccaccccgccatcagcagccacggcggcccaagcagcggcgcccctcctcccagcggcggcaggcggcccaagcagcggcgcccctcctcccagcggcggcagcccagccggctccccaacctctaccgaggagggcacctctgagtccgccacccccgagagcggccctggcacctccaccgagcccagcgagggcagcgcacccggcagccctgccggcagccccacctccacagaggagggaaccagcaccgagcccagcgaaggcagcgccccaggcaccagcaccgagcctagtgagcaggagattaaacggatcaacaagatcagaagaagacttgtgaaagacagcaacaccaagaaggccggcaagacaggccccatgaaaaccctgctggttagagtgatgacacccgatctgagagagcggctggaaaacctgagaaagaagcctgaaaatatcccccagcccatcagcaatacatctagagccaacctgaataagctgctgaccgattacaccgaaatgaagaaggcgatcctgcatgtgtactgggaagagttccagaaggaccctgtgggcctgatgagccgggtggcccagcctgccagcaagaagatcgatcagaacaagctgaaacctgagatggacgagaagggcaacctgaccaccgccggctttgcctgctctcagtgtggccagcccctgttcgtgtacaagctggagcaggtgtctgagaagggcaaggcttacaccaactacttcggacggtgcaatgtggccgagcacgaaaagctgatcctgctggcccagctgaagcccgagaaggatagcgacgaagccgtgacatatagcctgggaaagtttgggcagagggccctggatttctacagcattcatgtgaccaaggagtccacccaccccgtgaagcccctggcccagatcgccggaaacagatacgcctccggacctgtgggaaaggccctgagcgacgcatgtatgggcacaatcgcctccttcctgtctaagtaccaggacatcatcatcgaacaccagaaggtggtgaagggcaaccagaagagactggagagcctgcgggagctggccggcaaggaaaacctggaataccctagcgtgaccctgccacctcagcctcacaccaaggagggcgttgatgcctacaacgaagtgatcgcccgggtgcgaatgtgggtgaacctgaacctgtggcagaagctgaagctaagcagagatgatgccaagcctctgctgagactgaagggattcccttcctttcctctggtcgagagacaggccaacgaagtggactggtgggacatggtgtgtaacgtgaagaagctgatcaacgagaaaaaggaggatggcaaggtgttttggcagaatctggctggctacaagagacaggaagccctgagaccatacctgagcagcgaggaagatcggaagaagggaaagaaattcgctcggtaccagctgggcgacctgctgctgcacctggaaaagaagcacggcgaggactggggaaaggtgtacgacgaggcctgggagcggattgacaagaaagtggaaggcctgagcaagcacatcaagctggaagaggaacggagaagcgaggacgcccagagcaaggccgccctgaccgactggctgcgggctaaggccagcttcgtgatcgagggcctgaaggaggccgacaaggacgagttctgcagatgcgagctgaagctgcagaagtggtacggggacctgcggggaaagcccttcgccatcgaagccgagaacagcatcctggacatcagcggcttcagcaagcagtacaactgtgccttcatctggcagaaggacggcgtgaagaagctgaacctgtacctgatcatcaactacttcaagggcggcaagctgcggttcaagaagatcaaacctgaagccttcgaagccaacagattctacaccgtgatcaacaaaaagagcggcgagatcgtgcccatggaggtgaacttcaacttcgacgaccccaacctgatcatcctgcctctggcctttggcaagagacagggcagagaattcatctggaacgacctgctgtccctggaaaccggcagcctgaagctggccaacggaagagtgatcgagaagacactgtacaacagaagaacccggcaggatgagcctgccctgttcgtggccctgaccttcgagcggcgggaggtcctggactcctccaatatcaaaccaatgaacctgatcggcgtggcaagaggcgaaaacatccccgccgtgatcgccctgaccgaccccgagggctgcccactgagccggtttaaggatagcctgggaaacccaacccacatcctgagaatcggcgagagctataaggagaagcagcggaccatccaggccaagaaggaggtggagcagcggagagccggcggctacagccggaagtacgccagcaaagccaagaatctggcagacgatatggtgagaaacaccgctagagatctgctgtactacgccgtgacccaggatgccatgctgatcttcgccaacctgagccggggcttcggccggcagggcaagcggaccttcatggccgagagacagtacacacggatggaggactggctgaccgccaagctggcctacgagggcctgagcaagacctacctgtccaagacactggcccagtacacctccaagacatgcagcaactgtgggtttaccatcaccagcgccgactacgacagggtgctggagaagctgaagaagacagcaacaggctggatgaccacaattaacggcaaggagctgaaggtggagggccagattacctactacaacagatacaagagacagaacgtagtcaaggacctgtccgtcgagctggatagactgagcgaagaatctgtgaacaacgacatctcctcctggacaaagggcagaagcggagaagctctgagcctcctgaagaaaagattctcccatagacccgtgcaggagaagttcgtgtgcctgaactgcggcttcgagacacacgcagccgagcaagccgccctgaacatcgccagatcctggctgttcctgcggagccaggagtacaagaaataccagacaaacaagacaaccggcaacaccgataagagagccttcgtcgagacctggcagtccttttaccggaagaagcttaaggaggtgtggaaacctgccgtgcggtctggcggatctggcggaggctccaccagccccaagaaaaagagaaaagtctaagctgccttctgcggggcttgccttctggccatgcccttcttctctcccttgcacctgtacctcttggtctttgaataaagcctgagtaggaaggctagcaaaaaaaaaaaaaaaaaaaaaaaaaaaaaaaaaaaaaaaaaaaaaaaaaaaaaaaaaaaaaaaaaaaaaaaaaaaaaaaagcccagccggctccccaacctctaccgaggagggcacctctgagtccgccacccccgagagcggccctggcacctccaccgagcccagcgagggcagcgcacccggcagccctgccggcagccccacctccacagaggagggaaccagcaccgagcccagcgaaggcagcgccccaggcaccagcaccgagcctagtgagcaggagattaaacggatcaacaagatcagaagaagacttgtgaaagacagcaacaccaagaaggccggcaagacaggccccatgaaaaccctgctggttagagtgatgacacccgatctgagagagcggctggaaaacctgagaaagaagcctgaaaatatcccccagcccatcagcaatacatctagagccaacctgaataagctgctgaccgattacaccgaaatgaagaaggcgatcctgcatgtgtactgggaagagttccagaaggaccctgtgggcctgatgagccgggtggcccagcctgccagcaagaagatcgatcagaacaagctgaaacctgagatggacgagaagggcaacctgaccaccgccggctttgcctgctctcagtgtggccagcccctgttcgtgtacaagctggagcaggtgtctgagaagggcaaggcttacaccaactacttcggacggtgcaatgtggccgagcacgaaaagctgatcctgctggcccagctgaagcccgagaaggatagcgacgaagccgtgacatatagcctgggaaagtttgggcagagggccctggatttctacagcattcatgtgaccaaggagtccacccaccccgtgaagcccctggcccagatcgccggaaacagatacgcctccggacctgtgggaaaggccctgagcgacgcatgtatgggcacaatcgcctccttcctgtctaagtaccaggacatcatcatcgaacaccagaaggtggtgaagggcaaccagaagagactggagagcctgcgggagctggccggcaaggaaaacctggaataccctagcgtgaccctgccacctcagcctcacaccaaggagggcgttgatgcctacaacgaagtgatcgcccgggtgcgaatgtgggtgaacctgaacctgtggcagaagctgaagctaagcagagatgatgccaagcctctgctgagactgaagggattcccttcctttcctctggtcgagagacaggccaacgaagtggactggtgggacatggtgtgtaacgtgaagaagctgatcaacgagaaaaaggaggatggcaaggtgttttggcagaatctggctggctacaagagacaggaagccctgagaccatacctgagcagcgaggaagatcggaagaagggaaagaaattcgctcggtaccagctgggcgacctgctgctgcacctggaaaagaagcacggcgaggactggggaaaggtgtacgacgaggcctgggagcggattgacaagaaagtggaaggcctgagcaagcacatcaagctggaagaggaacggagaagcgaggacgcccagagcaaggccgccctgaccgactggctgcgggctaaggccagcttcgtgatcgagggcctgaaggaggccgacaaggacgagttctgcagatgcgagctgaagctgcagaagtggtacggggacctgcggggaaagcccttcgccatcgaagccgagaacagcatcctggacatcagcggcttcagcaagcagtacaactgtgccttcatctggcagaaggacggcgtgaagaagctgaacctgtacctgatcatcaactacttcaagggcggcaagctgcggttcaagaagatcaaacctgaagccttcgaagccaacagattctacaccgtgatcaacaaaaagagcggcgagatcgtgcccatggaggtgaacttcaacttcgacgaccccaacctgatcatcctgcctctggcctttggcaagagacagggcagagaattcatctggaacgacctgctgtccctggaaaccggcagcctgaagctggccaacggaagagtgatcgagaagacactgtacaacagaagaacccggcaggatgagcctgccctgttcgtggccctgaccttcgagcggcgggaggtcctggactcctccaatatcaaaccaatgaacctgatcggcgtggcaagaggcgaaaacatccccgccgtgatcgccctgaccgaccccgagggctgcccactgagccggtttaaggatagcctgggaaacccaacccacatcctgagaatcggcgagagctataaggagaagcagcggaccatccaggccaagaaggaggtggagcagcggagagccggcggctacagccggaagtacgccagcaaagccaagaatctggcagacgatatggtgagaaacaccgctagagatctgctgtactacgccgtgacccaggatgccatgctgatcttcgccaacctgagccggggcttcggccggcagggcaagcggaccttcatggccgagagacagtacacacggatggaggactggctgaccgccaagctggcctacgagggcctgagcaagacctacctgtccaagacactggcccagtacacctccaagacatgcagcaactgtgggtttaccatcaccagcgccgactacgacagggtgctggagaagctgaagaagacagcaacaggctggatgaccacaattaacggcaaggagctgaaggtggagggccagattacctactacaacagatacaagagacagaacgtagtcaaggacctgtccgtcgagctggatagactgagcgaagaatctgtgaacaacgacatctcctcctggacaaagggcagaagcggagaagctctgagcctcctgaagaaaagattctcccatagacccgtgcaggagaagttcgtgtgcctgaactgcggcttcgagacacacgcagccgagcaagccgccctgaacatcgccagatcctggctgttcctgcggagccaggagtacaagaaataccagacaaacaagacaaccggcaacaccgataagagagccttcgtcgagacctggcagtccttttaccggaagaagcttaaggaggtgtggaaacctgccgtgcggtctggcggatctggcggaggctccaccagccccaagaaaaagagaaaagtctaagctgccttctgcggggcttgccttctggccatgcccttcttctctcccttgcacctgtacctcttggtctttgaataaagcctgagtaggaaggctagcaaaaaaaaaaaaaaaaaaaaaaaaaaaaaaaaaaaaaaaaaaaaaaaaaaaaaaaaaaaaaaaaaaaaaaaaaaaaaaaa

SEQ ID NO: 9588 - RNA, 8787 nt, synthetic construct
  source 1..8787: mol_type = other RNA
aggaaataagagagaaaagaagagtaagaagaaatataagagccaccatggcccctaagaagaagcgtaaagtgagccggatgaaccacgaccaggagttcgacccccctaaggtgtaccctcccgtccccgccgagaagagaaagcccatccgggtcctgagcctgttcgatggcatcgccaccggtctgctggtgctgaaggacctgggcatccaggtggataggtacattgcctccgaggtgtgcgaggactccatcaccgtgggaatggtgcgtcatcagggcaagatcatgtacgtgggcgacgtgcggagcgtgacacagaagcatatccaggagtggggccctttcgacctggtgatcggcggcagcccttgcaatgacctgagcatcgtgaacccagcccggaagggcctgtacgagggaaccggcagactgttcttcgagttttacagactgctgcacgacgcccggcctaaggaaggcgacgaccggcccttcttttggctgttcgagaatgtggtggccatgggagtcagcgacaagcgggatattagccggttcctggagagcaaccccgtgatgatcgatgccaaggaagtgagcgccgcccaccgggccagatacttctggggcaatctgcctggcatgaacagacccctggccagcaccgtgaacgacaagctggagctgcaggagtgcctggagcacggccggatcgccaagttcagcaaggtgagaaccatcaccacccgaagcaacagcatcaaacaaggcaaggaccagcactttcctgtgttcatgaacgagaaggaggacatcctgtggtgtaccgagatggagagagtgttcgggttcccagtccactacacagatgtcagcaacatgtctagactggccagacagagactgctgggaagaagctggtccgtccctgtgatcagacacctgttcgcccctctgaaggagtacttcgcctgcgtgagcagcggcaacagcaacgccaacagccggggccccagcttctctagcggcctggtgccactgtccctgagagggagccacatgggccccatggagatctacaaaaccgtgagcgcctggaagcggcagcctgtgcgcgtgctgagcctgtttcggaatatcgataaagtcctgaaaagcctgggattcctggagagcggctctggctccggcggtggcaccctgaagtacgtggaggatgtgacaaacgtggtcagacgggatgtggagaagtggggccccttcgatctggtgtacggcagcacccaacccctgggcagctcttgtgaccggtgccctggctggtacatgtttcagttccaccggatcctgcagtacgccctgccgagacaggagtcccagcggccattcttttggattttcatggacaacttgctgctgaccgaggatgaccaggaaactaccactcggttcctgcagaccgaagccgtgaccctgcaggacgtgagaggccgggactaccagaacgccatgcgggtgtggtccaacatccctggactgaaaagcaagcacgcacctctgacccctaaagaagaggagtacctgcaggcccaggtgcggagcagaagcaagctggacgcccctaaggtggatctgctggtgaagaattgcctcctgcccctgagagagtacttcaagtatttcagccagaatagtctgcccctgggaggcagcggcggcggcagcgtggagatgctgagcttcagggacgtggccatcgacttcagcgccggcgagctggagtgcctggagcccgcccagtgggacctgtacagggacgtgatgctggagaacttcagccacctggtgttcctgggcttcagcttcagcaagcccctgctggtgaggttcctggagaagaaccaggagctgaggaacgtgaagaggaaggccgccaccgtgcccaggggcaagaagccctacaagggcggcccaagcagcggcgcccctcctcccagcggcggcaggcggcccaagcagcggcgcccctcctcccagcggcggcagcccagccggctccccaacctctaccgaggagggcacctctgagtccgccacccccgagagcggccctggcacctccaccgagcccagcgagggcagcgcacccggcagccctgccggcagccccacctccacagaggagggaaccagcaccgagcccagcgaaggcagcgccccaggcaccagcaccgagcctagtgagcaggagattaaacggatcaacaagatcagaagaagacttgtgaaagacagcaacaccaagaaggccggcaagacaggccccatgaaaaccctgctggttagagtgatgacacccgatctgagagagcggctggaaaacctgagaaagaagcctgaaaatatcccccagcccatcagcaatacatctagagccaacctgaataagctgctgaccgattacaccgaaatgaagaaggcgatcctgcatgtgtactgggaagagttccagaaggaccctgtgggcctgatgagccgggtggcccagcctgccagcaagaagatcgatcagaacaagctgaaacctgagatggacgagaagggcaacctgaccaccgccggctttgcctgctctcagtgtggccagcccctgttcgtgtacaagctggagcaggtgtctgagaagggcaaggcttacaccaactacttcggacggtgcaatgtggccgagcacgaaaagctgatcctgctggcccagctgaagcccgagaaggatagcgacgaagccgtgacatatagcctgggaaagtttgggcagagggccctggatttctacagcattcatgtgaccaaggagtccacccaccccgtgaagcccctggcccagatcgccggaaacagatacgcctccggacctgtgggaaaggccctgagcgacgcatgtatgggcacaatcgcctccttcctgtctaagtaccaggacatcatcatcgaacaccagaaggtggtgaagggcaaccagaagagactggagagcctgcgggagctggccggcaaggaaaacctggaataccctagcgtgaccctgccacctcagcctcacaccaaggagggcgttgatgcctacaacgaagtgatcgcccgggtgcgaatgtgggtgaacctgaacctgtggcagaagctgaagctaagcagagatgatgccaagcctctgctgagactgaagggattcccttcctttcctctggtcgagagacaggccaacgaagtggactggtgggacatggtgtgtaacgtgaagaagctgatcaacgagaaaaaggaggatggcaaggtgttttggcagaatctggctggctacaagagacaggaagccctgagaccatacctgagcagcgaggaagatcggaagaagggaaagaaattcgctcggtaccagctgggcgacctgctgctgcacctggaaaagaagcacggcgaggactggggaaaggtgtacgacgaggcctgggagcggattgacaagaaagtggaaggcctgagcaagcacatcaagctggaagaggaacggagaagcgaggacgcccagagcaaggccgccctgaccgactggctgcgggctaaggccagcttcgtgatcgagggcctgaaggaggccgacaaggacgagttctgcagatgcgagctgaagctgcagaagtggtacggggacctgcggggaaagcccttcgccatcgaagccgagaacagcatcctggacatcagcggcttcagcaagcagtacaactgtgccttcatctggcagaaggacggcgtgaagaagctgaacctgtacctgatcatcaactacttcaagggcggcaagctgcggttcaagaagatcaaacctgaagccttcgaagccaacagattctacaccgtgatcaacaaaaagagcggcgagatcgtgcccatggaggtgaacttcaacttcgacgaccccaacctgatcatcctgcctctggcctttggcaagagacagggcagagaattcatctggaacgacctgctgtccctggaaaccggcagcctgaagctggccaacggaagagtgatcgagaagacactgtacaacagaagaacccggcaggatgagcctgccctgttcgtggccctgaccttcgagcggcgggaggtcctggactcctccaatatcaaaccaatgaacctgatcggcgtggcaagaggcgaaaacatccccgccgtgatcgccctgaccgaccccgagggctgcccactgagccggtttaaggatagcctgggaaacccaacccacatcctgagaatcggcgagagctataaggagaagcagcggaccatccaggccaagaaggaggtggagcagcggagagccggcggctacagccggaagtacgccagcaaagccaagaatctggcagacgatatggtgagaaacaccgctagagatctgctgtactacgccgtgacccaggatgccatgctgatcttcgccaacctgagccggggcttcggccggcagggcaagcggaccttcatggccgagagacagtacacacggatggaggactggctgaccgccaagctggcctacgagggcctgagcaagacctacctgtccaagacactggcccagtacacctccaagacatgcagcaactgtgggtttaccatcaccagcgccgactacgacagggtgctggagaagctgaagaagacagcaacaggctggatgaccacaattaacggcaaggagctgaaggtggagggccagattacctactacaacagatacaagagacagaacgtagtcaaggacctgtccgtcgagctggatagactgagcgaagaatctgtgaacaacgacatctcctcctggacaaagggcagaagcggagaagctctgagcctcctgaagaaaagattctcccatagacccgtgcaggagaagttcgtgtgcctgaactgcggcttcgagacacacgcagccgagcaagccgccctgaacatcgccagatcctggctgttcctgcggagccaggagtacaagaaataccagacaaacaagacaaccggcaacaccgataagagagccttcgtcgagacctggcagtccttttaccggaagaagcttaaggaggtgtggaaacctgccgtgcggtctggcggatctggcggaggctccaccagccccaagaaaaagagaaaagtctaagctgccttctgcggggcttgccttctggccatgcccttcttctctcccttgcacctgtacctcttggtctttgaataaagcctgagtaggaaggctagcaaaaaaaaaaaaaaaaaaaaaaaaaaaaaaaaaaaaaaaaaaaaaaaaaaaaaaaaaaaaaaaaaaaaaaaaaaaaaaaagcccagccggctccccaacctctaccgaggagggcacctctgagtccgccacccccgagagcggccctggcacctccaccgagcccagcgagggcagcgcacccggcagccctgccggcagccccacctccacagaggagggaaccagcaccgagcccagcgaaggcagcgccccaggcaccagcaccgagcctagtgagcaggagattaaacggatcaacaagatcagaagaagacttgtgaaagacagcaacaccaagaaggccggcaagacaggccccatgaaaaccctgctggttagagtgatgacacccgatctgagagagcggctggaaaacctgagaaagaagcctgaaaatatcccccagcccatcagcaatacatctagagccaacctgaataagctgctgaccgattacaccgaaatgaagaaggcgatcctgcatgtgtactgggaagagttccagaaggaccctgtgggcctgatgagccgggtggcccagcctgccagcaagaagatcgatcagaacaagctgaaacctgagatggacgagaagggcaacctgaccaccgccggctttgcctgctctcagtgtggccagcccctgttcgtgtacaagctggagcaggtgtctgagaagggcaaggcttacaccaactacttcggacggtgcaatgtggccgagcacgaaaagctgatcctgctggcccagctgaagcccgagaaggatagcgacgaagccgtgacatatagcctgggaaagtttgggcagagggccctggatttctacagcattcatgtgaccaaggagtccacccaccccgtgaagcccctggcccagatcgccggaaacagatacgcctccggacctgtgggaaaggccctgagcgacgcatgtatgggcacaatcgcctccttcctgtctaagtaccaggacatcatcatcgaacaccagaaggtggtgaagggcaaccagaagagactggagagcctgcgggagctggccggcaaggaaaacctggaataccctagcgtgaccctgccacctcagcctcacaccaaggagggcgttgatgcctacaacgaagtgatcgcccgggtgcgaatgtgggtgaacctgaacctgtggcagaagctgaagctaagcagagatgatgccaagcctctgctgagactgaagggattcccttcctttcctctggtcgagagacaggccaacgaagtggactggtgggacatggtgtgtaacgtgaagaagctgatcaacgagaaaaaggaggatggcaaggtgttttggcagaatctggctggctacaagagacaggaagccctgagaccatacctgagcagcgaggaagatcggaagaagggaaagaaattcgctcggtaccagctgggcgacctgctgctgcacctggaaaagaagcacggcgaggactggggaaaggtgtacgacgaggcctgggagcggattgacaagaaagtggaaggcctgagcaagcacatcaagctggaagaggaacggagaagcgaggacgcccagagcaaggccgccctgaccgactggctgcgggctaaggccagcttcgtgatcgagggcctgaaggaggccgacaaggacgagttctgcagatgcgagctgaagctgcagaagtggtacggggacctgcggggaaagcccttcgccatcgaagccgagaacagcatcctggacatcagcggcttcagcaagcagtacaactgtgccttcatctggcagaaggacggcgtgaagaagctgaacctgtacctgatcatcaactacttcaagggcggcaagctgcggttcaagaagatcaaacctgaagccttcgaagccaacagattctacaccgtgatcaacaaaaagagcggcgagatcgtgcccatggaggtgaacttcaacttcgacgaccccaacctgatcatcctgcctctggcctttggcaagagacagggcagagaattcatctggaacgacctgctgtccctggaaaccggcagcctgaagctggccaacggaagagtgatcgagaagacactgtacaacagaagaacccggcaggatgagcctgccctgttcgtggccctgaccttcgagcggcgggaggtcctggactcctccaatatcaaaccaatgaacctgatcggcgtggcaagaggcgaaaacatccccgccgtgatcgccctgaccgaccccgagggctgcccactgagccggtttaaggatagcctgggaaacccaacccacatcctgagaatcggcgagagctataaggagaagcagcggaccatccaggccaagaaggaggtggagcagcggagagccggcggctacagccggaagtacgccagcaaagccaagaatctggcagacgatatggtgagaaacaccgctagagatctgctgtactacgccgtgacccaggatgccatgctgatcttcgccaacctgagccggggcttcggccggcagggcaagcggaccttcatggccgagagacagtacacacggatggaggactggctgaccgccaagctggcctacgagggcctgagcaagacctacctgtccaagacactggcccagtacacctccaagacatgcagcaactgtgggtttaccatcaccagcgccgactacgacagggtgctggagaagctgaagaagacagcaacaggctggatgaccacaattaacggcaaggagctgaaggtggagggccagattacctactacaacagatacaagagacagaacgtagtcaaggacctgtccgtcgagctggatagactgagcgaagaatctgtgaacaacgacatctcctcctggacaaagggcagaagcggagaagctctgagcctcctgaagaaaagattctcccatagacccgtgcaggagaagttcgtgtgcctgaactgcggcttcgagacacacgcagccgagcaagccgccctgaacatcgccagatcctggctgttcctgcggagccaggagtacaagaaataccagacaaacaagacaaccggcaacaccgataagagagccttcgtcgagacctggcagtccttttaccggaagaagcttaaggaggtgtggaaacctgccgtgcggtctggcggatctggcggaggctccaccagccccaagaaaaagagaaaagtctaagctgccttctgcggggcttgccttctggccatgcccttcttctctcccttgcacctgtacctcttggtctttgaataaagcctgagtaggaaggctagcaaaaaaaaaaaaaaaaaaaaaaaaaaaaaaaaaaaaaaaaaaaaaaaaaaaaaaaaaaaaaaaaaaaaaaaaaaaaaaaa

SEQ ID NO: 9589 - RNA, 8787 nt, synthetic construct
  source 1..8787: mol_type = other RNA
aggaaataagagagaaaagaagagtaagaagaaatataagagccaccatggcccctaagaagaagcgtaaagtgagccggatgaaccacgaccaggagttcgacccccctaaggtgtaccctcccgtccccgccgagaagagaaagcccatccgggtcctgagcctgttcgatggcatcgccaccggtctgctggtgctgaaggacctgggcatccaggtggataggtacattgcctccgaggtgtgcgaggactccatcaccgtgggaatggtgcgtcatcagggcaagatcatgtacgtgggcgacgtgcggagcgtgacacagaagcatatccaggagtggggccctttcgacctggtgatcggcggcagcccttgcaatgacctgagcatcgtgaacccagcccggaagggcctgtacgagggaaccggcagactgttcttcgagttttacagactgctgcacgacgcccggcctaaggaaggcgacgaccggcccttcttttggctgttcgagaatgtggtggccatgggagtcagcgacaagcgggatattagccggttcctggagagcaaccccgtgatgatcgatgccaaggaagtgagcgccgcccaccgggccagatacttctggggcaatctgcctggcatgaacagacccctggccagcaccgtgaacgacaagctggagctgcaggagtgcctggagcacggccggatcgccaagttcagcaaggtgagaaccatcaccacccgaagcaacagcatcaaacaaggcaaggaccagcactttcctgtgttcatgaacgagaaggaggacatcctgtggtgtaccgagatggagagagtgttcgggttcccagtccactacacagatgtcagcaacatgtctagactggccagacagagactgctgggaagaagctggtccgtccctgtgatcagacacctgttcgcccctctgaaggagtacttcgcctgcgtgagcagcggcaacagcaacgccaacagccggggccccagcttctctagcggcctggtgccactgtccctgagagggagccacatgggccccatggagatctacaaaaccgtgagcgcctggaagcggcagcctgtgcgcgtgctgagcctgtttcggaatatcgataaagtcctgaaaagcctgggattcctggagagcggctctggctccggcggtggcaccctgaagtacgtggaggatgtgacaaacgtggtcagacgggatgtggagaagtggggccccttcgatctggtgtacggcagcacccaacccctgggcagctcttgtgaccggtgccctggctggtacatgtttcagttccaccggatcctgcagtacgccctgccgagacaggagtcccagcggccattcttttggattttcatggacaacttgctgctgaccgaggatgaccaggaaactaccactcggttcctgcagaccgaagccgtgaccctgcaggacgtgagaggccgggactaccagaacgccatgcgggtgtggtccaacatccctggactgaaaagcaagcacgcacctctgacccctaaagaagaggagtacctgcaggcccaggtgcggagcagaagcaagctggacgcccctaaggtggatctgctggtgaagaattgcctcctgcccctgagagagtacttcaagtatttcagccagaatagtctgcccctgggaggcagcggcggcggcagccaggagagcgtgagcttcgaggacgtggccgtgtacttcacccagaaccagtgggccagcctggacagcgcccagaggaccctgtacagggaggtgatgctggagaactacgccaacgtgaccagcctggccgccttccccttccccaagcccgacctgatcttccagctggagaggggcaaggcccccggcggcctggacccctggacccccatcaggaggaaggtgaggggcgtgtgcggcggcccaagcagcggcgcccctcctcccagcggcggcaggcggcccaagcagcggcgcccctcctcccagcggcggcagcccagccggctccccaacctctaccgaggagggcacctctgagtccgccacccccgagagcggccctggcacctccaccgagcccagcgagggcagcgcacccggcagccctgccggcagccccacctccacagaggagggaaccagcaccgagcccagcgaaggcagcgccccaggcaccagcaccgagcctagtgagcaggagattaaacggatcaacaagatcagaagaagacttgtgaaagacagcaacaccaagaaggccggcaagacaggccccatgaaaaccctgctggttagagtgatgacacccgatctgagagagcggctggaaaacctgagaaagaagcctgaaaatatcccccagcccatcagcaatacatctagagccaacctgaataagctgctgaccgattacaccgaaatgaagaaggcgatcctgcatgtgtactgggaagagttccagaaggaccctgtgggcctgatgagccgggtggcccagcctgccagcaagaagatcgatcagaacaagctgaaacctgagatggacgagaagggcaacctgaccaccgccggctttgcctgctctcagtgtggccagcccctgttcgtgtacaagctggagcaggtgtctgagaagggcaaggcttacaccaactacttcggacggtgcaatgtggccgagcacgaaaagctgatcctgctggcccagctgaagcccgagaaggatagcgacgaagccgtgacatatagcctgggaaagtttgggcagagggccctggatttctacagcattcatgtgaccaaggagtccacccaccccgtgaagcccctggcccagatcgccggaaacagatacgcctccggacctgtgggaaaggccctgagcgacgcatgtatgggcacaatcgcctccttcctgtctaagtaccaggacatcatcatcgaacaccagaaggtggtgaagggcaaccagaagagactggagagcctgcgggagctggccggcaaggaaaacctggaataccctagcgtgaccctgccacctcagcctcacaccaaggagggcgttgatgcctacaacgaagtgatcgcccgggtgcgaatgtgggtgaacctgaacctgtggcagaagctgaagctaagcagagatgatgccaagcctctgctgagactgaagggattcccttcctttcctctggtcgagagacaggccaacgaagtggactggtgggacatggtgtgtaacgtgaagaagctgatcaacgagaaaaaggaggatggcaaggtgttttggcagaatctggctggctacaagagacaggaagccctgagaccatacctgagcagcgaggaagatcggaagaagggaaagaaattcgctcggtaccagctgggcgacctgctgctgcacctggaaaagaagcacggcgaggactggggaaaggtgtacgacgaggcctgggagcggattgacaagaaagtggaaggcctgagcaagcacatcaagctggaagaggaacggagaagcgaggacgcccagagcaaggccgccctgaccgactggctgcgggctaaggccagcttcgtgatcgagggcctgaaggaggccgacaaggacgagttctgcagatgcgagctgaagctgcagaagtggtacggggacctgcggggaaagcccttcgccatcgaagccgagaacagcatcctggacatcagcggcttcagcaagcagtacaactgtgccttcatctggcagaaggacggcgtgaagaagctgaacctgtacctgatcatcaactacttcaagggcggcaagctgcggttcaagaagatcaaacctgaagccttcgaagccaacagattctacaccgtgatcaacaaaaagagcggcgagatcgtgcccatggaggtgaacttcaacttcgacgaccccaacctgatcatcctgcctctggcctttggcaagagacagggcagagaattcatctggaacgacctgctgtccctggaaaccggcagcctgaagctggccaacggaagagtgatcgagaagacactgtacaacagaagaacccggcaggatgagcctgccctgttcgtggccctgaccttcgagcggcgggaggtcctggactcctccaatatcaaaccaatgaacctgatcggcgtggcaagaggcgaaaacatccccgccgtgatcgccctgaccgaccccgagggctgcccactgagccggtttaaggatagcctgggaaacccaacccacatcctgagaatcggcgagagctataaggagaagcagcggaccatccaggccaagaaggaggtggagcagcggagagccggcggctacagccggaagtacgccagcaaagccaagaatctggcagacgatatggtgagaaacaccgctagagatctgctgtactacgccgtgacccaggatgccatgctgatcttcgccaacctgagccggggcttcggccggcagggcaagcggaccttcatggccgagagacagtacacacggatggaggactggctgaccgccaagctggcctacgagggcctgagcaagacctacctgtccaagacactggcccagtacacctccaagacatgcagcaactgtgggtttaccatcaccagcgccgactacgacagggtgctggagaagctgaagaagacagcaacaggctggatgaccacaattaacggcaaggagctgaaggtggagggccagattacctactacaacagatacaagagacagaacgtagtcaaggacctgtccgtcgagctggatagactgagcgaagaatctgtgaacaacgacatctcctcctggacaaagggcagaagcggagaagctctgagcctcctgaagaaaagattctcccatagacccgtgcaggagaagttcgtgtgcctgaactgcggcttcgagacacacgcagccgagcaagccgccctgaacatcgccagatcctggctgttcctgcggagccaggagtacaagaaataccagacaaacaagacaaccggcaacaccgataagagagccttcgtcgagacctggcagtccttttaccggaagaagcttaaggaggtgtggaaacctgccgtgcggtctggcggatctggcggaggctccaccagccccaagaaaaagagaaaagtctaagctgccttctgcggggcttgccttctggccatgcccttcttctctcccttgcacctgtacctcttggtctttgaataaagcctgagtaggaaggctagcaaaaaaaaaaaaaaaaaaaaaaaaaaaaaaaaaaaaaaaaaaaaaaaaaaaaaaaaaaaaaaaaaaaaaaaaaaaaaaaagcccagccggctccccaacctctaccgaggagggcacctctgagtccgccacccccgagagcggccctggcacctccaccgagcccagcgagggcagcgcacccggcagccctgccggcagccccacctccacagaggagggaaccagcaccgagcccagcgaaggcagcgccccaggcaccagcaccgagcctagtgagcaggagattaaacggatcaacaagatcagaagaagacttgtgaaagacagcaacaccaagaaggccggcaagacaggccccatgaaaaccctgctggttagagtgatgacacccgatctgagagagcggctggaaaacctgagaaagaagcctgaaaatatcccccagcccatcagcaatacatctagagccaacctgaataagctgctgaccgattacaccgaaatgaagaaggcgatcctgcatgtgtactgggaagagttccagaaggaccctgtgggcctgatgagccgggtggcccagcctgccagcaagaagatcgatcagaacaagctgaaacctgagatggacgagaagggcaacctgaccaccgccggctttgcctgctctcagtgtggccagcccctgttcgtgtacaagctggagcaggtgtctgagaagggcaaggcttacaccaactacttcggacggtgcaatgtggccgagcacgaaaagctgatcctgctggcccagctgaagcccgagaaggatagcgacgaagccgtgacatatagcctgggaaagtttgggcagagggccctggatttctacagcattcatgtgaccaaggagtccacccaccccgtgaagcccctggcccagatcgccggaaacagatacgcctccggacctgtgggaaaggccctgagcgacgcatgtatgggcacaatcgcctccttcctgtctaagtaccaggacatcatcatcgaacaccagaaggtggtgaagggcaaccagaagagactggagagcctgcgggagctggccggcaaggaaaacctggaataccctagcgtgaccctgccacctcagcctcacaccaaggagggcgttgatgcctacaacgaagtgatcgcccgggtgcgaatgtgggtgaacctgaacctgtggcagaagctgaagctaagcagagatgatgccaagcctctgctgagactgaagggattcccttcctttcctctggtcgagagacaggccaacgaagtggactggtgggacatggtgtgtaacgtgaagaagctgatcaacgagaaaaaggaggatggcaaggtgttttggcagaatctggctggctacaagagacaggaagccctgagaccatacctgagcagcgaggaagatcggaagaagggaaagaaattcgctcggtaccagctgggcgacctgctgctgcacctggaaaagaagcacggcgaggactggggaaaggtgtacgacgaggcctgggagcggattgacaagaaagtggaaggcctgagcaagcacatcaagctggaagaggaacggagaagcgaggacgcccagagcaaggccgccctgaccgactggctgcgggctaaggccagcttcgtgatcgagggcctgaaggaggccgacaaggacgagttctgcagatgcgagctgaagctgcagaagtggtacggggacctgcggggaaagcccttcgccatcgaagccgagaacagcatcctggacatcagcggcttcagcaagcagtacaactgtgccttcatctggcagaaggacggcgtgaagaagctgaacctgtacctgatcatcaactacttcaagggcggcaagctgcggttcaagaagatcaaacctgaagccttcgaagccaacagattctacaccgtgatcaacaaaaagagcggcgagatcgtgcccatggaggtgaacttcaacttcgacgaccccaacctgatcatcctgcctctggcctttggcaagagacagggcagagaattcatctggaacgacctgctgtccctggaaaccggcagcctgaagctggccaacggaagagtgatcgagaagacactgtacaacagaagaacccggcaggatgagcctgccctgttcgtggccctgaccttcgagcggcgggaggtcctggactcctccaatatcaaaccaatgaacctgatcggcgtggcaagaggcgaaaacatccccgccgtgatcgccctgaccgaccccgagggctgcccactgagccggtttaaggatagcctgggaaacccaacccacatcctgagaatcggcgagagctataaggagaagcagcggaccatccaggccaagaaggaggtggagcagcggagagccggcggctacagccggaagtacgccagcaaagccaagaatctggcagacgatatggtgagaaacaccgctagagatctgctgtactacgccgtgacccaggatgccatgctgatcttcgccaacctgagccggggcttcggccggcagggcaagcggaccttcatggccgagagacagtacacacggatggaggactggctgaccgccaagctggcctacgagggcctgagcaagacctacctgtccaagacactggcccagtacacctccaagacatgcagcaactgtgggtttaccatcaccagcgccgactacgacagggtgctggagaagctgaagaagacagcaacaggctggatgaccacaattaacggcaaggagctgaaggtggagggccagattacctactacaacagatacaagagacagaacgtagtcaaggacctgtccgtcgagctggatagactgagcgaagaatctgtgaacaacgacatctcctcctggacaaagggcagaagcggagaagctctgagcctcctgaagaaaagattctcccatagacccgtgcaggagaagttcgtgtgcctgaactgcggcttcgagacacacgcagccgagcaagccgccctgaacatcgccagatcctggctgttcctgcggagccaggagtacaagaaataccagacaaacaagacaaccggcaacaccgataagagagccttcgtcgagacctggcagtccttttaccggaagaagcttaaggaggtgtggaaacctgccgtgcggtctggcggatctggcggaggctccaccagccccaagaaaaagagaaaagtctaagctgccttctgcggggcttgccttctggccatgcccttcttctctcccttgcacctgtacctcttggtctttgaataaagcctgagtaggaaggctagcaaaaaaaaaaaaaaaaaaaaaaaaaaaaaaaaaaaaaaaaaaaaaaaaaaaaaaaaaaaaaaaaaaaaaaaaaaaaaaaa

SEQ ID NO: 9590 - RNA, 8787 nt, synthetic construct
  source 1..8787: mol_type = other RNA
aggaaataagagagaaaagaagagtaagaagaaatataagagccaccatggcccctaagaagaagcgtaaagtgagccggatgaaccacgaccaggagttcgacccccctaaggtgtaccctcccgtccccgccgagaagagaaagcccatccgggtcctgagcctgttcgatggcatcgccaccggtctgctggtgctgaaggacctgggcatccaggtggataggtacattgcctccgaggtgtgcgaggactccatcaccgtgggaatggtgcgtcatcagggcaagatcatgtacgtgggcgacgtgcggagcgtgacacagaagcatatccaggagtggggccctttcgacctggtgatcggcggcagcccttgcaatgacctgagcatcgtgaacccagcccggaagggcctgtacgagggaaccggcagactgttcttcgagttttacagactgctgcacgacgcccggcctaaggaaggcgacgaccggcccttcttttggctgttcgagaatgtggtggccatgggagtcagcgacaagcgggatattagccggttcctggagagcaaccccgtgatgatcgatgccaaggaagtgagcgccgcccaccgggccagatacttctggggcaatctgcctggcatgaacagacccctggccagcaccgtgaacgacaagctggagctgcaggagtgcctggagcacggccggatcgccaagttcagcaaggtgagaaccatcaccacccgaagcaacagcatcaaacaaggcaaggaccagcactttcctgtgttcatgaacgagaaggaggacatcctgtggtgtaccgagatggagagagtgttcgggttcccagtccactacacagatgtcagcaacatgtctagactggccagacagagactgctgggaagaagctggtccgtccctgtgatcagacacctgttcgcccctctgaaggagtacttcgcctgcgtgagcagcggcaacagcaacgccaacagccggggccccagcttctctagcggcctggtgccactgtccctgagagggagccacatgggccccatggagatctacaaaaccgtgagcgcctggaagcggcagcctgtgcgcgtgctgagcctgtttcggaatatcgataaagtcctgaaaagcctgggattcctggagagcggctctggctccggcggtggcaccctgaagtacgtggaggatgtgacaaacgtggtcagacgggatgtggagaagtggggccccttcgatctggtgtacggcagcacccaacccctgggcagctcttgtgaccggtgccctggctggtacatgtttcagttccaccggatcctgcagtacgccctgccgagacaggagtcccagcggccattcttttggattttcatggacaacttgctgctgaccgaggatgaccaggaaactaccactcggttcctgcagaccgaagccgtgaccctgcaggacgtgagaggccgggactaccagaacgccatgcgggtgtggtccaacatccctggactgaaaagcaagcacgcacctctgacccctaaagaagaggagtacctgcaggcccaggtgcggagcagaagcaagctggacgcccctaaggtggatctgctggtgaagaattgcctcctgcccctgagagagtacttcaagtatttcagccagaatagtctgcccctgggaggcagcggcggcggcgcccaggagagcgtgatgttcagcgacgtgagcatcgacttcagccaggaggagtgggagtacctgaacgacgaccagagggacctgtacagggaggtgatgctggagaactacagcaacctggtgagcatggccggccacagcatcagcaagcccgacgtgatcagcttcctggagcagggcaaggagccctggctggtggacagggagctgaccagggaccagtggcccgtgctggagagcggcggcccaagcagcggcgcccctcctcccagcggcggcaggcggcccaagcagcggcgcccctcctcccagcggcggcagcccagccggctccccaacctctaccgaggagggcacctctgagtccgccacccccgagagcggccctggcacctccaccgagcccagcgagggcagcgcacccggcagccctgccggcagccccacctccacagaggagggaaccagcaccgagcccagcgaaggcagcgccccaggcaccagcaccgagcctagtgagcaggagattaaacggatcaacaagatcagaagaagacttgtgaaagacagcaacaccaagaaggccggcaagacaggccccatgaaaaccctgctggttagagtgatgacacccgatctgagagagcggctggaaaacctgagaaagaagcctgaaaatatcccccagcccatcagcaatacatctagagccaacctgaataagctgctgaccgattacaccgaaatgaagaaggcgatcctgcatgtgtactgggaagagttccagaaggaccctgtgggcctgatgagccgggtggcccagcctgccagcaagaagatcgatcagaacaagctgaaacctgagatggacgagaagggcaacctgaccaccgccggctttgcctgctctcagtgtggccagcccctgttcgtgtacaagctggagcaggtgtctgagaagggcaaggcttacaccaactacttcggacggtgcaatgtggccgagcacgaaaagctgatcctgctggcccagctgaagcccgagaaggatagcgacgaagccgtgacatatagcctgggaaagtttgggcagagggccctggatttctacagcattcatgtgaccaaggagtccacccaccccgtgaagcccctggcccagatcgccggaaacagatacgcctccggacctgtgggaaaggccctgagcgacgcatgtatgggcacaatcgcctccttcctgtctaagtaccaggacatcatcatcgaacaccagaaggtggtgaagggcaaccagaagagactggagagcctgcgggagctggccggcaaggaaaacctggaataccctagcgtgaccctgccacctcagcctcacaccaaggagggcgttgatgcctacaacgaagtgatcgcccgggtgcgaatgtgggtgaacctgaacctgtggcagaagctgaagctaagcagagatgatgccaagcctctgctgagactgaagggattcccttcctttcctctggtcgagagacaggccaacgaagtggactggtgggacatggtgtgtaacgtgaagaagctgatcaacgagaaaaaggaggatggcaaggtgttttggcagaatctggctggctacaagagacaggaagccctgagaccatacctgagcagcgaggaagatcggaagaagggaaagaaattcgctcggtaccagctgggcgacctgctgctgcacctggaaaagaagcacggcgaggactggggaaaggtgtacgacgaggcctgggagcggattgacaagaaagtggaaggcctgagcaagcacatcaagctggaagaggaacggagaagcgaggacgcccagagcaaggccgccctgaccgactggctgcgggctaaggccagcttcgtgatcgagggcctgaaggaggccgacaaggacgagttctgcagatgcgagctgaagctgcagaagtggtacggggacctgcggggaaagcccttcgccatcgaagccgagaacagcatcctggacatcagcggcttcagcaagcagtacaactgtgccttcatctggcagaaggacggcgtgaagaagctgaacctgtacctgatcatcaactacttcaagggcggcaagctgcggttcaagaagatcaaacctgaagccttcgaagccaacagattctacaccgtgatcaacaaaaagagcggcgagatcgtgcccatggaggtgaacttcaacttcgacgaccccaacctgatcatcctgcctctggcctttggcaagagacagggcagagaattcatctggaacgacctgctgtccctggaaaccggcagcctgaagctggccaacggaagagtgatcgagaagacactgtacaacagaagaacccggcaggatgagcctgccctgttcgtggccctgaccttcgagcggcgggaggtcctggactcctccaatatcaaaccaatgaacctgatcggcgtggcaagaggcgaaaacatccccgccgtgatcgccctgaccgaccccgagggctgcccactgagccggtttaaggatagcctgggaaacccaacccacatcctgagaatcggcgagagctataaggagaagcagcggaccatccaggccaagaaggaggtggagcagcggagagccggcggctacagccggaagtacgccagcaaagccaagaatctggcagacgatatggtgagaaacaccgctagagatctgctgtactacgccgtgacccaggatgccatgctgatcttcgccaacctgagccggggcttcggccggcagggcaagcggaccttcatggccgagagacagtacacacggatggaggactggctgaccgccaagctggcctacgagggcctgagcaagacctacctgtccaagacactggcccagtacacctccaagacatgcagcaactgtgggtttaccatcaccagcgccgactacgacagggtgctggagaagctgaagaagacagcaacaggctggatgaccacaattaacggcaaggagctgaaggtggagggccagattacctactacaacagatacaagagacagaacgtagtcaaggacctgtccgtcgagctggatagactgagcgaagaatctgtgaacaacgacatctcctcctggacaaagggcagaagcggagaagctctgagcctcctgaagaaaagattctcccatagacccgtgcaggagaagttcgtgtgcctgaactgcggcttcgagacacacgcagccgagcaagccgccctgaacatcgccagatcctggctgttcctgcggagccaggagtacaagaaataccagacaaacaagacaaccggcaacaccgataagagagccttcgtcgagacctggcagtccttttaccggaagaagcttaaggaggtgtggaaacctgccgtgcggtctggcggatctggcggaggctccaccagccccaagaaaaagagaaaagtctaagctgccttctgcggggcttgccttctggccatgcccttcttctctcccttgcacctgtacctcttggtctttgaataaagcctgagtaggaaggctagcaaaaaaaaaaaaaaaaaaaaaaaaaaaaaaaaaaaaaaaaaaaaaaaaaaaaaaaaaaaaaaaaaaaaaaaaaaaaaaaagcccagccggctccccaacctctaccgaggagggcacctctgagtccgccacccccgagagcggccctggcacctccaccgagcccagcgagggcagcgcacccggcagccctgccggcagccccacctccacagaggagggaaccagcaccgagcccagcgaaggcagcgccccaggcaccagcaccgagcctagtgagcaggagattaaacggatcaacaagatcagaagaagacttgtgaaagacagcaacaccaagaaggccggcaagacaggccccatgaaaaccctgctggttagagtgatgacacccgatctgagagagcggctggaaaacctgagaaagaagcctgaaaatatcccccagcccatcagcaatacatctagagccaacctgaataagctgctgaccgattacaccgaaatgaagaaggcgatcctgcatgtgtactgggaagagttccagaaggaccctgtgggcctgatgagccgggtggcccagcctgccagcaagaagatcgatcagaacaagctgaaacctgagatggacgagaagggcaacctgaccaccgccggctttgcctgctctcagtgtggccagcccctgttcgtgtacaagctggagcaggtgtctgagaagggcaaggcttacaccaactacttcggacggtgcaatgtggccgagcacgaaaagctgatcctgctggcccagctgaagcccgagaaggatagcgacgaagccgtgacatatagcctgggaaagtttgggcagagggccctggatttctacagcattcatgtgaccaaggagtccacccaccccgtgaagcccctggcccagatcgccggaaacagatacgcctccggacctgtgggaaaggccctgagcgacgcatgtatgggcacaatcgcctccttcctgtctaagtaccaggacatcatcatcgaacaccagaaggtggtgaagggcaaccagaagagactggagagcctgcgggagctggccggcaaggaaaacctggaataccctagcgtgaccctgccacctcagcctcacaccaaggagggcgttgatgcctacaacgaagtgatcgcccgggtgcgaatgtgggtgaacctgaacctgtggcagaagctgaagctaagcagagatgatgccaagcctctgctgagactgaagggattcccttcctttcctctggtcgagagacaggccaacgaagtggactggtgggacatggtgtgtaacgtgaagaagctgatcaacgagaaaaaggaggatggcaaggtgttttggcagaatctggctggctacaagagacaggaagccctgagaccatacctgagcagcgaggaagatcggaagaagggaaagaaattcgctcggtaccagctgggcgacctgctgctgcacctggaaaagaagcacggcgaggactggggaaaggtgtacgacgaggcctgggagcggattgacaagaaagtggaaggcctgagcaagcacatcaagctggaagaggaacggagaagcgaggacgcccagagcaaggccgccctgaccgactggctgcgggctaaggccagcttcgtgatcgagggcctgaaggaggccgacaaggacgagttctgcagatgcgagctgaagctgcagaagtggtacggggacctgcggggaaagcccttcgccatcgaagccgagaacagcatcctggacatcagcggcttcagcaagcagtacaactgtgccttcatctggcagaaggacggcgtgaagaagctgaacctgtacctgatcatcaactacttcaagggcggcaagctgcggttcaagaagatcaaacctgaagccttcgaagccaacagattctacaccgtgatcaacaaaaagagcggcgagatcgtgcccatggaggtgaacttcaacttcgacgaccccaacctgatcatcctgcctctggcctttggcaagagacagggcagagaattcatctggaacgacctgctgtccctggaaaccggcagcctgaagctggccaacggaagagtgatcgagaagacactgtacaacagaagaacccggcaggatgagcctgccctgttcgtggccctgaccttcgagcggcgggaggtcctggactcctccaatatcaaaccaatgaacctgatcggcgtggcaagaggcgaaaacatccccgccgtgatcgccctgaccgaccccgagggctgcccactgagccggtttaaggatagcctgggaaacccaacccacatcctgagaatcggcgagagctataaggagaagcagcggaccatccaggccaagaaggaggtggagcagcggagagccggcggctacagccggaagtacgccagcaaagccaagaatctggcagacgatatggtgagaaacaccgctagagatctgctgtactacgccgtgacccaggatgccatgctgatcttcgccaacctgagccggggcttcggccggcagggcaagcggaccttcatggccgagagacagtacacacggatggaggactggctgaccgccaagctggcctacgagggcctgagcaagacctacctgtccaagacactggcccagtacacctccaagacatgcagcaactgtgggtttaccatcaccagcgccgactacgacagggtgctggagaagctgaagaagacagcaacaggctggatgaccacaattaacggcaaggagctgaaggtggagggccagattacctactacaacagatacaagagacagaacgtagtcaaggacctgtccgtcgagctggatagactgagcgaagaatctgtgaacaacgacatctcctcctggacaaagggcagaagcggagaagctctgagcctcctgaagaaaagattctcccatagacccgtgcaggagaagttcgtgtgcctgaactgcggcttcgagacacacgcagccgagcaagccgccctgaacatcgccagatcctggctgttcctgcggagccaggagtacaagaaataccagacaaacaagacaaccggcaacaccgataagagagccttcgtcgagacctggcagtccttttaccggaagaagcttaaggaggtgtggaaacctgccgtgcggtctggcggatctggcggaggctccaccagccccaagaaaaagagaaaagtctaagctgccttctgcggggcttgccttctggccatgcccttcttctctcccttgcacctgtacctcttggtctttgaataaagcctgagtaggaaggctagcaaaaaaaaaaaaaaaaaaaaaaaaaaaaaaaaaaaaaaaaaaaaaaaaaaaaaaaaaaaaaaaaaaaaaaaaaaaaaaaa

SEQ ID NO: 9591 - RNA, 8787 nt, synthetic construct
  source 1..8787: mol_type = other RNA
aggaaataagagagaaaagaagagtaagaagaaatataagagccaccatggcccctaagaagaagcgtaaagtgagccggatgaaccacgaccaggagttcgacccccctaaggtgtaccctcccgtccccgccgagaagagaaagcccatccgggtcctgagcctgttcgatggcatcgccaccggtctgctggtgctgaaggacctgggcatccaggtggataggtacattgcctccgaggtgtgcgaggactccatcaccgtgggaatggtgcgtcatcagggcaagatcatgtacgtgggcgacgtgcggagcgtgacacagaagcatatccaggagtggggccctttcgacctggtgatcggcggcagcccttgcaatgacctgagcatcgtgaacccagcccggaagggcctgtacgagggaaccggcagactgttcttcgagttttacagactgctgcacgacgcccggcctaaggaaggcgacgaccggcccttcttttggctgttcgagaatgtggtggccatgggagtcagcgacaagcgggatattagccggttcctggagagcaaccccgtgatgatcgatgccaaggaagtgagcgccgcccaccgggccagatacttctggggcaatctgcctggcatgaacagacccctggccagcaccgtgaacgacaagctggagctgcaggagtgcctggagcacggccggatcgccaagttcagcaaggtgagaaccatcaccacccgaagcaacagcatcaaacaaggcaaggaccagcactttcctgtgttcatgaacgagaaggaggacatcctgtggtgtaccgagatggagagagtgttcgggttcccagtccactacacagatgtcagcaacatgtctagactggccagacagagactgctgggaagaagctggtccgtccctgtgatcagacacctgttcgcccctctgaaggagtacttcgcctgcgtgagcagcggcaacagcaacgccaacagccggggccccagcttctctagcggcctggtgccactgtccctgagagggagccacatgggccccatggagatctacaaaaccgtgagcgcctggaagcggcagcctgtgcgcgtgctgagcctgtttcggaatatcgataaagtcctgaaaagcctgggattcctggagagcggctctggctccggcggtggcaccctgaagtacgtggaggatgtgacaaacgtggtcagacgggatgtggagaagtggggccccttcgatctggtgtacggcagcacccaacccctgggcagctcttgtgaccggtgccctggctggtacatgtttcagttccaccggatcctgcagtacgccctgccgagacaggagtcccagcggccattcttttggattttcatggacaacttgctgctgaccgaggatgaccaggaaactaccactcggttcctgcagaccgaagccgtgaccctgcaggacgtgagaggccgggactaccagaacgccatgcgggtgtggtccaacatccctggactgaaaagcaagcacgcacctctgacccctaaagaagaggagtacctgcaggcccaggtgcggagcagaagcaagctggacgcccctaaggtggatctgctggtgaagaattgcctcctgcccctgagagagtacttcaagtatttcagccagaatagtctgcccctgggaggcagcggcggcggcagcaaggtgcccgtgaccttcggcgacctggccatctacttcagccaggaggagtgggagtggctgagccccatccagaaggacctgtacgaggacgtgatgctggagaactaccagaacctggtgagcctgggcctgagcttcaggaggcccaacgtgatcaccctgctggagaagggcaaggccccctgggtggtggagcccgtgaggaagaggaggggcctggacagcggcttcaagtgcggcggcccaagcagcggcgcccctcctcccagcggcggcaggcggcccaagcagcggcgcccctcctcccagcggcggcagcccagccggctccccaacctctaccgaggagggcacctctgagtccgccacccccgagagcggccctggcacctccaccgagcccagcgagggcagcgcacccggcagccctgccggcagccccacctccacagaggagggaaccagcaccgagcccagcgaaggcagcgccccaggcaccagcaccgagcctagtgagcaggagattaaacggatcaacaagatcagaagaagacttgtgaaagacagcaacaccaagaaggccggcaagacaggccccatgaaaaccctgctggttagagtgatgacacccgatctgagagagcggctggaaaacctgagaaagaagcctgaaaatatcccccagcccatcagcaatacatctagagccaacctgaataagctgctgaccgattacaccgaaatgaagaaggcgatcctgcatgtgtactgggaagagttccagaaggaccctgtgggcctgatgagccgggtggcccagcctgccagcaagaagatcgatcagaacaagctgaaacctgagatggacgagaagggcaacctgaccaccgccggctttgcctgctctcagtgtggccagcccctgttcgtgtacaagctggagcaggtgtctgagaagggcaaggcttacaccaactacttcggacggtgcaatgtggccgagcacgaaaagctgatcctgctggcccagctgaagcccgagaaggatagcgacgaagccgtgacatatagcctgggaaagtttgggcagagggccctggatttctacagcattcatgtgaccaaggagtccacccaccccgtgaagcccctggcccagatcgccggaaacagatacgcctccggacctgtgggaaaggccctgagcgacgcatgtatgggcacaatcgcctccttcctgtctaagtaccaggacatcatcatcgaacaccagaaggtggtgaagggcaaccagaagagactggagagcctgcgggagctggccggcaaggaaaacctggaataccctagcgtgaccctgccacctcagcctcacaccaaggagggcgttgatgcctacaacgaagtgatcgcccgggtgcgaatgtgggtgaacctgaacctgtggcagaagctgaagctaagcagagatgatgccaagcctctgctgagactgaagggattcccttcctttcctctggtcgagagacaggccaacgaagtggactggtgggacatggtgtgtaacgtgaagaagctgatcaacgagaaaaaggaggatggcaaggtgttttggcagaatctggctggctacaagagacaggaagccctgagaccatacctgagcagcgaggaagatcggaagaagggaaagaaattcgctcggtaccagctgggcgacctgctgctgcacctggaaaagaagcacggcgaggactggggaaaggtgtacgacgaggcctgggagcggattgacaagaaagtggaaggcctgagcaagcacatcaagctggaagaggaacggagaagcgaggacgcccagagcaaggccgccctgaccgactggctgcgggctaaggccagcttcgtgatcgagggcctgaaggaggccgacaaggacgagttctgcagatgcgagctgaagctgcagaagtggtacggggacctgcggggaaagcccttcgccatcgaagccgagaacagcatcctggacatcagcggcttcagcaagcagtacaactgtgccttcatctggcagaaggacggcgtgaagaagctgaacctgtacctgatcatcaactacttcaagggcggcaagctgcggttcaagaagatcaaacctgaagccttcgaagccaacagattctacaccgtgatcaacaaaaagagcggcgagatcgtgcccatggaggtgaacttcaacttcgacgaccccaacctgatcatcctgcctctggcctttggcaagagacagggcagagaattcatctggaacgacctgctgtccctggaaaccggcagcctgaagctggccaacggaagagtgatcgagaagacactgtacaacagaagaacccggcaggatgagcctgccctgttcgtggccctgaccttcgagcggcgggaggtcctggactcctccaatatcaaaccaatgaacctgatcggcgtggcaagaggcgaaaacatccccgccgtgatcgccctgaccgaccccgagggctgcccactgagccggtttaaggatagcctgggaaacccaacccacatcctgagaatcggcgagagctataaggagaagcagcggaccatccaggccaagaaggaggtggagcagcggagagccggcggctacagccggaagtacgccagcaaagccaagaatctggcagacgatatggtgagaaacaccgctagagatctgctgtactacgccgtgacccaggatgccatgctgatcttcgccaacctgagccggggcttcggccggcagggcaagcggaccttcatggccgagagacagtacacacggatggaggactggctgaccgccaagctggcctacgagggcctgagcaagacctacctgtccaagacactggcccagtacacctccaagacatgcagcaactgtgggtttaccatcaccagcgccgactacgacagggtgctggagaagctgaagaagacagcaacaggctggatgaccacaattaacggcaaggagctgaaggtggagggccagattacctactacaacagatacaagagacagaacgtagtcaaggacctgtccgtcgagctggatagactgagcgaagaatctgtgaacaacgacatctcctcctggacaaagggcagaagcggagaagctctgagcctcctgaagaaaagattctcccatagacccgtgcaggagaagttcgtgtgcctgaactgcggcttcgagacacacgcagccgagcaagccgccctgaacatcgccagatcctggctgttcctgcggagccaggagtacaagaaataccagacaaacaagacaaccggcaacaccgataagagagccttcgtcgagacctggcagtccttttaccggaagaagcttaaggaggtgtggaaacctgccgtgcggtctggcggatctggcggaggctccaccagccccaagaaaaagagaaaagtctaagctgccttctgcggggcttgccttctggccatgcccttcttctctcccttgcacctgtacctcttggtctttgaataaagcctgagtaggaaggctagcaaaaaaaaaaaaaaaaaaaaaaaaaaaaaaaaaaaaaaaaaaaaaaaaaaaaaaaaaaaaaaaaaaaaaaaaaaaaaaaagcccagccggctccccaacctctaccgaggagggcacctctgagtccgccacccccgagagcggccctggcacctccaccgagcccagcgagggcagcgcacccggcagccctgccggcagccccacctccacagaggagggaaccagcaccgagcccagcgaaggcagcgccccaggcaccagcaccgagcctagtgagcaggagattaaacggatcaacaagatcagaagaagacttgtgaaagacagcaacaccaagaaggccggcaagacaggccccatgaaaaccctgctggttagagtgatgacacccgatctgagagagcggctggaaaacctgagaaagaagcctgaaaatatcccccagcccatcagcaatacatctagagccaacctgaataagctgctgaccgattacaccgaaatgaagaaggcgatcctgcatgtgtactgggaagagttccagaaggaccctgtgggcctgatgagccgggtggcccagcctgccagcaagaagatcgatcagaacaagctgaaacctgagatggacgagaagggcaacctgaccaccgccggctttgcctgctctcagtgtggccagcccctgttcgtgtacaagctggagcaggtgtctgagaagggcaaggcttacaccaactacttcggacggtgcaatgtggccgagcacgaaaagctgatcctgctggcccagctgaagcccgagaaggatagcgacgaagccgtgacatatagcctgggaaagtttgggcagagggccctggatttctacagcattcatgtgaccaaggagtccacccaccccgtgaagcccctggcccagatcgccggaaacagatacgcctccggacctgtgggaaaggccctgagcgacgcatgtatgggcacaatcgcctccttcctgtctaagtaccaggacatcatcatcgaacaccagaaggtggtgaagggcaaccagaagagactggagagcctgcgggagctggccggcaaggaaaacctggaataccctagcgtgaccctgccacctcagcctcacaccaaggagggcgttgatgcctacaacgaagtgatcgcccgggtgcgaatgtgggtgaacctgaacctgtggcagaagctgaagctaagcagagatgatgccaagcctctgctgagactgaagggattcccttcctttcctctggtcgagagacaggccaacgaagtggactggtgggacatggtgtgtaacgtgaagaagctgatcaacgagaaaaaggaggatggcaaggtgttttggcagaatctggctggctacaagagacaggaagccctgagaccatacctgagcagcgaggaagatcggaagaagggaaagaaattcgctcggtaccagctgggcgacctgctgctgcacctggaaaagaagcacggcgaggactggggaaaggtgtacgacgaggcctgggagcggattgacaagaaagtggaaggcctgagcaagcacatcaagctggaagaggaacggagaagcgaggacgcccagagcaaggccgccctgaccgactggctgcgggctaaggccagcttcgtgatcgagggcctgaaggaggccgacaaggacgagttctgcagatgcgagctgaagctgcagaagtggtacggggacctgcggggaaagcccttcgccatcgaagccgagaacagcatcctggacatcagcggcttcagcaagcagtacaactgtgccttcatctggcagaaggacggcgtgaagaagctgaacctgtacctgatcatcaactacttcaagggcggcaagctgcggttcaagaagatcaaacctgaagccttcgaagccaacagattctacaccgtgatcaacaaaaagagcggcgagatcgtgcccatggaggtgaacttcaacttcgacgaccccaacctgatcatcctgcctctggcctttggcaagagacagggcagagaattcatctggaacgacctgctgtccctggaaaccggcagcctgaagctggccaacggaagagtgatcgagaagacactgtacaacagaagaacccggcaggatgagcctgccctgttcgtggccctgaccttcgagcggcgggaggtcctggactcctccaatatcaaaccaatgaacctgatcggcgtggcaagaggcgaaaacatccccgccgtgatcgccctgaccgaccccgagggctgcccactgagccggtttaaggatagcctgggaaacccaacccacatcctgagaatcggcgagagctataaggagaagcagcggaccatccaggccaagaaggaggtggagcagcggagagccggcggctacagccggaagtacgccagcaaagccaagaatctggcagacgatatggtgagaaacaccgctagagatctgctgtactacgccgtgacccaggatgccatgctgatcttcgccaacctgagccggggcttcggccggcagggcaagcggaccttcatggccgagagacagtacacacggatggaggactggctgaccgccaagctggcctacgagggcctgagcaagacctacctgtccaagacactggcccagtacacctccaagacatgcagcaactgtgggtttaccatcaccagcgccgactacgacagggtgctggagaagctgaagaagacagcaacaggctggatgaccacaattaacggcaaggagctgaaggtggagggccagattacctactacaacagatacaagagacagaacgtagtcaaggacctgtccgtcgagctggatagactgagcgaagaatctgtgaacaacgacatctcctcctggacaaagggcagaagcggagaagctctgagcctcctgaagaaaagattctcccatagacccgtgcaggagaagttcgtgtgcctgaactgcggcttcgagacacacgcagccgagcaagccgccctgaacatcgccagatcctggctgttcctgcggagccaggagtacaagaaataccagacaaacaagacaaccggcaacaccgataagagagccttcgtcgagacctggcagtccttttaccggaagaagcttaaggaggtgtggaaacctgccgtgcggtctggcggatctggcggaggctccaccagccccaagaaaaagagaaaagtctaagctgccttctgcggggcttgccttctggccatgcccttcttctctcccttgcacctgtacctcttggtctttgaataaagcctgagtaggaaggctagcaaaaaaaaaaaaaaaaaaaaaaaaaaaaaaaaaaaaaaaaaaaaaaaaaaaaaaaaaaaaaaaaaaaaaaaaaaaaaaaa

SEQ ID NO: 9592 - RNA, 8787 nt, synthetic construct
  source 1..8787: mol_type = other RNA
aggaaataagagagaaaagaagagtaagaagaaatataagagccaccatggcccctaagaagaagcgtaaagtgagccggatgaaccacgaccaggagttcgacccccctaaggtgtaccctcccgtccccgccgagaagagaaagcccatccgggtcctgagcctgttcgatggcatcgccaccggtctgctggtgctgaaggacctgggcatccaggtggataggtacattgcctccgaggtgtgcgaggactccatcaccgtgggaatggtgcgtcatcagggcaagatcatgtacgtgggcgacgtgcggagcgtgacacagaagcatatccaggagtggggccctttcgacctggtgatcggcggcagcccttgcaatgacctgagcatcgtgaacccagcccggaagggcctgtacgagggaaccggcagactgttcttcgagttttacagactgctgcacgacgcccggcctaaggaaggcgacgaccggcccttcttttggctgttcgagaatgtggtggccatgggagtcagcgacaagcgggatattagccggttcctggagagcaaccccgtgatgatcgatgccaaggaagtgagcgccgcccaccgggccagatacttctggggcaatctgcctggcatgaacagacccctggccagcaccgtgaacgacaagctggagctgcaggagtgcctggagcacggccggatcgccaagttcagcaaggtgagaaccatcaccacccgaagcaacagcatcaaacaaggcaaggaccagcactttcctgtgttcatgaacgagaaggaggacatcctgtggtgtaccgagatggagagagtgttcgggttcccagtccactacacagatgtcagcaacatgtctagactggccagacagagactgctgggaagaagctggtccgtccctgtgatcagacacctgttcgcccctctgaaggagtacttcgcctgcgtgagcagcggcaacagcaacgccaacagccggggccccagcttctctagcggcctggtgccactgtccctgagagggagccacatgggccccatggagatctacaaaaccgtgagcgcctggaagcggcagcctgtgcgcgtgctgagcctgtttcggaatatcgataaagtcctgaaaagcctgggattcctggagagcggctctggctccggcggtggcaccctgaagtacgtggaggatgtgacaaacgtggtcagacgggatgtggagaagtggggccccttcgatctggtgtacggcagcacccaacccctgggcagctcttgtgaccggtgccctggctggtacatgtttcagttccaccggatcctgcagtacgccctgccgagacaggagtcccagcggccattcttttggattttcatggacaacttgctgctgaccgaggatgaccaggaaactaccactcggttcctgcagaccgaagccgtgaccctgcaggacgtgagaggccgggactaccagaacgccatgcgggtgtggtccaacatccctggactgaaaagcaagcacgcacctctgacccctaaagaagaggagtacctgcaggcccaggtgcggagcagaagcaagctggacgcccctaaggtggatctgctggtgaagaattgcctcctgcccctgagagagtacttcaagtatttcagccagaatagtctgcccctgggaggcagcggcggcggctaccagaggcccgtgagcttcaaggacgtggtggtgggcttcacccaggaggagtggcacaggctgaaccccgcccagagggccctgtacagggacgtgatgctggagacctacagcaacctggtgagcgtgggctacgagggcaccaagccctacgtgatcctgaggctggagcaggaggaggccccctggatctgcgaggccgcctgccccggctgccactgcagggagaacatctggcagggcggcccaagcagcggcgcccctcctcccagcggcggcaggcggcccaagcagcggcgcccctcctcccagcggcggcagcccagccggctccccaacctctaccgaggagggcacctctgagtccgccacccccgagagcggccctggcacctccaccgagcccagcgagggcagcgcacccggcagccctgccggcagccccacctccacagaggagggaaccagcaccgagcccagcgaaggcagcgccccaggcaccagcaccgagcctagtgagcaggagattaaacggatcaacaagatcagaagaagacttgtgaaagacagcaacaccaagaaggccggcaagacaggccccatgaaaaccctgctggttagagtgatgacacccgatctgagagagcggctggaaaacctgagaaagaagcctgaaaatatcccccagcccatcagcaatacatctagagccaacctgaataagctgctgaccgattacaccgaaatgaagaaggcgatcctgcatgtgtactgggaagagttccagaaggaccctgtgggcctgatgagccgggtggcccagcctgccagcaagaagatcgatcagaacaagctgaaacctgagatggacgagaagggcaacctgaccaccgccggctttgcctgctctcagtgtggccagcccctgttcgtgtacaagctggagcaggtgtctgagaagggcaaggcttacaccaactacttcggacggtgcaatgtggccgagcacgaaaagctgatcctgctggcccagctgaagcccgagaaggatagcgacgaagccgtgacatatagcctgggaaagtttgggcagagggccctggatttctacagcattcatgtgaccaaggagtccacccaccccgtgaagcccctggcccagatcgccggaaacagatacgcctccggacctgtgggaaaggccctgagcgacgcatgtatgggcacaatcgcctccttcctgtctaagtaccaggacatcatcatcgaacaccagaaggtggtgaagggcaaccagaagagactggagagcctgcgggagctggccggcaaggaaaacctggaataccctagcgtgaccctgccacctcagcctcacaccaaggagggcgttgatgcctacaacgaagtgatcgcccgggtgcgaatgtgggtgaacctgaacctgtggcagaagctgaagctaagcagagatgatgccaagcctctgctgagactgaagggattcccttcctttcctctggtcgagagacaggccaacgaagtggactggtgggacatggtgtgtaacgtgaagaagctgatcaacgagaaaaaggaggatggcaaggtgttttggcagaatctggctggctacaagagacaggaagccctgagaccatacctgagcagcgaggaagatcggaagaagggaaagaaattcgctcggtaccagctgggcgacctgctgctgcacctggaaaagaagcacggcgaggactggggaaaggtgtacgacgaggcctgggagcggattgacaagaaagtggaaggcctgagcaagcacatcaagctggaagaggaacggagaagcgaggacgcccagagcaaggccgccctgaccgactggctgcgggctaaggccagcttcgtgatcgagggcctgaaggaggccgacaaggacgagttctgcagatgcgagctgaagctgcagaagtggtacggggacctgcggggaaagcccttcgccatcgaagccgagaacagcatcctggacatcagcggcttcagcaagcagtacaactgtgccttcatctggcagaaggacggcgtgaagaagctgaacctgtacctgatcatcaactacttcaagggcggcaagctgcggttcaagaagatcaaacctgaagccttcgaagccaacagattctacaccgtgatcaacaaaaagagcggcgagatcgtgcccatggaggtgaacttcaacttcgacgaccccaacctgatcatcctgcctctggcctttggcaagagacagggcagagaattcatctggaacgacctgctgtccctggaaaccggcagcctgaagctggccaacggaagagtgatcgagaagacactgtacaacagaagaacccggcaggatgagcctgccctgttcgtggccctgaccttcgagcggcgggaggtcctggactcctccaatatcaaaccaatgaacctgatcggcgtggcaagaggcgaaaacatccccgccgtgatcgccctgaccgaccccgagggctgcccactgagccggtttaaggatagcctgggaaacccaacccacatcctgagaatcggcgagagctataaggagaagcagcggaccatccaggccaagaaggaggtggagcagcggagagccggcggctacagccggaagtacgccagcaaagccaagaatctggcagacgatatggtgagaaacaccgctagagatctgctgtactacgccgtgacccaggatgccatgctgatcttcgccaacctgagccggggcttcggccggcagggcaagcggaccttcatggccgagagacagtacacacggatggaggactggctgaccgccaagctggcctacgagggcctgagcaagacctacctgtccaagacactggcccagtacacctccaagacatgcagcaactgtgggtttaccatcaccagcgccgactacgacagggtgctggagaagctgaagaagacagcaacaggctggatgaccacaattaacggcaaggagctgaaggtggagggccagattacctactacaacagatacaagagacagaacgtagtcaaggacctgtccgtcgagctggatagactgagcgaagaatctgtgaacaacgacatctcctcctggacaaagggcagaagcggagaagctctgagcctcctgaagaaaagattctcccatagacccgtgcaggagaagttcgtgtgcctgaactgcggcttcgagacacacgcagccgagcaagccgccctgaacatcgccagatcctggctgttcctgcggagccaggagtacaagaaataccagacaaacaagacaaccggcaacaccgataagagagccttcgtcgagacctggcagtccttttaccggaagaagcttaaggaggtgtggaaacctgccgtgcggtctggcggatctggcggaggctccaccagccccaagaaaaagagaaaagtctaagctgccttctgcggggcttgccttctggccatgcccttcttctctcccttgcacctgtacctcttggtctttgaataaagcctgagtaggaaggctagcaaaaaaaaaaaaaaaaaaaaaaaaaaaaaaaaaaaaaaaaaaaaaaaaaaaaaaaaaaaaaaaaaaaaaaaaaaaaaaaagcccagccggctccccaacctctaccgaggagggcacctctgagtccgccacccccgagagcggccctggcacctccaccgagcccagcgagggcagcgcacccggcagccctgccggcagccccacctccacagaggagggaaccagcaccgagcccagcgaaggcagcgccccaggcaccagcaccgagcctagtgagcaggagattaaacggatcaacaagatcagaagaagacttgtgaaagacagcaacaccaagaaggccggcaagacaggccccatgaaaaccctgctggttagagtgatgacacccgatctgagagagcggctggaaaacctgagaaagaagcctgaaaatatcccccagcccatcagcaatacatctagagccaacctgaataagctgctgaccgattacaccgaaatgaagaaggcgatcctgcatgtgtactgggaagagttccagaaggaccctgtgggcctgatgagccgggtggcccagcctgccagcaagaagatcgatcagaacaagctgaaacctgagatggacgagaagggcaacctgaccaccgccggctttgcctgctctcagtgtggccagcccctgttcgtgtacaagctggagcaggtgtctgagaagggcaaggcttacaccaactacttcggacggtgcaatgtggccgagcacgaaaagctgatcctgctggcccagctgaagcccgagaaggatagcgacgaagccgtgacatatagcctgggaaagtttgggcagagggccctggatttctacagcattcatgtgaccaaggagtccacccaccccgtgaagcccctggcccagatcgccggaaacagatacgcctccggacctgtgggaaaggccctgagcgacgcatgtatgggcacaatcgcctccttcctgtctaagtaccaggacatcatcatcgaacaccagaaggtggtgaagggcaaccagaagagactggagagcctgcgggagctggccggcaaggaaaacctggaataccctagcgtgaccctgccacctcagcctcacaccaaggagggcgttgatgcctacaacgaagtgatcgcccgggtgcgaatgtgggtgaacctgaacctgtggcagaagctgaagctaagcagagatgatgccaagcctctgctgagactgaagggattcccttcctttcctctggtcgagagacaggccaacgaagtggactggtgggacatggtgtgtaacgtgaagaagctgatcaacgagaaaaaggaggatggcaaggtgttttggcagaatctggctggctacaagagacaggaagccctgagaccatacctgagcagcgaggaagatcggaagaagggaaagaaattcgctcggtaccagctgggcgacctgctgctgcacctggaaaagaagcacggcgaggactggggaaaggtgtacgacgaggcctgggagcggattgacaagaaagtggaaggcctgagcaagcacatcaagctggaagaggaacggagaagcgaggacgcccagagcaaggccgccctgaccgactggctgcgggctaaggccagcttcgtgatcgagggcctgaaggaggccgacaaggacgagttctgcagatgcgagctgaagctgcagaagtggtacggggacctgcggggaaagcccttcgccatcgaagccgagaacagcatcctggacatcagcggcttcagcaagcagtacaactgtgccttcatctggcagaaggacggcgtgaagaagctgaacctgtacctgatcatcaactacttcaagggcggcaagctgcggttcaagaagatcaaacctgaagccttcgaagccaacagattctacaccgtgatcaacaaaaagagcggcgagatcgtgcccatggaggtgaacttcaacttcgacgaccccaacctgatcatcctgcctctggcctttggcaagagacagggcagagaattcatctggaacgacctgctgtccctggaaaccggcagcctgaagctggccaacggaagagtgatcgagaagacactgtacaacagaagaacccggcaggatgagcctgccctgttcgtggccctgaccttcgagcggcgggaggtcctggactcctccaatatcaaaccaatgaacctgatcggcgtggcaagaggcgaaaacatccccgccgtgatcgccctgaccgaccccgagggctgcccactgagccggtttaaggatagcctgggaaacccaacccacatcctgagaatcggcgagagctataaggagaagcagcggaccatccaggccaagaaggaggtggagcagcggagagccggcggctacagccggaagtacgccagcaaagccaagaatctggcagacgatatggtgagaaacaccgctagagatctgctgtactacgccgtgacccaggatgccatgctgatcttcgccaacctgagccggggcttcggccggcagggcaagcggaccttcatggccgagagacagtacacacggatggaggactggctgaccgccaagctggcctacgagggcctgagcaagacctacctgtccaagacactggcccagtacacctccaagacatgcagcaactgtgggtttaccatcaccagcgccgactacgacagggtgctggagaagctgaagaagacagcaacaggctggatgaccacaattaacggcaaggagctgaaggtggagggccagattacctactacaacagatacaagagacagaacgtagtcaaggacctgtccgtcgagctggatagactgagcgaagaatctgtgaacaacgacatctcctcctggacaaagggcagaagcggagaagctctgagcctcctgaagaaaagattctcccatagacccgtgcaggagaagttcgtgtgcctgaactgcggcttcgagacacacgcagccgagcaagccgccctgaacatcgccagatcctggctgttcctgcggagccaggagtacaagaaataccagacaaacaagacaaccggcaacaccgataagagagccttcgtcgagacctggcagtccttttaccggaagaagcttaaggaggtgtggaaacctgccgtgcggtctggcggatctggcggaggctccaccagccccaagaaaaagagaaaagtctaagctgccttctgcggggcttgccttctggccatgcccttcttctctcccttgcacctgtacctcttggtctttgaataaagcctgagtaggaaggctagcaaaaaaaaaaaaaaaaaaaaaaaaaaaaaaaaaaaaaaaaaaaaaaaaaaaaaaaaaaaaaaaaaaaaaaaaaaaaaaaa

SEQ ID NO: 9593 - RNA, 8787 nt, synthetic construct
  source 1..8787: mol_type = other RNA
aggaaataagagagaaaagaagagtaagaagaaatataagagccaccatggcccctaagaagaagcgtaaagtgagccggatgaaccacgaccaggagttcgacccccctaaggtgtaccctcccgtccccgccgagaagagaaagcccatccgggtcctgagcctgttcgatggcatcgccaccggtctgctggtgctgaaggacctgggcatccaggtggataggtacattgcctccgaggtgtgcgaggactccatcaccgtgggaatggtgcgtcatcagggcaagatcatgtacgtgggcgacgtgcggagcgtgacacagaagcatatccaggagtggggccctttcgacctggtgatcggcggcagcccttgcaatgacctgagcatcgtgaacccagcccggaagggcctgtacgagggaaccggcagactgttcttcgagttttacagactgctgcacgacgcccggcctaaggaaggcgacgaccggcccttcttttggctgttcgagaatgtggtggccatgggagtcagcgacaagcgggatattagccggttcctggagagcaaccccgtgatgatcgatgccaaggaagtgagcgccgcccaccgggccagatacttctggggcaatctgcctggcatgaacagacccctggccagcaccgtgaacgacaagctggagctgcaggagtgcctggagcacggccggatcgccaagttcagcaaggtgagaaccatcaccacccgaagcaacagcatcaaacaaggcaaggaccagcactttcctgtgttcatgaacgagaaggaggacatcctgtggtgtaccgagatggagagagtgttcgggttcccagtccactacacagatgtcagcaacatgtctagactggccagacagagactgctgggaagaagctggtccgtccctgtgatcagacacctgttcgcccctctgaaggagtacttcgcctgcgtgagcagcggcaacagcaacgccaacagccggggccccagcttctctagcggcctggtgccactgtccctgagagggagccacatgggccccatggagatctacaaaaccgtgagcgcctggaagcggcagcctgtgcgcgtgctgagcctgtttcggaatatcgataaagtcctgaaaagcctgggattcctggagagcggctctggctccggcggtggcaccctgaagtacgtggaggatgtgacaaacgtggtcagacgggatgtggagaagtggggccccttcgatctggtgtacggcagcacccaacccctgggcagctcttgtgaccggtgccctggctggtacatgtttcagttccaccggatcctgcagtacgccctgccgagacaggagtcccagcggccattcttttggattttcatggacaacttgctgctgaccgaggatgaccaggaaactaccactcggttcctgcagaccgaagccgtgaccctgcaggacgtgagaggccgggactaccagaacgccatgcgggtgtggtccaacatccctggactgaaaagcaagcacgcacctctgacccctaaagaagaggagtacctgcaggcccaggtgcggagcagaagcaagctggacgcccctaaggtggatctgctggtgaagaattgcctcctgcccctgagagagtacttcaagtatttcagccagaatagtctgcccctgggaggcagcggcggcggcatgaccttcgaggacgtggccgtggagttcaccaggtgggagtggggccagctggaccccacccagaaggacgtgtacagggaggtgatgctggagaacttcaagaacctggccagcctgggcttccccatgagcaagccctacgtgatctgcaggctggaggagggcgaggagccctgcatcctggagagggagatcagcaccggcgcccccgccgactgggagaggaggaggcaggccaagggcggcccaagcagcggcgcccctcctcccagcggcggcaggcggcccaagcagcggcgcccctcctcccagcggcggcagcccagccggctccccaacctctaccgaggagggcacctctgagtccgccacccccgagagcggccctggcacctccaccgagcccagcgagggcagcgcacccggcagccctgccggcagccccacctccacagaggagggaaccagcaccgagcccagcgaaggcagcgccccaggcaccagcaccgagcctagtgagcaggagattaaacggatcaacaagatcagaagaagacttgtgaaagacagcaacaccaagaaggccggcaagacaggccccatgaaaaccctgctggttagagtgatgacacccgatctgagagagcggctggaaaacctgagaaagaagcctgaaaatatcccccagcccatcagcaatacatctagagccaacctgaataagctgctgaccgattacaccgaaatgaagaaggcgatcctgcatgtgtactgggaagagttccagaaggaccctgtgggcctgatgagccgggtggcccagcctgccagcaagaagatcgatcagaacaagctgaaacctgagatggacgagaagggcaacctgaccaccgccggctttgcctgctctcagtgtggccagcccctgttcgtgtacaagctggagcaggtgtctgagaagggcaaggcttacaccaactacttcggacggtgcaatgtggccgagcacgaaaagctgatcctgctggcccagctgaagcccgagaaggatagcgacgaagccgtgacatatagcctgggaaagtttgggcagagggccctggatttctacagcattcatgtgaccaaggagtccacccaccccgtgaagcccctggcccagatcgccggaaacagatacgcctccggacctgtgggaaaggccctgagcgacgcatgtatgggcacaatcgcctccttcctgtctaagtaccaggacatcatcatcgaacaccagaaggtggtgaagggcaaccagaagagactggagagcctgcgggagctggccggcaaggaaaacctggaataccctagcgtgaccctgccacctcagcctcacaccaaggagggcgttgatgcctacaacgaagtgatcgcccgggtgcgaatgtgggtgaacctgaacctgtggcagaagctgaagctaagcagagatgatgccaagcctctgctgagactgaagggattcccttcctttcctctggtcgagagacaggccaacgaagtggactggtgggacatggtgtgtaacgtgaagaagctgatcaacgagaaaaaggaggatggcaaggtgttttggcagaatctggctggctacaagagacaggaagccctgagaccatacctgagcagcgaggaagatcggaagaagggaaagaaattcgctcggtaccagctgggcgacctgctgctgcacctggaaaagaagcacggcgaggactggggaaaggtgtacgacgaggcctgggagcggattgacaagaaagtggaaggcctgagcaagcacatcaagctggaagaggaacggagaagcgaggacgcccagagcaaggccgccctgaccgactggctgcgggctaaggccagcttcgtgatcgagggcctgaaggaggccgacaaggacgagttctgcagatgcgagctgaagctgcagaagtggtacggggacctgcggggaaagcccttcgccatcgaagccgagaacagcatcctggacatcagcggcttcagcaagcagtacaactgtgccttcatctggcagaaggacggcgtgaagaagctgaacctgtacctgatcatcaactacttcaagggcggcaagctgcggttcaagaagatcaaacctgaagccttcgaagccaacagattctacaccgtgatcaacaaaaagagcggcgagatcgtgcccatggaggtgaacttcaacttcgacgaccccaacctgatcatcctgcctctggcctttggcaagagacagggcagagaattcatctggaacgacctgctgtccctggaaaccggcagcctgaagctggccaacggaagagtgatcgagaagacactgtacaacagaagaacccggcaggatgagcctgccctgttcgtggccctgaccttcgagcggcgggaggtcctggactcctccaatatcaaaccaatgaacctgatcggcgtggcaagaggcgaaaacatccccgccgtgatcgccctgaccgaccccgagggctgcccactgagccggtttaaggatagcctgggaaacccaacccacatcctgagaatcggcgagagctataaggagaagcagcggaccatccaggccaagaaggaggtggagcagcggagagccggcggctacagccggaagtacgccagcaaagccaagaatctggcagacgatatggtgagaaacaccgctagagatctgctgtactacgccgtgacccaggatgccatgctgatcttcgccaacctgagccggggcttcggccggcagggcaagcggaccttcatggccgagagacagtacacacggatggaggactggctgaccgccaagctggcctacgagggcctgagcaagacctacctgtccaagacactggcccagtacacctccaagacatgcagcaactgtgggtttaccatcaccagcgccgactacgacagggtgctggagaagctgaagaagacagcaacaggctggatgaccacaattaacggcaaggagctgaaggtggagggccagattacctactacaacagatacaagagacagaacgtagtcaaggacctgtccgtcgagctggatagactgagcgaagaatctgtgaacaacgacatctcctcctggacaaagggcagaagcggagaagctctgagcctcctgaagaaaagattctcccatagacccgtgcaggagaagttcgtgtgcctgaactgcggcttcgagacacacgcagccgagcaagccgccctgaacatcgccagatcctggctgttcctgcggagccaggagtacaagaaataccagacaaacaagacaaccggcaacaccgataagagagccttcgtcgagacctggcagtccttttaccggaagaagcttaaggaggtgtggaaacctgccgtgcggtctggcggatctggcggaggctccaccagccccaagaaaaagagaaaagtctaagctgccttctgcggggcttgccttctggccatgcccttcttctctcccttgcacctgtacctcttggtctttgaataaagcctgagtaggaaggctagcaaaaaaaaaaaaaaaaaaaaaaaaaaaaaaaaaaaaaaaaaaaaaaaaaaaaaaaaaaaaaaaaaaaaaaaaaaaaaaaagcccagccggctccccaacctctaccgaggagggcacctctgagtccgccacccccgagagcggccctggcacctccaccgagcccagcgagggcagcgcacccggcagccctgccggcagccccacctccacagaggagggaaccagcaccgagcccagcgaaggcagcgccccaggcaccagcaccgagcctagtgagcaggagattaaacggatcaacaagatcagaagaagacttgtgaaagacagcaacaccaagaaggccggcaagacaggccccatgaaaaccctgctggttagagtgatgacacccgatctgagagagcggctggaaaacctgagaaagaagcctgaaaatatcccccagcccatcagcaatacatctagagccaacctgaataagctgctgaccgattacaccgaaatgaagaaggcgatcctgcatgtgtactgggaagagttccagaaggaccctgtgggcctgatgagccgggtggcccagcctgccagcaagaagatcgatcagaacaagctgaaacctgagatggacgagaagggcaacctgaccaccgccggctttgcctgctctcagtgtggccagcccctgttcgtgtacaagctggagcaggtgtctgagaagggcaaggcttacaccaactacttcggacggtgcaatgtggccgagcacgaaaagctgatcctgctggcccagctgaagcccgagaaggatagcgacgaagccgtgacatatagcctgggaaagtttgggcagagggccctggatttctacagcattcatgtgaccaaggagtccacccaccccgtgaagcccctggcccagatcgccggaaacagatacgcctccggacctgtgggaaaggccctgagcgacgcatgtatgggcacaatcgcctccttcctgtctaagtaccaggacatcatcatcgaacaccagaaggtggtgaagggcaaccagaagagactggagagcctgcgggagctggccggcaaggaaaacctggaataccctagcgtgaccctgccacctcagcctcacaccaaggagggcgttgatgcctacaacgaagtgatcgcccgggtgcgaatgtgggtgaacctgaacctgtggcagaagctgaagctaagcagagatgatgccaagcctctgctgagactgaagggattcccttcctttcctctggtcgagagacaggccaacgaagtggactggtgggacatggtgtgtaacgtgaagaagctgatcaacgagaaaaaggaggatggcaaggtgttttggcagaatctggctggctacaagagacaggaagccctgagaccatacctgagcagcgaggaagatcggaagaagggaaagaaattcgctcggtaccagctgggcgacctgctgctgcacctggaaaagaagcacggcgaggactggggaaaggtgtacgacgaggcctgggagcggattgacaagaaagtggaaggcctgagcaagcacatcaagctggaagaggaacggagaagcgaggacgcccagagcaaggccgccctgaccgactggctgcgggctaaggccagcttcgtgatcgagggcctgaaggaggccgacaaggacgagttctgcagatgcgagctgaagctgcagaagtggtacggggacctgcggggaaagcccttcgccatcgaagccgagaacagcatcctggacatcagcggcttcagcaagcagtacaactgtgccttcatctggcagaaggacggcgtgaagaagctgaacctgtacctgatcatcaactacttcaagggcggcaagctgcggttcaagaagatcaaacctgaagccttcgaagccaacagattctacaccgtgatcaacaaaaagagcggcgagatcgtgcccatggaggtgaacttcaacttcgacgaccccaacctgatcatcctgcctctggcctttggcaagagacagggcagagaattcatctggaacgacctgctgtccctggaaaccggcagcctgaagctggccaacggaagagtgatcgagaagacactgtacaacagaagaacccggcaggatgagcctgccctgttcgtggccctgaccttcgagcggcgggaggtcctggactcctccaatatcaaaccaatgaacctgatcggcgtggcaagaggcgaaaacatccccgccgtgatcgccctgaccgaccccgagggctgcccactgagccggtttaaggatagcctgggaaacccaacccacatcctgagaatcggcgagagctataaggagaagcagcggaccatccaggccaagaaggaggtggagcagcggagagccggcggctacagccggaagtacgccagcaaagccaagaatctggcagacgatatggtgagaaacaccgctagagatctgctgtactacgccgtgacccaggatgccatgctgatcttcgccaacctgagccggggcttcggccggcagggcaagcggaccttcatggccgagagacagtacacacggatggaggactggctgaccgccaagctggcctacgagggcctgagcaagacctacctgtccaagacactggcccagtacacctccaagacatgcagcaactgtgggtttaccatcaccagcgccgactacgacagggtgctggagaagctgaagaagacagcaacaggctggatgaccacaattaacggcaaggagctgaaggtggagggccagattacctactacaacagatacaagagacagaacgtagtcaaggacctgtccgtcgagctggatagactgagcgaagaatctgtgaacaacgacatctcctcctggacaaagggcagaagcggagaagctctgagcctcctgaagaaaagattctcccatagacccgtgcaggagaagttcgtgtgcctgaactgcggcttcgagacacacgcagccgagcaagccgccctgaacatcgccagatcctggctgttcctgcggagccaggagtacaagaaataccagacaaacaagacaaccggcaacaccgataagagagccttcgtcgagacctggcagtccttttaccggaagaagcttaaggaggtgtggaaacctgccgtgcggtctggcggatctggcggaggctccaccagccccaagaaaaagagaaaagtctaagctgccttctgcggggcttgccttctggccatgcccttcttctctcccttgcacctgtacctcttggtctttgaataaagcctgagtaggaaggctagcaaaaaaaaaaaaaaaaaaaaaaaaaaaaaaaaaaaaaaaaaaaaaaaaaaaaaaaaaaaaaaaaaaaaaaaaaaaaaaaa

SEQ ID NO: 9594 - RNA, 8787 nt, synthetic construct
  source 1..8787: mol_type = other RNA
aggaaataagagagaaaagaagagtaagaagaaatataagagccaccatggcccctaagaagaagcgtaaagtgagccggatgaaccacgaccaggagttcgacccccctaaggtgtaccctcccgtccccgccgagaagagaaagcccatccgggtcctgagcctgttcgatggcatcgccaccggtctgctggtgctgaaggacctgggcatccaggtggataggtacattgcctccgaggtgtgcgaggactccatcaccgtgggaatggtgcgtcatcagggcaagatcatgtacgtgggcgacgtgcggagcgtgacacagaagcatatccaggagtggggccctttcgacctggtgatcggcggcagcccttgcaatgacctgagcatcgtgaacccagcccggaagggcctgtacgagggaaccggcagactgttcttcgagttttacagactgctgcacgacgcccggcctaaggaaggcgacgaccggcccttcttttggctgttcgagaatgtggtggccatgggagtcagcgacaagcgggatattagccggttcctggagagcaaccccgtgatgatcgatgccaaggaagtgagcgccgcccaccgggccagatacttctggggcaatctgcctggcatgaacagacccctggccagcaccgtgaacgacaagctggagctgcaggagtgcctggagcacggccggatcgccaagttcagcaaggtgagaaccatcaccacccgaagcaacagcatcaaacaaggcaaggaccagcactttcctgtgttcatgaacgagaaggaggacatcctgtggtgtaccgagatggagagagtgttcgggttcccagtccactacacagatgtcagcaacatgtctagactggccagacagagactgctgggaagaagctggtccgtccctgtgatcagacacctgttcgcccctctgaaggagtacttcgcctgcgtgagcagcggcaacagcaacgccaacagccggggccccagcttctctagcggcctggtgccactgtccctgagagggagccacatgggccccatggagatctacaaaaccgtgagcgcctggaagcggcagcctgtgcgcgtgctgagcctgtttcggaatatcgataaagtcctgaaaagcctgggattcctggagagcggctctggctccggcggtggcaccctgaagtacgtggaggatgtgacaaacgtggtcagacgggatgtggagaagtggggccccttcgatctggtgtacggcagcacccaacccctgggcagctcttgtgaccggtgccctggctggtacatgtttcagttccaccggatcctgcagtacgccctgccgagacaggagtcccagcggccattcttttggattttcatggacaacttgctgctgaccgaggatgaccaggaaactaccactcggttcctgcagaccgaagccgtgaccctgcaggacgtgagaggccgggactaccagaacgccatgcgggtgtggtccaacatccctggactgaaaagcaagcacgcacctctgacccctaaagaagaggagtacctgcaggcccaggtgcggagcagaagcaagctggacgcccctaaggtggatctgctggtgaagaattgcctcctgcccctgagagagtacttcaagtatttcagccagaatagtctgcccctgggaggcagcggcggcggcagctacgagggcagcgtgagcttcagggacgtggccatcgacttcagcagggaggagtggaggcacctggacctgagccagaggaacctgtacagggacgtgatgctggagacctacagccacctgctgagcgtgggctaccaggtgcccgaggccgaggtggtgatgctggagcagggcaaggagccctgggccctgcagggcgagaggcccaggcacagctgccccggcgagaagctgtggggcggcccaagcagcggcgcccctcctcccagcggcggcaggcggcccaagcagcggcgcccctcctcccagcggcggcagcccagccggctccccaacctctaccgaggagggcacctctgagtccgccacccccgagagcggccctggcacctccaccgagcccagcgagggcagcgcacccggcagccctgccggcagccccacctccacagaggagggaaccagcaccgagcccagcgaaggcagcgccccaggcaccagcaccgagcctagtgagcaggagattaaacggatcaacaagatcagaagaagacttgtgaaagacagcaacaccaagaaggccggcaagacaggccccatgaaaaccctgctggttagagtgatgacacccgatctgagagagcggctggaaaacctgagaaagaagcctgaaaatatcccccagcccatcagcaatacatctagagccaacctgaataagctgctgaccgattacaccgaaatgaagaaggcgatcctgcatgtgtactgggaagagttccagaaggaccctgtgggcctgatgagccgggtggcccagcctgccagcaagaagatcgatcagaacaagctgaaacctgagatggacgagaagggcaacctgaccaccgccggctttgcctgctctcagtgtggccagcccctgttcgtgtacaagctggagcaggtgtctgagaagggcaaggcttacaccaactacttcggacggtgcaatgtggccgagcacgaaaagctgatcctgctggcccagctgaagcccgagaaggatagcgacgaagccgtgacatatagcctgggaaagtttgggcagagggccctggatttctacagcattcatgtgaccaaggagtccacccaccccgtgaagcccctggcccagatcgccggaaacagatacgcctccggacctgtgggaaaggccctgagcgacgcatgtatgggcacaatcgcctccttcctgtctaagtaccaggacatcatcatcgaacaccagaaggtggtgaagggcaaccagaagagactggagagcctgcgggagctggccggcaaggaaaacctggaataccctagcgtgaccctgccacctcagcctcacaccaaggagggcgttgatgcctacaacgaagtgatcgcccgggtgcgaatgtgggtgaacctgaacctgtggcagaagctgaagctaagcagagatgatgccaagcctctgctgagactgaagggattcccttcctttcctctggtcgagagacaggccaacgaagtggactggtgggacatggtgtgtaacgtgaagaagctgatcaacgagaaaaaggaggatggcaaggtgttttggcagaatctggctggctacaagagacaggaagccctgagaccatacctgagcagcgaggaagatcggaagaagggaaagaaattcgctcggtaccagctgggcgacctgctgctgcacctggaaaagaagcacggcgaggactggggaaaggtgtacgacgaggcctgggagcggattgacaagaaagtggaaggcctgagcaagcacatcaagctggaagaggaacggagaagcgaggacgcccagagcaaggccgccctgaccgactggctgcgggctaaggccagcttcgtgatcgagggcctgaaggaggccgacaaggacgagttctgcagatgcgagctgaagctgcagaagtggtacggggacctgcggggaaagcccttcgccatcgaagccgagaacagcatcctggacatcagcggcttcagcaagcagtacaactgtgccttcatctggcagaaggacggcgtgaagaagctgaacctgtacctgatcatcaactacttcaagggcggcaagctgcggttcaagaagatcaaacctgaagccttcgaagccaacagattctacaccgtgatcaacaaaaagagcggcgagatcgtgcccatggaggtgaacttcaacttcgacgaccccaacctgatcatcctgcctctggcctttggcaagagacagggcagagaattcatctggaacgacctgctgtccctggaaaccggcagcctgaagctggccaacggaagagtgatcgagaagacactgtacaacagaagaacccggcaggatgagcctgccctgttcgtggccctgaccttcgagcggcgggaggtcctggactcctccaatatcaaaccaatgaacctgatcggcgtggcaagaggcgaaaacatccccgccgtgatcgccctgaccgaccccgagggctgcccactgagccggtttaaggatagcctgggaaacccaacccacatcctgagaatcggcgagagctataaggagaagcagcggaccatccaggccaagaaggaggtggagcagcggagagccggcggctacagccggaagtacgccagcaaagccaagaatctggcagacgatatggtgagaaacaccgctagagatctgctgtactacgccgtgacccaggatgccatgctgatcttcgccaacctgagccggggcttcggccggcagggcaagcggaccttcatggccgagagacagtacacacggatggaggactggctgaccgccaagctggcctacgagggcctgagcaagacctacctgtccaagacactggcccagtacacctccaagacatgcagcaactgtgggtttaccatcaccagcgccgactacgacagggtgctggagaagctgaagaagacagcaacaggctggatgaccacaattaacggcaaggagctgaaggtggagggccagattacctactacaacagatacaagagacagaacgtagtcaaggacctgtccgtcgagctggatagactgagcgaagaatctgtgaacaacgacatctcctcctggacaaagggcagaagcggagaagctctgagcctcctgaagaaaagattctcccatagacccgtgcaggagaagttcgtgtgcctgaactgcggcttcgagacacacgcagccgagcaagccgccctgaacatcgccagatcctggctgttcctgcggagccaggagtacaagaaataccagacaaacaagacaaccggcaacaccgataagagagccttcgtcgagacctggcagtccttttaccggaagaagcttaaggaggtgtggaaacctgccgtgcggtctggcggatctggcggaggctccaccagccccaagaaaaagagaaaagtctaagctgccttctgcggggcttgccttctggccatgcccttcttctctcccttgcacctgtacctcttggtctttgaataaagcctgagtaggaaggctagcaaaaaaaaaaaaaaaaaaaaaaaaaaaaaaaaaaaaaaaaaaaaaaaaaaaaaaaaaaaaaaaaaaaaaaaaaaaaaaaagcccagccggctccccaacctctaccgaggagggcacctctgagtccgccacccccgagagcggccctggcacctccaccgagcccagcgagggcagcgcacccggcagccctgccggcagccccacctccacagaggagggaaccagcaccgagcccagcgaaggcagcgccccaggcaccagcaccgagcctagtgagcaggagattaaacggatcaacaagatcagaagaagacttgtgaaagacagcaacaccaagaaggccggcaagacaggccccatgaaaaccctgctggttagagtgatgacacccgatctgagagagcggctggaaaacctgagaaagaagcctgaaaatatcccccagcccatcagcaatacatctagagccaacctgaataagctgctgaccgattacaccgaaatgaagaaggcgatcctgcatgtgtactgggaagagttccagaaggaccctgtgggcctgatgagccgggtggcccagcctgccagcaagaagatcgatcagaacaagctgaaacctgagatggacgagaagggcaacctgaccaccgccggctttgcctgctctcagtgtggccagcccctgttcgtgtacaagctggagcaggtgtctgagaagggcaaggcttacaccaactacttcggacggtgcaatgtggccgagcacgaaaagctgatcctgctggcccagctgaagcccgagaaggatagcgacgaagccgtgacatatagcctgggaaagtttgggcagagggccctggatttctacagcattcatgtgaccaaggagtccacccaccccgtgaagcccctggcccagatcgccggaaacagatacgcctccggacctgtgggaaaggccctgagcgacgcatgtatgggcacaatcgcctccttcctgtctaagtaccaggacatcatcatcgaacaccagaaggtggtgaagggcaaccagaagagactggagagcctgcgggagctggccggcaaggaaaacctggaataccctagcgtgaccctgccacctcagcctcacaccaaggagggcgttgatgcctacaacgaagtgatcgcccgggtgcgaatgtgggtgaacctgaacctgtggcagaagctgaagctaagcagagatgatgccaagcctctgctgagactgaagggattcccttcctttcctctggtcgagagacaggccaacgaagtggactggtgggacatggtgtgtaacgtgaagaagctgatcaacgagaaaaaggaggatggcaaggtgttttggcagaatctggctggctacaagagacaggaagccctgagaccatacctgagcagcgaggaagatcggaagaagggaaagaaattcgctcggtaccagctgggcgacctgctgctgcacctggaaaagaagcacggcgaggactggggaaaggtgtacgacgaggcctgggagcggattgacaagaaagtggaaggcctgagcaagcacatcaagctggaagaggaacggagaagcgaggacgcccagagcaaggccgccctgaccgactggctgcgggctaaggccagcttcgtgatcgagggcctgaaggaggccgacaaggacgagttctgcagatgcgagctgaagctgcagaagtggtacggggacctgcggggaaagcccttcgccatcgaagccgagaacagcatcctggacatcagcggcttcagcaagcagtacaactgtgccttcatctggcagaaggacggcgtgaagaagctgaacctgtacctgatcatcaactacttcaagggcggcaagctgcggttcaagaagatcaaacctgaagccttcgaagccaacagattctacaccgtgatcaacaaaaagagcggcgagatcgtgcccatggaggtgaacttcaacttcgacgaccccaacctgatcatcctgcctctggcctttggcaagagacagggcagagaattcatctggaacgacctgctgtccctggaaaccggcagcctgaagctggccaacggaagagtgatcgagaagacactgtacaacagaagaacccggcaggatgagcctgccctgttcgtggccctgaccttcgagcggcgggaggtcctggactcctccaatatcaaaccaatgaacctgatcggcgtggcaagaggcgaaaacatccccgccgtgatcgccctgaccgaccccgagggctgcccactgagccggtttaaggatagcctgggaaacccaacccacatcctgagaatcggcgagagctataaggagaagcagcggaccatccaggccaagaaggaggtggagcagcggagagccggcggctacagccggaagtacgccagcaaagccaagaatctggcagacgatatggtgagaaacaccgctagagatctgctgtactacgccgtgacccaggatgccatgctgatcttcgccaacctgagccggggcttcggccggcagggcaagcggaccttcatggccgagagacagtacacacggatggaggactggctgaccgccaagctggcctacgagggcctgagcaagacctacctgtccaagacactggcccagtacacctccaagacatgcagcaactgtgggtttaccatcaccagcgccgactacgacagggtgctggagaagctgaagaagacagcaacaggctggatgaccacaattaacggcaaggagctgaaggtggagggccagattacctactacaacagatacaagagacagaacgtagtcaaggacctgtccgtcgagctggatagactgagcgaagaatctgtgaacaacgacatctcctcctggacaaagggcagaagcggagaagctctgagcctcctgaagaaaagattctcccatagacccgtgcaggagaagttcgtgtgcctgaactgcggcttcgagacacacgcagccgagcaagccgccctgaacatcgccagatcctggctgttcctgcggagccaggagtacaagaaataccagacaaacaagacaaccggcaacaccgataagagagccttcgtcgagacctggcagtccttttaccggaagaagcttaaggaggtgtggaaacctgccgtgcggtctggcggatctggcggaggctccaccagccccaagaaaaagagaaaagtctaagctgccttctgcggggcttgccttctggccatgcccttcttctctcccttgcacctgtacctcttggtctttgaataaagcctgagtaggaaggctagcaaaaaaaaaaaaaaaaaaaaaaaaaaaaaaaaaaaaaaaaaaaaaaaaaaaaaaaaaaaaaaaaaaaaaaaaaaaaaaaa

SEQ ID NO: 9595 - RNA, 8787 nt, synthetic construct
  source 1..8787: mol_type = other RNA
aggaaataagagagaaaagaagagtaagaagaaatataagagccaccatggcccctaagaagaagcgtaaagtgagccggatgaaccacgaccaggagttcgacccccctaaggtgtaccctcccgtccccgccgagaagagaaagcccatccgggtcctgagcctgttcgatggcatcgccaccggtctgctggtgctgaaggacctgggcatccaggtggataggtacattgcctccgaggtgtgcgaggactccatcaccgtgggaatggtgcgtcatcagggcaagatcatgtacgtgggcgacgtgcggagcgtgacacagaagcatatccaggagtggggccctttcgacctggtgatcggcggcagcccttgcaatgacctgagcatcgtgaacccagcccggaagggcctgtacgagggaaccggcagactgttcttcgagttttacagactgctgcacgacgcccggcctaaggaaggcgacgaccggcccttcttttggctgttcgagaatgtggtggccatgggagtcagcgacaagcgggatattagccggttcctggagagcaaccccgtgatgatcgatgccaaggaagtgagcgccgcccaccgggccagatacttctggggcaatctgcctggcatgaacagacccctggccagcaccgtgaacgacaagctggagctgcaggagtgcctggagcacggccggatcgccaagttcagcaaggtgagaaccatcaccacccgaagcaacagcatcaaacaaggcaaggaccagcactttcctgtgttcatgaacgagaaggaggacatcctgtggtgtaccgagatggagagagtgttcgggttcccagtccactacacagatgtcagcaacatgtctagactggccagacagagactgctgggaagaagctggtccgtccctgtgatcagacacctgttcgcccctctgaaggagtacttcgcctgcgtgagcagcggcaacagcaacgccaacagccggggccccagcttctctagcggcctggtgccactgtccctgagagggagccacatgggccccatggagatctacaaaaccgtgagcgcctggaagcggcagcctgtgcgcgtgctgagcctgtttcggaatatcgataaagtcctgaaaagcctgggattcctggagagcggctctggctccggcggtggcaccctgaagtacgtggaggatgtgacaaacgtggtcagacgggatgtggagaagtggggccccttcgatctggtgtacggcagcacccaacccctgggcagctcttgtgaccggtgccctggctggtacatgtttcagttccaccggatcctgcagtacgccctgccgagacaggagtcccagcggccattcttttggattttcatggacaacttgctgctgaccgaggatgaccaggaaactaccactcggttcctgcagaccgaagccgtgaccctgcaggacgtgagaggccgggactaccagaacgccatgcgggtgtggtccaacatccctggactgaaaagcaagcacgcacctctgacccctaaagaagaggagtacctgcaggcccaggtgcggagcagaagcaagctggacgcccctaaggtggatctgctggtgaagaattgcctcctgcccctgagagagtacttcaagtatttcagccagaatagtctgcccctgggaggcagcggcggcggcttccagaccctgctggccttcgaggacgtggccgtgttcttcagcgaggaggagtgggagctgctggacgagctgcagaaggaggtgtacaagaacaccatgagggagaactacgagaccctgctgagcctgggcctgaccaacatgaagcccgagatcatcgccaagatcgacgccggcgaggcccccagcgtgcagaacgccagctacctggagaagaggggcaagaagagcgccgccggcggcggcccaagcagcggcgcccctcctcccagcggcggcaggcggcccaagcagcggcgcccctcctcccagcggcggcagcccagccggctccccaacctctaccgaggagggcacctctgagtccgccacccccgagagcggccctggcacctccaccgagcccagcgagggcagcgcacccggcagccctgccggcagccccacctccacagaggagggaaccagcaccgagcccagcgaaggcagcgccccaggcaccagcaccgagcctagtgagcaggagattaaacggatcaacaagatcagaagaagacttgtgaaagacagcaacaccaagaaggccggcaagacaggccccatgaaaaccctgctggttagagtgatgacacccgatctgagagagcggctggaaaacctgagaaagaagcctgaaaatatcccccagcccatcagcaatacatctagagccaacctgaataagctgctgaccgattacaccgaaatgaagaaggcgatcctgcatgtgtactgggaagagttccagaaggaccctgtgggcctgatgagccgggtggcccagcctgccagcaagaagatcgatcagaacaagctgaaacctgagatggacgagaagggcaacctgaccaccgccggctttgcctgctctcagtgtggccagcccctgttcgtgtacaagctggagcaggtgtctgagaagggcaaggcttacaccaactacttcggacggtgcaatgtggccgagcacgaaaagctgatcctgctggcccagctgaagcccgagaaggatagcgacgaagccgtgacatatagcctgggaaagtttgggcagagggccctggatttctacagcattcatgtgaccaaggagtccacccaccccgtgaagcccctggcccagatcgccggaaacagatacgcctccggacctgtgggaaaggccctgagcgacgcatgtatgggcacaatcgcctccttcctgtctaagtaccaggacatcatcatcgaacaccagaaggtggtgaagggcaaccagaagagactggagagcctgcgggagctggccggcaaggaaaacctggaataccctagcgtgaccctgccacctcagcctcacaccaaggagggcgttgatgcctacaacgaagtgatcgcccgggtgcgaatgtgggtgaacctgaacctgtggcagaagctgaagctaagcagagatgatgccaagcctctgctgagactgaagggattcccttcctttcctctggtcgagagacaggccaacgaagtggactggtgggacatggtgtgtaacgtgaagaagctgatcaacgagaaaaaggaggatggcaaggtgttttggcagaatctggctggctacaagagacaggaagccctgagaccatacctgagcagcgaggaagatcggaagaagggaaagaaattcgctcggtaccagctgggcgacctgctgctgcacctggaaaagaagcacggcgaggactggggaaaggtgtacgacgaggcctgggagcggattgacaagaaagtggaaggcctgagcaagcacatcaagctggaagaggaacggagaagcgaggacgcccagagcaaggccgccctgaccgactggctgcgggctaaggccagcttcgtgatcgagggcctgaaggaggccgacaaggacgagttctgcagatgcgagctgaagctgcagaagtggtacggggacctgcggggaaagcccttcgccatcgaagccgagaacagcatcctggacatcagcggcttcagcaagcagtacaactgtgccttcatctggcagaaggacggcgtgaagaagctgaacctgtacctgatcatcaactacttcaagggcggcaagctgcggttcaagaagatcaaacctgaagccttcgaagccaacagattctacaccgtgatcaacaaaaagagcggcgagatcgtgcccatggaggtgaacttcaacttcgacgaccccaacctgatcatcctgcctctggcctttggcaagagacagggcagagaattcatctggaacgacctgctgtccctggaaaccggcagcctgaagctggccaacggaagagtgatcgagaagacactgtacaacagaagaacccggcaggatgagcctgccctgttcgtggccctgaccttcgagcggcgggaggtcctggactcctccaatatcaaaccaatgaacctgatcggcgtggcaagaggcgaaaacatccccgccgtgatcgccctgaccgaccccgagggctgcccactgagccggtttaaggatagcctgggaaacccaacccacatcctgagaatcggcgagagctataaggagaagcagcggaccatccaggccaagaaggaggtggagcagcggagagccggcggctacagccggaagtacgccagcaaagccaagaatctggcagacgatatggtgagaaacaccgctagagatctgctgtactacgccgtgacccaggatgccatgctgatcttcgccaacctgagccggggcttcggccggcagggcaagcggaccttcatggccgagagacagtacacacggatggaggactggctgaccgccaagctggcctacgagggcctgagcaagacctacctgtccaagacactggcccagtacacctccaagacatgcagcaactgtgggtttaccatcaccagcgccgactacgacagggtgctggagaagctgaagaagacagcaacaggctggatgaccacaattaacggcaaggagctgaaggtggagggccagattacctactacaacagatacaagagacagaacgtagtcaaggacctgtccgtcgagctggatagactgagcgaagaatctgtgaacaacgacatctcctcctggacaaagggcagaagcggagaagctctgagcctcctgaagaaaagattctcccatagacccgtgcaggagaagttcgtgtgcctgaactgcggcttcgagacacacgcagccgagcaagccgccctgaacatcgccagatcctggctgttcctgcggagccaggagtacaagaaataccagacaaacaagacaaccggcaacaccgataagagagccttcgtcgagacctggcagtccttttaccggaagaagcttaaggaggtgtggaaacctgccgtgcggtctggcggatctggcggaggctccaccagccccaagaaaaagagaaaagtctaagctgccttctgcggggcttgccttctggccatgcccttcttctctcccttgcacctgtacctcttggtctttgaataaagcctgagtaggaaggctagcaaaaaaaaaaaaaaaaaaaaaaaaaaaaaaaaaaaaaaaaaaaaaaaaaaaaaaaaaaaaaaaaaaaaaaaaaaaaaaaagcccagccggctccccaacctctaccgaggagggcacctctgagtccgccacccccgagagcggccctggcacctccaccgagcccagcgagggcagcgcacccggcagccctgccggcagccccacctccacagaggagggaaccagcaccgagcccagcgaaggcagcgccccaggcaccagcaccgagcctagtgagcaggagattaaacggatcaacaagatcagaagaagacttgtgaaagacagcaacaccaagaaggccggcaagacaggccccatgaaaaccctgctggttagagtgatgacacccgatctgagagagcggctggaaaacctgagaaagaagcctgaaaatatcccccagcccatcagcaatacatctagagccaacctgaataagctgctgaccgattacaccgaaatgaagaaggcgatcctgcatgtgtactgggaagagttccagaaggaccctgtgggcctgatgagccgggtggcccagcctgccagcaagaagatcgatcagaacaagctgaaacctgagatggacgagaagggcaacctgaccaccgccggctttgcctgctctcagtgtggccagcccctgttcgtgtacaagctggagcaggtgtctgagaagggcaaggcttacaccaactacttcggacggtgcaatgtggccgagcacgaaaagctgatcctgctggcccagctgaagcccgagaaggatagcgacgaagccgtgacatatagcctgggaaagtttgggcagagggccctggatttctacagcattcatgtgaccaaggagtccacccaccccgtgaagcccctggcccagatcgccggaaacagatacgcctccggacctgtgggaaaggccctgagcgacgcatgtatgggcacaatcgcctccttcctgtctaagtaccaggacatcatcatcgaacaccagaaggtggtgaagggcaaccagaagagactggagagcctgcgggagctggccggcaaggaaaacctggaataccctagcgtgaccctgccacctcagcctcacaccaaggagggcgttgatgcctacaacgaagtgatcgcccgggtgcgaatgtgggtgaacctgaacctgtggcagaagctgaagctaagcagagatgatgccaagcctctgctgagactgaagggattcccttcctttcctctggtcgagagacaggccaacgaagtggactggtgggacatggtgtgtaacgtgaagaagctgatcaacgagaaaaaggaggatggcaaggtgttttggcagaatctggctggctacaagagacaggaagccctgagaccatacctgagcagcgaggaagatcggaagaagggaaagaaattcgctcggtaccagctgggcgacctgctgctgcacctggaaaagaagcacggcgaggactggggaaaggtgtacgacgaggcctgggagcggattgacaagaaagtggaaggcctgagcaagcacatcaagctggaagaggaacggagaagcgaggacgcccagagcaaggccgccctgaccgactggctgcgggctaaggccagcttcgtgatcgagggcctgaaggaggccgacaaggacgagttctgcagatgcgagctgaagctgcagaagtggtacggggacctgcggggaaagcccttcgccatcgaagccgagaacagcatcctggacatcagcggcttcagcaagcagtacaactgtgccttcatctggcagaaggacggcgtgaagaagctgaacctgtacctgatcatcaactacttcaagggcggcaagctgcggttcaagaagatcaaacctgaagccttcgaagccaacagattctacaccgtgatcaacaaaaagagcggcgagatcgtgcccatggaggtgaacttcaacttcgacgaccccaacctgatcatcctgcctctggcctttggcaagagacagggcagagaattcatctggaacgacctgctgtccctggaaaccggcagcctgaagctggccaacggaagagtgatcgagaagacactgtacaacagaagaacccggcaggatgagcctgccctgttcgtggccctgaccttcgagcggcgggaggtcctggactcctccaatatcaaaccaatgaacctgatcggcgtggcaagaggcgaaaacatccccgccgtgatcgccctgaccgaccccgagggctgcccactgagccggtttaaggatagcctgggaaacccaacccacatcctgagaatcggcgagagctataaggagaagcagcggaccatccaggccaagaaggaggtggagcagcggagagccggcggctacagccggaagtacgccagcaaagccaagaatctggcagacgatatggtgagaaacaccgctagagatctgctgtactacgccgtgacccaggatgccatgctgatcttcgccaacctgagccggggcttcggccggcagggcaagcggaccttcatggccgagagacagtacacacggatggaggactggctgaccgccaagctggcctacgagggcctgagcaagacctacctgtccaagacactggcccagtacacctccaagacatgcagcaactgtgggtttaccatcaccagcgccgactacgacagggtgctggagaagctgaagaagacagcaacaggctggatgaccacaattaacggcaaggagctgaaggtggagggccagattacctactacaacagatacaagagacagaacgtagtcaaggacctgtccgtcgagctggatagactgagcgaagaatctgtgaacaacgacatctcctcctggacaaagggcagaagcggagaagctctgagcctcctgaagaaaagattctcccatagacccgtgcaggagaagttcgtgtgcctgaactgcggcttcgagacacacgcagccgagcaagccgccctgaacatcgccagatcctggctgttcctgcggagccaggagtacaagaaataccagacaaacaagacaaccggcaacaccgataagagagccttcgtcgagacctggcagtccttttaccggaagaagcttaaggaggtgtggaaacctgccgtgcggtctggcggatctggcggaggctccaccagccccaagaaaaagagaaaagtctaagctgccttctgcggggcttgccttctggccatgcccttcttctctcccttgcacctgtacctcttggtctttgaataaagcctgagtaggaaggctagcaaaaaaaaaaaaaaaaaaaaaaaaaaaaaaaaaaaaaaaaaaaaaaaaaaaaaaaaaaaaaaaaaaaaaaaaaaaaaaaa

SEQ ID NO: 9596 - RNA, 8787 nt, synthetic construct
  source 1..8787: mol_type = other RNA
aggaaataagagagaaaagaagagtaagaagaaatataagagccaccatggcccctaagaagaagcgtaaagtgagccggatgaaccacgaccaggagttcgacccccctaaggtgtaccctcccgtccccgccgagaagagaaagcccatccgggtcctgagcctgttcgatggcatcgccaccggtctgctggtgctgaaggacctgggcatccaggtggataggtacattgcctccgaggtgtgcgaggactccatcaccgtgggaatggtgcgtcatcagggcaagatcatgtacgtgggcgacgtgcggagcgtgacacagaagcatatccaggagtggggccctttcgacctggtgatcggcggcagcccttgcaatgacctgagcatcgtgaacccagcccggaagggcctgtacgagggaaccggcagactgttcttcgagttttacagactgctgcacgacgcccggcctaaggaaggcgacgaccggcccttcttttggctgttcgagaatgtggtggccatgggagtcagcgacaagcgggatattagccggttcctggagagcaaccccgtgatgatcgatgccaaggaagtgagcgccgcccaccgggccagatacttctggggcaatctgcctggcatgaacagacccctggccagcaccgtgaacgacaagctggagctgcaggagtgcctggagcacggccggatcgccaagttcagcaaggtgagaaccatcaccacccgaagcaacagcatcaaacaaggcaaggaccagcactttcctgtgttcatgaacgagaaggaggacatcctgtggtgtaccgagatggagagagtgttcgggttcccagtccactacacagatgtcagcaacatgtctagactggccagacagagactgctgggaagaagctggtccgtccctgtgatcagacacctgttcgcccctctgaaggagtacttcgcctgcgtgagcagcggcaacagcaacgccaacagccggggccccagcttctctagcggcctggtgccactgtccctgagagggagccacatgggccccatggagatctacaaaaccgtgagcgcctggaagcggcagcctgtgcgcgtgctgagcctgtttcggaatatcgataaagtcctgaaaagcctgggattcctggagagcggctctggctccggcggtggcaccctgaagtacgtggaggatgtgacaaacgtggtcagacgggatgtggagaagtggggccccttcgatctggtgtacggcagcacccaacccctgggcagctcttgtgaccggtgccctggctggtacatgtttcagttccaccggatcctgcagtacgccctgccgagacaggagtcccagcggccattcttttggattttcatggacaacttgctgctgaccgaggatgaccaggaaactaccactcggttcctgcagaccgaagccgtgaccctgcaggacgtgagaggccgggactaccagaacgccatgcgggtgtggtccaacatccctggactgaaaagcaagcacgcacctctgacccctaaagaagaggagtacctgcaggcccaggtgcggagcagaagcaagctggacgcccctaaggtggatctgctggtgaagaattgcctcctgcccctgagagagtacttcaagtatttcagccagaatagtctgcccctgggaggcagcggcggcggccaccaggagagcctgaccttcaaggacgtggccgtgaacttcacccaggaggagtggcaccacgtggacgccgcccagaggaggctgtacaaggacgtgatgctggagaactacagccacctggtgagcctgggctaccaggtgagcaagcccgaggtgatcttcaagctggagcagggcgaggagccctggatcgccgagggcgagatccagaggcccgtgtgccccgactggaagaccaggggcggcccaagcagcggcgcccctcctcccagcggcggcaggcggcccaagcagcggcgcccctcctcccagcggcggcagcccagccggctccccaacctctaccgaggagggcacctctgagtccgccacccccgagagcggccctggcacctccaccgagcccagcgagggcagcgcacccggcagccctgccggcagccccacctccacagaggagggaaccagcaccgagcccagcgaaggcagcgccccaggcaccagcaccgagcctagtgagcaggagattaaacggatcaacaagatcagaagaagacttgtgaaagacagcaacaccaagaaggccggcaagacaggccccatgaaaaccctgctggttagagtgatgacacccgatctgagagagcggctggaaaacctgagaaagaagcctgaaaatatcccccagcccatcagcaatacatctagagccaacctgaataagctgctgaccgattacaccgaaatgaagaaggcgatcctgcatgtgtactgggaagagttccagaaggaccctgtgggcctgatgagccgggtggcccagcctgccagcaagaagatcgatcagaacaagctgaaacctgagatggacgagaagggcaacctgaccaccgccggctttgcctgctctcagtgtggccagcccctgttcgtgtacaagctggagcaggtgtctgagaagggcaaggcttacaccaactacttcggacggtgcaatgtggccgagcacgaaaagctgatcctgctggcccagctgaagcccgagaaggatagcgacgaagccgtgacatatagcctgggaaagtttgggcagagggccctggatttctacagcattcatgtgaccaaggagtccacccaccccgtgaagcccctggcccagatcgccggaaacagatacgcctccggacctgtgggaaaggccctgagcgacgcatgtatgggcacaatcgcctccttcctgtctaagtaccaggacatcatcatcgaacaccagaaggtggtgaagggcaaccagaagagactggagagcctgcgggagctggccggcaaggaaaacctggaataccctagcgtgaccctgccacctcagcctcacaccaaggagggcgttgatgcctacaacgaagtgatcgcccgggtgcgaatgtgggtgaacctgaacctgtggcagaagctgaagctaagcagagatgatgccaagcctctgctgagactgaagggattcccttcctttcctctggtcgagagacaggccaacgaagtggactggtgggacatggtgtgtaacgtgaagaagctgatcaacgagaaaaaggaggatggcaaggtgttttggcagaatctggctggctacaagagacaggaagccctgagaccatacctgagcagcgaggaagatcggaagaagggaaagaaattcgctcggtaccagctgggcgacctgctgctgcacctggaaaagaagcacggcgaggactggggaaaggtgtacgacgaggcctgggagcggattgacaagaaagtggaaggcctgagcaagcacatcaagctggaagaggaacggagaagcgaggacgcccagagcaaggccgccctgaccgactggctgcgggctaaggccagcttcgtgatcgagggcctgaaggaggccgacaaggacgagttctgcagatgcgagctgaagctgcagaagtggtacggggacctgcggggaaagcccttcgccatcgaagccgagaacagcatcctggacatcagcggcttcagcaagcagtacaactgtgccttcatctggcagaaggacggcgtgaagaagctgaacctgtacctgatcatcaactacttcaagggcggcaagctgcggttcaagaagatcaaacctgaagccttcgaagccaacagattctacaccgtgatcaacaaaaagagcggcgagatcgtgcccatggaggtgaacttcaacttcgacgaccccaacctgatcatcctgcctctggcctttggcaagagacagggcagagaattcatctggaacgacctgctgtccctggaaaccggcagcctgaagctggccaacggaagagtgatcgagaagacactgtacaacagaagaacccggcaggatgagcctgccctgttcgtggccctgaccttcgagcggcgggaggtcctggactcctccaatatcaaaccaatgaacctgatcggcgtggcaagaggcgaaaacatccccgccgtgatcgccctgaccgaccccgagggctgcccactgagccggtttaaggatagcctgggaaacccaacccacatcctgagaatcggcgagagctataaggagaagcagcggaccatccaggccaagaaggaggtggagcagcggagagccggcggctacagccggaagtacgccagcaaagccaagaatctggcagacgatatggtgagaaacaccgctagagatctgctgtactacgccgtgacccaggatgccatgctgatcttcgccaacctgagccggggcttcggccggcagggcaagcggaccttcatggccgagagacagtacacacggatggaggactggctgaccgccaagctggcctacgagggcctgagcaagacctacctgtccaagacactggcccagtacacctccaagacatgcagcaactgtgggtttaccatcaccagcgccgactacgacagggtgctggagaagctgaagaagacagcaacaggctggatgaccacaattaacggcaaggagctgaaggtggagggccagattacctactacaacagatacaagagacagaacgtagtcaaggacctgtccgtcgagctggatagactgagcgaagaatctgtgaacaacgacatctcctcctggacaaagggcagaagcggagaagctctgagcctcctgaagaaaagattctcccatagacccgtgcaggagaagttcgtgtgcctgaactgcggcttcgagacacacgcagccgagcaagccgccctgaacatcgccagatcctggctgttcctgcggagccaggagtacaagaaataccagacaaacaagacaaccggcaacaccgataagagagccttcgtcgagacctggcagtccttttaccggaagaagcttaaggaggtgtggaaacctgccgtgcggtctggcggatctggcggaggctccaccagccccaagaaaaagagaaaagtctaagctgccttctgcggggcttgccttctggccatgcccttcttctctcccttgcacctgtacctcttggtctttgaataaagcctgagtaggaaggctagcaaaaaaaaaaaaaaaaaaaaaaaaaaaaaaaaaaaaaaaaaaaaaaaaaaaaaaaaaaaaaaaaaaaaaaaaaaaaaaaagcccagccggctccccaacctctaccgaggagggcacctctgagtccgccacccccgagagcggccctggcacctccaccgagcccagcgagggcagcgcacccggcagccctgccggcagccccacctccacagaggagggaaccagcaccgagcccagcgaaggcagcgccccaggcaccagcaccgagcctagtgagcaggagattaaacggatcaacaagatcagaagaagacttgtgaaagacagcaacaccaagaaggccggcaagacaggccccatgaaaaccctgctggttagagtgatgacacccgatctgagagagcggctggaaaacctgagaaagaagcctgaaaatatcccccagcccatcagcaatacatctagagccaacctgaataagctgctgaccgattacaccgaaatgaagaaggcgatcctgcatgtgtactgggaagagttccagaaggaccctgtgggcctgatgagccgggtggcccagcctgccagcaagaagatcgatcagaacaagctgaaacctgagatggacgagaagggcaacctgaccaccgccggctttgcctgctctcagtgtggccagcccctgttcgtgtacaagctggagcaggtgtctgagaagggcaaggcttacaccaactacttcggacggtgcaatgtggccgagcacgaaaagctgatcctgctggcccagctgaagcccgagaaggatagcgacgaagccgtgacatatagcctgggaaagtttgggcagagggccctggatttctacagcattcatgtgaccaaggagtccacccaccccgtgaagcccctggcccagatcgccggaaacagatacgcctccggacctgtgggaaaggccctgagcgacgcatgtatgggcacaatcgcctccttcctgtctaagtaccaggacatcatcatcgaacaccagaaggtggtgaagggcaaccagaagagactggagagcctgcgggagctggccggcaaggaaaacctggaataccctagcgtgaccctgccacctcagcctcacaccaaggagggcgttgatgcctacaacgaagtgatcgcccgggtgcgaatgtgggtgaacctgaacctgtggcagaagctgaagctaagcagagatgatgccaagcctctgctgagactgaagggattcccttcctttcctctggtcgagagacaggccaacgaagtggactggtgggacatggtgtgtaacgtgaagaagctgatcaacgagaaaaaggaggatggcaaggtgttttggcagaatctggctggctacaagagacaggaagccctgagaccatacctgagcagcgaggaagatcggaagaagggaaagaaattcgctcggtaccagctgggcgacctgctgctgcacctggaaaagaagcacggcgaggactggggaaaggtgtacgacgaggcctgggagcggattgacaagaaagtggaaggcctgagcaagcacatcaagctggaagaggaacggagaagcgaggacgcccagagcaaggccgccctgaccgactggctgcgggctaaggccagcttcgtgatcgagggcctgaaggaggccgacaaggacgagttctgcagatgcgagctgaagctgcagaagtggtacggggacctgcggggaaagcccttcgccatcgaagccgagaacagcatcctggacatcagcggcttcagcaagcagtacaactgtgccttcatctggcagaaggacggcgtgaagaagctgaacctgtacctgatcatcaactacttcaagggcggcaagctgcggttcaagaagatcaaacctgaagccttcgaagccaacagattctacaccgtgatcaacaaaaagagcggcgagatcgtgcccatggaggtgaacttcaacttcgacgaccccaacctgatcatcctgcctctggcctttggcaagagacagggcagagaattcatctggaacgacctgctgtccctggaaaccggcagcctgaagctggccaacggaagagtgatcgagaagacactgtacaacagaagaacccggcaggatgagcctgccctgttcgtggccctgaccttcgagcggcgggaggtcctggactcctccaatatcaaaccaatgaacctgatcggcgtggcaagaggcgaaaacatccccgccgtgatcgccctgaccgaccccgagggctgcccactgagccggtttaaggatagcctgggaaacccaacccacatcctgagaatcggcgagagctataaggagaagcagcggaccatccaggccaagaaggaggtggagcagcggagagccggcggctacagccggaagtacgccagcaaagccaagaatctggcagacgatatggtgagaaacaccgctagagatctgctgtactacgccgtgacccaggatgccatgctgatcttcgccaacctgagccggggcttcggccggcagggcaagcggaccttcatggccgagagacagtacacacggatggaggactggctgaccgccaagctggcctacgagggcctgagcaagacctacctgtccaagacactggcccagtacacctccaagacatgcagcaactgtgggtttaccatcaccagcgccgactacgacagggtgctggagaagctgaagaagacagcaacaggctggatgaccacaattaacggcaaggagctgaaggtggagggccagattacctactacaacagatacaagagacagaacgtagtcaaggacctgtccgtcgagctggatagactgagcgaagaatctgtgaacaacgacatctcctcctggacaaagggcagaagcggagaagctctgagcctcctgaagaaaagattctcccatagacccgtgcaggagaagttcgtgtgcctgaactgcggcttcgagacacacgcagccgagcaagccgccctgaacatcgccagatcctggctgttcctgcggagccaggagtacaagaaataccagacaaacaagacaaccggcaacaccgataagagagccttcgtcgagacctggcagtccttttaccggaagaagcttaaggaggtgtggaaacctgccgtgcggtctggcggatctggcggaggctccaccagccccaagaaaaagagaaaagtctaagctgccttctgcggggcttgccttctggccatgcccttcttctctcccttgcacctgtacctcttggtctttgaataaagcctgagtaggaaggctagcaaaaaaaaaaaaaaaaaaaaaaaaaaaaaaaaaaaaaaaaaaaaaaaaaaaaaaaaaaaaaaaaaaaaaaaaaaaaaaaa

SEQ ID NO: 9597 - RNA, 8787 nt, synthetic construct
  source 1..8787: mol_type = other RNA
aggaaataagagagaaaagaagagtaagaagaaatataagagccaccatggcccctaagaagaagcgtaaagtgagccggatgaaccacgaccaggagttcgacccccctaaggtgtaccctcccgtccccgccgagaagagaaagcccatccgggtcctgagcctgttcgatggcatcgccaccggtctgctggtgctgaaggacctgggcatccaggtggataggtacattgcctccgaggtgtgcgaggactccatcaccgtgggaatggtgcgtcatcagggcaagatcatgtacgtgggcgacgtgcggagcgtgacacagaagcatatccaggagtggggccctttcgacctggtgatcggcggcagcccttgcaatgacctgagcatcgtgaacccagcccggaagggcctgtacgagggaaccggcagactgttcttcgagttttacagactgctgcacgacgcccggcctaaggaaggcgacgaccggcccttcttttggctgttcgagaatgtggtggccatgggagtcagcgacaagcgggatattagccggttcctggagagcaaccccgtgatgatcgatgccaaggaagtgagcgccgcccaccgggccagatacttctggggcaatctgcctggcatgaacagacccctggccagcaccgtgaacgacaagctggagctgcaggagtgcctggagcacggccggatcgccaagttcagcaaggtgagaaccatcaccacccgaagcaacagcatcaaacaaggcaaggaccagcactttcctgtgttcatgaacgagaaggaggacatcctgtggtgtaccgagatggagagagtgttcgggttcccagtccactacacagatgtcagcaacatgtctagactggccagacagagactgctgggaagaagctggtccgtccctgtgatcagacacctgttcgcccctctgaaggagtacttcgcctgcgtgagcagcggcaacagcaacgccaacagccggggccccagcttctctagcggcctggtgccactgtccctgagagggagccacatgggccccatggagatctacaaaaccgtgagcgcctggaagcggcagcctgtgcgcgtgctgagcctgtttcggaatatcgataaagtcctgaaaagcctgggattcctggagagcggctctggctccggcggtggcaccctgaagtacgtggaggatgtgacaaacgtggtcagacgggatgtggagaagtggggccccttcgatctggtgtacggcagcacccaacccctgggcagctcttgtgaccggtgccctggctggtacatgtttcagttccaccggatcctgcagtacgccctgccgagacaggagtcccagcggccattcttttggattttcatggacaacttgctgctgaccgaggatgaccaggaaactaccactcggttcctgcagaccgaagccgtgaccctgcaggacgtgagaggccgggactaccagaacgccatgcgggtgtggtccaacatccctggactgaaaagcaagcacgcacctctgacccctaaagaagaggagtacctgcaggcccaggtgcggagcagaagcaagctggacgcccctaaggtggatctgctggtgaagaattgcctcctgcccctgagagagtacttcaagtatttcagccagaatagtctgcccctgggaggcagcggcggcggcaagcccggcgccgtgagcttcgccgacgtggccgtgtacttcagcagggaggagtggggctgcctgaggcccgcccagagggccctgtacagggacgtgatgagggagacctacggccacctgggcgccctgggcgtgggcggcagcaagcccgccctgatcagctgggtggaggagaaggccgagctgtgggaccccgccgcccaggaccccgaggtggccaagtgccccaccgaggccgacggcggcccaagcagcggcgcccctcctcccagcggcggcaggcggcccaagcagcggcgcccctcctcccagcggcggcagcccagccggctccccaacctctaccgaggagggcacctctgagtccgccacccccgagagcggccctggcacctccaccgagcccagcgagggcagcgcacccggcagccctgccggcagccccacctccacagaggagggaaccagcaccgagcccagcgaaggcagcgccccaggcaccagcaccgagcctagtgagcaggagattaaacggatcaacaagatcagaagaagacttgtgaaagacagcaacaccaagaaggccggcaagacaggccccatgaaaaccctgctggttagagtgatgacacccgatctgagagagcggctggaaaacctgagaaagaagcctgaaaatatcccccagcccatcagcaatacatctagagccaacctgaataagctgctgaccgattacaccgaaatgaagaaggcgatcctgcatgtgtactgggaagagttccagaaggaccctgtgggcctgatgagccgggtggcccagcctgccagcaagaagatcgatcagaacaagctgaaacctgagatggacgagaagggcaacctgaccaccgccggctttgcctgctctcagtgtggccagcccctgttcgtgtacaagctggagcaggtgtctgagaagggcaaggcttacaccaactacttcggacggtgcaatgtggccgagcacgaaaagctgatcctgctggcccagctgaagcccgagaaggatagcgacgaagccgtgacatatagcctgggaaagtttgggcagagggccctggatttctacagcattcatgtgaccaaggagtccacccaccccgtgaagcccctggcccagatcgccggaaacagatacgcctccggacctgtgggaaaggccctgagcgacgcatgtatgggcacaatcgcctccttcctgtctaagtaccaggacatcatcatcgaacaccagaaggtggtgaagggcaaccagaagagactggagagcctgcgggagctggccggcaaggaaaacctggaataccctagcgtgaccctgccacctcagcctcacaccaaggagggcgttgatgcctacaacgaagtgatcgcccgggtgcgaatgtgggtgaacctgaacctgtggcagaagctgaagctaagcagagatgatgccaagcctctgctgagactgaagggattcccttcctttcctctggtcgagagacaggccaacgaagtggactggtgggacatggtgtgtaacgtgaagaagctgatcaacgagaaaaaggaggatggcaaggtgttttggcagaatctggctggctacaagagacaggaagccctgagaccatacctgagcagcgaggaagatcggaagaagggaaagaaattcgctcggtaccagctgggcgacctgctgctgcacctggaaaagaagcacggcgaggactggggaaaggtgtacgacgaggcctgggagcggattgacaagaaagtggaaggcctgagcaagcacatcaagctggaagaggaacggagaagcgaggacgcccagagcaaggccgccctgaccgactggctgcgggctaaggccagcttcgtgatcgagggcctgaaggaggccgacaaggacgagttctgcagatgcgagctgaagctgcagaagtggtacggggacctgcggggaaagcccttcgccatcgaagccgagaacagcatcctggacatcagcggcttcagcaagcagtacaactgtgccttcatctggcagaaggacggcgtgaagaagctgaacctgtacctgatcatcaactacttcaagggcggcaagctgcggttcaagaagatcaaacctgaagccttcgaagccaacagattctacaccgtgatcaacaaaaagagcggcgagatcgtgcccatggaggtgaacttcaacttcgacgaccccaacctgatcatcctgcctctggcctttggcaagagacagggcagagaattcatctggaacgacctgctgtccctggaaaccggcagcctgaagctggccaacggaagagtgatcgagaagacactgtacaacagaagaacccggcaggatgagcctgccctgttcgtggccctgaccttcgagcggcgggaggtcctggactcctccaatatcaaaccaatgaacctgatcggcgtggcaagaggcgaaaacatccccgccgtgatcgccctgaccgaccccgagggctgcccactgagccggtttaaggatagcctgggaaacccaacccacatcctgagaatcggcgagagctataaggagaagcagcggaccatccaggccaagaaggaggtggagcagcggagagccggcggctacagccggaagtacgccagcaaagccaagaatctggcagacgatatggtgagaaacaccgctagagatctgctgtactacgccgtgacccaggatgccatgctgatcttcgccaacctgagccggggcttcggccggcagggcaagcggaccttcatggccgagagacagtacacacggatggaggactggctgaccgccaagctggcctacgagggcctgagcaagacctacctgtccaagacactggcccagtacacctccaagacatgcagcaactgtgggtttaccatcaccagcgccgactacgacagggtgctggagaagctgaagaagacagcaacaggctggatgaccacaattaacggcaaggagctgaaggtggagggccagattacctactacaacagatacaagagacagaacgtagtcaaggacctgtccgtcgagctggatagactgagcgaagaatctgtgaacaacgacatctcctcctggacaaagggcagaagcggagaagctctgagcctcctgaagaaaagattctcccatagacccgtgcaggagaagttcgtgtgcctgaactgcggcttcgagacacacgcagccgagcaagccgccctgaacatcgccagatcctggctgttcctgcggagccaggagtacaagaaataccagacaaacaagacaaccggcaacaccgataagagagccttcgtcgagacctggcagtccttttaccggaagaagcttaaggaggtgtggaaacctgccgtgcggtctggcggatctggcggaggctccaccagccccaagaaaaagagaaaagtctaagctgccttctgcggggcttgccttctggccatgcccttcttctctcccttgcacctgtacctcttggtctttgaataaagcctgagtaggaaggctagcaaaaaaaaaaaaaaaaaaaaaaaaaaaaaaaaaaaaaaaaaaaaaaaaaaaaaaaaaaaaaaaaaaaaaaaaaaaaaaaagcccagccggctccccaacctctaccgaggagggcacctctgagtccgccacccccgagagcggccctggcacctccaccgagcccagcgagggcagcgcacccggcagccctgccggcagccccacctccacagaggagggaaccagcaccgagcccagcgaaggcagcgccccaggcaccagcaccgagcctagtgagcaggagattaaacggatcaacaagatcagaagaagacttgtgaaagacagcaacaccaagaaggccggcaagacaggccccatgaaaaccctgctggttagagtgatgacacccgatctgagagagcggctggaaaacctgagaaagaagcctgaaaatatcccccagcccatcagcaatacatctagagccaacctgaataagctgctgaccgattacaccgaaatgaagaaggcgatcctgcatgtgtactgggaagagttccagaaggaccctgtgggcctgatgagccgggtggcccagcctgccagcaagaagatcgatcagaacaagctgaaacctgagatggacgagaagggcaacctgaccaccgccggctttgcctgctctcagtgtggccagcccctgttcgtgtacaagctggagcaggtgtctgagaagggcaaggcttacaccaactacttcggacggtgcaatgtggccgagcacgaaaagctgatcctgctggcccagctgaagcccgagaaggatagcgacgaagccgtgacatatagcctgggaaagtttgggcagagggccctggatttctacagcattcatgtgaccaaggagtccacccaccccgtgaagcccctggcccagatcgccggaaacagatacgcctccggacctgtgggaaaggccctgagcgacgcatgtatgggcacaatcgcctccttcctgtctaagtaccaggacatcatcatcgaacaccagaaggtggtgaagggcaaccagaagagactggagagcctgcgggagctggccggcaaggaaaacctggaataccctagcgtgaccctgccacctcagcctcacaccaaggagggcgttgatgcctacaacgaagtgatcgcccgggtgcgaatgtgggtgaacctgaacctgtggcagaagctgaagctaagcagagatgatgccaagcctctgctgagactgaagggattcccttcctttcctctggtcgagagacaggccaacgaagtggactggtgggacatggtgtgtaacgtgaagaagctgatcaacgagaaaaaggaggatggcaaggtgttttggcagaatctggctggctacaagagacaggaagccctgagaccatacctgagcagcgaggaagatcggaagaagggaaagaaattcgctcggtaccagctgggcgacctgctgctgcacctggaaaagaagcacggcgaggactggggaaaggtgtacgacgaggcctgggagcggattgacaagaaagtggaaggcctgagcaagcacatcaagctggaagaggaacggagaagcgaggacgcccagagcaaggccgccctgaccgactggctgcgggctaaggccagcttcgtgatcgagggcctgaaggaggccgacaaggacgagttctgcagatgcgagctgaagctgcagaagtggtacggggacctgcggggaaagcccttcgccatcgaagccgagaacagcatcctggacatcagcggcttcagcaagcagtacaactgtgccttcatctggcagaaggacggcgtgaagaagctgaacctgtacctgatcatcaactacttcaagggcggcaagctgcggttcaagaagatcaaacctgaagccttcgaagccaacagattctacaccgtgatcaacaaaaagagcggcgagatcgtgcccatggaggtgaacttcaacttcgacgaccccaacctgatcatcctgcctctggcctttggcaagagacagggcagagaattcatctggaacgacctgctgtccctggaaaccggcagcctgaagctggccaacggaagagtgatcgagaagacactgtacaacagaagaacccggcaggatgagcctgccctgttcgtggccctgaccttcgagcggcgggaggtcctggactcctccaatatcaaaccaatgaacctgatcggcgtggcaagaggcgaaaacatccccgccgtgatcgccctgaccgaccccgagggctgcccactgagccggtttaaggatagcctgggaaacccaacccacatcctgagaatcggcgagagctataaggagaagcagcggaccatccaggccaagaaggaggtggagcagcggagagccggcggctacagccggaagtacgccagcaaagccaagaatctggcagacgatatggtgagaaacaccgctagagatctgctgtactacgccgtgacccaggatgccatgctgatcttcgccaacctgagccggggcttcggccggcagggcaagcggaccttcatggccgagagacagtacacacggatggaggactggctgaccgccaagctggcctacgagggcctgagcaagacctacctgtccaagacactggcccagtacacctccaagacatgcagcaactgtgggtttaccatcaccagcgccgactacgacagggtgctggagaagctgaagaagacagcaacaggctggatgaccacaattaacggcaaggagctgaaggtggagggccagattacctactacaacagatacaagagacagaacgtagtcaaggacctgtccgtcgagctggatagactgagcgaagaatctgtgaacaacgacatctcctcctggacaaagggcagaagcggagaagctctgagcctcctgaagaaaagattctcccatagacccgtgcaggagaagttcgtgtgcctgaactgcggcttcgagacacacgcagccgagcaagccgccctgaacatcgccagatcctggctgttcctgcggagccaggagtacaagaaataccagacaaacaagacaaccggcaacaccgataagagagccttcgtcgagacctggcagtccttttaccggaagaagcttaaggaggtgtggaaacctgccgtgcggtctggcggatctggcggaggctccaccagccccaagaaaaagagaaaagtctaagctgccttctgcggggcttgccttctggccatgcccttcttctctcccttgcacctgtacctcttggtctttgaataaagcctgagtaggaaggctagcaaaaaaaaaaaaaaaaaaaaaaaaaaaaaaaaaaaaaaaaaaaaaaaaaaaaaaaaaaaaaaaaaaaaaaaaaaaaaaaa

SEQ ID NO: 9598 - RNA, 8787 nt, synthetic construct
  source 1..8787: mol_type = other RNA
aggaaataagagagaaaagaagagtaagaagaaatataagagccaccatggcccctaagaagaagcgtaaagtgagccggatgaaccacgaccaggagttcgacccccctaaggtgtaccctcccgtccccgccgagaagagaaagcccatccgggtcctgagcctgttcgatggcatcgccaccggtctgctggtgctgaaggacctgggcatccaggtggataggtacattgcctccgaggtgtgcgaggactccatcaccgtgggaatggtgcgtcatcagggcaagatcatgtacgtgggcgacgtgcggagcgtgacacagaagcatatccaggagtggggccctttcgacctggtgatcggcggcagcccttgcaatgacctgagcatcgtgaacccagcccggaagggcctgtacgagggaaccggcagactgttcttcgagttttacagactgctgcacgacgcccggcctaaggaaggcgacgaccggcccttcttttggctgttcgagaatgtggtggccatgggagtcagcgacaagcgggatattagccggttcctggagagcaaccccgtgatgatcgatgccaaggaagtgagcgccgcccaccgggccagatacttctggggcaatctgcctggcatgaacagacccctggccagcaccgtgaacgacaagctggagctgcaggagtgcctggagcacggccggatcgccaagttcagcaaggtgagaaccatcaccacccgaagcaacagcatcaaacaaggcaaggaccagcactttcctgtgttcatgaacgagaaggaggacatcctgtggtgtaccgagatggagagagtgttcgggttcccagtccactacacagatgtcagcaacatgtctagactggccagacagagactgctgggaagaagctggtccgtccctgtgatcagacacctgttcgcccctctgaaggagtacttcgcctgcgtgagcagcggcaacagcaacgccaacagccggggccccagcttctctagcggcctggtgccactgtccctgagagggagccacatgggccccatggagatctacaaaaccgtgagcgcctggaagcggcagcctgtgcgcgtgctgagcctgtttcggaatatcgataaagtcctgaaaagcctgggattcctggagagcggctctggctccggcggtggcaccctgaagtacgtggaggatgtgacaaacgtggtcagacgggatgtggagaagtggggccccttcgatctggtgtacggcagcacccaacccctgggcagctcttgtgaccggtgccctggctggtacatgtttcagttccaccggatcctgcagtacgccctgccgagacaggagtcccagcggccattcttttggattttcatggacaacttgctgctgaccgaggatgaccaggaaactaccactcggttcctgcagaccgaagccgtgaccctgcaggacgtgagaggccgggactaccagaacgccatgcgggtgtggtccaacatccctggactgaaaagcaagcacgcacctctgacccctaaagaagaggagtacctgcaggcccaggtgcggagcagaagcaagctggacgcccctaaggtggatctgctggtgaagaattgcctcctgcccctgagagagtacttcaagtatttcagccagaatagtctgcccctgggaggcagcggcggcggcgcccacatgagcctgagcttcagggacgtggccatcgacctgagccaggaggagtgggagtgcctggaccccgtgcagagggccctgtacagggacgtgatgctggagaactacagcaacctggtgagcctgggctgcagcacccccaagcccgacatgatcaccctgctggagcaggagaaggagccctggatgatcatgagggagggcaccggcagctggttcaccggcctggagagcaagggcggcccaagcagcggcgcccctcctcccagcggcggcaggcggcccaagcagcggcgcccctcctcccagcggcggcagcccagccggctccccaacctctaccgaggagggcacctctgagtccgccacccccgagagcggccctggcacctccaccgagcccagcgagggcagcgcacccggcagccctgccggcagccccacctccacagaggagggaaccagcaccgagcccagcgaaggcagcgccccaggcaccagcaccgagcctagtgagcaggagattaaacggatcaacaagatcagaagaagacttgtgaaagacagcaacaccaagaaggccggcaagacaggccccatgaaaaccctgctggttagagtgatgacacccgatctgagagagcggctggaaaacctgagaaagaagcctgaaaatatcccccagcccatcagcaatacatctagagccaacctgaataagctgctgaccgattacaccgaaatgaagaaggcgatcctgcatgtgtactgggaagagttccagaaggaccctgtgggcctgatgagccgggtggcccagcctgccagcaagaagatcgatcagaacaagctgaaacctgagatggacgagaagggcaacctgaccaccgccggctttgcctgctctcagtgtggccagcccctgttcgtgtacaagctggagcaggtgtctgagaagggcaaggcttacaccaactacttcggacggtgcaatgtggccgagcacgaaaagctgatcctgctggcccagctgaagcccgagaaggatagcgacgaagccgtgacatatagcctgggaaagtttgggcagagggccctggatttctacagcattcatgtgaccaaggagtccacccaccccgtgaagcccctggcccagatcgccggaaacagatacgcctccggacctgtgggaaaggccctgagcgacgcatgtatgggcacaatcgcctccttcctgtctaagtaccaggacatcatcatcgaacaccagaaggtggtgaagggcaaccagaagagactggagagcctgcgggagctggccggcaaggaaaacctggaataccctagcgtgaccctgccacctcagcctcacaccaaggagggcgttgatgcctacaacgaagtgatcgcccgggtgcgaatgtgggtgaacctgaacctgtggcagaagctgaagctaagcagagatgatgccaagcctctgctgagactgaagggattcccttcctttcctctggtcgagagacaggccaacgaagtggactggtgggacatggtgtgtaacgtgaagaagctgatcaacgagaaaaaggaggatggcaaggtgttttggcagaatctggctggctacaagagacaggaagccctgagaccatacctgagcagcgaggaagatcggaagaagggaaagaaattcgctcggtaccagctgggcgacctgctgctgcacctggaaaagaagcacggcgaggactggggaaaggtgtacgacgaggcctgggagcggattgacaagaaagtggaaggcctgagcaagcacatcaagctggaagaggaacggagaagcgaggacgcccagagcaaggccgccctgaccgactggctgcgggctaaggccagcttcgtgatcgagggcctgaaggaggccgacaaggacgagttctgcagatgcgagctgaagctgcagaagtggtacggggacctgcggggaaagcccttcgccatcgaagccgagaacagcatcctggacatcagcggcttcagcaagcagtacaactgtgccttcatctggcagaaggacggcgtgaagaagctgaacctgtacctgatcatcaactacttcaagggcggcaagctgcggttcaagaagatcaaacctgaagccttcgaagccaacagattctacaccgtgatcaacaaaaagagcggcgagatcgtgcccatggaggtgaacttcaacttcgacgaccccaacctgatcatcctgcctctggcctttggcaagagacagggcagagaattcatctggaacgacctgctgtccctggaaaccggcagcctgaagctggccaacggaagagtgatcgagaagacactgtacaacagaagaacccggcaggatgagcctgccctgttcgtggccctgaccttcgagcggcgggaggtcctggactcctccaatatcaaaccaatgaacctgatcggcgtggcaagaggcgaaaacatccccgccgtgatcgccctgaccgaccccgagggctgcccactgagccggtttaaggatagcctgggaaacccaacccacatcctgagaatcggcgagagctataaggagaagcagcggaccatccaggccaagaaggaggtggagcagcggagagccggcggctacagccggaagtacgccagcaaagccaagaatctggcagacgatatggtgagaaacaccgctagagatctgctgtactacgccgtgacccaggatgccatgctgatcttcgccaacctgagccggggcttcggccggcagggcaagcggaccttcatggccgagagacagtacacacggatggaggactggctgaccgccaagctggcctacgagggcctgagcaagacctacctgtccaagacactggcccagtacacctccaagacatgcagcaactgtgggtttaccatcaccagcgccgactacgacagggtgctggagaagctgaagaagacagcaacaggctggatgaccacaattaacggcaaggagctgaaggtggagggccagattacctactacaacagatacaagagacagaacgtagtcaaggacctgtccgtcgagctggatagactgagcgaagaatctgtgaacaacgacatctcctcctggacaaagggcagaagcggagaagctctgagcctcctgaagaaaagattctcccatagacccgtgcaggagaagttcgtgtgcctgaactgcggcttcgagacacacgcagccgagcaagccgccctgaacatcgccagatcctggctgttcctgcggagccaggagtacaagaaataccagacaaacaagacaaccggcaacaccgataagagagccttcgtcgagacctggcagtccttttaccggaagaagcttaaggaggtgtggaaacctgccgtgcggtctggcggatctggcggaggctccaccagccccaagaaaaagagaaaagtctaagctgccttctgcggggcttgccttctggccatgcccttcttctctcccttgcacctgtacctcttggtctttgaataaagcctgagtaggaaggctagcaaaaaaaaaaaaaaaaaaaaaaaaaaaaaaaaaaaaaaaaaaaaaaaaaaaaaaaaaaaaaaaaaaaaaaaaaaaaaaaagcccagccggctccccaacctctaccgaggagggcacctctgagtccgccacccccgagagcggccctggcacctccaccgagcccagcgagggcagcgcacccggcagccctgccggcagccccacctccacagaggagggaaccagcaccgagcccagcgaaggcagcgccccaggcaccagcaccgagcctagtgagcaggagattaaacggatcaacaagatcagaagaagacttgtgaaagacagcaacaccaagaaggccggcaagacaggccccatgaaaaccctgctggttagagtgatgacacccgatctgagagagcggctggaaaacctgagaaagaagcctgaaaatatcccccagcccatcagcaatacatctagagccaacctgaataagctgctgaccgattacaccgaaatgaagaaggcgatcctgcatgtgtactgggaagagttccagaaggaccctgtgggcctgatgagccgggtggcccagcctgccagcaagaagatcgatcagaacaagctgaaacctgagatggacgagaagggcaacctgaccaccgccggctttgcctgctctcagtgtggccagcccctgttcgtgtacaagctggagcaggtgtctgagaagggcaaggcttacaccaactacttcggacggtgcaatgtggccgagcacgaaaagctgatcctgctggcccagctgaagcccgagaaggatagcgacgaagccgtgacatatagcctgggaaagtttgggcagagggccctggatttctacagcattcatgtgaccaaggagtccacccaccccgtgaagcccctggcccagatcgccggaaacagatacgcctccggacctgtgggaaaggccctgagcgacgcatgtatgggcacaatcgcctccttcctgtctaagtaccaggacatcatcatcgaacaccagaaggtggtgaagggcaaccagaagagactggagagcctgcgggagctggccggcaaggaaaacctggaataccctagcgtgaccctgccacctcagcctcacaccaaggagggcgttgatgcctacaacgaagtgatcgcccgggtgcgaatgtgggtgaacctgaacctgtggcagaagctgaagctaagcagagatgatgccaagcctctgctgagactgaagggattcccttcctttcctctggtcgagagacaggccaacgaagtggactggtgggacatggtgtgtaacgtgaagaagctgatcaacgagaaaaaggaggatggcaaggtgttttggcagaatctggctggctacaagagacaggaagccctgagaccatacctgagcagcgaggaagatcggaagaagggaaagaaattcgctcggtaccagctgggcgacctgctgctgcacctggaaaagaagcacggcgaggactggggaaaggtgtacgacgaggcctgggagcggattgacaagaaagtggaaggcctgagcaagcacatcaagctggaagaggaacggagaagcgaggacgcccagagcaaggccgccctgaccgactggctgcgggctaaggccagcttcgtgatcgagggcctgaaggaggccgacaaggacgagttctgcagatgcgagctgaagctgcagaagtggtacggggacctgcggggaaagcccttcgccatcgaagccgagaacagcatcctggacatcagcggcttcagcaagcagtacaactgtgccttcatctggcagaaggacggcgtgaagaagctgaacctgtacctgatcatcaactacttcaagggcggcaagctgcggttcaagaagatcaaacctgaagccttcgaagccaacagattctacaccgtgatcaacaaaaagagcggcgagatcgtgcccatggaggtgaacttcaacttcgacgaccccaacctgatcatcctgcctctggcctttggcaagagacagggcagagaattcatctggaacgacctgctgtccctggaaaccggcagcctgaagctggccaacggaagagtgatcgagaagacactgtacaacagaagaacccggcaggatgagcctgccctgttcgtggccctgaccttcgagcggcgggaggtcctggactcctccaatatcaaaccaatgaacctgatcggcgtggcaagaggcgaaaacatccccgccgtgatcgccctgaccgaccccgagggctgcccactgagccggtttaaggatagcctgggaaacccaacccacatcctgagaatcggcgagagctataaggagaagcagcggaccatccaggccaagaaggaggtggagcagcggagagccggcggctacagccggaagtacgccagcaaagccaagaatctggcagacgatatggtgagaaacaccgctagagatctgctgtactacgccgtgacccaggatgccatgctgatcttcgccaacctgagccggggcttcggccggcagggcaagcggaccttcatggccgagagacagtacacacggatggaggactggctgaccgccaagctggcctacgagggcctgagcaagacctacctgtccaagacactggcccagtacacctccaagacatgcagcaactgtgggtttaccatcaccagcgccgactacgacagggtgctggagaagctgaagaagacagcaacaggctggatgaccacaattaacggcaaggagctgaaggtggagggccagattacctactacaacagatacaagagacagaacgtagtcaaggacctgtccgtcgagctggatagactgagcgaagaatctgtgaacaacgacatctcctcctggacaaagggcagaagcggagaagctctgagcctcctgaagaaaagattctcccatagacccgtgcaggagaagttcgtgtgcctgaactgcggcttcgagacacacgcagccgagcaagccgccctgaacatcgccagatcctggctgttcctgcggagccaggagtacaagaaataccagacaaacaagacaaccggcaacaccgataagagagccttcgtcgagacctggcagtccttttaccggaagaagcttaaggaggtgtggaaacctgccgtgcggtctggcggatctggcggaggctccaccagccccaagaaaaagagaaaagtctaagctgccttctgcggggcttgccttctggccatgcccttcttctctcccttgcacctgtacctcttggtctttgaataaagcctgagtaggaaggctagcaaaaaaaaaaaaaaaaaaaaaaaaaaaaaaaaaaaaaaaaaaaaaaaaaaaaaaaaaaaaaaaaaaaaaaaaaaaaaaaa

SEQ ID NO: 9599 - RNA, 8787 nt, synthetic construct
  source 1..8787: mol_type = other RNA
aggaaataagagagaaaagaagagtaagaagaaatataagagccaccatggcccctaagaagaagcgtaaagtgagccggatgaaccacgaccaggagttcgacccccctaaggtgtaccctcccgtccccgccgagaagagaaagcccatccgggtcctgagcctgttcgatggcatcgccaccggtctgctggtgctgaaggacctgggcatccaggtggataggtacattgcctccgaggtgtgcgaggactccatcaccgtgggaatggtgcgtcatcagggcaagatcatgtacgtgggcgacgtgcggagcgtgacacagaagcatatccaggagtggggccctttcgacctggtgatcggcggcagcccttgcaatgacctgagcatcgtgaacccagcccggaagggcctgtacgagggaaccggcagactgttcttcgagttttacagactgctgcacgacgcccggcctaaggaaggcgacgaccggcccttcttttggctgttcgagaatgtggtggccatgggagtcagcgacaagcgggatattagccggttcctggagagcaaccccgtgatgatcgatgccaaggaagtgagcgccgcccaccgggccagatacttctggggcaatctgcctggcatgaacagacccctggccagcaccgtgaacgacaagctggagctgcaggagtgcctggagcacggccggatcgccaagttcagcaaggtgagaaccatcaccacccgaagcaacagcatcaaacaaggcaaggaccagcactttcctgtgttcatgaacgagaaggaggacatcctgtggtgtaccgagatggagagagtgttcgggttcccagtccactacacagatgtcagcaacatgtctagactggccagacagagactgctgggaagaagctggtccgtccctgtgatcagacacctgttcgcccctctgaaggagtacttcgcctgcgtgagcagcggcaacagcaacgccaacagccggggccccagcttctctagcggcctggtgccactgtccctgagagggagccacatgggccccatggagatctacaaaaccgtgagcgcctggaagcggcagcctgtgcgcgtgctgagcctgtttcggaatatcgataaagtcctgaaaagcctgggattcctggagagcggctctggctccggcggtggcaccctgaagtacgtggaggatgtgacaaacgtggtcagacgggatgtggagaagtggggccccttcgatctggtgtacggcagcacccaacccctgggcagctcttgtgaccggtgccctggctggtacatgtttcagttccaccggatcctgcagtacgccctgccgagacaggagtcccagcggccattcttttggattttcatggacaacttgctgctgaccgaggatgaccaggaaactaccactcggttcctgcagaccgaagccgtgaccctgcaggacgtgagaggccgggactaccagaacgccatgcgggtgtggtccaacatccctggactgaaaagcaagcacgcacctctgacccctaaagaagaggagtacctgcaggcccaggtgcggagcagaagcaagctggacgcccctaaggtggatctgctggtgaagaattgcctcctgcccctgagagagtacttcaagtatttcagccagaatagtctgcccctgggaggcagcggcggcggcccccaggagcccgtgaccttcgaggacgtggccgtgctgttcacccccgaggagtggatgttcctggacagcgcccagaggagcctgtacagggacgtgatgctggagaactacaggaacctggccagcgtgggcgaccagctgggcaagttcagcagcttcagccacctggagcagggcgaggagtggtggcccaccgagaggagggtgttccccggcagctgccccgagcccagcctgcccggcggcccaagcagcggcgcccctcctcccagcggcggcaggcggcccaagcagcggcgcccctcctcccagcggcggcagcccagccggctccccaacctctaccgaggagggcacctctgagtccgccacccccgagagcggccctggcacctccaccgagcccagcgagggcagcgcacccggcagccctgccggcagccccacctccacagaggagggaaccagcaccgagcccagcgaaggcagcgccccaggcaccagcaccgagcctagtgagcaggagattaaacggatcaacaagatcagaagaagacttgtgaaagacagcaacaccaagaaggccggcaagacaggccccatgaaaaccctgctggttagagtgatgacacccgatctgagagagcggctggaaaacctgagaaagaagcctgaaaatatcccccagcccatcagcaatacatctagagccaacctgaataagctgctgaccgattacaccgaaatgaagaaggcgatcctgcatgtgtactgggaagagttccagaaggaccctgtgggcctgatgagccgggtggcccagcctgccagcaagaagatcgatcagaacaagctgaaacctgagatggacgagaagggcaacctgaccaccgccggctttgcctgctctcagtgtggccagcccctgttcgtgtacaagctggagcaggtgtctgagaagggcaaggcttacaccaactacttcggacggtgcaatgtggccgagcacgaaaagctgatcctgctggcccagctgaagcccgagaaggatagcgacgaagccgtgacatatagcctgggaaagtttgggcagagggccctggatttctacagcattcatgtgaccaaggagtccacccaccccgtgaagcccctggcccagatcgccggaaacagatacgcctccggacctgtgggaaaggccctgagcgacgcatgtatgggcacaatcgcctccttcctgtctaagtaccaggacatcatcatcgaacaccagaaggtggtgaagggcaaccagaagagactggagagcctgcgggagctggccggcaaggaaaacctggaataccctagcgtgaccctgccacctcagcctcacaccaaggagggcgttgatgcctacaacgaagtgatcgcccgggtgcgaatgtgggtgaacctgaacctgtggcagaagctgaagctaagcagagatgatgccaagcctctgctgagactgaagggattcccttcctttcctctggtcgagagacaggccaacgaagtggactggtgggacatggtgtgtaacgtgaagaagctgatcaacgagaaaaaggaggatggcaaggtgttttggcagaatctggctggctacaagagacaggaagccctgagaccatacctgagcagcgaggaagatcggaagaagggaaagaaattcgctcggtaccagctgggcgacctgctgctgcacctggaaaagaagcacggcgaggactggggaaaggtgtacgacgaggcctgggagcggattgacaagaaagtggaaggcctgagcaagcacatcaagctggaagaggaacggagaagcgaggacgcccagagcaaggccgccctgaccgactggctgcgggctaaggccagcttcgtgatcgagggcctgaaggaggccgacaaggacgagttctgcagatgcgagctgaagctgcagaagtggtacggggacctgcggggaaagcccttcgccatcgaagccgagaacagcatcctggacatcagcggcttcagcaagcagtacaactgtgccttcatctggcagaaggacggcgtgaagaagctgaacctgtacctgatcatcaactacttcaagggcggcaagctgcggttcaagaagatcaaacctgaagccttcgaagccaacagattctacaccgtgatcaacaaaaagagcggcgagatcgtgcccatggaggtgaacttcaacttcgacgaccccaacctgatcatcctgcctctggcctttggcaagagacagggcagagaattcatctggaacgacctgctgtccctggaaaccggcagcctgaagctggccaacggaagagtgatcgagaagacactgtacaacagaagaacccggcaggatgagcctgccctgttcgtggccctgaccttcgagcggcgggaggtcctggactcctccaatatcaaaccaatgaacctgatcggcgtggcaagaggcgaaaacatccccgccgtgatcgccctgaccgaccccgagggctgcccactgagccggtttaaggatagcctgggaaacccaacccacatcctgagaatcggcgagagctataaggagaagcagcggaccatccaggccaagaaggaggtggagcagcggagagccggcggctacagccggaagtacgccagcaaagccaagaatctggcagacgatatggtgagaaacaccgctagagatctgctgtactacgccgtgacccaggatgccatgctgatcttcgccaacctgagccggggcttcggccggcagggcaagcggaccttcatggccgagagacagtacacacggatggaggactggctgaccgccaagctggcctacgagggcctgagcaagacctacctgtccaagacactggcccagtacacctccaagacatgcagcaactgtgggtttaccatcaccagcgccgactacgacagggtgctggagaagctgaagaagacagcaacaggctggatgaccacaattaacggcaaggagctgaaggtggagggccagattacctactacaacagatacaagagacagaacgtagtcaaggacctgtccgtcgagctggatagactgagcgaagaatctgtgaacaacgacatctcctcctggacaaagggcagaagcggagaagctctgagcctcctgaagaaaagattctcccatagacccgtgcaggagaagttcgtgtgcctgaactgcggcttcgagacacacgcagccgagcaagccgccctgaacatcgccagatcctggctgttcctgcggagccaggagtacaagaaataccagacaaacaagacaaccggcaacaccgataagagagccttcgtcgagacctggcagtccttttaccggaagaagcttaaggaggtgtggaaacctgccgtgcggtctggcggatctggcggaggctccaccagccccaagaaaaagagaaaagtctaagctgccttctgcggggcttgccttctggccatgcccttcttctctcccttgcacctgtacctcttggtctttgaataaagcctgagtaggaaggctagcaaaaaaaaaaaaaaaaaaaaaaaaaaaaaaaaaaaaaaaaaaaaaaaaaaaaaaaaaaaaaaaaaaaaaaaaaaaaaaaagcccagccggctccccaacctctaccgaggagggcacctctgagtccgccacccccgagagcggccctggcacctccaccgagcccagcgagggcagcgcacccggcagccctgccggcagccccacctccacagaggagggaaccagcaccgagcccagcgaaggcagcgccccaggcaccagcaccgagcctagtgagcaggagattaaacggatcaacaagatcagaagaagacttgtgaaagacagcaacaccaagaaggccggcaagacaggccccatgaaaaccctgctggttagagtgatgacacccgatctgagagagcggctggaaaacctgagaaagaagcctgaaaatatcccccagcccatcagcaatacatctagagccaacctgaataagctgctgaccgattacaccgaaatgaagaaggcgatcctgcatgtgtactgggaagagttccagaaggaccctgtgggcctgatgagccgggtggcccagcctgccagcaagaagatcgatcagaacaagctgaaacctgagatggacgagaagggcaacctgaccaccgccggctttgcctgctctcagtgtggccagcccctgttcgtgtacaagctggagcaggtgtctgagaagggcaaggcttacaccaactacttcggacggtgcaatgtggccgagcacgaaaagctgatcctgctggcccagctgaagcccgagaaggatagcgacgaagccgtgacatatagcctgggaaagtttgggcagagggccctggatttctacagcattcatgtgaccaaggagtccacccaccccgtgaagcccctggcccagatcgccggaaacagatacgcctccggacctgtgggaaaggccctgagcgacgcatgtatgggcacaatcgcctccttcctgtctaagtaccaggacatcatcatcgaacaccagaaggtggtgaagggcaaccagaagagactggagagcctgcgggagctggccggcaaggaaaacctggaataccctagcgtgaccctgccacctcagcctcacaccaaggagggcgttgatgcctacaacgaagtgatcgcccgggtgcgaatgtgggtgaacctgaacctgtggcagaagctgaagctaagcagagatgatgccaagcctctgctgagactgaagggattcccttcctttcctctggtcgagagacaggccaacgaagtggactggtgggacatggtgtgtaacgtgaagaagctgatcaacgagaaaaaggaggatggcaaggtgttttggcagaatctggctggctacaagagacaggaagccctgagaccatacctgagcagcgaggaagatcggaagaagggaaagaaattcgctcggtaccagctgggcgacctgctgctgcacctggaaaagaagcacggcgaggactggggaaaggtgtacgacgaggcctgggagcggattgacaagaaagtggaaggcctgagcaagcacatcaagctggaagaggaacggagaagcgaggacgcccagagcaaggccgccctgaccgactggctgcgggctaaggccagcttcgtgatcgagggcctgaaggaggccgacaaggacgagttctgcagatgcgagctgaagctgcagaagtggtacggggacctgcggggaaagcccttcgccatcgaagccgagaacagcatcctggacatcagcggcttcagcaagcagtacaactgtgccttcatctggcagaaggacggcgtgaagaagctgaacctgtacctgatcatcaactacttcaagggcggcaagctgcggttcaagaagatcaaacctgaagccttcgaagccaacagattctacaccgtgatcaacaaaaagagcggcgagatcgtgcccatggaggtgaacttcaacttcgacgaccccaacctgatcatcctgcctctggcctttggcaagagacagggcagagaattcatctggaacgacctgctgtccctggaaaccggcagcctgaagctggccaacggaagagtgatcgagaagacactgtacaacagaagaacccggcaggatgagcctgccctgttcgtggccctgaccttcgagcggcgggaggtcctggactcctccaatatcaaaccaatgaacctgatcggcgtggcaagaggcgaaaacatccccgccgtgatcgccctgaccgaccccgagggctgcccactgagccggtttaaggatagcctgggaaacccaacccacatcctgagaatcggcgagagctataaggagaagcagcggaccatccaggccaagaaggaggtggagcagcggagagccggcggctacagccggaagtacgccagcaaagccaagaatctggcagacgatatggtgagaaacaccgctagagatctgctgtactacgccgtgacccaggatgccatgctgatcttcgccaacctgagccggggcttcggccggcagggcaagcggaccttcatggccgagagacagtacacacggatggaggactggctgaccgccaagctggcctacgagggcctgagcaagacctacctgtccaagacactggcccagtacacctccaagacatgcagcaactgtgggtttaccatcaccagcgccgactacgacagggtgctggagaagctgaagaagacagcaacaggctggatgaccacaattaacggcaaggagctgaaggtggagggccagattacctactacaacagatacaagagacagaacgtagtcaaggacctgtccgtcgagctggatagactgagcgaagaatctgtgaacaacgacatctcctcctggacaaagggcagaagcggagaagctctgagcctcctgaagaaaagattctcccatagacccgtgcaggagaagttcgtgtgcctgaactgcggcttcgagacacacgcagccgagcaagccgccctgaacatcgccagatcctggctgttcctgcggagccaggagtacaagaaataccagacaaacaagacaaccggcaacaccgataagagagccttcgtcgagacctggcagtccttttaccggaagaagcttaaggaggtgtggaaacctgccgtgcggtctggcggatctggcggaggctccaccagccccaagaaaaagagaaaagtctaagctgccttctgcggggcttgccttctggccatgcccttcttctctcccttgcacctgtacctcttggtctttgaataaagcctgagtaggaaggctagcaaaaaaaaaaaaaaaaaaaaaaaaaaaaaaaaaaaaaaaaaaaaaaaaaaaaaaaaaaaaaaaaaaaaaaaaaaaaaaaa

SEQ ID NO: 9600 - RNA, 8787 nt, synthetic construct
  source 1..8787: mol_type = other RNA
aggaaataagagagaaaagaagagtaagaagaaatataagagccaccatggcccctaagaagaagcgtaaagtgagccggatgaaccacgaccaggagttcgacccccctaaggtgtaccctcccgtccccgccgagaagagaaagcccatccgggtcctgagcctgttcgatggcatcgccaccggtctgctggtgctgaaggacctgggcatccaggtggataggtacattgcctccgaggtgtgcgaggactccatcaccgtgggaatggtgcgtcatcagggcaagatcatgtacgtgggcgacgtgcggagcgtgacacagaagcatatccaggagtggggccctttcgacctggtgatcggcggcagcccttgcaatgacctgagcatcgtgaacccagcccggaagggcctgtacgagggaaccggcagactgttcttcgagttttacagactgctgcacgacgcccggcctaaggaaggcgacgaccggcccttcttttggctgttcgagaatgtggtggccatgggagtcagcgacaagcgggatattagccggttcctggagagcaaccccgtgatgatcgatgccaaggaagtgagcgccgcccaccgggccagatacttctggggcaatctgcctggcatgaacagacccctggccagcaccgtgaacgacaagctggagctgcaggagtgcctggagcacggccggatcgccaagttcagcaaggtgagaaccatcaccacccgaagcaacagcatcaaacaaggcaaggaccagcactttcctgtgttcatgaacgagaaggaggacatcctgtggtgtaccgagatggagagagtgttcgggttcccagtccactacacagatgtcagcaacatgtctagactggccagacagagactgctgggaagaagctggtccgtccctgtgatcagacacctgttcgcccctctgaaggagtacttcgcctgcgtgagcagcggcaacagcaacgccaacagccggggccccagcttctctagcggcctggtgccactgtccctgagagggagccacatgggccccatggagatctacaaaaccgtgagcgcctggaagcggcagcctgtgcgcgtgctgagcctgtttcggaatatcgataaagtcctgaaaagcctgggattcctggagagcggctctggctccggcggtggcaccctgaagtacgtggaggatgtgacaaacgtggtcagacgggatgtggagaagtggggccccttcgatctggtgtacggcagcacccaacccctgggcagctcttgtgaccggtgccctggctggtacatgtttcagttccaccggatcctgcagtacgccctgccgagacaggagtcccagcggccattcttttggattttcatggacaacttgctgctgaccgaggatgaccaggaaactaccactcggttcctgcagaccgaagccgtgaccctgcaggacgtgagaggccgggactaccagaacgccatgcgggtgtggtccaacatccctggactgaaaagcaagcacgcacctctgacccctaaagaagaggagtacctgcaggcccaggtgcggagcagaagcaagctggacgcccctaaggtggatctgctggtgaagaattgcctcctgcccctgagagagtacttcaagtatttcagccagaatagtctgcccctgggaggcagcggcggcggctggcaggagcccgtgaccttcgaggacgtggccgtgtacctgagccacgccgagtgggacgccatggcccccgagcagagggagctgtactgcagcgtgatgctggacaactaccagctgctggccagcctgggctaccccggccccaagcccgacatcgtgtacaggctggagaggggcgaggagccctggggctgcgccccccagagccccctgagctgggacggccccaggagccccagcggcggcccaagcagcggcgcccctcctcccagcggcggcaggcggcccaagcagcggcgcccctcctcccagcggcggcagcccagccggctccccaacctctaccgaggagggcacctctgagtccgccacccccgagagcggccctggcacctccaccgagcccagcgagggcagcgcacccggcagccctgccggcagccccacctccacagaggagggaaccagcaccgagcccagcgaaggcagcgccccaggcaccagcaccgagcctagtgagcaggagattaaacggatcaacaagatcagaagaagacttgtgaaagacagcaacaccaagaaggccggcaagacaggccccatgaaaaccctgctggttagagtgatgacacccgatctgagagagcggctggaaaacctgagaaagaagcctgaaaatatcccccagcccatcagcaatacatctagagccaacctgaataagctgctgaccgattacaccgaaatgaagaaggcgatcctgcatgtgtactgggaagagttccagaaggaccctgtgggcctgatgagccgggtggcccagcctgccagcaagaagatcgatcagaacaagctgaaacctgagatggacgagaagggcaacctgaccaccgccggctttgcctgctctcagtgtggccagcccctgttcgtgtacaagctggagcaggtgtctgagaagggcaaggcttacaccaactacttcggacggtgcaatgtggccgagcacgaaaagctgatcctgctggcccagctgaagcccgagaaggatagcgacgaagccgtgacatatagcctgggaaagtttgggcagagggccctggatttctacagcattcatgtgaccaaggagtccacccaccccgtgaagcccctggcccagatcgccggaaacagatacgcctccggacctgtgggaaaggccctgagcgacgcatgtatgggcacaatcgcctccttcctgtctaagtaccaggacatcatcatcgaacaccagaaggtggtgaagggcaaccagaagagactggagagcctgcgggagctggccggcaaggaaaacctggaataccctagcgtgaccctgccacctcagcctcacaccaaggagggcgttgatgcctacaacgaagtgatcgcccgggtgcgaatgtgggtgaacctgaacctgtggcagaagctgaagctaagcagagatgatgccaagcctctgctgagactgaagggattcccttcctttcctctggtcgagagacaggccaacgaagtggactggtgggacatggtgtgtaacgtgaagaagctgatcaacgagaaaaaggaggatggcaaggtgttttggcagaatctggctggctacaagagacaggaagccctgagaccatacctgagcagcgaggaagatcggaagaagggaaagaaattcgctcggtaccagctgggcgacctgctgctgcacctggaaaagaagcacggcgaggactggggaaaggtgtacgacgaggcctgggagcggattgacaagaaagtggaaggcctgagcaagcacatcaagctggaagaggaacggagaagcgaggacgcccagagcaaggccgccctgaccgactggctgcgggctaaggccagcttcgtgatcgagggcctgaaggaggccgacaaggacgagttctgcagatgcgagctgaagctgcagaagtggtacggggacctgcggggaaagcccttcgccatcgaagccgagaacagcatcctggacatcagcggcttcagcaagcagtacaactgtgccttcatctggcagaaggacggcgtgaagaagctgaacctgtacctgatcatcaactacttcaagggcggcaagctgcggttcaagaagatcaaacctgaagccttcgaagccaacagattctacaccgtgatcaacaaaaagagcggcgagatcgtgcccatggaggtgaacttcaacttcgacgaccccaacctgatcatcctgcctctggcctttggcaagagacagggcagagaattcatctggaacgacctgctgtccctggaaaccggcagcctgaagctggccaacggaagagtgatcgagaagacactgtacaacagaagaacccggcaggatgagcctgccctgttcgtggccctgaccttcgagcggcgggaggtcctggactcctccaatatcaaaccaatgaacctgatcggcgtggcaagaggcgaaaacatccccgccgtgatcgccctgaccgaccccgagggctgcccactgagccggtttaaggatagcctgggaaacccaacccacatcctgagaatcggcgagagctataaggagaagcagcggaccatccaggccaagaaggaggtggagcagcggagagccggcggctacagccggaagtacgccagcaaagccaagaatctggcagacgatatggtgagaaacaccgctagagatctgctgtactacgccgtgacccaggatgccatgctgatcttcgccaacctgagccggggcttcggccggcagggcaagcggaccttcatggccgagagacagtacacacggatggaggactggctgaccgccaagctggcctacgagggcctgagcaagacctacctgtccaagacactggcccagtacacctccaagacatgcagcaactgtgggtttaccatcaccagcgccgactacgacagggtgctggagaagctgaagaagacagcaacaggctggatgaccacaattaacggcaaggagctgaaggtggagggccagattacctactacaacagatacaagagacagaacgtagtcaaggacctgtccgtcgagctggatagactgagcgaagaatctgtgaacaacgacatctcctcctggacaaagggcagaagcggagaagctctgagcctcctgaagaaaagattctcccatagacccgtgcaggagaagttcgtgtgcctgaactgcggcttcgagacacacgcagccgagcaagccgccctgaacatcgccagatcctggctgttcctgcggagccaggagtacaagaaataccagacaaacaagacaaccggcaacaccgataagagagccttcgtcgagacctggcagtccttttaccggaagaagcttaaggaggtgtggaaacctgccgtgcggtctggcggatctggcggaggctccaccagccccaagaaaaagagaaaagtctaagctgccttctgcggggcttgccttctggccatgcccttcttctctcccttgcacctgtacctcttggtctttgaataaagcctgagtaggaaggctagcaaaaaaaaaaaaaaaaaaaaaaaaaaaaaaaaaaaaaaaaaaaaaaaaaaaaaaaaaaaaaaaaaaaaaaaaaaaaaaaagcccagccggctccccaacctctaccgaggagggcacctctgagtccgccacccccgagagcggccctggcacctccaccgagcccagcgagggcagcgcacccggcagccctgccggcagccccacctccacagaggagggaaccagcaccgagcccagcgaaggcagcgccccaggcaccagcaccgagcctagtgagcaggagattaaacggatcaacaagatcagaagaagacttgtgaaagacagcaacaccaagaaggccggcaagacaggccccatgaaaaccctgctggttagagtgatgacacccgatctgagagagcggctggaaaacctgagaaagaagcctgaaaatatcccccagcccatcagcaatacatctagagccaacctgaataagctgctgaccgattacaccgaaatgaagaaggcgatcctgcatgtgtactgggaagagttccagaaggaccctgtgggcctgatgagccgggtggcccagcctgccagcaagaagatcgatcagaacaagctgaaacctgagatggacgagaagggcaacctgaccaccgccggctttgcctgctctcagtgtggccagcccctgttcgtgtacaagctggagcaggtgtctgagaagggcaaggcttacaccaactacttcggacggtgcaatgtggccgagcacgaaaagctgatcctgctggcccagctgaagcccgagaaggatagcgacgaagccgtgacatatagcctgggaaagtttgggcagagggccctggatttctacagcattcatgtgaccaaggagtccacccaccccgtgaagcccctggcccagatcgccggaaacagatacgcctccggacctgtgggaaaggccctgagcgacgcatgtatgggcacaatcgcctccttcctgtctaagtaccaggacatcatcatcgaacaccagaaggtggtgaagggcaaccagaagagactggagagcctgcgggagctggccggcaaggaaaacctggaataccctagcgtgaccctgccacctcagcctcacaccaaggagggcgttgatgcctacaacgaagtgatcgcccgggtgcgaatgtgggtgaacctgaacctgtggcagaagctgaagctaagcagagatgatgccaagcctctgctgagactgaagggattcccttcctttcctctggtcgagagacaggccaacgaagtggactggtgggacatggtgtgtaacgtgaagaagctgatcaacgagaaaaaggaggatggcaaggtgttttggcagaatctggctggctacaagagacaggaagccctgagaccatacctgagcagcgaggaagatcggaagaagggaaagaaattcgctcggtaccagctgggcgacctgctgctgcacctggaaaagaagcacggcgaggactggggaaaggtgtacgacgaggcctgggagcggattgacaagaaagtggaaggcctgagcaagcacatcaagctggaagaggaacggagaagcgaggacgcccagagcaaggccgccctgaccgactggctgcgggctaaggccagcttcgtgatcgagggcctgaaggaggccgacaaggacgagttctgcagatgcgagctgaagctgcagaagtggtacggggacctgcggggaaagcccttcgccatcgaagccgagaacagcatcctggacatcagcggcttcagcaagcagtacaactgtgccttcatctggcagaaggacggcgtgaagaagctgaacctgtacctgatcatcaactacttcaagggcggcaagctgcggttcaagaagatcaaacctgaagccttcgaagccaacagattctacaccgtgatcaacaaaaagagcggcgagatcgtgcccatggaggtgaacttcaacttcgacgaccccaacctgatcatcctgcctctggcctttggcaagagacagggcagagaattcatctggaacgacctgctgtccctggaaaccggcagcctgaagctggccaacggaagagtgatcgagaagacactgtacaacagaagaacccggcaggatgagcctgccctgttcgtggccctgaccttcgagcggcgggaggtcctggactcctccaatatcaaaccaatgaacctgatcggcgtggcaagaggcgaaaacatccccgccgtgatcgccctgaccgaccccgagggctgcccactgagccggtttaaggatagcctgggaaacccaacccacatcctgagaatcggcgagagctataaggagaagcagcggaccatccaggccaagaaggaggtggagcagcggagagccggcggctacagccggaagtacgccagcaaagccaagaatctggcagacgatatggtgagaaacaccgctagagatctgctgtactacgccgtgacccaggatgccatgctgatcttcgccaacctgagccggggcttcggccggcagggcaagcggaccttcatggccgagagacagtacacacggatggaggactggctgaccgccaagctggcctacgagggcctgagcaagacctacctgtccaagacactggcccagtacacctccaagacatgcagcaactgtgggtttaccatcaccagcgccgactacgacagggtgctggagaagctgaagaagacagcaacaggctggatgaccacaattaacggcaaggagctgaaggtggagggccagattacctactacaacagatacaagagacagaacgtagtcaaggacctgtccgtcgagctggatagactgagcgaagaatctgtgaacaacgacatctcctcctggacaaagggcagaagcggagaagctctgagcctcctgaagaaaagattctcccatagacccgtgcaggagaagttcgtgtgcctgaactgcggcttcgagacacacgcagccgagcaagccgccctgaacatcgccagatcctggctgttcctgcggagccaggagtacaagaaataccagacaaacaagacaaccggcaacaccgataagagagccttcgtcgagacctggcagtccttttaccggaagaagcttaaggaggtgtggaaacctgccgtgcggtctggcggatctggcggaggctccaccagccccaagaaaaagagaaaagtctaagctgccttctgcggggcttgccttctggccatgcccttcttctctcccttgcacctgtacctcttggtctttgaataaagcctgagtaggaaggctagcaaaaaaaaaaaaaaaaaaaaaaaaaaaaaaaaaaaaaaaaaaaaaaaaaaaaaaaaaaaaaaaaaaaaaaaaaaaaaaaa

SEQ ID NO: 9601 - RNA, 8787 nt, synthetic construct
  source 1..8787: mol_type = other RNA
aggaaataagagagaaaagaagagtaagaagaaatataagagccaccatggcccctaagaagaagcgtaaagtgagccggatgaaccacgaccaggagttcgacccccctaaggtgtaccctcccgtccccgccgagaagagaaagcccatccgggtcctgagcctgttcgatggcatcgccaccggtctgctggtgctgaaggacctgggcatccaggtggataggtacattgcctccgaggtgtgcgaggactccatcaccgtgggaatggtgcgtcatcagggcaagatcatgtacgtgggcgacgtgcggagcgtgacacagaagcatatccaggagtggggccctttcgacctggtgatcggcggcagcccttgcaatgacctgagcatcgtgaacccagcccggaagggcctgtacgagggaaccggcagactgttcttcgagttttacagactgctgcacgacgcccggcctaaggaaggcgacgaccggcccttcttttggctgttcgagaatgtggtggccatgggagtcagcgacaagcgggatattagccggttcctggagagcaaccccgtgatgatcgatgccaaggaagtgagcgccgcccaccgggccagatacttctggggcaatctgcctggcatgaacagacccctggccagcaccgtgaacgacaagctggagctgcaggagtgcctggagcacggccggatcgccaagttcagcaaggtgagaaccatcaccacccgaagcaacagcatcaaacaaggcaaggaccagcactttcctgtgttcatgaacgagaaggaggacatcctgtggtgtaccgagatggagagagtgttcgggttcccagtccactacacagatgtcagcaacatgtctagactggccagacagagactgctgggaagaagctggtccgtccctgtgatcagacacctgttcgcccctctgaaggagtacttcgcctgcgtgagcagcggcaacagcaacgccaacagccggggccccagcttctctagcggcctggtgccactgtccctgagagggagccacatgggccccatggagatctacaaaaccgtgagcgcctggaagcggcagcctgtgcgcgtgctgagcctgtttcggaatatcgataaagtcctgaaaagcctgggattcctggagagcggctctggctccggcggtggcaccctgaagtacgtggaggatgtgacaaacgtggtcagacgggatgtggagaagtggggccccttcgatctggtgtacggcagcacccaacccctgggcagctcttgtgaccggtgccctggctggtacatgtttcagttccaccggatcctgcagtacgccctgccgagacaggagtcccagcggccattcttttggattttcatggacaacttgctgctgaccgaggatgaccaggaaactaccactcggttcctgcagaccgaagccgtgaccctgcaggacgtgagaggccgggactaccagaacgccatgcgggtgtggtccaacatccctggactgaaaagcaagcacgcacctctgacccctaaagaagaggagtacctgcaggcccaggtgcggagcagaagcaagctggacgcccctaaggtggatctgctggtgaagaattgcctcctgcccctgagagagtacttcaagtatttcagccagaatagtctgcccctgggaggcagcggcggcggcggcaaggccctgctgagcttcgaggacgtggccatgtacttcaccagggaggagtggaaccacctggactgggcccagaaggacctgtacagggacgtgatgctggagaactacatgaacatggtgctgctgggcttccagttccccaagcccgaggtgatctgccagctggagaactgggacgagccctggatcctggacctgcccagggccggcaacaggaaggccagcagcagcgcctgcggcggcccaagcagcggcgcccctcctcccagcggcggcaggcggcccaagcagcggcgcccctcctcccagcggcggcagcccagccggctccccaacctctaccgaggagggcacctctgagtccgccacccccgagagcggccctggcacctccaccgagcccagcgagggcagcgcacccggcagccctgccggcagccccacctccacagaggagggaaccagcaccgagcccagcgaaggcagcgccccaggcaccagcaccgagcctagtgagcaggagattaaacggatcaacaagatcagaagaagacttgtgaaagacagcaacaccaagaaggccggcaagacaggccccatgaaaaccctgctggttagagtgatgacacccgatctgagagagcggctggaaaacctgagaaagaagcctgaaaatatcccccagcccatcagcaatacatctagagccaacctgaataagctgctgaccgattacaccgaaatgaagaaggcgatcctgcatgtgtactgggaagagttccagaaggaccctgtgggcctgatgagccgggtggcccagcctgccagcaagaagatcgatcagaacaagctgaaacctgagatggacgagaagggcaacctgaccaccgccggctttgcctgctctcagtgtggccagcccctgttcgtgtacaagctggagcaggtgtctgagaagggcaaggcttacaccaactacttcggacggtgcaatgtggccgagcacgaaaagctgatcctgctggcccagctgaagcccgagaaggatagcgacgaagccgtgacatatagcctgggaaagtttgggcagagggccctggatttctacagcattcatgtgaccaaggagtccacccaccccgtgaagcccctggcccagatcgccggaaacagatacgcctccggacctgtgggaaaggccctgagcgacgcatgtatgggcacaatcgcctccttcctgtctaagtaccaggacatcatcatcgaacaccagaaggtggtgaagggcaaccagaagagactggagagcctgcgggagctggccggcaaggaaaacctggaataccctagcgtgaccctgccacctcagcctcacaccaaggagggcgttgatgcctacaacgaagtgatcgcccgggtgcgaatgtgggtgaacctgaacctgtggcagaagctgaagctaagcagagatgatgccaagcctctgctgagactgaagggattcccttcctttcctctggtcgagagacaggccaacgaagtggactggtgggacatggtgtgtaacgtgaagaagctgatcaacgagaaaaaggaggatggcaaggtgttttggcagaatctggctggctacaagagacaggaagccctgagaccatacctgagcagcgaggaagatcggaagaagggaaagaaattcgctcggtaccagctgggcgacctgctgctgcacctggaaaagaagcacggcgaggactggggaaaggtgtacgacgaggcctgggagcggattgacaagaaagtggaaggcctgagcaagcacatcaagctggaagaggaacggagaagcgaggacgcccagagcaaggccgccctgaccgactggctgcgggctaaggccagcttcgtgatcgagggcctgaaggaggccgacaaggacgagttctgcagatgcgagctgaagctgcagaagtggtacggggacctgcggggaaagcccttcgccatcgaagccgagaacagcatcctggacatcagcggcttcagcaagcagtacaactgtgccttcatctggcagaaggacggcgtgaagaagctgaacctgtacctgatcatcaactacttcaagggcggcaagctgcggttcaagaagatcaaacctgaagccttcgaagccaacagattctacaccgtgatcaacaaaaagagcggcgagatcgtgcccatggaggtgaacttcaacttcgacgaccccaacctgatcatcctgcctctggcctttggcaagagacagggcagagaattcatctggaacgacctgctgtccctggaaaccggcagcctgaagctggccaacggaagagtgatcgagaagacactgtacaacagaagaacccggcaggatgagcctgccctgttcgtggccctgaccttcgagcggcgggaggtcctggactcctccaatatcaaaccaatgaacctgatcggcgtggcaagaggcgaaaacatccccgccgtgatcgccctgaccgaccccgagggctgcccactgagccggtttaaggatagcctgggaaacccaacccacatcctgagaatcggcgagagctataaggagaagcagcggaccatccaggccaagaaggaggtggagcagcggagagccggcggctacagccggaagtacgccagcaaagccaagaatctggcagacgatatggtgagaaacaccgctagagatctgctgtactacgccgtgacccaggatgccatgctgatcttcgccaacctgagccggggcttcggccggcagggcaagcggaccttcatggccgagagacagtacacacggatggaggactggctgaccgccaagctggcctacgagggcctgagcaagacctacctgtccaagacactggcccagtacacctccaagacatgcagcaactgtgggtttaccatcaccagcgccgactacgacagggtgctggagaagctgaagaagacagcaacaggctggatgaccacaattaacggcaaggagctgaaggtggagggccagattacctactacaacagatacaagagacagaacgtagtcaaggacctgtccgtcgagctggatagactgagcgaagaatctgtgaacaacgacatctcctcctggacaaagggcagaagcggagaagctctgagcctcctgaagaaaagattctcccatagacccgtgcaggagaagttcgtgtgcctgaactgcggcttcgagacacacgcagccgagcaagccgccctgaacatcgccagatcctggctgttcctgcggagccaggagtacaagaaataccagacaaacaagacaaccggcaacaccgataagagagccttcgtcgagacctggcagtccttttaccggaagaagcttaaggaggtgtggaaacctgccgtgcggtctggcggatctggcggaggctccaccagccccaagaaaaagagaaaagtctaagctgccttctgcggggcttgccttctggccatgcccttcttctctcccttgcacctgtacctcttggtctttgaataaagcctgagtaggaaggctagcaaaaaaaaaaaaaaaaaaaaaaaaaaaaaaaaaaaaaaaaaaaaaaaaaaaaaaaaaaaaaaaaaaaaaaaaaaaaaaaagcccagccggctccccaacctctaccgaggagggcacctctgagtccgccacccccgagagcggccctggcacctccaccgagcccagcgagggcagcgcacccggcagccctgccggcagccccacctccacagaggagggaaccagcaccgagcccagcgaaggcagcgccccaggcaccagcaccgagcctagtgagcaggagattaaacggatcaacaagatcagaagaagacttgtgaaagacagcaacaccaagaaggccggcaagacaggccccatgaaaaccctgctggttagagtgatgacacccgatctgagagagcggctggaaaacctgagaaagaagcctgaaaatatcccccagcccatcagcaatacatctagagccaacctgaataagctgctgaccgattacaccgaaatgaagaaggcgatcctgcatgtgtactgggaagagttccagaaggaccctgtgggcctgatgagccgggtggcccagcctgccagcaagaagatcgatcagaacaagctgaaacctgagatggacgagaagggcaacctgaccaccgccggctttgcctgctctcagtgtggccagcccctgttcgtgtacaagctggagcaggtgtctgagaagggcaaggcttacaccaactacttcggacggtgcaatgtggccgagcacgaaaagctgatcctgctggcccagctgaagcccgagaaggatagcgacgaagccgtgacatatagcctgggaaagtttgggcagagggccctggatttctacagcattcatgtgaccaaggagtccacccaccccgtgaagcccctggcccagatcgccggaaacagatacgcctccggacctgtgggaaaggccctgagcgacgcatgtatgggcacaatcgcctccttcctgtctaagtaccaggacatcatcatcgaacaccagaaggtggtgaagggcaaccagaagagactggagagcctgcgggagctggccggcaaggaaaacctggaataccctagcgtgaccctgccacctcagcctcacaccaaggagggcgttgatgcctacaacgaagtgatcgcccgggtgcgaatgtgggtgaacctgaacctgtggcagaagctgaagctaagcagagatgatgccaagcctctgctgagactgaagggattcccttcctttcctctggtcgagagacaggccaacgaagtggactggtgggacatggtgtgtaacgtgaagaagctgatcaacgagaaaaaggaggatggcaaggtgttttggcagaatctggctggctacaagagacaggaagccctgagaccatacctgagcagcgaggaagatcggaagaagggaaagaaattcgctcggtaccagctgggcgacctgctgctgcacctggaaaagaagcacggcgaggactggggaaaggtgtacgacgaggcctgggagcggattgacaagaaagtggaaggcctgagcaagcacatcaagctggaagaggaacggagaagcgaggacgcccagagcaaggccgccctgaccgactggctgcgggctaaggccagcttcgtgatcgagggcctgaaggaggccgacaaggacgagttctgcagatgcgagctgaagctgcagaagtggtacggggacctgcggggaaagcccttcgccatcgaagccgagaacagcatcctggacatcagcggcttcagcaagcagtacaactgtgccttcatctggcagaaggacggcgtgaagaagctgaacctgtacctgatcatcaactacttcaagggcggcaagctgcggttcaagaagatcaaacctgaagccttcgaagccaacagattctacaccgtgatcaacaaaaagagcggcgagatcgtgcccatggaggtgaacttcaacttcgacgaccccaacctgatcatcctgcctctggcctttggcaagagacagggcagagaattcatctggaacgacctgctgtccctggaaaccggcagcctgaagctggccaacggaagagtgatcgagaagacactgtacaacagaagaacccggcaggatgagcctgccctgttcgtggccctgaccttcgagcggcgggaggtcctggactcctccaatatcaaaccaatgaacctgatcggcgtggcaagaggcgaaaacatccccgccgtgatcgccctgaccgaccccgagggctgcccactgagccggtttaaggatagcctgggaaacccaacccacatcctgagaatcggcgagagctataaggagaagcagcggaccatccaggccaagaaggaggtggagcagcggagagccggcggctacagccggaagtacgccagcaaagccaagaatctggcagacgatatggtgagaaacaccgctagagatctgctgtactacgccgtgacccaggatgccatgctgatcttcgccaacctgagccggggcttcggccggcagggcaagcggaccttcatggccgagagacagtacacacggatggaggactggctgaccgccaagctggcctacgagggcctgagcaagacctacctgtccaagacactggcccagtacacctccaagacatgcagcaactgtgggtttaccatcaccagcgccgactacgacagggtgctggagaagctgaagaagacagcaacaggctggatgaccacaattaacggcaaggagctgaaggtggagggccagattacctactacaacagatacaagagacagaacgtagtcaaggacctgtccgtcgagctggatagactgagcgaagaatctgtgaacaacgacatctcctcctggacaaagggcagaagcggagaagctctgagcctcctgaagaaaagattctcccatagacccgtgcaggagaagttcgtgtgcctgaactgcggcttcgagacacacgcagccgagcaagccgccctgaacatcgccagatcctggctgttcctgcggagccaggagtacaagaaataccagacaaacaagacaaccggcaacaccgataagagagccttcgtcgagacctggcagtccttttaccggaagaagcttaaggaggtgtggaaacctgccgtgcggtctggcggatctggcggaggctccaccagccccaagaaaaagagaaaagtctaagctgccttctgcggggcttgccttctggccatgcccttcttctctcccttgcacctgtacctcttggtctttgaataaagcctgagtaggaaggctagcaaaaaaaaaaaaaaaaaaaaaaaaaaaaaaaaaaaaaaaaaaaaaaaaaaaaaaaaaaaaaaaaaaaaaaaaaaaaaaaa

SEQ ID NO: 9602 - RNA, 8787 nt, synthetic construct
  source 1..8787: mol_type = other RNA
aggaaataagagagaaaagaagagtaagaagaaatataagagccaccatggcccctaagaagaagcgtaaagtgagccggatgaaccacgaccaggagttcgacccccctaaggtgtaccctcccgtccccgccgagaagagaaagcccatccgggtcctgagcctgttcgatggcatcgccaccggtctgctggtgctgaaggacctgggcatccaggtggataggtacattgcctccgaggtgtgcgaggactccatcaccgtgggaatggtgcgtcatcagggcaagatcatgtacgtgggcgacgtgcggagcgtgacacagaagcatatccaggagtggggccctttcgacctggtgatcggcggcagcccttgcaatgacctgagcatcgtgaacccagcccggaagggcctgtacgagggaaccggcagactgttcttcgagttttacagactgctgcacgacgcccggcctaaggaaggcgacgaccggcccttcttttggctgttcgagaatgtggtggccatgggagtcagcgacaagcgggatattagccggttcctggagagcaaccccgtgatgatcgatgccaaggaagtgagcgccgcccaccgggccagatacttctggggcaatctgcctggcatgaacagacccctggccagcaccgtgaacgacaagctggagctgcaggagtgcctggagcacggccggatcgccaagttcagcaaggtgagaaccatcaccacccgaagcaacagcatcaaacaaggcaaggaccagcactttcctgtgttcatgaacgagaaggaggacatcctgtggtgtaccgagatggagagagtgttcgggttcccagtccactacacagatgtcagcaacatgtctagactggccagacagagactgctgggaagaagctggtccgtccctgtgatcagacacctgttcgcccctctgaaggagtacttcgcctgcgtgagcagcggcaacagcaacgccaacagccggggccccagcttctctagcggcctggtgccactgtccctgagagggagccacatgggccccatggagatctacaaaaccgtgagcgcctggaagcggcagcctgtgcgcgtgctgagcctgtttcggaatatcgataaagtcctgaaaagcctgggattcctggagagcggctctggctccggcggtggcaccctgaagtacgtggaggatgtgacaaacgtggtcagacgggatgtggagaagtggggccccttcgatctggtgtacggcagcacccaacccctgggcagctcttgtgaccggtgccctggctggtacatgtttcagttccaccggatcctgcagtacgccctgccgagacaggagtcccagcggccattcttttggattttcatggacaacttgctgctgaccgaggatgaccaggaaactaccactcggttcctgcagaccgaagccgtgaccctgcaggacgtgagaggccgggactaccagaacgccatgcgggtgtggtccaacatccctggactgaaaagcaagcacgcacctctgacccctaaagaagaggagtacctgcaggcccaggtgcggagcagaagcaagctggacgcccctaaggtggatctgctggtgaagaattgcctcctgcccctgagagagtacttcaagtatttcagccagaatagtctgcccctgggaggcagcggcggcggcacccaggtgagcgtgaccttcgacgacgtggccgtgaccttcacccaggaggagtggggccacctggaccccgcccagaggaccctgtacagggaggtgatgctggagacctgcaggctgctggtgagcctgggctgccccgtgcccaggcccgagctgatctacaggctggagcacggccaggagctgtggaccgtgaagagggacctgagcaggagcacctgcgccgtggacgagggcaagggcggcccaagcagcggcgcccctcctcccagcggcggcaggcggcccaagcagcggcgcccctcctcccagcggcggcagcccagccggctccccaacctctaccgaggagggcacctctgagtccgccacccccgagagcggccctggcacctccaccgagcccagcgagggcagcgcacccggcagccctgccggcagccccacctccacagaggagggaaccagcaccgagcccagcgaaggcagcgccccaggcaccagcaccgagcctagtgagcaggagattaaacggatcaacaagatcagaagaagacttgtgaaagacagcaacaccaagaaggccggcaagacaggccccatgaaaaccctgctggttagagtgatgacacccgatctgagagagcggctggaaaacctgagaaagaagcctgaaaatatcccccagcccatcagcaatacatctagagccaacctgaataagctgctgaccgattacaccgaaatgaagaaggcgatcctgcatgtgtactgggaagagttccagaaggaccctgtgggcctgatgagccgggtggcccagcctgccagcaagaagatcgatcagaacaagctgaaacctgagatggacgagaagggcaacctgaccaccgccggctttgcctgctctcagtgtggccagcccctgttcgtgtacaagctggagcaggtgtctgagaagggcaaggcttacaccaactacttcggacggtgcaatgtggccgagcacgaaaagctgatcctgctggcccagctgaagcccgagaaggatagcgacgaagccgtgacatatagcctgggaaagtttgggcagagggccctggatttctacagcattcatgtgaccaaggagtccacccaccccgtgaagcccctggcccagatcgccggaaacagatacgcctccggacctgtgggaaaggccctgagcgacgcatgtatgggcacaatcgcctccttcctgtctaagtaccaggacatcatcatcgaacaccagaaggtggtgaagggcaaccagaagagactggagagcctgcgggagctggccggcaaggaaaacctggaataccctagcgtgaccctgccacctcagcctcacaccaaggagggcgttgatgcctacaacgaagtgatcgcccgggtgcgaatgtgggtgaacctgaacctgtggcagaagctgaagctaagcagagatgatgccaagcctctgctgagactgaagggattcccttcctttcctctggtcgagagacaggccaacgaagtggactggtgggacatggtgtgtaacgtgaagaagctgatcaacgagaaaaaggaggatggcaaggtgttttggcagaatctggctggctacaagagacaggaagccctgagaccatacctgagcagcgaggaagatcggaagaagggaaagaaattcgctcggtaccagctgggcgacctgctgctgcacctggaaaagaagcacggcgaggactggggaaaggtgtacgacgaggcctgggagcggattgacaagaaagtggaaggcctgagcaagcacatcaagctggaagaggaacggagaagcgaggacgcccagagcaaggccgccctgaccgactggctgcgggctaaggccagcttcgtgatcgagggcctgaaggaggccgacaaggacgagttctgcagatgcgagctgaagctgcagaagtggtacggggacctgcggggaaagcccttcgccatcgaagccgagaacagcatcctggacatcagcggcttcagcaagcagtacaactgtgccttcatctggcagaaggacggcgtgaagaagctgaacctgtacctgatcatcaactacttcaagggcggcaagctgcggttcaagaagatcaaacctgaagccttcgaagccaacagattctacaccgtgatcaacaaaaagagcggcgagatcgtgcccatggaggtgaacttcaacttcgacgaccccaacctgatcatcctgcctctggcctttggcaagagacagggcagagaattcatctggaacgacctgctgtccctggaaaccggcagcctgaagctggccaacggaagagtgatcgagaagacactgtacaacagaagaacccggcaggatgagcctgccctgttcgtggccctgaccttcgagcggcgggaggtcctggactcctccaatatcaaaccaatgaacctgatcggcgtggcaagaggcgaaaacatccccgccgtgatcgccctgaccgaccccgagggctgcccactgagccggtttaaggatagcctgggaaacccaacccacatcctgagaatcggcgagagctataaggagaagcagcggaccatccaggccaagaaggaggtggagcagcggagagccggcggctacagccggaagtacgccagcaaagccaagaatctggcagacgatatggtgagaaacaccgctagagatctgctgtactacgccgtgacccaggatgccatgctgatcttcgccaacctgagccggggcttcggccggcagggcaagcggaccttcatggccgagagacagtacacacggatggaggactggctgaccgccaagctggcctacgagggcctgagcaagacctacctgtccaagacactggcccagtacacctccaagacatgcagcaactgtgggtttaccatcaccagcgccgactacgacagggtgctggagaagctgaagaagacagcaacaggctggatgaccacaattaacggcaaggagctgaaggtggagggccagattacctactacaacagatacaagagacagaacgtagtcaaggacctgtccgtcgagctggatagactgagcgaagaatctgtgaacaacgacatctcctcctggacaaagggcagaagcggagaagctctgagcctcctgaagaaaagattctcccatagacccgtgcaggagaagttcgtgtgcctgaactgcggcttcgagacacacgcagccgagcaagccgccctgaacatcgccagatcctggctgttcctgcggagccaggagtacaagaaataccagacaaacaagacaaccggcaacaccgataagagagccttcgtcgagacctggcagtccttttaccggaagaagcttaaggaggtgtggaaacctgccgtgcggtctggcggatctggcggaggctccaccagccccaagaaaaagagaaaagtctaagctgccttctgcggggcttgccttctggccatgcccttcttctctcccttgcacctgtacctcttggtctttgaataaagcctgagtaggaaggctagcaaaaaaaaaaaaaaaaaaaaaaaaaaaaaaaaaaaaaaaaaaaaaaaaaaaaaaaaaaaaaaaaaaaaaaaaaaaaaaaagcccagccggctccccaacctctaccgaggagggcacctctgagtccgccacccccgagagcggccctggcacctccaccgagcccagcgagggcagcgcacccggcagccctgccggcagccccacctccacagaggagggaaccagcaccgagcccagcgaaggcagcgccccaggcaccagcaccgagcctagtgagcaggagattaaacggatcaacaagatcagaagaagacttgtgaaagacagcaacaccaagaaggccggcaagacaggccccatgaaaaccctgctggttagagtgatgacacccgatctgagagagcggctggaaaacctgagaaagaagcctgaaaatatcccccagcccatcagcaatacatctagagccaacctgaataagctgctgaccgattacaccgaaatgaagaaggcgatcctgcatgtgtactgggaagagttccagaaggaccctgtgggcctgatgagccgggtggcccagcctgccagcaagaagatcgatcagaacaagctgaaacctgagatggacgagaagggcaacctgaccaccgccggctttgcctgctctcagtgtggccagcccctgttcgtgtacaagctggagcaggtgtctgagaagggcaaggcttacaccaactacttcggacggtgcaatgtggccgagcacgaaaagctgatcctgctggcccagctgaagcccgagaaggatagcgacgaagccgtgacatatagcctgggaaagtttgggcagagggccctggatttctacagcattcatgtgaccaaggagtccacccaccccgtgaagcccctggcccagatcgccggaaacagatacgcctccggacctgtgggaaaggccctgagcgacgcatgtatgggcacaatcgcctccttcctgtctaagtaccaggacatcatcatcgaacaccagaaggtggtgaagggcaaccagaagagactggagagcctgcgggagctggccggcaaggaaaacctggaataccctagcgtgaccctgccacctcagcctcacaccaaggagggcgttgatgcctacaacgaagtgatcgcccgggtgcgaatgtgggtgaacctgaacctgtggcagaagctgaagctaagcagagatgatgccaagcctctgctgagactgaagggattcccttcctttcctctggtcgagagacaggccaacgaagtggactggtgggacatggtgtgtaacgtgaagaagctgatcaacgagaaaaaggaggatggcaaggtgttttggcagaatctggctggctacaagagacaggaagccctgagaccatacctgagcagcgaggaagatcggaagaagggaaagaaattcgctcggtaccagctgggcgacctgctgctgcacctggaaaagaagcacggcgaggactggggaaaggtgtacgacgaggcctgggagcggattgacaagaaagtggaaggcctgagcaagcacatcaagctggaagaggaacggagaagcgaggacgcccagagcaaggccgccctgaccgactggctgcgggctaaggccagcttcgtgatcgagggcctgaaggaggccgacaaggacgagttctgcagatgcgagctgaagctgcagaagtggtacggggacctgcggggaaagcccttcgccatcgaagccgagaacagcatcctggacatcagcggcttcagcaagcagtacaactgtgccttcatctggcagaaggacggcgtgaagaagctgaacctgtacctgatcatcaactacttcaagggcggcaagctgcggttcaagaagatcaaacctgaagccttcgaagccaacagattctacaccgtgatcaacaaaaagagcggcgagatcgtgcccatggaggtgaacttcaacttcgacgaccccaacctgatcatcctgcctctggcctttggcaagagacagggcagagaattcatctggaacgacctgctgtccctggaaaccggcagcctgaagctggccaacggaagagtgatcgagaagacactgtacaacagaagaacccggcaggatgagcctgccctgttcgtggccctgaccttcgagcggcgggaggtcctggactcctccaatatcaaaccaatgaacctgatcggcgtggcaagaggcgaaaacatccccgccgtgatcgccctgaccgaccccgagggctgcccactgagccggtttaaggatagcctgggaaacccaacccacatcctgagaatcggcgagagctataaggagaagcagcggaccatccaggccaagaaggaggtggagcagcggagagccggcggctacagccggaagtacgccagcaaagccaagaatctggcagacgatatggtgagaaacaccgctagagatctgctgtactacgccgtgacccaggatgccatgctgatcttcgccaacctgagccggggcttcggccggcagggcaagcggaccttcatggccgagagacagtacacacggatggaggactggctgaccgccaagctggcctacgagggcctgagcaagacctacctgtccaagacactggcccagtacacctccaagacatgcagcaactgtgggtttaccatcaccagcgccgactacgacagggtgctggagaagctgaagaagacagcaacaggctggatgaccacaattaacggcaaggagctgaaggtggagggccagattacctactacaacagatacaagagacagaacgtagtcaaggacctgtccgtcgagctggatagactgagcgaagaatctgtgaacaacgacatctcctcctggacaaagggcagaagcggagaagctctgagcctcctgaagaaaagattctcccatagacccgtgcaggagaagttcgtgtgcctgaactgcggcttcgagacacacgcagccgagcaagccgccctgaacatcgccagatcctggctgttcctgcggagccaggagtacaagaaataccagacaaacaagacaaccggcaacaccgataagagagccttcgtcgagacctggcagtccttttaccggaagaagcttaaggaggtgtggaaacctgccgtgcggtctggcggatctggcggaggctccaccagccccaagaaaaagagaaaagtctaagctgccttctgcggggcttgccttctggccatgcccttcttctctcccttgcacctgtacctcttggtctttgaataaagcctgagtaggaaggctagcaaaaaaaaaaaaaaaaaaaaaaaaaaaaaaaaaaaaaaaaaaaaaaaaaaaaaaaaaaaaaaaaaaaaaaaaaaaaaaaa

SEQ ID NO: 9603 - RNA, 8787 nt, synthetic construct
  source 1..8787: mol_type = other RNA
aggaaataagagagaaaagaagagtaagaagaaatataagagccaccatggcccctaagaagaagcgtaaagtgagccggatgaaccacgaccaggagttcgacccccctaaggtgtaccctcccgtccccgccgagaagagaaagcccatccgggtcctgagcctgttcgatggcatcgccaccggtctgctggtgctgaaggacctgggcatccaggtggataggtacattgcctccgaggtgtgcgaggactccatcaccgtgggaatggtgcgtcatcagggcaagatcatgtacgtgggcgacgtgcggagcgtgacacagaagcatatccaggagtggggccctttcgacctggtgatcggcggcagcccttgcaatgacctgagcatcgtgaacccagcccggaagggcctgtacgagggaaccggcagactgttcttcgagttttacagactgctgcacgacgcccggcctaaggaaggcgacgaccggcccttcttttggctgttcgagaatgtggtggccatgggagtcagcgacaagcgggatattagccggttcctggagagcaaccccgtgatgatcgatgccaaggaagtgagcgccgcccaccgggccagatacttctggggcaatctgcctggcatgaacagacccctggccagcaccgtgaacgacaagctggagctgcaggagtgcctggagcacggccggatcgccaagttcagcaaggtgagaaccatcaccacccgaagcaacagcatcaaacaaggcaaggaccagcactttcctgtgttcatgaacgagaaggaggacatcctgtggtgtaccgagatggagagagtgttcgggttcccagtccactacacagatgtcagcaacatgtctagactggccagacagagactgctgggaagaagctggtccgtccctgtgatcagacacctgttcgcccctctgaaggagtacttcgcctgcgtgagcagcggcaacagcaacgccaacagccggggccccagcttctctagcggcctggtgccactgtccctgagagggagccacatgggccccatggagatctacaaaaccgtgagcgcctggaagcggcagcctgtgcgcgtgctgagcctgtttcggaatatcgataaagtcctgaaaagcctgggattcctggagagcggctctggctccggcggtggcaccctgaagtacgtggaggatgtgacaaacgtggtcagacgggatgtggagaagtggggccccttcgatctggtgtacggcagcacccaacccctgggcagctcttgtgaccggtgccctggctggtacatgtttcagttccaccggatcctgcagtacgccctgccgagacaggagtcccagcggccattcttttggattttcatggacaacttgctgctgaccgaggatgaccaggaaactaccactcggttcctgcagaccgaagccgtgaccctgcaggacgtgagaggccgggactaccagaacgccatgcgggtgtggtccaacatccctggactgaaaagcaagcacgcacctctgacccctaaagaagaggagtacctgcaggcccaggtgcggagcagaagcaagctggacgcccctaaggtggatctgctggtgaagaattgcctcctgcccctgagagagtacttcaagtatttcagccagaatagtctgcccctgggaggcagcggcggcggctaccagggcctggtgagcttcgaggacgtggccgtgaacttcacctgggaggagtggcaggacctggacgccgcccagaggaccctgtacagggacgtgatgctggagaactacagcagcctggtgagcctgggccactgcatcaccaagcccgaggtgatcatcaagctggagcagggcgccgccccctggaccgtgaaggagacccccgaccagggcagccccgacgtgcagatcgtggacggcggcccaagcagcggcgcccctcctcccagcggcggcaggcggcccaagcagcggcgcccctcctcccagcggcggcagcccagccggctccccaacctctaccgaggagggcacctctgagtccgccacccccgagagcggccctggcacctccaccgagcccagcgagggcagcgcacccggcagccctgccggcagccccacctccacagaggagggaaccagcaccgagcccagcgaaggcagcgccccaggcaccagcaccgagcctagtgagcaggagattaaacggatcaacaagatcagaagaagacttgtgaaagacagcaacaccaagaaggccggcaagacaggccccatgaaaaccctgctggttagagtgatgacacccgatctgagagagcggctggaaaacctgagaaagaagcctgaaaatatcccccagcccatcagcaatacatctagagccaacctgaataagctgctgaccgattacaccgaaatgaagaaggcgatcctgcatgtgtactgggaagagttccagaaggaccctgtgggcctgatgagccgggtggcccagcctgccagcaagaagatcgatcagaacaagctgaaacctgagatggacgagaagggcaacctgaccaccgccggctttgcctgctctcagtgtggccagcccctgttcgtgtacaagctggagcaggtgtctgagaagggcaaggcttacaccaactacttcggacggtgcaatgtggccgagcacgaaaagctgatcctgctggcccagctgaagcccgagaaggatagcgacgaagccgtgacatatagcctgggaaagtttgggcagagggccctggatttctacagcattcatgtgaccaaggagtccacccaccccgtgaagcccctggcccagatcgccggaaacagatacgcctccggacctgtgggaaaggccctgagcgacgcatgtatgggcacaatcgcctccttcctgtctaagtaccaggacatcatcatcgaacaccagaaggtggtgaagggcaaccagaagagactggagagcctgcgggagctggccggcaaggaaaacctggaataccctagcgtgaccctgccacctcagcctcacaccaaggagggcgttgatgcctacaacgaagtgatcgcccgggtgcgaatgtgggtgaacctgaacctgtggcagaagctgaagctaagcagagatgatgccaagcctctgctgagactgaagggattcccttcctttcctctggtcgagagacaggccaacgaagtggactggtgggacatggtgtgtaacgtgaagaagctgatcaacgagaaaaaggaggatggcaaggtgttttggcagaatctggctggctacaagagacaggaagccctgagaccatacctgagcagcgaggaagatcggaagaagggaaagaaattcgctcggtaccagctgggcgacctgctgctgcacctggaaaagaagcacggcgaggactggggaaaggtgtacgacgaggcctgggagcggattgacaagaaagtggaaggcctgagcaagcacatcaagctggaagaggaacggagaagcgaggacgcccagagcaaggccgccctgaccgactggctgcgggctaaggccagcttcgtgatcgagggcctgaaggaggccgacaaggacgagttctgcagatgcgagctgaagctgcagaagtggtacggggacctgcggggaaagcccttcgccatcgaagccgagaacagcatcctggacatcagcggcttcagcaagcagtacaactgtgccttcatctggcagaaggacggcgtgaagaagctgaacctgtacctgatcatcaactacttcaagggcggcaagctgcggttcaagaagatcaaacctgaagccttcgaagccaacagattctacaccgtgatcaacaaaaagagcggcgagatcgtgcccatggaggtgaacttcaacttcgacgaccccaacctgatcatcctgcctctggcctttggcaagagacagggcagagaattcatctggaacgacctgctgtccctggaaaccggcagcctgaagctggccaacggaagagtgatcgagaagacactgtacaacagaagaacccggcaggatgagcctgccctgttcgtggccctgaccttcgagcggcgggaggtcctggactcctccaatatcaaaccaatgaacctgatcggcgtggcaagaggcgaaaacatccccgccgtgatcgccctgaccgaccccgagggctgcccactgagccggtttaaggatagcctgggaaacccaacccacatcctgagaatcggcgagagctataaggagaagcagcggaccatccaggccaagaaggaggtggagcagcggagagccggcggctacagccggaagtacgccagcaaagccaagaatctggcagacgatatggtgagaaacaccgctagagatctgctgtactacgccgtgacccaggatgccatgctgatcttcgccaacctgagccggggcttcggccggcagggcaagcggaccttcatggccgagagacagtacacacggatggaggactggctgaccgccaagctggcctacgagggcctgagcaagacctacctgtccaagacactggcccagtacacctccaagacatgcagcaactgtgggtttaccatcaccagcgccgactacgacagggtgctggagaagctgaagaagacagcaacaggctggatgaccacaattaacggcaaggagctgaaggtggagggccagattacctactacaacagatacaagagacagaacgtagtcaaggacctgtccgtcgagctggatagactgagcgaagaatctgtgaacaacgacatctcctcctggacaaagggcagaagcggagaagctctgagcctcctgaagaaaagattctcccatagacccgtgcaggagaagttcgtgtgcctgaactgcggcttcgagacacacgcagccgagcaagccgccctgaacatcgccagatcctggctgttcctgcggagccaggagtacaagaaataccagacaaacaagacaaccggcaacaccgataagagagccttcgtcgagacctggcagtccttttaccggaagaagcttaaggaggtgtggaaacctgccgtgcggtctggcggatctggcggaggctccaccagccccaagaaaaagagaaaagtctaagctgccttctgcggggcttgccttctggccatgcccttcttctctcccttgcacctgtacctcttggtctttgaataaagcctgagtaggaaggctagcaaaaaaaaaaaaaaaaaaaaaaaaaaaaaaaaaaaaaaaaaaaaaaaaaaaaaaaaaaaaaaaaaaaaaaaaaaaaaaaagcccagccggctccccaacctctaccgaggagggcacctctgagtccgccacccccgagagcggccctggcacctccaccgagcccagcgagggcagcgcacccggcagccctgccggcagccccacctccacagaggagggaaccagcaccgagcccagcgaaggcagcgccccaggcaccagcaccgagcctagtgagcaggagattaaacggatcaacaagatcagaagaagacttgtgaaagacagcaacaccaagaaggccggcaagacaggccccatgaaaaccctgctggttagagtgatgacacccgatctgagagagcggctggaaaacctgagaaagaagcctgaaaatatcccccagcccatcagcaatacatctagagccaacctgaataagctgctgaccgattacaccgaaatgaagaaggcgatcctgcatgtgtactgggaagagttccagaaggaccctgtgggcctgatgagccgggtggcccagcctgccagcaagaagatcgatcagaacaagctgaaacctgagatggacgagaagggcaacctgaccaccgccggctttgcctgctctcagtgtggccagcccctgttcgtgtacaagctggagcaggtgtctgagaagggcaaggcttacaccaactacttcggacggtgcaatgtggccgagcacgaaaagctgatcctgctggcccagctgaagcccgagaaggatagcgacgaagccgtgacatatagcctgggaaagtttgggcagagggccctggatttctacagcattcatgtgaccaaggagtccacccaccccgtgaagcccctggcccagatcgccggaaacagatacgcctccggacctgtgggaaaggccctgagcgacgcatgtatgggcacaatcgcctccttcctgtctaagtaccaggacatcatcatcgaacaccagaaggtggtgaagggcaaccagaagagactggagagcctgcgggagctggccggcaaggaaaacctggaataccctagcgtgaccctgccacctcagcctcacaccaaggagggcgttgatgcctacaacgaagtgatcgcccgggtgcgaatgtgggtgaacctgaacctgtggcagaagctgaagctaagcagagatgatgccaagcctctgctgagactgaagggattcccttcctttcctctggtcgagagacaggccaacgaagtggactggtgggacatggtgtgtaacgtgaagaagctgatcaacgagaaaaaggaggatggcaaggtgttttggcagaatctggctggctacaagagacaggaagccctgagaccatacctgagcagcgaggaagatcggaagaagggaaagaaattcgctcggtaccagctgggcgacctgctgctgcacctggaaaagaagcacggcgaggactggggaaaggtgtacgacgaggcctgggagcggattgacaagaaagtggaaggcctgagcaagcacatcaagctggaagaggaacggagaagcgaggacgcccagagcaaggccgccctgaccgactggctgcgggctaaggccagcttcgtgatcgagggcctgaaggaggccgacaaggacgagttctgcagatgcgagctgaagctgcagaagtggtacggggacctgcggggaaagcccttcgccatcgaagccgagaacagcatcctggacatcagcggcttcagcaagcagtacaactgtgccttcatctggcagaaggacggcgtgaagaagctgaacctgtacctgatcatcaactacttcaagggcggcaagctgcggttcaagaagatcaaacctgaagccttcgaagccaacagattctacaccgtgatcaacaaaaagagcggcgagatcgtgcccatggaggtgaacttcaacttcgacgaccccaacctgatcatcctgcctctggcctttggcaagagacagggcagagaattcatctggaacgacctgctgtccctggaaaccggcagcctgaagctggccaacggaagagtgatcgagaagacactgtacaacagaagaacccggcaggatgagcctgccctgttcgtggccctgaccttcgagcggcgggaggtcctggactcctccaatatcaaaccaatgaacctgatcggcgtggcaagaggcgaaaacatccccgccgtgatcgccctgaccgaccccgagggctgcccactgagccggtttaaggatagcctgggaaacccaacccacatcctgagaatcggcgagagctataaggagaagcagcggaccatccaggccaagaaggaggtggagcagcggagagccggcggctacagccggaagtacgccagcaaagccaagaatctggcagacgatatggtgagaaacaccgctagagatctgctgtactacgccgtgacccaggatgccatgctgatcttcgccaacctgagccggggcttcggccggcagggcaagcggaccttcatggccgagagacagtacacacggatggaggactggctgaccgccaagctggcctacgagggcctgagcaagacctacctgtccaagacactggcccagtacacctccaagacatgcagcaactgtgggtttaccatcaccagcgccgactacgacagggtgctggagaagctgaagaagacagcaacaggctggatgaccacaattaacggcaaggagctgaaggtggagggccagattacctactacaacagatacaagagacagaacgtagtcaaggacctgtccgtcgagctggatagactgagcgaagaatctgtgaacaacgacatctcctcctggacaaagggcagaagcggagaagctctgagcctcctgaagaaaagattctcccatagacccgtgcaggagaagttcgtgtgcctgaactgcggcttcgagacacacgcagccgagcaagccgccctgaacatcgccagatcctggctgttcctgcggagccaggagtacaagaaataccagacaaacaagacaaccggcaacaccgataagagagccttcgtcgagacctggcagtccttttaccggaagaagcttaaggaggtgtggaaacctgccgtgcggtctggcggatctggcggaggctccaccagccccaagaaaaagagaaaagtctaagctgccttctgcggggcttgccttctggccatgcccttcttctctcccttgcacctgtacctcttggtctttgaataaagcctgagtaggaaggctagcaaaaaaaaaaaaaaaaaaaaaaaaaaaaaaaaaaaaaaaaaaaaaaaaaaaaaaaaaaaaaaaaaaaaaaaaaaaaaaaa

SEQ ID NO: 9604 - RNA, 8787 nt, synthetic construct
  source 1..8787: mol_type = other RNA
aggaaataagagagaaaagaagagtaagaagaaatataagagccaccatggcccctaagaagaagcgtaaagtgagccggatgaaccacgaccaggagttcgacccccctaaggtgtaccctcccgtccccgccgagaagagaaagcccatccgggtcctgagcctgttcgatggcatcgccaccggtctgctggtgctgaaggacctgggcatccaggtggataggtacattgcctccgaggtgtgcgaggactccatcaccgtgggaatggtgcgtcatcagggcaagatcatgtacgtgggcgacgtgcggagcgtgacacagaagcatatccaggagtggggccctttcgacctggtgatcggcggcagcccttgcaatgacctgagcatcgtgaacccagcccggaagggcctgtacgagggaaccggcagactgttcttcgagttttacagactgctgcacgacgcccggcctaaggaaggcgacgaccggcccttcttttggctgttcgagaatgtggtggccatgggagtcagcgacaagcgggatattagccggttcctggagagcaaccccgtgatgatcgatgccaaggaagtgagcgccgcccaccgggccagatacttctggggcaatctgcctggcatgaacagacccctggccagcaccgtgaacgacaagctggagctgcaggagtgcctggagcacggccggatcgccaagttcagcaaggtgagaaccatcaccacccgaagcaacagcatcaaacaaggcaaggaccagcactttcctgtgttcatgaacgagaaggaggacatcctgtggtgtaccgagatggagagagtgttcgggttcccagtccactacacagatgtcagcaacatgtctagactggccagacagagactgctgggaagaagctggtccgtccctgtgatcagacacctgttcgcccctctgaaggagtacttcgcctgcgtgagcagcggcaacagcaacgccaacagccggggccccagcttctctagcggcctggtgccactgtccctgagagggagccacatgggccccatggagatctacaaaaccgtgagcgcctggaagcggcagcctgtgcgcgtgctgagcctgtttcggaatatcgataaagtcctgaaaagcctgggattcctggagagcggctctggctccggcggtggcaccctgaagtacgtggaggatgtgacaaacgtggtcagacgggatgtggagaagtggggccccttcgatctggtgtacggcagcacccaacccctgggcagctcttgtgaccggtgccctggctggtacatgtttcagttccaccggatcctgcagtacgccctgccgagacaggagtcccagcggccattcttttggattttcatggacaacttgctgctgaccgaggatgaccaggaaactaccactcggttcctgcagaccgaagccgtgaccctgcaggacgtgagaggccgggactaccagaacgccatgcgggtgtggtccaacatccctggactgaaaagcaagcacgcacctctgacccctaaagaagaggagtacctgcaggcccaggtgcggagcagaagcaagctggacgcccctaaggtggatctgctggtgaagaattgcctcctgcccctgagagagtacttcaagtatttcagccagaatagtctgcccctgggaggcagcggcggcggcccccaggacagcgtgaccttcgaggaggtggccgtgagcttcagcagggaggagtgggccctgctgaccgactggcagaagaacctgtacaaggacgtgatgagggacaactacgagatgctgaacagcctggacctggccgcccacaagcccgacatcatcctgaggatcgagaggggccaggagccctgcgtgggcaggctgcagaggagcaaggccagggagaggcccaaccacgtgttcggcggcccaagcagcggcgcccctcctcccagcggcggcaggcggcccaagcagcggcgcccctcctcccagcggcggcagcccagccggctccccaacctctaccgaggagggcacctctgagtccgccacccccgagagcggccctggcacctccaccgagcccagcgagggcagcgcacccggcagccctgccggcagccccacctccacagaggagggaaccagcaccgagcccagcgaaggcagcgccccaggcaccagcaccgagcctagtgagcaggagattaaacggatcaacaagatcagaagaagacttgtgaaagacagcaacaccaagaaggccggcaagacaggccccatgaaaaccctgctggttagagtgatgacacccgatctgagagagcggctggaaaacctgagaaagaagcctgaaaatatcccccagcccatcagcaatacatctagagccaacctgaataagctgctgaccgattacaccgaaatgaagaaggcgatcctgcatgtgtactgggaagagttccagaaggaccctgtgggcctgatgagccgggtggcccagcctgccagcaagaagatcgatcagaacaagctgaaacctgagatggacgagaagggcaacctgaccaccgccggctttgcctgctctcagtgtggccagcccctgttcgtgtacaagctggagcaggtgtctgagaagggcaaggcttacaccaactacttcggacggtgcaatgtggccgagcacgaaaagctgatcctgctggcccagctgaagcccgagaaggatagcgacgaagccgtgacatatagcctgggaaagtttgggcagagggccctggatttctacagcattcatgtgaccaaggagtccacccaccccgtgaagcccctggcccagatcgccggaaacagatacgcctccggacctgtgggaaaggccctgagcgacgcatgtatgggcacaatcgcctccttcctgtctaagtaccaggacatcatcatcgaacaccagaaggtggtgaagggcaaccagaagagactggagagcctgcgggagctggccggcaaggaaaacctggaataccctagcgtgaccctgccacctcagcctcacaccaaggagggcgttgatgcctacaacgaagtgatcgcccgggtgcgaatgtgggtgaacctgaacctgtggcagaagctgaagctaagcagagatgatgccaagcctctgctgagactgaagggattcccttcctttcctctggtcgagagacaggccaacgaagtggactggtgggacatggtgtgtaacgtgaagaagctgatcaacgagaaaaaggaggatggcaaggtgttttggcagaatctggctggctacaagagacaggaagccctgagaccatacctgagcagcgaggaagatcggaagaagggaaagaaattcgctcggtaccagctgggcgacctgctgctgcacctggaaaagaagcacggcgaggactggggaaaggtgtacgacgaggcctgggagcggattgacaagaaagtggaaggcctgagcaagcacatcaagctggaagaggaacggagaagcgaggacgcccagagcaaggccgccctgaccgactggctgcgggctaaggccagcttcgtgatcgagggcctgaaggaggccgacaaggacgagttctgcagatgcgagctgaagctgcagaagtggtacggggacctgcggggaaagcccttcgccatcgaagccgagaacagcatcctggacatcagcggcttcagcaagcagtacaactgtgccttcatctggcagaaggacggcgtgaagaagctgaacctgtacctgatcatcaactacttcaagggcggcaagctgcggttcaagaagatcaaacctgaagccttcgaagccaacagattctacaccgtgatcaacaaaaagagcggcgagatcgtgcccatggaggtgaacttcaacttcgacgaccccaacctgatcatcctgcctctggcctttggcaagagacagggcagagaattcatctggaacgacctgctgtccctggaaaccggcagcctgaagctggccaacggaagagtgatcgagaagacactgtacaacagaagaacccggcaggatgagcctgccctgttcgtggccctgaccttcgagcggcgggaggtcctggactcctccaatatcaaaccaatgaacctgatcggcgtggcaagaggcgaaaacatccccgccgtgatcgccctgaccgaccccgagggctgcccactgagccggtttaaggatagcctgggaaacccaacccacatcctgagaatcggcgagagctataaggagaagcagcggaccatccaggccaagaaggaggtggagcagcggagagccggcggctacagccggaagtacgccagcaaagccaagaatctggcagacgatatggtgagaaacaccgctagagatctgctgtactacgccgtgacccaggatgccatgctgatcttcgccaacctgagccggggcttcggccggcagggcaagcggaccttcatggccgagagacagtacacacggatggaggactggctgaccgccaagctggcctacgagggcctgagcaagacctacctgtccaagacactggcccagtacacctccaagacatgcagcaactgtgggtttaccatcaccagcgccgactacgacagggtgctggagaagctgaagaagacagcaacaggctggatgaccacaattaacggcaaggagctgaaggtggagggccagattacctactacaacagatacaagagacagaacgtagtcaaggacctgtccgtcgagctggatagactgagcgaagaatctgtgaacaacgacatctcctcctggacaaagggcagaagcggagaagctctgagcctcctgaagaaaagattctcccatagacccgtgcaggagaagttcgtgtgcctgaactgcggcttcgagacacacgcagccgagcaagccgccctgaacatcgccagatcctggctgttcctgcggagccaggagtacaagaaataccagacaaacaagacaaccggcaacaccgataagagagccttcgtcgagacctggcagtccttttaccggaagaagcttaaggaggtgtggaaacctgccgtgcggtctggcggatctggcggaggctccaccagccccaagaaaaagagaaaagtctaagctgccttctgcggggcttgccttctggccatgcccttcttctctcccttgcacctgtacctcttggtctttgaataaagcctgagtaggaaggctagcaaaaaaaaaaaaaaaaaaaaaaaaaaaaaaaaaaaaaaaaaaaaaaaaaaaaaaaaaaaaaaaaaaaaaaaaaaaaaaaagcccagccggctccccaacctctaccgaggagggcacctctgagtccgccacccccgagagcggccctggcacctccaccgagcccagcgagggcagcgcacccggcagccctgccggcagccccacctccacagaggagggaaccagcaccgagcccagcgaaggcagcgccccaggcaccagcaccgagcctagtgagcaggagattaaacggatcaacaagatcagaagaagacttgtgaaagacagcaacaccaagaaggccggcaagacaggccccatgaaaaccctgctggttagagtgatgacacccgatctgagagagcggctggaaaacctgagaaagaagcctgaaaatatcccccagcccatcagcaatacatctagagccaacctgaataagctgctgaccgattacaccgaaatgaagaaggcgatcctgcatgtgtactgggaagagttccagaaggaccctgtgggcctgatgagccgggtggcccagcctgccagcaagaagatcgatcagaacaagctgaaacctgagatggacgagaagggcaacctgaccaccgccggctttgcctgctctcagtgtggccagcccctgttcgtgtacaagctggagcaggtgtctgagaagggcaaggcttacaccaactacttcggacggtgcaatgtggccgagcacgaaaagctgatcctgctggcccagctgaagcccgagaaggatagcgacgaagccgtgacatatagcctgggaaagtttgggcagagggccctggatttctacagcattcatgtgaccaaggagtccacccaccccgtgaagcccctggcccagatcgccggaaacagatacgcctccggacctgtgggaaaggccctgagcgacgcatgtatgggcacaatcgcctccttcctgtctaagtaccaggacatcatcatcgaacaccagaaggtggtgaagggcaaccagaagagactggagagcctgcgggagctggccggcaaggaaaacctggaataccctagcgtgaccctgccacctcagcctcacaccaaggagggcgttgatgcctacaacgaagtgatcgcccgggtgcgaatgtgggtgaacctgaacctgtggcagaagctgaagctaagcagagatgatgccaagcctctgctgagactgaagggattcccttcctttcctctggtcgagagacaggccaacgaagtggactggtgggacatggtgtgtaacgtgaagaagctgatcaacgagaaaaaggaggatggcaaggtgttttggcagaatctggctggctacaagagacaggaagccctgagaccatacctgagcagcgaggaagatcggaagaagggaaagaaattcgctcggtaccagctgggcgacctgctgctgcacctggaaaagaagcacggcgaggactggggaaaggtgtacgacgaggcctgggagcggattgacaagaaagtggaaggcctgagcaagcacatcaagctggaagaggaacggagaagcgaggacgcccagagcaaggccgccctgaccgactggctgcgggctaaggccagcttcgtgatcgagggcctgaaggaggccgacaaggacgagttctgcagatgcgagctgaagctgcagaagtggtacggggacctgcggggaaagcccttcgccatcgaagccgagaacagcatcctggacatcagcggcttcagcaagcagtacaactgtgccttcatctggcagaaggacggcgtgaagaagctgaacctgtacctgatcatcaactacttcaagggcggcaagctgcggttcaagaagatcaaacctgaagccttcgaagccaacagattctacaccgtgatcaacaaaaagagcggcgagatcgtgcccatggaggtgaacttcaacttcgacgaccccaacctgatcatcctgcctctggcctttggcaagagacagggcagagaattcatctggaacgacctgctgtccctggaaaccggcagcctgaagctggccaacggaagagtgatcgagaagacactgtacaacagaagaacccggcaggatgagcctgccctgttcgtggccctgaccttcgagcggcgggaggtcctggactcctccaatatcaaaccaatgaacctgatcggcgtggcaagaggcgaaaacatccccgccgtgatcgccctgaccgaccccgagggctgcccactgagccggtttaaggatagcctgggaaacccaacccacatcctgagaatcggcgagagctataaggagaagcagcggaccatccaggccaagaaggaggtggagcagcggagagccggcggctacagccggaagtacgccagcaaagccaagaatctggcagacgatatggtgagaaacaccgctagagatctgctgtactacgccgtgacccaggatgccatgctgatcttcgccaacctgagccggggcttcggccggcagggcaagcggaccttcatggccgagagacagtacacacggatggaggactggctgaccgccaagctggcctacgagggcctgagcaagacctacctgtccaagacactggcccagtacacctccaagacatgcagcaactgtgggtttaccatcaccagcgccgactacgacagggtgctggagaagctgaagaagacagcaacaggctggatgaccacaattaacggcaaggagctgaaggtggagggccagattacctactacaacagatacaagagacagaacgtagtcaaggacctgtccgtcgagctggatagactgagcgaagaatctgtgaacaacgacatctcctcctggacaaagggcagaagcggagaagctctgagcctcctgaagaaaagattctcccatagacccgtgcaggagaagttcgtgtgcctgaactgcggcttcgagacacacgcagccgagcaagccgccctgaacatcgccagatcctggctgttcctgcggagccaggagtacaagaaataccagacaaacaagacaaccggcaacaccgataagagagccttcgtcgagacctggcagtccttttaccggaagaagcttaaggaggtgtggaaacctgccgtgcggtctggcggatctggcggaggctccaccagccccaagaaaaagagaaaagtctaagctgccttctgcggggcttgccttctggccatgcccttcttctctcccttgcacctgtacctcttggtctttgaataaagcctgagtaggaaggctagcaaaaaaaaaaaaaaaaaaaaaaaaaaaaaaaaaaaaaaaaaaaaaaaaaaaaaaaaaaaaaaaaaaaaaaaaaaaaaaaa

SEQ ID NO: 9605 - RNA, 8787 nt, synthetic construct
  source 1..8787: mol_type = other RNA
aggaaataagagagaaaagaagagtaagaagaaatataagagccaccatggcccctaagaagaagcgtaaagtgagccggatgaaccacgaccaggagttcgacccccctaaggtgtaccctcccgtccccgccgagaagagaaagcccatccgggtcctgagcctgttcgatggcatcgccaccggtctgctggtgctgaaggacctgggcatccaggtggataggtacattgcctccgaggtgtgcgaggactccatcaccgtgggaatggtgcgtcatcagggcaagatcatgtacgtgggcgacgtgcggagcgtgacacagaagcatatccaggagtggggccctttcgacctggtgatcggcggcagcccttgcaatgacctgagcatcgtgaacccagcccggaagggcctgtacgagggaaccggcagactgttcttcgagttttacagactgctgcacgacgcccggcctaaggaaggcgacgaccggcccttcttttggctgttcgagaatgtggtggccatgggagtcagcgacaagcgggatattagccggttcctggagagcaaccccgtgatgatcgatgccaaggaagtgagcgccgcccaccgggccagatacttctggggcaatctgcctggcatgaacagacccctggccagcaccgtgaacgacaagctggagctgcaggagtgcctggagcacggccggatcgccaagttcagcaaggtgagaaccatcaccacccgaagcaacagcatcaaacaaggcaaggaccagcactttcctgtgttcatgaacgagaaggaggacatcctgtggtgtaccgagatggagagagtgttcgggttcccagtccactacacagatgtcagcaacatgtctagactggccagacagagactgctgggaagaagctggtccgtccctgtgatcagacacctgttcgcccctctgaaggagtacttcgcctgcgtgagcagcggcaacagcaacgccaacagccggggccccagcttctctagcggcctggtgccactgtccctgagagggagccacatgggccccatggagatctacaaaaccgtgagcgcctggaagcggcagcctgtgcgcgtgctgagcctgtttcggaatatcgataaagtcctgaaaagcctgggattcctggagagcggctctggctccggcggtggcaccctgaagtacgtggaggatgtgacaaacgtggtcagacgggatgtggagaagtggggccccttcgatctggtgtacggcagcacccaacccctgggcagctcttgtgaccggtgccctggctggtacatgtttcagttccaccggatcctgcagtacgccctgccgagacaggagtcccagcggccattcttttggattttcatggacaacttgctgctgaccgaggatgaccaggaaactaccactcggttcctgcagaccgaagccgtgaccctgcaggacgtgagaggccgggactaccagaacgccatgcgggtgtggtccaacatccctggactgaaaagcaagcacgcacctctgacccctaaagaagaggagtacctgcaggcccaggtgcggagcagaagcaagctggacgcccctaaggtggatctgctggtgaagaattgcctcctgcccctgagagagtacttcaagtatttcagccagaatagtctgcccctgggaggcagcggcggcggcaggatgaagagcgtgaccttcgaggacgtggccgtgtacttcacccagaccgagtgggacagcctgagcaccgcccagagggccctgtacagggacgtgatgctggagaactacggcaacgtggccagcctgggcttccccctgctgaagcccgccgtgatcagccagctggagggcggcggcgagctggagggccccagccccctggccagcggcgccggcaccggcccccagggcctgtggggcggcccaagcagcggcgcccctcctcccagcggcggcaggcggcccaagcagcggcgcccctcctcccagcggcggcagcccagccggctccccaacctctaccgaggagggcacctctgagtccgccacccccgagagcggccctggcacctccaccgagcccagcgagggcagcgcacccggcagccctgccggcagccccacctccacagaggagggaaccagcaccgagcccagcgaaggcagcgccccaggcaccagcaccgagcctagtgagcaggagattaaacggatcaacaagatcagaagaagacttgtgaaagacagcaacaccaagaaggccggcaagacaggccccatgaaaaccctgctggttagagtgatgacacccgatctgagagagcggctggaaaacctgagaaagaagcctgaaaatatcccccagcccatcagcaatacatctagagccaacctgaataagctgctgaccgattacaccgaaatgaagaaggcgatcctgcatgtgtactgggaagagttccagaaggaccctgtgggcctgatgagccgggtggcccagcctgccagcaagaagatcgatcagaacaagctgaaacctgagatggacgagaagggcaacctgaccaccgccggctttgcctgctctcagtgtggccagcccctgttcgtgtacaagctggagcaggtgtctgagaagggcaaggcttacaccaactacttcggacggtgcaatgtggccgagcacgaaaagctgatcctgctggcccagctgaagcccgagaaggatagcgacgaagccgtgacatatagcctgggaaagtttgggcagagggccctggatttctacagcattcatgtgaccaaggagtccacccaccccgtgaagcccctggcccagatcgccggaaacagatacgcctccggacctgtgggaaaggccctgagcgacgcatgtatgggcacaatcgcctccttcctgtctaagtaccaggacatcatcatcgaacaccagaaggtggtgaagggcaaccagaagagactggagagcctgcgggagctggccggcaaggaaaacctggaataccctagcgtgaccctgccacctcagcctcacaccaaggagggcgttgatgcctacaacgaagtgatcgcccgggtgcgaatgtgggtgaacctgaacctgtggcagaagctgaagctaagcagagatgatgccaagcctctgctgagactgaagggattcccttcctttcctctggtcgagagacaggccaacgaagtggactggtgggacatggtgtgtaacgtgaagaagctgatcaacgagaaaaaggaggatggcaaggtgttttggcagaatctggctggctacaagagacaggaagccctgagaccatacctgagcagcgaggaagatcggaagaagggaaagaaattcgctcggtaccagctgggcgacctgctgctgcacctggaaaagaagcacggcgaggactggggaaaggtgtacgacgaggcctgggagcggattgacaagaaagtggaaggcctgagcaagcacatcaagctggaagaggaacggagaagcgaggacgcccagagcaaggccgccctgaccgactggctgcgggctaaggccagcttcgtgatcgagggcctgaaggaggccgacaaggacgagttctgcagatgcgagctgaagctgcagaagtggtacggggacctgcggggaaagcccttcgccatcgaagccgagaacagcatcctggacatcagcggcttcagcaagcagtacaactgtgccttcatctggcagaaggacggcgtgaagaagctgaacctgtacctgatcatcaactacttcaagggcggcaagctgcggttcaagaagatcaaacctgaagccttcgaagccaacagattctacaccgtgatcaacaaaaagagcggcgagatcgtgcccatggaggtgaacttcaacttcgacgaccccaacctgatcatcctgcctctggcctttggcaagagacagggcagagaattcatctggaacgacctgctgtccctggaaaccggcagcctgaagctggccaacggaagagtgatcgagaagacactgtacaacagaagaacccggcaggatgagcctgccctgttcgtggccctgaccttcgagcggcgggaggtcctggactcctccaatatcaaaccaatgaacctgatcggcgtggcaagaggcgaaaacatccccgccgtgatcgccctgaccgaccccgagggctgcccactgagccggtttaaggatagcctgggaaacccaacccacatcctgagaatcggcgagagctataaggagaagcagcggaccatccaggccaagaaggaggtggagcagcggagagccggcggctacagccggaagtacgccagcaaagccaagaatctggcagacgatatggtgagaaacaccgctagagatctgctgtactacgccgtgacccaggatgccatgctgatcttcgccaacctgagccggggcttcggccggcagggcaagcggaccttcatggccgagagacagtacacacggatggaggactggctgaccgccaagctggcctacgagggcctgagcaagacctacctgtccaagacactggcccagtacacctccaagacatgcagcaactgtgggtttaccatcaccagcgccgactacgacagggtgctggagaagctgaagaagacagcaacaggctggatgaccacaattaacggcaaggagctgaaggtggagggccagattacctactacaacagatacaagagacagaacgtagtcaaggacctgtccgtcgagctggatagactgagcgaagaatctgtgaacaacgacatctcctcctggacaaagggcagaagcggagaagctctgagcctcctgaagaaaagattctcccatagacccgtgcaggagaagttcgtgtgcctgaactgcggcttcgagacacacgcagccgagcaagccgccctgaacatcgccagatcctggctgttcctgcggagccaggagtacaagaaataccagacaaacaagacaaccggcaacaccgataagagagccttcgtcgagacctggcagtccttttaccggaagaagcttaaggaggtgtggaaacctgccgtgcggtctggcggatctggcggaggctccaccagccccaagaaaaagagaaaagtctaagctgccttctgcggggcttgccttctggccatgcccttcttctctcccttgcacctgtacctcttggtctttgaataaagcctgagtaggaaggctagcaaaaaaaaaaaaaaaaaaaaaaaaaaaaaaaaaaaaaaaaaaaaaaaaaaaaaaaaaaaaaaaaaaaaaaaaaaaaaaaagcccagccggctccccaacctctaccgaggagggcacctctgagtccgccacccccgagagcggccctggcacctccaccgagcccagcgagggcagcgcacccggcagccctgccggcagccccacctccacagaggagggaaccagcaccgagcccagcgaaggcagcgccccaggcaccagcaccgagcctagtgagcaggagattaaacggatcaacaagatcagaagaagacttgtgaaagacagcaacaccaagaaggccggcaagacaggccccatgaaaaccctgctggttagagtgatgacacccgatctgagagagcggctggaaaacctgagaaagaagcctgaaaatatcccccagcccatcagcaatacatctagagccaacctgaataagctgctgaccgattacaccgaaatgaagaaggcgatcctgcatgtgtactgggaagagttccagaaggaccctgtgggcctgatgagccgggtggcccagcctgccagcaagaagatcgatcagaacaagctgaaacctgagatggacgagaagggcaacctgaccaccgccggctttgcctgctctcagtgtggccagcccctgttcgtgtacaagctggagcaggtgtctgagaagggcaaggcttacaccaactacttcggacggtgcaatgtggccgagcacgaaaagctgatcctgctggcccagctgaagcccgagaaggatagcgacgaagccgtgacatatagcctgggaaagtttgggcagagggccctggatttctacagcattcatgtgaccaaggagtccacccaccccgtgaagcccctggcccagatcgccggaaacagatacgcctccggacctgtgggaaaggccctgagcgacgcatgtatgggcacaatcgcctccttcctgtctaagtaccaggacatcatcatcgaacaccagaaggtggtgaagggcaaccagaagagactggagagcctgcgggagctggccggcaaggaaaacctggaataccctagcgtgaccctgccacctcagcctcacaccaaggagggcgttgatgcctacaacgaagtgatcgcccgggtgcgaatgtgggtgaacctgaacctgtggcagaagctgaagctaagcagagatgatgccaagcctctgctgagactgaagggattcccttcctttcctctggtcgagagacaggccaacgaagtggactggtgggacatggtgtgtaacgtgaagaagctgatcaacgagaaaaaggaggatggcaaggtgttttggcagaatctggctggctacaagagacaggaagccctgagaccatacctgagcagcgaggaagatcggaagaagggaaagaaattcgctcggtaccagctgggcgacctgctgctgcacctggaaaagaagcacggcgaggactggggaaaggtgtacgacgaggcctgggagcggattgacaagaaagtggaaggcctgagcaagcacatcaagctggaagaggaacggagaagcgaggacgcccagagcaaggccgccctgaccgactggctgcgggctaaggccagcttcgtgatcgagggcctgaaggaggccgacaaggacgagttctgcagatgcgagctgaagctgcagaagtggtacggggacctgcggggaaagcccttcgccatcgaagccgagaacagcatcctggacatcagcggcttcagcaagcagtacaactgtgccttcatctggcagaaggacggcgtgaagaagctgaacctgtacctgatcatcaactacttcaagggcggcaagctgcggttcaagaagatcaaacctgaagccttcgaagccaacagattctacaccgtgatcaacaaaaagagcggcgagatcgtgcccatggaggtgaacttcaacttcgacgaccccaacctgatcatcctgcctctggcctttggcaagagacagggcagagaattcatctggaacgacctgctgtccctggaaaccggcagcctgaagctggccaacggaagagtgatcgagaagacactgtacaacagaagaacccggcaggatgagcctgccctgttcgtggccctgaccttcgagcggcgggaggtcctggactcctccaatatcaaaccaatgaacctgatcggcgtggcaagaggcgaaaacatccccgccgtgatcgccctgaccgaccccgagggctgcccactgagccggtttaaggatagcctgggaaacccaacccacatcctgagaatcggcgagagctataaggagaagcagcggaccatccaggccaagaaggaggtggagcagcggagagccggcggctacagccggaagtacgccagcaaagccaagaatctggcagacgatatggtgagaaacaccgctagagatctgctgtactacgccgtgacccaggatgccatgctgatcttcgccaacctgagccggggcttcggccggcagggcaagcggaccttcatggccgagagacagtacacacggatggaggactggctgaccgccaagctggcctacgagggcctgagcaagacctacctgtccaagacactggcccagtacacctccaagacatgcagcaactgtgggtttaccatcaccagcgccgactacgacagggtgctggagaagctgaagaagacagcaacaggctggatgaccacaattaacggcaaggagctgaaggtggagggccagattacctactacaacagatacaagagacagaacgtagtcaaggacctgtccgtcgagctggatagactgagcgaagaatctgtgaacaacgacatctcctcctggacaaagggcagaagcggagaagctctgagcctcctgaagaaaagattctcccatagacccgtgcaggagaagttcgtgtgcctgaactgcggcttcgagacacacgcagccgagcaagccgccctgaacatcgccagatcctggctgttcctgcggagccaggagtacaagaaataccagacaaacaagacaaccggcaacaccgataagagagccttcgtcgagacctggcagtccttttaccggaagaagcttaaggaggtgtggaaacctgccgtgcggtctggcggatctggcggaggctccaccagccccaagaaaaagagaaaagtctaagctgccttctgcggggcttgccttctggccatgcccttcttctctcccttgcacctgtacctcttggtctttgaataaagcctgagtaggaaggctagcaaaaaaaaaaaaaaaaaaaaaaaaaaaaaaaaaaaaaaaaaaaaaaaaaaaaaaaaaaaaaaaaaaaaaaaaaaaaaaaa

SEQ ID NO: 9606 - RNA, 8787 nt, synthetic construct
  source 1..8787: mol_type = other RNA
aggaaataagagagaaaagaagagtaagaagaaatataagagccaccatggcccctaagaagaagcgtaaagtgagccggatgaaccacgaccaggagttcgacccccctaaggtgtaccctcccgtccccgccgagaagagaaagcccatccgggtcctgagcctgttcgatggcatcgccaccggtctgctggtgctgaaggacctgggcatccaggtggataggtacattgcctccgaggtgtgcgaggactccatcaccgtgggaatggtgcgtcatcagggcaagatcatgtacgtgggcgacgtgcggagcgtgacacagaagcatatccaggagtggggccctttcgacctggtgatcggcggcagcccttgcaatgacctgagcatcgtgaacccagcccggaagggcctgtacgagggaaccggcagactgttcttcgagttttacagactgctgcacgacgcccggcctaaggaaggcgacgaccggcccttcttttggctgttcgagaatgtggtggccatgggagtcagcgacaagcgggatattagccggttcctggagagcaaccccgtgatgatcgatgccaaggaagtgagcgccgcccaccgggccagatacttctggggcaatctgcctggcatgaacagacccctggccagcaccgtgaacgacaagctggagctgcaggagtgcctggagcacggccggatcgccaagttcagcaaggtgagaaccatcaccacccgaagcaacagcatcaaacaaggcaaggaccagcactttcctgtgttcatgaacgagaaggaggacatcctgtggtgtaccgagatggagagagtgttcgggttcccagtccactacacagatgtcagcaacatgtctagactggccagacagagactgctgggaagaagctggtccgtccctgtgatcagacacctgttcgcccctctgaaggagtacttcgcctgcgtgagcagcggcaacagcaacgccaacagccggggccccagcttctctagcggcctggtgccactgtccctgagagggagccacatgggccccatggagatctacaaaaccgtgagcgcctggaagcggcagcctgtgcgcgtgctgagcctgtttcggaatatcgataaagtcctgaaaagcctgggattcctggagagcggctctggctccggcggtggcaccctgaagtacgtggaggatgtgacaaacgtggtcagacgggatgtggagaagtggggccccttcgatctggtgtacggcagcacccaacccctgggcagctcttgtgaccggtgccctggctggtacatgtttcagttccaccggatcctgcagtacgccctgccgagacaggagtcccagcggccattcttttggattttcatggacaacttgctgctgaccgaggatgaccaggaaactaccactcggttcctgcagaccgaagccgtgaccctgcaggacgtgagaggccgggactaccagaacgccatgcgggtgtggtccaacatccctggactgaaaagcaagcacgcacctctgacccctaaagaagaggagtacctgcaggcccaggtgcggagcagaagcaagctggacgcccctaaggtggatctgctggtgaagaattgcctcctgcccctgagagagtacttcaagtatttcagccagaatagtctgcccctgggaggcagcggcggcggcatccagggcagcctgaccttcaaggacgtggccgtggacttcacccaggaggagtggtgcctgctggaccacagccagaaggagctgtacctggaggtgatgctggagaacgtgcagaacctgctgagcgtgggcctgcccgtgcccagggagtactgcaccagctacttccagcaggagaaggccaggtggctgctggagcagaagtgccccaggagcagcagccccgaggccgagaccaacggcggcccaagcagcggcgcccctcctcccagcggcggcaggcggcccaagcagcggcgcccctcctcccagcggcggcagcccagccggctccccaacctctaccgaggagggcacctctgagtccgccacccccgagagcggccctggcacctccaccgagcccagcgagggcagcgcacccggcagccctgccggcagccccacctccacagaggagggaaccagcaccgagcccagcgaaggcagcgccccaggcaccagcaccgagcctagtgagcaggagattaaacggatcaacaagatcagaagaagacttgtgaaagacagcaacaccaagaaggccggcaagacaggccccatgaaaaccctgctggttagagtgatgacacccgatctgagagagcggctggaaaacctgagaaagaagcctgaaaatatcccccagcccatcagcaatacatctagagccaacctgaataagctgctgaccgattacaccgaaatgaagaaggcgatcctgcatgtgtactgggaagagttccagaaggaccctgtgggcctgatgagccgggtggcccagcctgccagcaagaagatcgatcagaacaagctgaaacctgagatggacgagaagggcaacctgaccaccgccggctttgcctgctctcagtgtggccagcccctgttcgtgtacaagctggagcaggtgtctgagaagggcaaggcttacaccaactacttcggacggtgcaatgtggccgagcacgaaaagctgatcctgctggcccagctgaagcccgagaaggatagcgacgaagccgtgacatatagcctgggaaagtttgggcagagggccctggatttctacagcattcatgtgaccaaggagtccacccaccccgtgaagcccctggcccagatcgccggaaacagatacgcctccggacctgtgggaaaggccctgagcgacgcatgtatgggcacaatcgcctccttcctgtctaagtaccaggacatcatcatcgaacaccagaaggtggtgaagggcaaccagaagagactggagagcctgcgggagctggccggcaaggaaaacctggaataccctagcgtgaccctgccacctcagcctcacaccaaggagggcgttgatgcctacaacgaagtgatcgcccgggtgcgaatgtgggtgaacctgaacctgtggcagaagctgaagctaagcagagatgatgccaagcctctgctgagactgaagggattcccttcctttcctctggtcgagagacaggccaacgaagtggactggtgggacatggtgtgtaacgtgaagaagctgatcaacgagaaaaaggaggatggcaaggtgttttggcagaatctggctggctacaagagacaggaagccctgagaccatacctgagcagcgaggaagatcggaagaagggaaagaaattcgctcggtaccagctgggcgacctgctgctgcacctggaaaagaagcacggcgaggactggggaaaggtgtacgacgaggcctgggagcggattgacaagaaagtggaaggcctgagcaagcacatcaagctggaagaggaacggagaagcgaggacgcccagagcaaggccgccctgaccgactggctgcgggctaaggccagcttcgtgatcgagggcctgaaggaggccgacaaggacgagttctgcagatgcgagctgaagctgcagaagtggtacggggacctgcggggaaagcccttcgccatcgaagccgagaacagcatcctggacatcagcggcttcagcaagcagtacaactgtgccttcatctggcagaaggacggcgtgaagaagctgaacctgtacctgatcatcaactacttcaagggcggcaagctgcggttcaagaagatcaaacctgaagccttcgaagccaacagattctacaccgtgatcaacaaaaagagcggcgagatcgtgcccatggaggtgaacttcaacttcgacgaccccaacctgatcatcctgcctctggcctttggcaagagacagggcagagaattcatctggaacgacctgctgtccctggaaaccggcagcctgaagctggccaacggaagagtgatcgagaagacactgtacaacagaagaacccggcaggatgagcctgccctgttcgtggccctgaccttcgagcggcgggaggtcctggactcctccaatatcaaaccaatgaacctgatcggcgtggcaagaggcgaaaacatccccgccgtgatcgccctgaccgaccccgagggctgcccactgagccggtttaaggatagcctgggaaacccaacccacatcctgagaatcggcgagagctataaggagaagcagcggaccatccaggccaagaaggaggtggagcagcggagagccggcggctacagccggaagtacgccagcaaagccaagaatctggcagacgatatggtgagaaacaccgctagagatctgctgtactacgccgtgacccaggatgccatgctgatcttcgccaacctgagccggggcttcggccggcagggcaagcggaccttcatggccgagagacagtacacacggatggaggactggctgaccgccaagctggcctacgagggcctgagcaagacctacctgtccaagacactggcccagtacacctccaagacatgcagcaactgtgggtttaccatcaccagcgccgactacgacagggtgctggagaagctgaagaagacagcaacaggctggatgaccacaattaacggcaaggagctgaaggtggagggccagattacctactacaacagatacaagagacagaacgtagtcaaggacctgtccgtcgagctggatagactgagcgaagaatctgtgaacaacgacatctcctcctggacaaagggcagaagcggagaagctctgagcctcctgaagaaaagattctcccatagacccgtgcaggagaagttcgtgtgcctgaactgcggcttcgagacacacgcagccgagcaagccgccctgaacatcgccagatcctggctgttcctgcggagccaggagtacaagaaataccagacaaacaagacaaccggcaacaccgataagagagccttcgtcgagacctggcagtccttttaccggaagaagcttaaggaggtgtggaaacctgccgtgcggtctggcggatctggcggaggctccaccagccccaagaaaaagagaaaagtctaagctgccttctgcggggcttgccttctggccatgcccttcttctctcccttgcacctgtacctcttggtctttgaataaagcctgagtaggaaggctagcaaaaaaaaaaaaaaaaaaaaaaaaaaaaaaaaaaaaaaaaaaaaaaaaaaaaaaaaaaaaaaaaaaaaaaaaaaaaaaaagcccagccggctccccaacctctaccgaggagggcacctctgagtccgccacccccgagagcggccctggcacctccaccgagcccagcgagggcagcgcacccggcagccctgccggcagccccacctccacagaggagggaaccagcaccgagcccagcgaaggcagcgccccaggcaccagcaccgagcctagtgagcaggagattaaacggatcaacaagatcagaagaagacttgtgaaagacagcaacaccaagaaggccggcaagacaggccccatgaaaaccctgctggttagagtgatgacacccgatctgagagagcggctggaaaacctgagaaagaagcctgaaaatatcccccagcccatcagcaatacatctagagccaacctgaataagctgctgaccgattacaccgaaatgaagaaggcgatcctgcatgtgtactgggaagagttccagaaggaccctgtgggcctgatgagccgggtggcccagcctgccagcaagaagatcgatcagaacaagctgaaacctgagatggacgagaagggcaacctgaccaccgccggctttgcctgctctcagtgtggccagcccctgttcgtgtacaagctggagcaggtgtctgagaagggcaaggcttacaccaactacttcggacggtgcaatgtggccgagcacgaaaagctgatcctgctggcccagctgaagcccgagaaggatagcgacgaagccgtgacatatagcctgggaaagtttgggcagagggccctggatttctacagcattcatgtgaccaaggagtccacccaccccgtgaagcccctggcccagatcgccggaaacagatacgcctccggacctgtgggaaaggccctgagcgacgcatgtatgggcacaatcgcctccttcctgtctaagtaccaggacatcatcatcgaacaccagaaggtggtgaagggcaaccagaagagactggagagcctgcgggagctggccggcaaggaaaacctggaataccctagcgtgaccctgccacctcagcctcacaccaaggagggcgttgatgcctacaacgaagtgatcgcccgggtgcgaatgtgggtgaacctgaacctgtggcagaagctgaagctaagcagagatgatgccaagcctctgctgagactgaagggattcccttcctttcctctggtcgagagacaggccaacgaagtggactggtgggacatggtgtgtaacgtgaagaagctgatcaacgagaaaaaggaggatggcaaggtgttttggcagaatctggctggctacaagagacaggaagccctgagaccatacctgagcagcgaggaagatcggaagaagggaaagaaattcgctcggtaccagctgggcgacctgctgctgcacctggaaaagaagcacggcgaggactggggaaaggtgtacgacgaggcctgggagcggattgacaagaaagtggaaggcctgagcaagcacatcaagctggaagaggaacggagaagcgaggacgcccagagcaaggccgccctgaccgactggctgcgggctaaggccagcttcgtgatcgagggcctgaaggaggccgacaaggacgagttctgcagatgcgagctgaagctgcagaagtggtacggggacctgcggggaaagcccttcgccatcgaagccgagaacagcatcctggacatcagcggcttcagcaagcagtacaactgtgccttcatctggcagaaggacggcgtgaagaagctgaacctgtacctgatcatcaactacttcaagggcggcaagctgcggttcaagaagatcaaacctgaagccttcgaagccaacagattctacaccgtgatcaacaaaaagagcggcgagatcgtgcccatggaggtgaacttcaacttcgacgaccccaacctgatcatcctgcctctggcctttggcaagagacagggcagagaattcatctggaacgacctgctgtccctggaaaccggcagcctgaagctggccaacggaagagtgatcgagaagacactgtacaacagaagaacccggcaggatgagcctgccctgttcgtggccctgaccttcgagcggcgggaggtcctggactcctccaatatcaaaccaatgaacctgatcggcgtggcaagaggcgaaaacatccccgccgtgatcgccctgaccgaccccgagggctgcccactgagccggtttaaggatagcctgggaaacccaacccacatcctgagaatcggcgagagctataaggagaagcagcggaccatccaggccaagaaggaggtggagcagcggagagccggcggctacagccggaagtacgccagcaaagccaagaatctggcagacgatatggtgagaaacaccgctagagatctgctgtactacgccgtgacccaggatgccatgctgatcttcgccaacctgagccggggcttcggccggcagggcaagcggaccttcatggccgagagacagtacacacggatggaggactggctgaccgccaagctggcctacgagggcctgagcaagacctacctgtccaagacactggcccagtacacctccaagacatgcagcaactgtgggtttaccatcaccagcgccgactacgacagggtgctggagaagctgaagaagacagcaacaggctggatgaccacaattaacggcaaggagctgaaggtggagggccagattacctactacaacagatacaagagacagaacgtagtcaaggacctgtccgtcgagctggatagactgagcgaagaatctgtgaacaacgacatctcctcctggacaaagggcagaagcggagaagctctgagcctcctgaagaaaagattctcccatagacccgtgcaggagaagttcgtgtgcctgaactgcggcttcgagacacacgcagccgagcaagccgccctgaacatcgccagatcctggctgttcctgcggagccaggagtacaagaaataccagacaaacaagacaaccggcaacaccgataagagagccttcgtcgagacctggcagtccttttaccggaagaagcttaaggaggtgtggaaacctgccgtgcggtctggcggatctggcggaggctccaccagccccaagaaaaagagaaaagtctaagctgccttctgcggggcttgccttctggccatgcccttcttctctcccttgcacctgtacctcttggtctttgaataaagcctgagtaggaaggctagcaaaaaaaaaaaaaaaaaaaaaaaaaaaaaaaaaaaaaaaaaaaaaaaaaaaaaaaaaaaaaaaaaaaaaaaaaaaaaaaa

SEQ ID NO: 9607 - RNA, 8787 nt, synthetic construct
  source 1..8787: mol_type = other RNA
aggaaataagagagaaaagaagagtaagaagaaatataagagccaccatggcccctaagaagaagcgtaaagtgagccggatgaaccacgaccaggagttcgacccccctaaggtgtaccctcccgtccccgccgagaagagaaagcccatccgggtcctgagcctgttcgatggcatcgccaccggtctgctggtgctgaaggacctgggcatccaggtggataggtacattgcctccgaggtgtgcgaggactccatcaccgtgggaatggtgcgtcatcagggcaagatcatgtacgtgggcgacgtgcggagcgtgacacagaagcatatccaggagtggggccctttcgacctggtgatcggcggcagcccttgcaatgacctgagcatcgtgaacccagcccggaagggcctgtacgagggaaccggcagactgttcttcgagttttacagactgctgcacgacgcccggcctaaggaaggcgacgaccggcccttcttttggctgttcgagaatgtggtggccatgggagtcagcgacaagcgggatattagccggttcctggagagcaaccccgtgatgatcgatgccaaggaagtgagcgccgcccaccgggccagatacttctggggcaatctgcctggcatgaacagacccctggccagcaccgtgaacgacaagctggagctgcaggagtgcctggagcacggccggatcgccaagttcagcaaggtgagaaccatcaccacccgaagcaacagcatcaaacaaggcaaggaccagcactttcctgtgttcatgaacgagaaggaggacatcctgtggtgtaccgagatggagagagtgttcgggttcccagtccactacacagatgtcagcaacatgtctagactggccagacagagactgctgggaagaagctggtccgtccctgtgatcagacacctgttcgcccctctgaaggagtacttcgcctgcgtgagcagcggcaacagcaacgccaacagccggggccccagcttctctagcggcctggtgccactgtccctgagagggagccacatgggccccatggagatctacaaaaccgtgagcgcctggaagcggcagcctgtgcgcgtgctgagcctgtttcggaatatcgataaagtcctgaaaagcctgggattcctggagagcggctctggctccggcggtggcaccctgaagtacgtggaggatgtgacaaacgtggtcagacgggatgtggagaagtggggccccttcgatctggtgtacggcagcacccaacccctgggcagctcttgtgaccggtgccctggctggtacatgtttcagttccaccggatcctgcagtacgccctgccgagacaggagtcccagcggccattcttttggattttcatggacaacttgctgctgaccgaggatgaccaggaaactaccactcggttcctgcagaccgaagccgtgaccctgcaggacgtgagaggccgggactaccagaacgccatgcgggtgtggtccaacatccctggactgaaaagcaagcacgcacctctgacccctaaagaagaggagtacctgcaggcccaggtgcggagcagaagcaagctggacgcccctaaggtggatctgctggtgaagaattgcctcctgcccctgagagagtacttcaagtatttcagccagaatagtctgcccctgggaggcagcggcggcggcggcaccgtggtgttcagcgacgtgagcgtggacttcagccaggaggagtgggagtgcctggaccccgtgcagagggacctgtacagggaggtgatgctggagaactacagcaacctggtgagcgtgggcgccggcccctacatccccaagccccaggtgatcagcctgctggagcagggcaaggagccctggatggtgggcagggagctgaccaggggcctgtgcagcgacctggagagcatgggcggcccaagcagcggcgcccctcctcccagcggcggcaggcggcccaagcagcggcgcccctcctcccagcggcggcagcccagccggctccccaacctctaccgaggagggcacctctgagtccgccacccccgagagcggccctggcacctccaccgagcccagcgagggcagcgcacccggcagccctgccggcagccccacctccacagaggagggaaccagcaccgagcccagcgaaggcagcgccccaggcaccagcaccgagcctagtgagcaggagattaaacggatcaacaagatcagaagaagacttgtgaaagacagcaacaccaagaaggccggcaagacaggccccatgaaaaccctgctggttagagtgatgacacccgatctgagagagcggctggaaaacctgagaaagaagcctgaaaatatcccccagcccatcagcaatacatctagagccaacctgaataagctgctgaccgattacaccgaaatgaagaaggcgatcctgcatgtgtactgggaagagttccagaaggaccctgtgggcctgatgagccgggtggcccagcctgccagcaagaagatcgatcagaacaagctgaaacctgagatggacgagaagggcaacctgaccaccgccggctttgcctgctctcagtgtggccagcccctgttcgtgtacaagctggagcaggtgtctgagaagggcaaggcttacaccaactacttcggacggtgcaatgtggccgagcacgaaaagctgatcctgctggcccagctgaagcccgagaaggatagcgacgaagccgtgacatatagcctgggaaagtttgggcagagggccctggatttctacagcattcatgtgaccaaggagtccacccaccccgtgaagcccctggcccagatcgccggaaacagatacgcctccggacctgtgggaaaggccctgagcgacgcatgtatgggcacaatcgcctccttcctgtctaagtaccaggacatcatcatcgaacaccagaaggtggtgaagggcaaccagaagagactggagagcctgcgggagctggccggcaaggaaaacctggaataccctagcgtgaccctgccacctcagcctcacaccaaggagggcgttgatgcctacaacgaagtgatcgcccgggtgcgaatgtgggtgaacctgaacctgtggcagaagctgaagctaagcagagatgatgccaagcctctgctgagactgaagggattcccttcctttcctctggtcgagagacaggccaacgaagtggactggtgggacatggtgtgtaacgtgaagaagctgatcaacgagaaaaaggaggatggcaaggtgttttggcagaatctggctggctacaagagacaggaagccctgagaccatacctgagcagcgaggaagatcggaagaagggaaagaaattcgctcggtaccagctgggcgacctgctgctgcacctggaaaagaagcacggcgaggactggggaaaggtgtacgacgaggcctgggagcggattgacaagaaagtggaaggcctgagcaagcacatcaagctggaagaggaacggagaagcgaggacgcccagagcaaggccgccctgaccgactggctgcgggctaaggccagcttcgtgatcgagggcctgaaggaggccgacaaggacgagttctgcagatgcgagctgaagctgcagaagtggtacggggacctgcggggaaagcccttcgccatcgaagccgagaacagcatcctggacatcagcggcttcagcaagcagtacaactgtgccttcatctggcagaaggacggcgtgaagaagctgaacctgtacctgatcatcaactacttcaagggcggcaagctgcggttcaagaagatcaaacctgaagccttcgaagccaacagattctacaccgtgatcaacaaaaagagcggcgagatcgtgcccatggaggtgaacttcaacttcgacgaccccaacctgatcatcctgcctctggcctttggcaagagacagggcagagaattcatctggaacgacctgctgtccctggaaaccggcagcctgaagctggccaacggaagagtgatcgagaagacactgtacaacagaagaacccggcaggatgagcctgccctgttcgtggccctgaccttcgagcggcgggaggtcctggactcctccaatatcaaaccaatgaacctgatcggcgtggcaagaggcgaaaacatccccgccgtgatcgccctgaccgaccccgagggctgcccactgagccggtttaaggatagcctgggaaacccaacccacatcctgagaatcggcgagagctataaggagaagcagcggaccatccaggccaagaaggaggtggagcagcggagagccggcggctacagccggaagtacgccagcaaagccaagaatctggcagacgatatggtgagaaacaccgctagagatctgctgtactacgccgtgacccaggatgccatgctgatcttcgccaacctgagccggggcttcggccggcagggcaagcggaccttcatggccgagagacagtacacacggatggaggactggctgaccgccaagctggcctacgagggcctgagcaagacctacctgtccaagacactggcccagtacacctccaagacatgcagcaactgtgggtttaccatcaccagcgccgactacgacagggtgctggagaagctgaagaagacagcaacaggctggatgaccacaattaacggcaaggagctgaaggtggagggccagattacctactacaacagatacaagagacagaacgtagtcaaggacctgtccgtcgagctggatagactgagcgaagaatctgtgaacaacgacatctcctcctggacaaagggcagaagcggagaagctctgagcctcctgaagaaaagattctcccatagacccgtgcaggagaagttcgtgtgcctgaactgcggcttcgagacacacgcagccgagcaagccgccctgaacatcgccagatcctggctgttcctgcggagccaggagtacaagaaataccagacaaacaagacaaccggcaacaccgataagagagccttcgtcgagacctggcagtccttttaccggaagaagcttaaggaggtgtggaaacctgccgtgcggtctggcggatctggcggaggctccaccagccccaagaaaaagagaaaagtctaagctgccttctgcggggcttgccttctggccatgcccttcttctctcccttgcacctgtacctcttggtctttgaataaagcctgagtaggaaggctagcaaaaaaaaaaaaaaaaaaaaaaaaaaaaaaaaaaaaaaaaaaaaaaaaaaaaaaaaaaaaaaaaaaaaaaaaaaaaaaaagcccagccggctccccaacctctaccgaggagggcacctctgagtccgccacccccgagagcggccctggcacctccaccgagcccagcgagggcagcgcacccggcagccctgccggcagccccacctccacagaggagggaaccagcaccgagcccagcgaaggcagcgccccaggcaccagcaccgagcctagtgagcaggagattaaacggatcaacaagatcagaagaagacttgtgaaagacagcaacaccaagaaggccggcaagacaggccccatgaaaaccctgctggttagagtgatgacacccgatctgagagagcggctggaaaacctgagaaagaagcctgaaaatatcccccagcccatcagcaatacatctagagccaacctgaataagctgctgaccgattacaccgaaatgaagaaggcgatcctgcatgtgtactgggaagagttccagaaggaccctgtgggcctgatgagccgggtggcccagcctgccagcaagaagatcgatcagaacaagctgaaacctgagatggacgagaagggcaacctgaccaccgccggctttgcctgctctcagtgtggccagcccctgttcgtgtacaagctggagcaggtgtctgagaagggcaaggcttacaccaactacttcggacggtgcaatgtggccgagcacgaaaagctgatcctgctggcccagctgaagcccgagaaggatagcgacgaagccgtgacatatagcctgggaaagtttgggcagagggccctggatttctacagcattcatgtgaccaaggagtccacccaccccgtgaagcccctggcccagatcgccggaaacagatacgcctccggacctgtgggaaaggccctgagcgacgcatgtatgggcacaatcgcctccttcctgtctaagtaccaggacatcatcatcgaacaccagaaggtggtgaagggcaaccagaagagactggagagcctgcgggagctggccggcaaggaaaacctggaataccctagcgtgaccctgccacctcagcctcacaccaaggagggcgttgatgcctacaacgaagtgatcgcccgggtgcgaatgtgggtgaacctgaacctgtggcagaagctgaagctaagcagagatgatgccaagcctctgctgagactgaagggattcccttcctttcctctggtcgagagacaggccaacgaagtggactggtgggacatggtgtgtaacgtgaagaagctgatcaacgagaaaaaggaggatggcaaggtgttttggcagaatctggctggctacaagagacaggaagccctgagaccatacctgagcagcgaggaagatcggaagaagggaaagaaattcgctcggtaccagctgggcgacctgctgctgcacctggaaaagaagcacggcgaggactggggaaaggtgtacgacgaggcctgggagcggattgacaagaaagtggaaggcctgagcaagcacatcaagctggaagaggaacggagaagcgaggacgcccagagcaaggccgccctgaccgactggctgcgggctaaggccagcttcgtgatcgagggcctgaaggaggccgacaaggacgagttctgcagatgcgagctgaagctgcagaagtggtacggggacctgcggggaaagcccttcgccatcgaagccgagaacagcatcctggacatcagcggcttcagcaagcagtacaactgtgccttcatctggcagaaggacggcgtgaagaagctgaacctgtacctgatcatcaactacttcaagggcggcaagctgcggttcaagaagatcaaacctgaagccttcgaagccaacagattctacaccgtgatcaacaaaaagagcggcgagatcgtgcccatggaggtgaacttcaacttcgacgaccccaacctgatcatcctgcctctggcctttggcaagagacagggcagagaattcatctggaacgacctgctgtccctggaaaccggcagcctgaagctggccaacggaagagtgatcgagaagacactgtacaacagaagaacccggcaggatgagcctgccctgttcgtggccctgaccttcgagcggcgggaggtcctggactcctccaatatcaaaccaatgaacctgatcggcgtggcaagaggcgaaaacatccccgccgtgatcgccctgaccgaccccgagggctgcccactgagccggtttaaggatagcctgggaaacccaacccacatcctgagaatcggcgagagctataaggagaagcagcggaccatccaggccaagaaggaggtggagcagcggagagccggcggctacagccggaagtacgccagcaaagccaagaatctggcagacgatatggtgagaaacaccgctagagatctgctgtactacgccgtgacccaggatgccatgctgatcttcgccaacctgagccggggcttcggccggcagggcaagcggaccttcatggccgagagacagtacacacggatggaggactggctgaccgccaagctggcctacgagggcctgagcaagacctacctgtccaagacactggcccagtacacctccaagacatgcagcaactgtgggtttaccatcaccagcgccgactacgacagggtgctggagaagctgaagaagacagcaacaggctggatgaccacaattaacggcaaggagctgaaggtggagggccagattacctactacaacagatacaagagacagaacgtagtcaaggacctgtccgtcgagctggatagactgagcgaagaatctgtgaacaacgacatctcctcctggacaaagggcagaagcggagaagctctgagcctcctgaagaaaagattctcccatagacccgtgcaggagaagttcgtgtgcctgaactgcggcttcgagacacacgcagccgagcaagccgccctgaacatcgccagatcctggctgttcctgcggagccaggagtacaagaaataccagacaaacaagacaaccggcaacaccgataagagagccttcgtcgagacctggcagtccttttaccggaagaagcttaaggaggtgtggaaacctgccgtgcggtctggcggatctggcggaggctccaccagccccaagaaaaagagaaaagtctaagctgccttctgcggggcttgccttctggccatgcccttcttctctcccttgcacctgtacctcttggtctttgaataaagcctgagtaggaaggctagcaaaaaaaaaaaaaaaaaaaaaaaaaaaaaaaaaaaaaaaaaaaaaaaaaaaaaaaaaaaaaaaaaaaaaaaaaaaaaaaa

SEQ ID NO: 9608 - RNA, 8787 nt, synthetic construct
  source 1..8787: mol_type = other RNA
aggaaataagagagaaaagaagagtaagaagaaatataagagccaccatggcccctaagaagaagcgtaaagtgagccggatgaaccacgaccaggagttcgacccccctaaggtgtaccctcccgtccccgccgagaagagaaagcccatccgggtcctgagcctgttcgatggcatcgccaccggtctgctggtgctgaaggacctgggcatccaggtggataggtacattgcctccgaggtgtgcgaggactccatcaccgtgggaatggtgcgtcatcagggcaagatcatgtacgtgggcgacgtgcggagcgtgacacagaagcatatccaggagtggggccctttcgacctggtgatcggcggcagcccttgcaatgacctgagcatcgtgaacccagcccggaagggcctgtacgagggaaccggcagactgttcttcgagttttacagactgctgcacgacgcccggcctaaggaaggcgacgaccggcccttcttttggctgttcgagaatgtggtggccatgggagtcagcgacaagcgggatattagccggttcctggagagcaaccccgtgatgatcgatgccaaggaagtgagcgccgcccaccgggccagatacttctggggcaatctgcctggcatgaacagacccctggccagcaccgtgaacgacaagctggagctgcaggagtgcctggagcacggccggatcgccaagttcagcaaggtgagaaccatcaccacccgaagcaacagcatcaaacaaggcaaggaccagcactttcctgtgttcatgaacgagaaggaggacatcctgtggtgtaccgagatggagagagtgttcgggttcccagtccactacacagatgtcagcaacatgtctagactggccagacagagactgctgggaagaagctggtccgtccctgtgatcagacacctgttcgcccctctgaaggagtacttcgcctgcgtgagcagcggcaacagcaacgccaacagccggggccccagcttctctagcggcctggtgccactgtccctgagagggagccacatgggccccatggagatctacaaaaccgtgagcgcctggaagcggcagcctgtgcgcgtgctgagcctgtttcggaatatcgataaagtcctgaaaagcctgggattcctggagagcggctctggctccggcggtggcaccctgaagtacgtggaggatgtgacaaacgtggtcagacgggatgtggagaagtggggccccttcgatctggtgtacggcagcacccaacccctgggcagctcttgtgaccggtgccctggctggtacatgtttcagttccaccggatcctgcagtacgccctgccgagacaggagtcccagcggccattcttttggattttcatggacaacttgctgctgaccgaggatgaccaggaaactaccactcggttcctgcagaccgaagccgtgaccctgcaggacgtgagaggccgggactaccagaacgccatgcgggtgtggtccaacatccctggactgaaaagcaagcacgcacctctgacccctaaagaagaggagtacctgcaggcccaggtgcggagcagaagcaagctggacgcccctaaggtggatctgctggtgaagaattgcctcctgcccctgagagagtacttcaagtatttcagccagaatagtctgcccctgggaggcagcggcggcggcgagatgggcctgctgaccttcagggacatcgccatcgagttcagcctggaggagtggcagtgcctggactgcgcccagaggaacctgtacagggacgtgatgctggagaactacaggaacctggtgagcctgggcatcgccgtgagcaagcccgacctgatcacctgcctggagcagaacaaggagagccagaacatcaagaggaacgagatggtggccaagcaccccgtgaccaggagccacggcggcccaagcagcggcgcccctcctcccagcggcggcaggcggcccaagcagcggcgcccctcctcccagcggcggcagcccagccggctccccaacctctaccgaggagggcacctctgagtccgccacccccgagagcggccctggcacctccaccgagcccagcgagggcagcgcacccggcagccctgccggcagccccacctccacagaggagggaaccagcaccgagcccagcgaaggcagcgccccaggcaccagcaccgagcctagtgagcaggagattaaacggatcaacaagatcagaagaagacttgtgaaagacagcaacaccaagaaggccggcaagacaggccccatgaaaaccctgctggttagagtgatgacacccgatctgagagagcggctggaaaacctgagaaagaagcctgaaaatatcccccagcccatcagcaatacatctagagccaacctgaataagctgctgaccgattacaccgaaatgaagaaggcgatcctgcatgtgtactgggaagagttccagaaggaccctgtgggcctgatgagccgggtggcccagcctgccagcaagaagatcgatcagaacaagctgaaacctgagatggacgagaagggcaacctgaccaccgccggctttgcctgctctcagtgtggccagcccctgttcgtgtacaagctggagcaggtgtctgagaagggcaaggcttacaccaactacttcggacggtgcaatgtggccgagcacgaaaagctgatcctgctggcccagctgaagcccgagaaggatagcgacgaagccgtgacatatagcctgggaaagtttgggcagagggccctggatttctacagcattcatgtgaccaaggagtccacccaccccgtgaagcccctggcccagatcgccggaaacagatacgcctccggacctgtgggaaaggccctgagcgacgcatgtatgggcacaatcgcctccttcctgtctaagtaccaggacatcatcatcgaacaccagaaggtggtgaagggcaaccagaagagactggagagcctgcgggagctggccggcaaggaaaacctggaataccctagcgtgaccctgccacctcagcctcacaccaaggagggcgttgatgcctacaacgaagtgatcgcccgggtgcgaatgtgggtgaacctgaacctgtggcagaagctgaagctaagcagagatgatgccaagcctctgctgagactgaagggattcccttcctttcctctggtcgagagacaggccaacgaagtggactggtgggacatggtgtgtaacgtgaagaagctgatcaacgagaaaaaggaggatggcaaggtgttttggcagaatctggctggctacaagagacaggaagccctgagaccatacctgagcagcgaggaagatcggaagaagggaaagaaattcgctcggtaccagctgggcgacctgctgctgcacctggaaaagaagcacggcgaggactggggaaaggtgtacgacgaggcctgggagcggattgacaagaaagtggaaggcctgagcaagcacatcaagctggaagaggaacggagaagcgaggacgcccagagcaaggccgccctgaccgactggctgcgggctaaggccagcttcgtgatcgagggcctgaaggaggccgacaaggacgagttctgcagatgcgagctgaagctgcagaagtggtacggggacctgcggggaaagcccttcgccatcgaagccgagaacagcatcctggacatcagcggcttcagcaagcagtacaactgtgccttcatctggcagaaggacggcgtgaagaagctgaacctgtacctgatcatcaactacttcaagggcggcaagctgcggttcaagaagatcaaacctgaagccttcgaagccaacagattctacaccgtgatcaacaaaaagagcggcgagatcgtgcccatggaggtgaacttcaacttcgacgaccccaacctgatcatcctgcctctggcctttggcaagagacagggcagagaattcatctggaacgacctgctgtccctggaaaccggcagcctgaagctggccaacggaagagtgatcgagaagacactgtacaacagaagaacccggcaggatgagcctgccctgttcgtggccctgaccttcgagcggcgggaggtcctggactcctccaatatcaaaccaatgaacctgatcggcgtggcaagaggcgaaaacatccccgccgtgatcgccctgaccgaccccgagggctgcccactgagccggtttaaggatagcctgggaaacccaacccacatcctgagaatcggcgagagctataaggagaagcagcggaccatccaggccaagaaggaggtggagcagcggagagccggcggctacagccggaagtacgccagcaaagccaagaatctggcagacgatatggtgagaaacaccgctagagatctgctgtactacgccgtgacccaggatgccatgctgatcttcgccaacctgagccggggcttcggccggcagggcaagcggaccttcatggccgagagacagtacacacggatggaggactggctgaccgccaagctggcctacgagggcctgagcaagacctacctgtccaagacactggcccagtacacctccaagacatgcagcaactgtgggtttaccatcaccagcgccgactacgacagggtgctggagaagctgaagaagacagcaacaggctggatgaccacaattaacggcaaggagctgaaggtggagggccagattacctactacaacagatacaagagacagaacgtagtcaaggacctgtccgtcgagctggatagactgagcgaagaatctgtgaacaacgacatctcctcctggacaaagggcagaagcggagaagctctgagcctcctgaagaaaagattctcccatagacccgtgcaggagaagttcgtgtgcctgaactgcggcttcgagacacacgcagccgagcaagccgccctgaacatcgccagatcctggctgttcctgcggagccaggagtacaagaaataccagacaaacaagacaaccggcaacaccgataagagagccttcgtcgagacctggcagtccttttaccggaagaagcttaaggaggtgtggaaacctgccgtgcggtctggcggatctggcggaggctccaccagccccaagaaaaagagaaaagtctaagctgccttctgcggggcttgccttctggccatgcccttcttctctcccttgcacctgtacctcttggtctttgaataaagcctgagtaggaaggctagcaaaaaaaaaaaaaaaaaaaaaaaaaaaaaaaaaaaaaaaaaaaaaaaaaaaaaaaaaaaaaaaaaaaaaaaaaaaaaaaagcccagccggctccccaacctctaccgaggagggcacctctgagtccgccacccccgagagcggccctggcacctccaccgagcccagcgagggcagcgcacccggcagccctgccggcagccccacctccacagaggagggaaccagcaccgagcccagcgaaggcagcgccccaggcaccagcaccgagcctagtgagcaggagattaaacggatcaacaagatcagaagaagacttgtgaaagacagcaacaccaagaaggccggcaagacaggccccatgaaaaccctgctggttagagtgatgacacccgatctgagagagcggctggaaaacctgagaaagaagcctgaaaatatcccccagcccatcagcaatacatctagagccaacctgaataagctgctgaccgattacaccgaaatgaagaaggcgatcctgcatgtgtactgggaagagttccagaaggaccctgtgggcctgatgagccgggtggcccagcctgccagcaagaagatcgatcagaacaagctgaaacctgagatggacgagaagggcaacctgaccaccgccggctttgcctgctctcagtgtggccagcccctgttcgtgtacaagctggagcaggtgtctgagaagggcaaggcttacaccaactacttcggacggtgcaatgtggccgagcacgaaaagctgatcctgctggcccagctgaagcccgagaaggatagcgacgaagccgtgacatatagcctgggaaagtttgggcagagggccctggatttctacagcattcatgtgaccaaggagtccacccaccccgtgaagcccctggcccagatcgccggaaacagatacgcctccggacctgtgggaaaggccctgagcgacgcatgtatgggcacaatcgcctccttcctgtctaagtaccaggacatcatcatcgaacaccagaaggtggtgaagggcaaccagaagagactggagagcctgcgggagctggccggcaaggaaaacctggaataccctagcgtgaccctgccacctcagcctcacaccaaggagggcgttgatgcctacaacgaagtgatcgcccgggtgcgaatgtgggtgaacctgaacctgtggcagaagctgaagctaagcagagatgatgccaagcctctgctgagactgaagggattcccttcctttcctctggtcgagagacaggccaacgaagtggactggtgggacatggtgtgtaacgtgaagaagctgatcaacgagaaaaaggaggatggcaaggtgttttggcagaatctggctggctacaagagacaggaagccctgagaccatacctgagcagcgaggaagatcggaagaagggaaagaaattcgctcggtaccagctgggcgacctgctgctgcacctggaaaagaagcacggcgaggactggggaaaggtgtacgacgaggcctgggagcggattgacaagaaagtggaaggcctgagcaagcacatcaagctggaagaggaacggagaagcgaggacgcccagagcaaggccgccctgaccgactggctgcgggctaaggccagcttcgtgatcgagggcctgaaggaggccgacaaggacgagttctgcagatgcgagctgaagctgcagaagtggtacggggacctgcggggaaagcccttcgccatcgaagccgagaacagcatcctggacatcagcggcttcagcaagcagtacaactgtgccttcatctggcagaaggacggcgtgaagaagctgaacctgtacctgatcatcaactacttcaagggcggcaagctgcggttcaagaagatcaaacctgaagccttcgaagccaacagattctacaccgtgatcaacaaaaagagcggcgagatcgtgcccatggaggtgaacttcaacttcgacgaccccaacctgatcatcctgcctctggcctttggcaagagacagggcagagaattcatctggaacgacctgctgtccctggaaaccggcagcctgaagctggccaacggaagagtgatcgagaagacactgtacaacagaagaacccggcaggatgagcctgccctgttcgtggccctgaccttcgagcggcgggaggtcctggactcctccaatatcaaaccaatgaacctgatcggcgtggcaagaggcgaaaacatccccgccgtgatcgccctgaccgaccccgagggctgcccactgagccggtttaaggatagcctgggaaacccaacccacatcctgagaatcggcgagagctataaggagaagcagcggaccatccaggccaagaaggaggtggagcagcggagagccggcggctacagccggaagtacgccagcaaagccaagaatctggcagacgatatggtgagaaacaccgctagagatctgctgtactacgccgtgacccaggatgccatgctgatcttcgccaacctgagccggggcttcggccggcagggcaagcggaccttcatggccgagagacagtacacacggatggaggactggctgaccgccaagctggcctacgagggcctgagcaagacctacctgtccaagacactggcccagtacacctccaagacatgcagcaactgtgggtttaccatcaccagcgccgactacgacagggtgctggagaagctgaagaagacagcaacaggctggatgaccacaattaacggcaaggagctgaaggtggagggccagattacctactacaacagatacaagagacagaacgtagtcaaggacctgtccgtcgagctggatagactgagcgaagaatctgtgaacaacgacatctcctcctggacaaagggcagaagcggagaagctctgagcctcctgaagaaaagattctcccatagacccgtgcaggagaagttcgtgtgcctgaactgcggcttcgagacacacgcagccgagcaagccgccctgaacatcgccagatcctggctgttcctgcggagccaggagtacaagaaataccagacaaacaagacaaccggcaacaccgataagagagccttcgtcgagacctggcagtccttttaccggaagaagcttaaggaggtgtggaaacctgccgtgcggtctggcggatctggcggaggctccaccagccccaagaaaaagagaaaagtctaagctgccttctgcggggcttgccttctggccatgcccttcttctctcccttgcacctgtacctcttggtctttgaataaagcctgagtaggaaggctagcaaaaaaaaaaaaaaaaaaaaaaaaaaaaaaaaaaaaaaaaaaaaaaaaaaaaaaaaaaaaaaaaaaaaaaaaaaaaaaaa

SEQ ID NO: 9609 - RNA, 8787 nt, synthetic construct
  source 1..8787: mol_type = other RNA
aggaaataagagagaaaagaagagtaagaagaaatataagagccaccatggcccctaagaagaagcgtaaagtgagccggatgaaccacgaccaggagttcgacccccctaaggtgtaccctcccgtccccgccgagaagagaaagcccatccgggtcctgagcctgttcgatggcatcgccaccggtctgctggtgctgaaggacctgggcatccaggtggataggtacattgcctccgaggtgtgcgaggactccatcaccgtgggaatggtgcgtcatcagggcaagatcatgtacgtgggcgacgtgcggagcgtgacacagaagcatatccaggagtggggccctttcgacctggtgatcggcggcagcccttgcaatgacctgagcatcgtgaacccagcccggaagggcctgtacgagggaaccggcagactgttcttcgagttttacagactgctgcacgacgcccggcctaaggaaggcgacgaccggcccttcttttggctgttcgagaatgtggtggccatgggagtcagcgacaagcgggatattagccggttcctggagagcaaccccgtgatgatcgatgccaaggaagtgagcgccgcccaccgggccagatacttctggggcaatctgcctggcatgaacagacccctggccagcaccgtgaacgacaagctggagctgcaggagtgcctggagcacggccggatcgccaagttcagcaaggtgagaaccatcaccacccgaagcaacagcatcaaacaaggcaaggaccagcactttcctgtgttcatgaacgagaaggaggacatcctgtggtgtaccgagatggagagagtgttcgggttcccagtccactacacagatgtcagcaacatgtctagactggccagacagagactgctgggaagaagctggtccgtccctgtgatcagacacctgttcgcccctctgaaggagtacttcgcctgcgtgagcagcggcaacagcaacgccaacagccggggccccagcttctctagcggcctggtgccactgtccctgagagggagccacatgggccccatggagatctacaaaaccgtgagcgcctggaagcggcagcctgtgcgcgtgctgagcctgtttcggaatatcgataaagtcctgaaaagcctgggattcctggagagcggctctggctccggcggtggcaccctgaagtacgtggaggatgtgacaaacgtggtcagacgggatgtggagaagtggggccccttcgatctggtgtacggcagcacccaacccctgggcagctcttgtgaccggtgccctggctggtacatgtttcagttccaccggatcctgcagtacgccctgccgagacaggagtcccagcggccattcttttggattttcatggacaacttgctgctgaccgaggatgaccaggaaactaccactcggttcctgcagaccgaagccgtgaccctgcaggacgtgagaggccgggactaccagaacgccatgcgggtgtggtccaacatccctggactgaaaagcaagcacgcacctctgacccctaaagaagaggagtacctgcaggcccaggtgcggagcagaagcaagctggacgcccctaaggtggatctgctggtgaagaattgcctcctgcccctgagagagtacttcaagtatttcagccagaatagtctgcccctgggaggcagcggcggcggcaccagcgcccccgtgaccttcggcgacctggccatctacttcagccaggaggagtgggagtggctgagccccgtgcagaaggccctgtacgaggacgtgatgctggagaactaccagaccctggccagcctgggcctgagcttcaggaggcccaacgtgatcaccctgctggagaagggcaaggccccctggatggtggagcccgtgaggaggaggaggggcctggacagcggcagcaagtgcggcggcccaagcagcggcgcccctcctcccagcggcggcaggcggcccaagcagcggcgcccctcctcccagcggcggcagcccagccggctccccaacctctaccgaggagggcacctctgagtccgccacccccgagagcggccctggcacctccaccgagcccagcgagggcagcgcacccggcagccctgccggcagccccacctccacagaggagggaaccagcaccgagcccagcgaaggcagcgccccaggcaccagcaccgagcctagtgagcaggagattaaacggatcaacaagatcagaagaagacttgtgaaagacagcaacaccaagaaggccggcaagacaggccccatgaaaaccctgctggttagagtgatgacacccgatctgagagagcggctggaaaacctgagaaagaagcctgaaaatatcccccagcccatcagcaatacatctagagccaacctgaataagctgctgaccgattacaccgaaatgaagaaggcgatcctgcatgtgtactgggaagagttccagaaggaccctgtgggcctgatgagccgggtggcccagcctgccagcaagaagatcgatcagaacaagctgaaacctgagatggacgagaagggcaacctgaccaccgccggctttgcctgctctcagtgtggccagcccctgttcgtgtacaagctggagcaggtgtctgagaagggcaaggcttacaccaactacttcggacggtgcaatgtggccgagcacgaaaagctgatcctgctggcccagctgaagcccgagaaggatagcgacgaagccgtgacatatagcctgggaaagtttgggcagagggccctggatttctacagcattcatgtgaccaaggagtccacccaccccgtgaagcccctggcccagatcgccggaaacagatacgcctccggacctgtgggaaaggccctgagcgacgcatgtatgggcacaatcgcctccttcctgtctaagtaccaggacatcatcatcgaacaccagaaggtggtgaagggcaaccagaagagactggagagcctgcgggagctggccggcaaggaaaacctggaataccctagcgtgaccctgccacctcagcctcacaccaaggagggcgttgatgcctacaacgaagtgatcgcccgggtgcgaatgtgggtgaacctgaacctgtggcagaagctgaagctaagcagagatgatgccaagcctctgctgagactgaagggattcccttcctttcctctggtcgagagacaggccaacgaagtggactggtgggacatggtgtgtaacgtgaagaagctgatcaacgagaaaaaggaggatggcaaggtgttttggcagaatctggctggctacaagagacaggaagccctgagaccatacctgagcagcgaggaagatcggaagaagggaaagaaattcgctcggtaccagctgggcgacctgctgctgcacctggaaaagaagcacggcgaggactggggaaaggtgtacgacgaggcctgggagcggattgacaagaaagtggaaggcctgagcaagcacatcaagctggaagaggaacggagaagcgaggacgcccagagcaaggccgccctgaccgactggctgcgggctaaggccagcttcgtgatcgagggcctgaaggaggccgacaaggacgagttctgcagatgcgagctgaagctgcagaagtggtacggggacctgcggggaaagcccttcgccatcgaagccgagaacagcatcctggacatcagcggcttcagcaagcagtacaactgtgccttcatctggcagaaggacggcgtgaagaagctgaacctgtacctgatcatcaactacttcaagggcggcaagctgcggttcaagaagatcaaacctgaagccttcgaagccaacagattctacaccgtgatcaacaaaaagagcggcgagatcgtgcccatggaggtgaacttcaacttcgacgaccccaacctgatcatcctgcctctggcctttggcaagagacagggcagagaattcatctggaacgacctgctgtccctggaaaccggcagcctgaagctggccaacggaagagtgatcgagaagacactgtacaacagaagaacccggcaggatgagcctgccctgttcgtggccctgaccttcgagcggcgggaggtcctggactcctccaatatcaaaccaatgaacctgatcggcgtggcaagaggcgaaaacatccccgccgtgatcgccctgaccgaccccgagggctgcccactgagccggtttaaggatagcctgggaaacccaacccacatcctgagaatcggcgagagctataaggagaagcagcggaccatccaggccaagaaggaggtggagcagcggagagccggcggctacagccggaagtacgccagcaaagccaagaatctggcagacgatatggtgagaaacaccgctagagatctgctgtactacgccgtgacccaggatgccatgctgatcttcgccaacctgagccggggcttcggccggcagggcaagcggaccttcatggccgagagacagtacacacggatggaggactggctgaccgccaagctggcctacgagggcctgagcaagacctacctgtccaagacactggcccagtacacctccaagacatgcagcaactgtgggtttaccatcaccagcgccgactacgacagggtgctggagaagctgaagaagacagcaacaggctggatgaccacaattaacggcaaggagctgaaggtggagggccagattacctactacaacagatacaagagacagaacgtagtcaaggacctgtccgtcgagctggatagactgagcgaagaatctgtgaacaacgacatctcctcctggacaaagggcagaagcggagaagctctgagcctcctgaagaaaagattctcccatagacccgtgcaggagaagttcgtgtgcctgaactgcggcttcgagacacacgcagccgagcaagccgccctgaacatcgccagatcctggctgttcctgcggagccaggagtacaagaaataccagacaaacaagacaaccggcaacaccgataagagagccttcgtcgagacctggcagtccttttaccggaagaagcttaaggaggtgtggaaacctgccgtgcggtctggcggatctggcggaggctccaccagccccaagaaaaagagaaaagtctaagctgccttctgcggggcttgccttctggccatgcccttcttctctcccttgcacctgtacctcttggtctttgaataaagcctgagtaggaaggctagcaaaaaaaaaaaaaaaaaaaaaaaaaaaaaaaaaaaaaaaaaaaaaaaaaaaaaaaaaaaaaaaaaaaaaaaaaaaaaaaagcccagccggctccccaacctctaccgaggagggcacctctgagtccgccacccccgagagcggccctggcacctccaccgagcccagcgagggcagcgcacccggcagccctgccggcagccccacctccacagaggagggaaccagcaccgagcccagcgaaggcagcgccccaggcaccagcaccgagcctagtgagcaggagattaaacggatcaacaagatcagaagaagacttgtgaaagacagcaacaccaagaaggccggcaagacaggccccatgaaaaccctgctggttagagtgatgacacccgatctgagagagcggctggaaaacctgagaaagaagcctgaaaatatcccccagcccatcagcaatacatctagagccaacctgaataagctgctgaccgattacaccgaaatgaagaaggcgatcctgcatgtgtactgggaagagttccagaaggaccctgtgggcctgatgagccgggtggcccagcctgccagcaagaagatcgatcagaacaagctgaaacctgagatggacgagaagggcaacctgaccaccgccggctttgcctgctctcagtgtggccagcccctgttcgtgtacaagctggagcaggtgtctgagaagggcaaggcttacaccaactacttcggacggtgcaatgtggccgagcacgaaaagctgatcctgctggcccagctgaagcccgagaaggatagcgacgaagccgtgacatatagcctgggaaagtttgggcagagggccctggatttctacagcattcatgtgaccaaggagtccacccaccccgtgaagcccctggcccagatcgccggaaacagatacgcctccggacctgtgggaaaggccctgagcgacgcatgtatgggcacaatcgcctccttcctgtctaagtaccaggacatcatcatcgaacaccagaaggtggtgaagggcaaccagaagagactggagagcctgcgggagctggccggcaaggaaaacctggaataccctagcgtgaccctgccacctcagcctcacaccaaggagggcgttgatgcctacaacgaagtgatcgcccgggtgcgaatgtgggtgaacctgaacctgtggcagaagctgaagctaagcagagatgatgccaagcctctgctgagactgaagggattcccttcctttcctctggtcgagagacaggccaacgaagtggactggtgggacatggtgtgtaacgtgaagaagctgatcaacgagaaaaaggaggatggcaaggtgttttggcagaatctggctggctacaagagacaggaagccctgagaccatacctgagcagcgaggaagatcggaagaagggaaagaaattcgctcggtaccagctgggcgacctgctgctgcacctggaaaagaagcacggcgaggactggggaaaggtgtacgacgaggcctgggagcggattgacaagaaagtggaaggcctgagcaagcacatcaagctggaagaggaacggagaagcgaggacgcccagagcaaggccgccctgaccgactggctgcgggctaaggccagcttcgtgatcgagggcctgaaggaggccgacaaggacgagttctgcagatgcgagctgaagctgcagaagtggtacggggacctgcggggaaagcccttcgccatcgaagccgagaacagcatcctggacatcagcggcttcagcaagcagtacaactgtgccttcatctggcagaaggacggcgtgaagaagctgaacctgtacctgatcatcaactacttcaagggcggcaagctgcggttcaagaagatcaaacctgaagccttcgaagccaacagattctacaccgtgatcaacaaaaagagcggcgagatcgtgcccatggaggtgaacttcaacttcgacgaccccaacctgatcatcctgcctctggcctttggcaagagacagggcagagaattcatctggaacgacctgctgtccctggaaaccggcagcctgaagctggccaacggaagagtgatcgagaagacactgtacaacagaagaacccggcaggatgagcctgccctgttcgtggccctgaccttcgagcggcgggaggtcctggactcctccaatatcaaaccaatgaacctgatcggcgtggcaagaggcgaaaacatccccgccgtgatcgccctgaccgaccccgagggctgcccactgagccggtttaaggatagcctgggaaacccaacccacatcctgagaatcggcgagagctataaggagaagcagcggaccatccaggccaagaaggaggtggagcagcggagagccggcggctacagccggaagtacgccagcaaagccaagaatctggcagacgatatggtgagaaacaccgctagagatctgctgtactacgccgtgacccaggatgccatgctgatcttcgccaacctgagccggggcttcggccggcagggcaagcggaccttcatggccgagagacagtacacacggatggaggactggctgaccgccaagctggcctacgagggcctgagcaagacctacctgtccaagacactggcccagtacacctccaagacatgcagcaactgtgggtttaccatcaccagcgccgactacgacagggtgctggagaagctgaagaagacagcaacaggctggatgaccacaattaacggcaaggagctgaaggtggagggccagattacctactacaacagatacaagagacagaacgtagtcaaggacctgtccgtcgagctggatagactgagcgaagaatctgtgaacaacgacatctcctcctggacaaagggcagaagcggagaagctctgagcctcctgaagaaaagattctcccatagacccgtgcaggagaagttcgtgtgcctgaactgcggcttcgagacacacgcagccgagcaagccgccctgaacatcgccagatcctggctgttcctgcggagccaggagtacaagaaataccagacaaacaagacaaccggcaacaccgataagagagccttcgtcgagacctggcagtccttttaccggaagaagcttaaggaggtgtggaaacctgccgtgcggtctggcggatctggcggaggctccaccagccccaagaaaaagagaaaagtctaagctgccttctgcggggcttgccttctggccatgcccttcttctctcccttgcacctgtacctcttggtctttgaataaagcctgagtaggaaggctagcaaaaaaaaaaaaaaaaaaaaaaaaaaaaaaaaaaaaaaaaaaaaaaaaaaaaaaaaaaaaaaaaaaaaaaaaaaaaaaaa

SEQ ID NO: 9610 - RNA, 8787 nt, synthetic construct
  source 1..8787: mol_type = other RNA
aggaaataagagagaaaagaagagtaagaagaaatataagagccaccatggcccctaagaagaagcgtaaagtgagccggatgaaccacgaccaggagttcgacccccctaaggtgtaccctcccgtccccgccgagaagagaaagcccatccgggtcctgagcctgttcgatggcatcgccaccggtctgctggtgctgaaggacctgggcatccaggtggataggtacattgcctccgaggtgtgcgaggactccatcaccgtgggaatggtgcgtcatcagggcaagatcatgtacgtgggcgacgtgcggagcgtgacacagaagcatatccaggagtggggccctttcgacctggtgatcggcggcagcccttgcaatgacctgagcatcgtgaacccagcccggaagggcctgtacgagggaaccggcagactgttcttcgagttttacagactgctgcacgacgcccggcctaaggaaggcgacgaccggcccttcttttggctgttcgagaatgtggtggccatgggagtcagcgacaagcgggatattagccggttcctggagagcaaccccgtgatgatcgatgccaaggaagtgagcgccgcccaccgggccagatacttctggggcaatctgcctggcatgaacagacccctggccagcaccgtgaacgacaagctggagctgcaggagtgcctggagcacggccggatcgccaagttcagcaaggtgagaaccatcaccacccgaagcaacagcatcaaacaaggcaaggaccagcactttcctgtgttcatgaacgagaaggaggacatcctgtggtgtaccgagatggagagagtgttcgggttcccagtccactacacagatgtcagcaacatgtctagactggccagacagagactgctgggaagaagctggtccgtccctgtgatcagacacctgttcgcccctctgaaggagtacttcgcctgcgtgagcagcggcaacagcaacgccaacagccggggccccagcttctctagcggcctggtgccactgtccctgagagggagccacatgggccccatggagatctacaaaaccgtgagcgcctggaagcggcagcctgtgcgcgtgctgagcctgtttcggaatatcgataaagtcctgaaaagcctgggattcctggagagcggctctggctccggcggtggcaccctgaagtacgtggaggatgtgacaaacgtggtcagacgggatgtggagaagtggggccccttcgatctggtgtacggcagcacccaacccctgggcagctcttgtgaccggtgccctggctggtacatgtttcagttccaccggatcctgcagtacgccctgccgagacaggagtcccagcggccattcttttggattttcatggacaacttgctgctgaccgaggatgaccaggaaactaccactcggttcctgcagaccgaagccgtgaccctgcaggacgtgagaggccgggactaccagaacgccatgcgggtgtggtccaacatccctggactgaaaagcaagcacgcacctctgacccctaaagaagaggagtacctgcaggcccaggtgcggagcagaagcaagctggacgcccctaaggtggatctgctggtgaagaattgcctcctgcccctgagagagtacttcaagtatttcagccagaatagtctgcccctgggaggcagcggcggcggcgacagcgtgaccttcgaggacgtggccatcagcttcaccgtggaggagtgggccctgctggaccccagccagaagaagctgcacagggacgtgatggaggagaccttcaggaacctggccgccatcggcaggacccaggacgaccagcacatcgacaacgaccacaggtacagcaggaggaaccagaggaacgaggtggtggagaggctgctggagaggaacaagagcagcgagtgcaaggagggcggcccaagcagcggcgcccctcctcccagcggcggcaggcggcccaagcagcggcgcccctcctcccagcggcggcagcccagccggctccccaacctctaccgaggagggcacctctgagtccgccacccccgagagcggccctggcacctccaccgagcccagcgagggcagcgcacccggcagccctgccggcagccccacctccacagaggagggaaccagcaccgagcccagcgaaggcagcgccccaggcaccagcaccgagcctagtgagcaggagattaaacggatcaacaagatcagaagaagacttgtgaaagacagcaacaccaagaaggccggcaagacaggccccatgaaaaccctgctggttagagtgatgacacccgatctgagagagcggctggaaaacctgagaaagaagcctgaaaatatcccccagcccatcagcaatacatctagagccaacctgaataagctgctgaccgattacaccgaaatgaagaaggcgatcctgcatgtgtactgggaagagttccagaaggaccctgtgggcctgatgagccgggtggcccagcctgccagcaagaagatcgatcagaacaagctgaaacctgagatggacgagaagggcaacctgaccaccgccggctttgcctgctctcagtgtggccagcccctgttcgtgtacaagctggagcaggtgtctgagaagggcaaggcttacaccaactacttcggacggtgcaatgtggccgagcacgaaaagctgatcctgctggcccagctgaagcccgagaaggatagcgacgaagccgtgacatatagcctgggaaagtttgggcagagggccctggatttctacagcattcatgtgaccaaggagtccacccaccccgtgaagcccctggcccagatcgccggaaacagatacgcctccggacctgtgggaaaggccctgagcgacgcatgtatgggcacaatcgcctccttcctgtctaagtaccaggacatcatcatcgaacaccagaaggtggtgaagggcaaccagaagagactggagagcctgcgggagctggccggcaaggaaaacctggaataccctagcgtgaccctgccacctcagcctcacaccaaggagggcgttgatgcctacaacgaagtgatcgcccgggtgcgaatgtgggtgaacctgaacctgtggcagaagctgaagctaagcagagatgatgccaagcctctgctgagactgaagggattcccttcctttcctctggtcgagagacaggccaacgaagtggactggtgggacatggtgtgtaacgtgaagaagctgatcaacgagaaaaaggaggatggcaaggtgttttggcagaatctggctggctacaagagacaggaagccctgagaccatacctgagcagcgaggaagatcggaagaagggaaagaaattcgctcggtaccagctgggcgacctgctgctgcacctggaaaagaagcacggcgaggactggggaaaggtgtacgacgaggcctgggagcggattgacaagaaagtggaaggcctgagcaagcacatcaagctggaagaggaacggagaagcgaggacgcccagagcaaggccgccctgaccgactggctgcgggctaaggccagcttcgtgatcgagggcctgaaggaggccgacaaggacgagttctgcagatgcgagctgaagctgcagaagtggtacggggacctgcggggaaagcccttcgccatcgaagccgagaacagcatcctggacatcagcggcttcagcaagcagtacaactgtgccttcatctggcagaaggacggcgtgaagaagctgaacctgtacctgatcatcaactacttcaagggcggcaagctgcggttcaagaagatcaaacctgaagccttcgaagccaacagattctacaccgtgatcaacaaaaagagcggcgagatcgtgcccatggaggtgaacttcaacttcgacgaccccaacctgatcatcctgcctctggcctttggcaagagacagggcagagaattcatctggaacgacctgctgtccctggaaaccggcagcctgaagctggccaacggaagagtgatcgagaagacactgtacaacagaagaacccggcaggatgagcctgccctgttcgtggccctgaccttcgagcggcgggaggtcctggactcctccaatatcaaaccaatgaacctgatcggcgtggcaagaggcgaaaacatccccgccgtgatcgccctgaccgaccccgagggctgcccactgagccggtttaaggatagcctgggaaacccaacccacatcctgagaatcggcgagagctataaggagaagcagcggaccatccaggccaagaaggaggtggagcagcggagagccggcggctacagccggaagtacgccagcaaagccaagaatctggcagacgatatggtgagaaacaccgctagagatctgctgtactacgccgtgacccaggatgccatgctgatcttcgccaacctgagccggggcttcggccggcagggcaagcggaccttcatggccgagagacagtacacacggatggaggactggctgaccgccaagctggcctacgagggcctgagcaagacctacctgtccaagacactggcccagtacacctccaagacatgcagcaactgtgggtttaccatcaccagcgccgactacgacagggtgctggagaagctgaagaagacagcaacaggctggatgaccacaattaacggcaaggagctgaaggtggagggccagattacctactacaacagatacaagagacagaacgtagtcaaggacctgtccgtcgagctggatagactgagcgaagaatctgtgaacaacgacatctcctcctggacaaagggcagaagcggagaagctctgagcctcctgaagaaaagattctcccatagacccgtgcaggagaagttcgtgtgcctgaactgcggcttcgagacacacgcagccgagcaagccgccctgaacatcgccagatcctggctgttcctgcggagccaggagtacaagaaataccagacaaacaagacaaccggcaacaccgataagagagccttcgtcgagacctggcagtccttttaccggaagaagcttaaggaggtgtggaaacctgccgtgcggtctggcggatctggcggaggctccaccagccccaagaaaaagagaaaagtctaagctgccttctgcggggcttgccttctggccatgcccttcttctctcccttgcacctgtacctcttggtctttgaataaagcctgagtaggaaggctagcaaaaaaaaaaaaaaaaaaaaaaaaaaaaaaaaaaaaaaaaaaaaaaaaaaaaaaaaaaaaaaaaaaaaaaaaaaaaaaaagcccagccggctccccaacctctaccgaggagggcacctctgagtccgccacccccgagagcggccctggcacctccaccgagcccagcgagggcagcgcacccggcagccctgccggcagccccacctccacagaggagggaaccagcaccgagcccagcgaaggcagcgccccaggcaccagcaccgagcctagtgagcaggagattaaacggatcaacaagatcagaagaagacttgtgaaagacagcaacaccaagaaggccggcaagacaggccccatgaaaaccctgctggttagagtgatgacacccgatctgagagagcggctggaaaacctgagaaagaagcctgaaaatatcccccagcccatcagcaatacatctagagccaacctgaataagctgctgaccgattacaccgaaatgaagaaggcgatcctgcatgtgtactgggaagagttccagaaggaccctgtgggcctgatgagccgggtggcccagcctgccagcaagaagatcgatcagaacaagctgaaacctgagatggacgagaagggcaacctgaccaccgccggctttgcctgctctcagtgtggccagcccctgttcgtgtacaagctggagcaggtgtctgagaagggcaaggcttacaccaactacttcggacggtgcaatgtggccgagcacgaaaagctgatcctgctggcccagctgaagcccgagaaggatagcgacgaagccgtgacatatagcctgggaaagtttgggcagagggccctggatttctacagcattcatgtgaccaaggagtccacccaccccgtgaagcccctggcccagatcgccggaaacagatacgcctccggacctgtgggaaaggccctgagcgacgcatgtatgggcacaatcgcctccttcctgtctaagtaccaggacatcatcatcgaacaccagaaggtggtgaagggcaaccagaagagactggagagcctgcgggagctggccggcaaggaaaacctggaataccctagcgtgaccctgccacctcagcctcacaccaaggagggcgttgatgcctacaacgaagtgatcgcccgggtgcgaatgtgggtgaacctgaacctgtggcagaagctgaagctaagcagagatgatgccaagcctctgctgagactgaagggattcccttcctttcctctggtcgagagacaggccaacgaagtggactggtgggacatggtgtgtaacgtgaagaagctgatcaacgagaaaaaggaggatggcaaggtgttttggcagaatctggctggctacaagagacaggaagccctgagaccatacctgagcagcgaggaagatcggaagaagggaaagaaattcgctcggtaccagctgggcgacctgctgctgcacctggaaaagaagcacggcgaggactggggaaaggtgtacgacgaggcctgggagcggattgacaagaaagtggaaggcctgagcaagcacatcaagctggaagaggaacggagaagcgaggacgcccagagcaaggccgccctgaccgactggctgcgggctaaggccagcttcgtgatcgagggcctgaaggaggccgacaaggacgagttctgcagatgcgagctgaagctgcagaagtggtacggggacctgcggggaaagcccttcgccatcgaagccgagaacagcatcctggacatcagcggcttcagcaagcagtacaactgtgccttcatctggcagaaggacggcgtgaagaagctgaacctgtacctgatcatcaactacttcaagggcggcaagctgcggttcaagaagatcaaacctgaagccttcgaagccaacagattctacaccgtgatcaacaaaaagagcggcgagatcgtgcccatggaggtgaacttcaacttcgacgaccccaacctgatcatcctgcctctggcctttggcaagagacagggcagagaattcatctggaacgacctgctgtccctggaaaccggcagcctgaagctggccaacggaagagtgatcgagaagacactgtacaacagaagaacccggcaggatgagcctgccctgttcgtggccctgaccttcgagcggcgggaggtcctggactcctccaatatcaaaccaatgaacctgatcggcgtggcaagaggcgaaaacatccccgccgtgatcgccctgaccgaccccgagggctgcccactgagccggtttaaggatagcctgggaaacccaacccacatcctgagaatcggcgagagctataaggagaagcagcggaccatccaggccaagaaggaggtggagcagcggagagccggcggctacagccggaagtacgccagcaaagccaagaatctggcagacgatatggtgagaaacaccgctagagatctgctgtactacgccgtgacccaggatgccatgctgatcttcgccaacctgagccggggcttcggccggcagggcaagcggaccttcatggccgagagacagtacacacggatggaggactggctgaccgccaagctggcctacgagggcctgagcaagacctacctgtccaagacactggcccagtacacctccaagacatgcagcaactgtgggtttaccatcaccagcgccgactacgacagggtgctggagaagctgaagaagacagcaacaggctggatgaccacaattaacggcaaggagctgaaggtggagggccagattacctactacaacagatacaagagacagaacgtagtcaaggacctgtccgtcgagctggatagactgagcgaagaatctgtgaacaacgacatctcctcctggacaaagggcagaagcggagaagctctgagcctcctgaagaaaagattctcccatagacccgtgcaggagaagttcgtgtgcctgaactgcggcttcgagacacacgcagccgagcaagccgccctgaacatcgccagatcctggctgttcctgcggagccaggagtacaagaaataccagacaaacaagacaaccggcaacaccgataagagagccttcgtcgagacctggcagtccttttaccggaagaagcttaaggaggtgtggaaacctgccgtgcggtctggcggatctggcggaggctccaccagccccaagaaaaagagaaaagtctaagctgccttctgcggggcttgccttctggccatgcccttcttctctcccttgcacctgtacctcttggtctttgaataaagcctgagtaggaaggctagcaaaaaaaaaaaaaaaaaaaaaaaaaaaaaaaaaaaaaaaaaaaaaaaaaaaaaaaaaaaaaaaaaaaaaaaaaaaaaaaa

SEQ ID NO: 9611 - RNA, 8787 nt, synthetic construct
  source 1..8787: mol_type = other RNA
aggaaataagagagaaaagaagagtaagaagaaatataagagccaccatggcccctaagaagaagcgtaaagtgagccggatgaaccacgaccaggagttcgacccccctaaggtgtaccctcccgtccccgccgagaagagaaagcccatccgggtcctgagcctgttcgatggcatcgccaccggtctgctggtgctgaaggacctgggcatccaggtggataggtacattgcctccgaggtgtgcgaggactccatcaccgtgggaatggtgcgtcatcagggcaagatcatgtacgtgggcgacgtgcggagcgtgacacagaagcatatccaggagtggggccctttcgacctggtgatcggcggcagcccttgcaatgacctgagcatcgtgaacccagcccggaagggcctgtacgagggaaccggcagactgttcttcgagttttacagactgctgcacgacgcccggcctaaggaaggcgacgaccggcccttcttttggctgttcgagaatgtggtggccatgggagtcagcgacaagcgggatattagccggttcctggagagcaaccccgtgatgatcgatgccaaggaagtgagcgccgcccaccgggccagatacttctggggcaatctgcctggcatgaacagacccctggccagcaccgtgaacgacaagctggagctgcaggagtgcctggagcacggccggatcgccaagttcagcaaggtgagaaccatcaccacccgaagcaacagcatcaaacaaggcaaggaccagcactttcctgtgttcatgaacgagaaggaggacatcctgtggtgtaccgagatggagagagtgttcgggttcccagtccactacacagatgtcagcaacatgtctagactggccagacagagactgctgggaagaagctggtccgtccctgtgatcagacacctgttcgcccctctgaaggagtacttcgcctgcgtgagcagcggcaacagcaacgccaacagccggggccccagcttctctagcggcctggtgccactgtccctgagagggagccacatgggccccatggagatctacaaaaccgtgagcgcctggaagcggcagcctgtgcgcgtgctgagcctgtttcggaatatcgataaagtcctgaaaagcctgggattcctggagagcggctctggctccggcggtggcaccctgaagtacgtggaggatgtgacaaacgtggtcagacgggatgtggagaagtggggccccttcgatctggtgtacggcagcacccaacccctgggcagctcttgtgaccggtgccctggctggtacatgtttcagttccaccggatcctgcagtacgccctgccgagacaggagtcccagcggccattcttttggattttcatggacaacttgctgctgaccgaggatgaccaggaaactaccactcggttcctgcagaccgaagccgtgaccctgcaggacgtgagaggccgggactaccagaacgccatgcgggtgtggtccaacatccctggactgaaaagcaagcacgcacctctgacccctaaagaagaggagtacctgcaggcccaggtgcggagcagaagcaagctggacgcccctaaggtggatctgctggtgaagaattgcctcctgcccctgagagagtacttcaagtatttcagccagaatagtctgcccctgggaggcagcggcggcggcggcgagaacctggagagcagggtgaccctgggcagccccgccgccgagagccaggagctgctgaccttcaaggacgtgagcgtggacttcacccaggaggagtggggccagctggcccccgcccacaggaacctgtacagggaggtgatgctggagaactacggcaacctggtgagcgtgggctaccagctgagcaagcccggcctgatcagccagctggagaagggcgaggagccctggctgggcggcccaagcagcggcgcccctcctcccagcggcggcaggcggcccaagcagcggcgcccctcctcccagcggcggcagcccagccggctccccaacctctaccgaggagggcacctctgagtccgccacccccgagagcggccctggcacctccaccgagcccagcgagggcagcgcacccggcagccctgccggcagccccacctccacagaggagggaaccagcaccgagcccagcgaaggcagcgccccaggcaccagcaccgagcctagtgagcaggagattaaacggatcaacaagatcagaagaagacttgtgaaagacagcaacaccaagaaggccggcaagacaggccccatgaaaaccctgctggttagagtgatgacacccgatctgagagagcggctggaaaacctgagaaagaagcctgaaaatatcccccagcccatcagcaatacatctagagccaacctgaataagctgctgaccgattacaccgaaatgaagaaggcgatcctgcatgtgtactgggaagagttccagaaggaccctgtgggcctgatgagccgggtggcccagcctgccagcaagaagatcgatcagaacaagctgaaacctgagatggacgagaagggcaacctgaccaccgccggctttgcctgctctcagtgtggccagcccctgttcgtgtacaagctggagcaggtgtctgagaagggcaaggcttacaccaactacttcggacggtgcaatgtggccgagcacgaaaagctgatcctgctggcccagctgaagcccgagaaggatagcgacgaagccgtgacatatagcctgggaaagtttgggcagagggccctggatttctacagcattcatgtgaccaaggagtccacccaccccgtgaagcccctggcccagatcgccggaaacagatacgcctccggacctgtgggaaaggccctgagcgacgcatgtatgggcacaatcgcctccttcctgtctaagtaccaggacatcatcatcgaacaccagaaggtggtgaagggcaaccagaagagactggagagcctgcgggagctggccggcaaggaaaacctggaataccctagcgtgaccctgccacctcagcctcacaccaaggagggcgttgatgcctacaacgaagtgatcgcccgggtgcgaatgtgggtgaacctgaacctgtggcagaagctgaagctaagcagagatgatgccaagcctctgctgagactgaagggattcccttcctttcctctggtcgagagacaggccaacgaagtggactggtgggacatggtgtgtaacgtgaagaagctgatcaacgagaaaaaggaggatggcaaggtgttttggcagaatctggctggctacaagagacaggaagccctgagaccatacctgagcagcgaggaagatcggaagaagggaaagaaattcgctcggtaccagctgggcgacctgctgctgcacctggaaaagaagcacggcgaggactggggaaaggtgtacgacgaggcctgggagcggattgacaagaaagtggaaggcctgagcaagcacatcaagctggaagaggaacggagaagcgaggacgcccagagcaaggccgccctgaccgactggctgcgggctaaggccagcttcgtgatcgagggcctgaaggaggccgacaaggacgagttctgcagatgcgagctgaagctgcagaagtggtacggggacctgcggggaaagcccttcgccatcgaagccgagaacagcatcctggacatcagcggcttcagcaagcagtacaactgtgccttcatctggcagaaggacggcgtgaagaagctgaacctgtacctgatcatcaactacttcaagggcggcaagctgcggttcaagaagatcaaacctgaagccttcgaagccaacagattctacaccgtgatcaacaaaaagagcggcgagatcgtgcccatggaggtgaacttcaacttcgacgaccccaacctgatcatcctgcctctggcctttggcaagagacagggcagagaattcatctggaacgacctgctgtccctggaaaccggcagcctgaagctggccaacggaagagtgatcgagaagacactgtacaacagaagaacccggcaggatgagcctgccctgttcgtggccctgaccttcgagcggcgggaggtcctggactcctccaatatcaaaccaatgaacctgatcggcgtggcaagaggcgaaaacatccccgccgtgatcgccctgaccgaccccgagggctgcccactgagccggtttaaggatagcctgggaaacccaacccacatcctgagaatcggcgagagctataaggagaagcagcggaccatccaggccaagaaggaggtggagcagcggagagccggcggctacagccggaagtacgccagcaaagccaagaatctggcagacgatatggtgagaaacaccgctagagatctgctgtactacgccgtgacccaggatgccatgctgatcttcgccaacctgagccggggcttcggccggcagggcaagcggaccttcatggccgagagacagtacacacggatggaggactggctgaccgccaagctggcctacgagggcctgagcaagacctacctgtccaagacactggcccagtacacctccaagacatgcagcaactgtgggtttaccatcaccagcgccgactacgacagggtgctggagaagctgaagaagacagcaacaggctggatgaccacaattaacggcaaggagctgaaggtggagggccagattacctactacaacagatacaagagacagaacgtagtcaaggacctgtccgtcgagctggatagactgagcgaagaatctgtgaacaacgacatctcctcctggacaaagggcagaagcggagaagctctgagcctcctgaagaaaagattctcccatagacccgtgcaggagaagttcgtgtgcctgaactgcggcttcgagacacacgcagccgagcaagccgccctgaacatcgccagatcctggctgttcctgcggagccaggagtacaagaaataccagacaaacaagacaaccggcaacaccgataagagagccttcgtcgagacctggcagtccttttaccggaagaagcttaaggaggtgtggaaacctgccgtgcggtctggcggatctggcggaggctccaccagccccaagaaaaagagaaaagtctaagctgccttctgcggggcttgccttctggccatgcccttcttctctcccttgcacctgtacctcttggtctttgaataaagcctgagtaggaaggctagcaaaaaaaaaaaaaaaaaaaaaaaaaaaaaaaaaaaaaaaaaaaaaaaaaaaaaaaaaaaaaaaaaaaaaaaaaaaaaaaagcccagccggctccccaacctctaccgaggagggcacctctgagtccgccacccccgagagcggccctggcacctccaccgagcccagcgagggcagcgcacccggcagccctgccggcagccccacctccacagaggagggaaccagcaccgagcccagcgaaggcagcgccccaggcaccagcaccgagcctagtgagcaggagattaaacggatcaacaagatcagaagaagacttgtgaaagacagcaacaccaagaaggccggcaagacaggccccatgaaaaccctgctggttagagtgatgacacccgatctgagagagcggctggaaaacctgagaaagaagcctgaaaatatcccccagcccatcagcaatacatctagagccaacctgaataagctgctgaccgattacaccgaaatgaagaaggcgatcctgcatgtgtactgggaagagttccagaaggaccctgtgggcctgatgagccgggtggcccagcctgccagcaagaagatcgatcagaacaagctgaaacctgagatggacgagaagggcaacctgaccaccgccggctttgcctgctctcagtgtggccagcccctgttcgtgtacaagctggagcaggtgtctgagaagggcaaggcttacaccaactacttcggacggtgcaatgtggccgagcacgaaaagctgatcctgctggcccagctgaagcccgagaaggatagcgacgaagccgtgacatatagcctgggaaagtttgggcagagggccctggatttctacagcattcatgtgaccaaggagtccacccaccccgtgaagcccctggcccagatcgccggaaacagatacgcctccggacctgtgggaaaggccctgagcgacgcatgtatgggcacaatcgcctccttcctgtctaagtaccaggacatcatcatcgaacaccagaaggtggtgaagggcaaccagaagagactggagagcctgcgggagctggccggcaaggaaaacctggaataccctagcgtgaccctgccacctcagcctcacaccaaggagggcgttgatgcctacaacgaagtgatcgcccgggtgcgaatgtgggtgaacctgaacctgtggcagaagctgaagctaagcagagatgatgccaagcctctgctgagactgaagggattcccttcctttcctctggtcgagagacaggccaacgaagtggactggtgggacatggtgtgtaacgtgaagaagctgatcaacgagaaaaaggaggatggcaaggtgttttggcagaatctggctggctacaagagacaggaagccctgagaccatacctgagcagcgaggaagatcggaagaagggaaagaaattcgctcggtaccagctgggcgacctgctgctgcacctggaaaagaagcacggcgaggactggggaaaggtgtacgacgaggcctgggagcggattgacaagaaagtggaaggcctgagcaagcacatcaagctggaagaggaacggagaagcgaggacgcccagagcaaggccgccctgaccgactggctgcgggctaaggccagcttcgtgatcgagggcctgaaggaggccgacaaggacgagttctgcagatgcgagctgaagctgcagaagtggtacggggacctgcggggaaagcccttcgccatcgaagccgagaacagcatcctggacatcagcggcttcagcaagcagtacaactgtgccttcatctggcagaaggacggcgtgaagaagctgaacctgtacctgatcatcaactacttcaagggcggcaagctgcggttcaagaagatcaaacctgaagccttcgaagccaacagattctacaccgtgatcaacaaaaagagcggcgagatcgtgcccatggaggtgaacttcaacttcgacgaccccaacctgatcatcctgcctctggcctttggcaagagacagggcagagaattcatctggaacgacctgctgtccctggaaaccggcagcctgaagctggccaacggaagagtgatcgagaagacactgtacaacagaagaacccggcaggatgagcctgccctgttcgtggccctgaccttcgagcggcgggaggtcctggactcctccaatatcaaaccaatgaacctgatcggcgtggcaagaggcgaaaacatccccgccgtgatcgccctgaccgaccccgagggctgcccactgagccggtttaaggatagcctgggaaacccaacccacatcctgagaatcggcgagagctataaggagaagcagcggaccatccaggccaagaaggaggtggagcagcggagagccggcggctacagccggaagtacgccagcaaagccaagaatctggcagacgatatggtgagaaacaccgctagagatctgctgtactacgccgtgacccaggatgccatgctgatcttcgccaacctgagccggggcttcggccggcagggcaagcggaccttcatggccgagagacagtacacacggatggaggactggctgaccgccaagctggcctacgagggcctgagcaagacctacctgtccaagacactggcccagtacacctccaagacatgcagcaactgtgggtttaccatcaccagcgccgactacgacagggtgctggagaagctgaagaagacagcaacaggctggatgaccacaattaacggcaaggagctgaaggtggagggccagattacctactacaacagatacaagagacagaacgtagtcaaggacctgtccgtcgagctggatagactgagcgaagaatctgtgaacaacgacatctcctcctggacaaagggcagaagcggagaagctctgagcctcctgaagaaaagattctcccatagacccgtgcaggagaagttcgtgtgcctgaactgcggcttcgagacacacgcagccgagcaagccgccctgaacatcgccagatcctggctgttcctgcggagccaggagtacaagaaataccagacaaacaagacaaccggcaacaccgataagagagccttcgtcgagacctggcagtccttttaccggaagaagcttaaggaggtgtggaaacctgccgtgcggtctggcggatctggcggaggctccaccagccccaagaaaaagagaaaagtctaagctgccttctgcggggcttgccttctggccatgcccttcttctctcccttgcacctgtacctcttggtctttgaataaagcctgagtaggaaggctagcaaaaaaaaaaaaaaaaaaaaaaaaaaaaaaaaaaaaaaaaaaaaaaaaaaaaaaaaaaaaaaaaaaaaaaaaaaaaaaaa

SEQ ID NO: 9612 - RNA, 8787 nt, synthetic construct
  source 1..8787: mol_type = other RNA
aggaaataagagagaaaagaagagtaagaagaaatataagagccaccatggcccctaagaagaagcgtaaagtgagccggatgaaccacgaccaggagttcgacccccctaaggtgtaccctcccgtccccgccgagaagagaaagcccatccgggtcctgagcctgttcgatggcatcgccaccggtctgctggtgctgaaggacctgggcatccaggtggataggtacattgcctccgaggtgtgcgaggactccatcaccgtgggaatggtgcgtcatcagggcaagatcatgtacgtgggcgacgtgcggagcgtgacacagaagcatatccaggagtggggccctttcgacctggtgatcggcggcagcccttgcaatgacctgagcatcgtgaacccagcccggaagggcctgtacgagggaaccggcagactgttcttcgagttttacagactgctgcacgacgcccggcctaaggaaggcgacgaccggcccttcttttggctgttcgagaatgtggtggccatgggagtcagcgacaagcgggatattagccggttcctggagagcaaccccgtgatgatcgatgccaaggaagtgagcgccgcccaccgggccagatacttctggggcaatctgcctggcatgaacagacccctggccagcaccgtgaacgacaagctggagctgcaggagtgcctggagcacggccggatcgccaagttcagcaaggtgagaaccatcaccacccgaagcaacagcatcaaacaaggcaaggaccagcactttcctgtgttcatgaacgagaaggaggacatcctgtggtgtaccgagatggagagagtgttcgggttcccagtccactacacagatgtcagcaacatgtctagactggccagacagagactgctgggaagaagctggtccgtccctgtgatcagacacctgttcgcccctctgaaggagtacttcgcctgcgtgagcagcggcaacagcaacgccaacagccggggccccagcttctctagcggcctggtgccactgtccctgagagggagccacatgggccccatggagatctacaaaaccgtgagcgcctggaagcggcagcctgtgcgcgtgctgagcctgtttcggaatatcgataaagtcctgaaaagcctgggattcctggagagcggctctggctccggcggtggcaccctgaagtacgtggaggatgtgacaaacgtggtcagacgggatgtggagaagtggggccccttcgatctggtgtacggcagcacccaacccctgggcagctcttgtgaccggtgccctggctggtacatgtttcagttccaccggatcctgcagtacgccctgccgagacaggagtcccagcggccattcttttggattttcatggacaacttgctgctgaccgaggatgaccaggaaactaccactcggttcctgcagaccgaagccgtgaccctgcaggacgtgagaggccgggactaccagaacgccatgcgggtgtggtccaacatccctggactgaaaagcaagcacgcacctctgacccctaaagaagaggagtacctgcaggcccaggtgcggagcagaagcaagctggacgcccctaaggtggatctgctggtgaagaattgcctcctgcccctgagagagtacttcaagtatttcagccagaatagtctgcccctgggaggcagcggcggcggcccccaggccagcgtgaccttcgaggacgtggccgtgtacctgacccaggaggagtggggccacctggagcccgcccagaggggcctgtacagggacgtgatgctggagaactacggcaacgtggtgagcctgggcttccccgtgagcaagcccgacgtgatcctgcagctggagctgaggggcgagccctggttcctggacatgcagggcaccgagggcagggagatcctgagggactgcgagggcggcccaagcagcggcgcccctcctcccagcggcggcaggcggcccaagcagcggcgcccctcctcccagcggcggcagcccagccggctccccaacctctaccgaggagggcacctctgagtccgccacccccgagagcggccctggcacctccaccgagcccagcgagggcagcgcacccggcagccctgccggcagccccacctccacagaggagggaaccagcaccgagcccagcgaaggcagcgccccaggcaccagcaccgagcctagtgagcaggagattaaacggatcaacaagatcagaagaagacttgtgaaagacagcaacaccaagaaggccggcaagacaggccccatgaaaaccctgctggttagagtgatgacacccgatctgagagagcggctggaaaacctgagaaagaagcctgaaaatatcccccagcccatcagcaatacatctagagccaacctgaataagctgctgaccgattacaccgaaatgaagaaggcgatcctgcatgtgtactgggaagagttccagaaggaccctgtgggcctgatgagccgggtggcccagcctgccagcaagaagatcgatcagaacaagctgaaacctgagatggacgagaagggcaacctgaccaccgccggctttgcctgctctcagtgtggccagcccctgttcgtgtacaagctggagcaggtgtctgagaagggcaaggcttacaccaactacttcggacggtgcaatgtggccgagcacgaaaagctgatcctgctggcccagctgaagcccgagaaggatagcgacgaagccgtgacatatagcctgggaaagtttgggcagagggccctggatttctacagcattcatgtgaccaaggagtccacccaccccgtgaagcccctggcccagatcgccggaaacagatacgcctccggacctgtgggaaaggccctgagcgacgcatgtatgggcacaatcgcctccttcctgtctaagtaccaggacatcatcatcgaacaccagaaggtggtgaagggcaaccagaagagactggagagcctgcgggagctggccggcaaggaaaacctggaataccctagcgtgaccctgccacctcagcctcacaccaaggagggcgttgatgcctacaacgaagtgatcgcccgggtgcgaatgtgggtgaacctgaacctgtggcagaagctgaagctaagcagagatgatgccaagcctctgctgagactgaagggattcccttcctttcctctggtcgagagacaggccaacgaagtggactggtgggacatggtgtgtaacgtgaagaagctgatcaacgagaaaaaggaggatggcaaggtgttttggcagaatctggctggctacaagagacaggaagccctgagaccatacctgagcagcgaggaagatcggaagaagggaaagaaattcgctcggtaccagctgggcgacctgctgctgcacctggaaaagaagcacggcgaggactggggaaaggtgtacgacgaggcctgggagcggattgacaagaaagtggaaggcctgagcaagcacatcaagctggaagaggaacggagaagcgaggacgcccagagcaaggccgccctgaccgactggctgcgggctaaggccagcttcgtgatcgagggcctgaaggaggccgacaaggacgagttctgcagatgcgagctgaagctgcagaagtggtacggggacctgcggggaaagcccttcgccatcgaagccgagaacagcatcctggacatcagcggcttcagcaagcagtacaactgtgccttcatctggcagaaggacggcgtgaagaagctgaacctgtacctgatcatcaactacttcaagggcggcaagctgcggttcaagaagatcaaacctgaagccttcgaagccaacagattctacaccgtgatcaacaaaaagagcggcgagatcgtgcccatggaggtgaacttcaacttcgacgaccccaacctgatcatcctgcctctggcctttggcaagagacagggcagagaattcatctggaacgacctgctgtccctggaaaccggcagcctgaagctggccaacggaagagtgatcgagaagacactgtacaacagaagaacccggcaggatgagcctgccctgttcgtggccctgaccttcgagcggcgggaggtcctggactcctccaatatcaaaccaatgaacctgatcggcgtggcaagaggcgaaaacatccccgccgtgatcgccctgaccgaccccgagggctgcccactgagccggtttaaggatagcctgggaaacccaacccacatcctgagaatcggcgagagctataaggagaagcagcggaccatccaggccaagaaggaggtggagcagcggagagccggcggctacagccggaagtacgccagcaaagccaagaatctggcagacgatatggtgagaaacaccgctagagatctgctgtactacgccgtgacccaggatgccatgctgatcttcgccaacctgagccggggcttcggccggcagggcaagcggaccttcatggccgagagacagtacacacggatggaggactggctgaccgccaagctggcctacgagggcctgagcaagacctacctgtccaagacactggcccagtacacctccaagacatgcagcaactgtgggtttaccatcaccagcgccgactacgacagggtgctggagaagctgaagaagacagcaacaggctggatgaccacaattaacggcaaggagctgaaggtggagggccagattacctactacaacagatacaagagacagaacgtagtcaaggacctgtccgtcgagctggatagactgagcgaagaatctgtgaacaacgacatctcctcctggacaaagggcagaagcggagaagctctgagcctcctgaagaaaagattctcccatagacccgtgcaggagaagttcgtgtgcctgaactgcggcttcgagacacacgcagccgagcaagccgccctgaacatcgccagatcctggctgttcctgcggagccaggagtacaagaaataccagacaaacaagacaaccggcaacaccgataagagagccttcgtcgagacctggcagtccttttaccggaagaagcttaaggaggtgtggaaacctgccgtgcggtctggcggatctggcggaggctccaccagccccaagaaaaagagaaaagtctaagctgccttctgcggggcttgccttctggccatgcccttcttctctcccttgcacctgtacctcttggtctttgaataaagcctgagtaggaaggctagcaaaaaaaaaaaaaaaaaaaaaaaaaaaaaaaaaaaaaaaaaaaaaaaaaaaaaaaaaaaaaaaaaaaaaaaaaaaaaaaagcccagccggctccccaacctctaccgaggagggcacctctgagtccgccacccccgagagcggccctggcacctccaccgagcccagcgagggcagcgcacccggcagccctgccggcagccccacctccacagaggagggaaccagcaccgagcccagcgaaggcagcgccccaggcaccagcaccgagcctagtgagcaggagattaaacggatcaacaagatcagaagaagacttgtgaaagacagcaacaccaagaaggccggcaagacaggccccatgaaaaccctgctggttagagtgatgacacccgatctgagagagcggctggaaaacctgagaaagaagcctgaaaatatcccccagcccatcagcaatacatctagagccaacctgaataagctgctgaccgattacaccgaaatgaagaaggcgatcctgcatgtgtactgggaagagttccagaaggaccctgtgggcctgatgagccgggtggcccagcctgccagcaagaagatcgatcagaacaagctgaaacctgagatggacgagaagggcaacctgaccaccgccggctttgcctgctctcagtgtggccagcccctgttcgtgtacaagctggagcaggtgtctgagaagggcaaggcttacaccaactacttcggacggtgcaatgtggccgagcacgaaaagctgatcctgctggcccagctgaagcccgagaaggatagcgacgaagccgtgacatatagcctgggaaagtttgggcagagggccctggatttctacagcattcatgtgaccaaggagtccacccaccccgtgaagcccctggcccagatcgccggaaacagatacgcctccggacctgtgggaaaggccctgagcgacgcatgtatgggcacaatcgcctccttcctgtctaagtaccaggacatcatcatcgaacaccagaaggtggtgaagggcaaccagaagagactggagagcctgcgggagctggccggcaaggaaaacctggaataccctagcgtgaccctgccacctcagcctcacaccaaggagggcgttgatgcctacaacgaagtgatcgcccgggtgcgaatgtgggtgaacctgaacctgtggcagaagctgaagctaagcagagatgatgccaagcctctgctgagactgaagggattcccttcctttcctctggtcgagagacaggccaacgaagtggactggtgggacatggtgtgtaacgtgaagaagctgatcaacgagaaaaaggaggatggcaaggtgttttggcagaatctggctggctacaagagacaggaagccctgagaccatacctgagcagcgaggaagatcggaagaagggaaagaaattcgctcggtaccagctgggcgacctgctgctgcacctggaaaagaagcacggcgaggactggggaaaggtgtacgacgaggcctgggagcggattgacaagaaagtggaaggcctgagcaagcacatcaagctggaagaggaacggagaagcgaggacgcccagagcaaggccgccctgaccgactggctgcgggctaaggccagcttcgtgatcgagggcctgaaggaggccgacaaggacgagttctgcagatgcgagctgaagctgcagaagtggtacggggacctgcggggaaagcccttcgccatcgaagccgagaacagcatcctggacatcagcggcttcagcaagcagtacaactgtgccttcatctggcagaaggacggcgtgaagaagctgaacctgtacctgatcatcaactacttcaagggcggcaagctgcggttcaagaagatcaaacctgaagccttcgaagccaacagattctacaccgtgatcaacaaaaagagcggcgagatcgtgcccatggaggtgaacttcaacttcgacgaccccaacctgatcatcctgcctctggcctttggcaagagacagggcagagaattcatctggaacgacctgctgtccctggaaaccggcagcctgaagctggccaacggaagagtgatcgagaagacactgtacaacagaagaacccggcaggatgagcctgccctgttcgtggccctgaccttcgagcggcgggaggtcctggactcctccaatatcaaaccaatgaacctgatcggcgtggcaagaggcgaaaacatccccgccgtgatcgccctgaccgaccccgagggctgcccactgagccggtttaaggatagcctgggaaacccaacccacatcctgagaatcggcgagagctataaggagaagcagcggaccatccaggccaagaaggaggtggagcagcggagagccggcggctacagccggaagtacgccagcaaagccaagaatctggcagacgatatggtgagaaacaccgctagagatctgctgtactacgccgtgacccaggatgccatgctgatcttcgccaacctgagccggggcttcggccggcagggcaagcggaccttcatggccgagagacagtacacacggatggaggactggctgaccgccaagctggcctacgagggcctgagcaagacctacctgtccaagacactggcccagtacacctccaagacatgcagcaactgtgggtttaccatcaccagcgccgactacgacagggtgctggagaagctgaagaagacagcaacaggctggatgaccacaattaacggcaaggagctgaaggtggagggccagattacctactacaacagatacaagagacagaacgtagtcaaggacctgtccgtcgagctggatagactgagcgaagaatctgtgaacaacgacatctcctcctggacaaagggcagaagcggagaagctctgagcctcctgaagaaaagattctcccatagacccgtgcaggagaagttcgtgtgcctgaactgcggcttcgagacacacgcagccgagcaagccgccctgaacatcgccagatcctggctgttcctgcggagccaggagtacaagaaataccagacaaacaagacaaccggcaacaccgataagagagccttcgtcgagacctggcagtccttttaccggaagaagcttaaggaggtgtggaaacctgccgtgcggtctggcggatctggcggaggctccaccagccccaagaaaaagagaaaagtctaagctgccttctgcggggcttgccttctggccatgcccttcttctctcccttgcacctgtacctcttggtctttgaataaagcctgagtaggaaggctagcaaaaaaaaaaaaaaaaaaaaaaaaaaaaaaaaaaaaaaaaaaaaaaaaaaaaaaaaaaaaaaaaaaaaaaaaaaaaaaaa

SEQ ID NO: 9613 - RNA, 8787 nt, synthetic construct
  source 1..8787: mol_type = other RNA
aggaaataagagagaaaagaagagtaagaagaaatataagagccaccatggcccctaagaagaagcgtaaagtgagccggatgaaccacgaccaggagttcgacccccctaaggtgtaccctcccgtccccgccgagaagagaaagcccatccgggtcctgagcctgttcgatggcatcgccaccggtctgctggtgctgaaggacctgggcatccaggtggataggtacattgcctccgaggtgtgcgaggactccatcaccgtgggaatggtgcgtcatcagggcaagatcatgtacgtgggcgacgtgcggagcgtgacacagaagcatatccaggagtggggccctttcgacctggtgatcggcggcagcccttgcaatgacctgagcatcgtgaacccagcccggaagggcctgtacgagggaaccggcagactgttcttcgagttttacagactgctgcacgacgcccggcctaaggaaggcgacgaccggcccttcttttggctgttcgagaatgtggtggccatgggagtcagcgacaagcgggatattagccggttcctggagagcaaccccgtgatgatcgatgccaaggaagtgagcgccgcccaccgggccagatacttctggggcaatctgcctggcatgaacagacccctggccagcaccgtgaacgacaagctggagctgcaggagtgcctggagcacggccggatcgccaagttcagcaaggtgagaaccatcaccacccgaagcaacagcatcaaacaaggcaaggaccagcactttcctgtgttcatgaacgagaaggaggacatcctgtggtgtaccgagatggagagagtgttcgggttcccagtccactacacagatgtcagcaacatgtctagactggccagacagagactgctgggaagaagctggtccgtccctgtgatcagacacctgttcgcccctctgaaggagtacttcgcctgcgtgagcagcggcaacagcaacgccaacagccggggccccagcttctctagcggcctggtgccactgtccctgagagggagccacatgggccccatggagatctacaaaaccgtgagcgcctggaagcggcagcctgtgcgcgtgctgagcctgtttcggaatatcgataaagtcctgaaaagcctgggattcctggagagcggctctggctccggcggtggcaccctgaagtacgtggaggatgtgacaaacgtggtcagacgggatgtggagaagtggggccccttcgatctggtgtacggcagcacccaacccctgggcagctcttgtgaccggtgccctggctggtacatgtttcagttccaccggatcctgcagtacgccctgccgagacaggagtcccagcggccattcttttggattttcatggacaacttgctgctgaccgaggatgaccaggaaactaccactcggttcctgcagaccgaagccgtgaccctgcaggacgtgagaggccgggactaccagaacgccatgcgggtgtggtccaacatccctggactgaaaagcaagcacgcacctctgacccctaaagaagaggagtacctgcaggcccaggtgcggagcagaagcaagctggacgcccctaaggtggatctgctggtgaagaattgcctcctgcccctgagagagtacttcaagtatttcagccagaatagtctgcccctgggaggcagcggcggcggcgaggccctgcccgtggtgttcgaggacgtggccgtgtacttcaccagggaggagtggggcgccctggacaagaggcagaaggagatgtacagggacgtgatgaggatgaactacgagctgctggccagcctgggccccgccgccgccaagcccgacctgatcagcaagctggagaggagggccgccccctggatcaaggacccccacggcctgaagtggggcaagggcaggccccccggcaagggcggcccaagcagcggcgcccctcctcccagcggcggcaggcggcccaagcagcggcgcccctcctcccagcggcggcagcccagccggctccccaacctctaccgaggagggcacctctgagtccgccacccccgagagcggccctggcacctccaccgagcccagcgagggcagcgcacccggcagccctgccggcagccccacctccacagaggagggaaccagcaccgagcccagcgaaggcagcgccccaggcaccagcaccgagcctagtgagcaggagattaaacggatcaacaagatcagaagaagacttgtgaaagacagcaacaccaagaaggccggcaagacaggccccatgaaaaccctgctggttagagtgatgacacccgatctgagagagcggctggaaaacctgagaaagaagcctgaaaatatcccccagcccatcagcaatacatctagagccaacctgaataagctgctgaccgattacaccgaaatgaagaaggcgatcctgcatgtgtactgggaagagttccagaaggaccctgtgggcctgatgagccgggtggcccagcctgccagcaagaagatcgatcagaacaagctgaaacctgagatggacgagaagggcaacctgaccaccgccggctttgcctgctctcagtgtggccagcccctgttcgtgtacaagctggagcaggtgtctgagaagggcaaggcttacaccaactacttcggacggtgcaatgtggccgagcacgaaaagctgatcctgctggcccagctgaagcccgagaaggatagcgacgaagccgtgacatatagcctgggaaagtttgggcagagggccctggatttctacagcattcatgtgaccaaggagtccacccaccccgtgaagcccctggcccagatcgccggaaacagatacgcctccggacctgtgggaaaggccctgagcgacgcatgtatgggcacaatcgcctccttcctgtctaagtaccaggacatcatcatcgaacaccagaaggtggtgaagggcaaccagaagagactggagagcctgcgggagctggccggcaaggaaaacctggaataccctagcgtgaccctgccacctcagcctcacaccaaggagggcgttgatgcctacaacgaagtgatcgcccgggtgcgaatgtgggtgaacctgaacctgtggcagaagctgaagctaagcagagatgatgccaagcctctgctgagactgaagggattcccttcctttcctctggtcgagagacaggccaacgaagtggactggtgggacatggtgtgtaacgtgaagaagctgatcaacgagaaaaaggaggatggcaaggtgttttggcagaatctggctggctacaagagacaggaagccctgagaccatacctgagcagcgaggaagatcggaagaagggaaagaaattcgctcggtaccagctgggcgacctgctgctgcacctggaaaagaagcacggcgaggactggggaaaggtgtacgacgaggcctgggagcggattgacaagaaagtggaaggcctgagcaagcacatcaagctggaagaggaacggagaagcgaggacgcccagagcaaggccgccctgaccgactggctgcgggctaaggccagcttcgtgatcgagggcctgaaggaggccgacaaggacgagttctgcagatgcgagctgaagctgcagaagtggtacggggacctgcggggaaagcccttcgccatcgaagccgagaacagcatcctggacatcagcggcttcagcaagcagtacaactgtgccttcatctggcagaaggacggcgtgaagaagctgaacctgtacctgatcatcaactacttcaagggcggcaagctgcggttcaagaagatcaaacctgaagccttcgaagccaacagattctacaccgtgatcaacaaaaagagcggcgagatcgtgcccatggaggtgaacttcaacttcgacgaccccaacctgatcatcctgcctctggcctttggcaagagacagggcagagaattcatctggaacgacctgctgtccctggaaaccggcagcctgaagctggccaacggaagagtgatcgagaagacactgtacaacagaagaacccggcaggatgagcctgccctgttcgtggccctgaccttcgagcggcgggaggtcctggactcctccaatatcaaaccaatgaacctgatcggcgtggcaagaggcgaaaacatccccgccgtgatcgccctgaccgaccccgagggctgcccactgagccggtttaaggatagcctgggaaacccaacccacatcctgagaatcggcgagagctataaggagaagcagcggaccatccaggccaagaaggaggtggagcagcggagagccggcggctacagccggaagtacgccagcaaagccaagaatctggcagacgatatggtgagaaacaccgctagagatctgctgtactacgccgtgacccaggatgccatgctgatcttcgccaacctgagccggggcttcggccggcagggcaagcggaccttcatggccgagagacagtacacacggatggaggactggctgaccgccaagctggcctacgagggcctgagcaagacctacctgtccaagacactggcccagtacacctccaagacatgcagcaactgtgggtttaccatcaccagcgccgactacgacagggtgctggagaagctgaagaagacagcaacaggctggatgaccacaattaacggcaaggagctgaaggtggagggccagattacctactacaacagatacaagagacagaacgtagtcaaggacctgtccgtcgagctggatagactgagcgaagaatctgtgaacaacgacatctcctcctggacaaagggcagaagcggagaagctctgagcctcctgaagaaaagattctcccatagacccgtgcaggagaagttcgtgtgcctgaactgcggcttcgagacacacgcagccgagcaagccgccctgaacatcgccagatcctggctgttcctgcggagccaggagtacaagaaataccagacaaacaagacaaccggcaacaccgataagagagccttcgtcgagacctggcagtccttttaccggaagaagcttaaggaggtgtggaaacctgccgtgcggtctggcggatctggcggaggctccaccagccccaagaaaaagagaaaagtctaagctgccttctgcggggcttgccttctggccatgcccttcttctctcccttgcacctgtacctcttggtctttgaataaagcctgagtaggaaggctagcaaaaaaaaaaaaaaaaaaaaaaaaaaaaaaaaaaaaaaaaaaaaaaaaaaaaaaaaaaaaaaaaaaaaaaaaaaaaaaaagcccagccggctccccaacctctaccgaggagggcacctctgagtccgccacccccgagagcggccctggcacctccaccgagcccagcgagggcagcgcacccggcagccctgccggcagccccacctccacagaggagggaaccagcaccgagcccagcgaaggcagcgccccaggcaccagcaccgagcctagtgagcaggagattaaacggatcaacaagatcagaagaagacttgtgaaagacagcaacaccaagaaggccggcaagacaggccccatgaaaaccctgctggttagagtgatgacacccgatctgagagagcggctggaaaacctgagaaagaagcctgaaaatatcccccagcccatcagcaatacatctagagccaacctgaataagctgctgaccgattacaccgaaatgaagaaggcgatcctgcatgtgtactgggaagagttccagaaggaccctgtgggcctgatgagccgggtggcccagcctgccagcaagaagatcgatcagaacaagctgaaacctgagatggacgagaagggcaacctgaccaccgccggctttgcctgctctcagtgtggccagcccctgttcgtgtacaagctggagcaggtgtctgagaagggcaaggcttacaccaactacttcggacggtgcaatgtggccgagcacgaaaagctgatcctgctggcccagctgaagcccgagaaggatagcgacgaagccgtgacatatagcctgggaaagtttgggcagagggccctggatttctacagcattcatgtgaccaaggagtccacccaccccgtgaagcccctggcccagatcgccggaaacagatacgcctccggacctgtgggaaaggccctgagcgacgcatgtatgggcacaatcgcctccttcctgtctaagtaccaggacatcatcatcgaacaccagaaggtggtgaagggcaaccagaagagactggagagcctgcgggagctggccggcaaggaaaacctggaataccctagcgtgaccctgccacctcagcctcacaccaaggagggcgttgatgcctacaacgaagtgatcgcccgggtgcgaatgtgggtgaacctgaacctgtggcagaagctgaagctaagcagagatgatgccaagcctctgctgagactgaagggattcccttcctttcctctggtcgagagacaggccaacgaagtggactggtgggacatggtgtgtaacgtgaagaagctgatcaacgagaaaaaggaggatggcaaggtgttttggcagaatctggctggctacaagagacaggaagccctgagaccatacctgagcagcgaggaagatcggaagaagggaaagaaattcgctcggtaccagctgggcgacctgctgctgcacctggaaaagaagcacggcgaggactggggaaaggtgtacgacgaggcctgggagcggattgacaagaaagtggaaggcctgagcaagcacatcaagctggaagaggaacggagaagcgaggacgcccagagcaaggccgccctgaccgactggctgcgggctaaggccagcttcgtgatcgagggcctgaaggaggccgacaaggacgagttctgcagatgcgagctgaagctgcagaagtggtacggggacctgcggggaaagcccttcgccatcgaagccgagaacagcatcctggacatcagcggcttcagcaagcagtacaactgtgccttcatctggcagaaggacggcgtgaagaagctgaacctgtacctgatcatcaactacttcaagggcggcaagctgcggttcaagaagatcaaacctgaagccttcgaagccaacagattctacaccgtgatcaacaaaaagagcggcgagatcgtgcccatggaggtgaacttcaacttcgacgaccccaacctgatcatcctgcctctggcctttggcaagagacagggcagagaattcatctggaacgacctgctgtccctggaaaccggcagcctgaagctggccaacggaagagtgatcgagaagacactgtacaacagaagaacccggcaggatgagcctgccctgttcgtggccctgaccttcgagcggcgggaggtcctggactcctccaatatcaaaccaatgaacctgatcggcgtggcaagaggcgaaaacatccccgccgtgatcgccctgaccgaccccgagggctgcccactgagccggtttaaggatagcctgggaaacccaacccacatcctgagaatcggcgagagctataaggagaagcagcggaccatccaggccaagaaggaggtggagcagcggagagccggcggctacagccggaagtacgccagcaaagccaagaatctggcagacgatatggtgagaaacaccgctagagatctgctgtactacgccgtgacccaggatgccatgctgatcttcgccaacctgagccggggcttcggccggcagggcaagcggaccttcatggccgagagacagtacacacggatggaggactggctgaccgccaagctggcctacgagggcctgagcaagacctacctgtccaagacactggcccagtacacctccaagacatgcagcaactgtgggtttaccatcaccagcgccgactacgacagggtgctggagaagctgaagaagacagcaacaggctggatgaccacaattaacggcaaggagctgaaggtggagggccagattacctactacaacagatacaagagacagaacgtagtcaaggacctgtccgtcgagctggatagactgagcgaagaatctgtgaacaacgacatctcctcctggacaaagggcagaagcggagaagctctgagcctcctgaagaaaagattctcccatagacccgtgcaggagaagttcgtgtgcctgaactgcggcttcgagacacacgcagccgagcaagccgccctgaacatcgccagatcctggctgttcctgcggagccaggagtacaagaaataccagacaaacaagacaaccggcaacaccgataagagagccttcgtcgagacctggcagtccttttaccggaagaagcttaaggaggtgtggaaacctgccgtgcggtctggcggatctggcggaggctccaccagccccaagaaaaagagaaaagtctaagctgccttctgcggggcttgccttctggccatgcccttcttctctcccttgcacctgtacctcttggtctttgaataaagcctgagtaggaaggctagcaaaaaaaaaaaaaaaaaaaaaaaaaaaaaaaaaaaaaaaaaaaaaaaaaaaaaaaaaaaaaaaaaaaaaaaaaaaaaaaa

SEQ ID NO: 9614 - RNA, 8814 nt, synthetic construct
  source 1..8814: mol_type = other RNA
aggaaataagagagaaaagaagagtaagaagaaatataagagccaccatggcccctaagaagaagcgtaaagtgagccggatgaaccacgaccaggagttcgacccccctaaggtgtaccctcccgtccccgccgagaagagaaagcccatccgggtcctgagcctgttcgatggcatcgccaccggtctgctggtgctgaaggacctgggcatccaggtggataggtacattgcctccgaggtgtgcgaggactccatcaccgtgggaatggtgcgtcatcagggcaagatcatgtacgtgggcgacgtgcggagcgtgacacagaagcatatccaggagtggggccctttcgacctggtgatcggcggcagcccttgcaatgacctgagcatcgtgaacccagcccggaagggcctgtacgagggaaccggcagactgttcttcgagttttacagactgctgcacgacgcccggcctaaggaaggcgacgaccggcccttcttttggctgttcgagaatgtggtggccatgggagtcagcgacaagcgggatattagccggttcctggagagcaaccccgtgatgatcgatgccaaggaagtgagcgccgcccaccgggccagatacttctggggcaatctgcctggcatgaacagacccctggccagcaccgtgaacgacaagctggagctgcaggagtgcctggagcacggccggatcgccaagttcagcaaggtgagaaccatcaccacccgaagcaacagcatcaaacaaggcaaggaccagcactttcctgtgttcatgaacgagaaggaggacatcctgtggtgtaccgagatggagagagtgttcgggttcccagtccactacacagatgtcagcaacatgtctagactggccagacagagactgctgggaagaagctggtccgtccctgtgatcagacacctgttcgcccctctgaaggagtacttcgcctgcgtgagcagcggcaacagcaacgccaacagccggggccccagcttctctagcggcctggtgccactgtccctgagagggagccacatgggccccatggagatctacaaaaccgtgagcgcctggaagcggcagcctgtgcgcgtgctgagcctgtttcggaatatcgataaagtcctgaaaagcctgggattcctggagagcggctctggctccggcggtggcaccctgaagtacgtggaggatgtgacaaacgtggtcagacgggatgtggagaagtggggccccttcgatctggtgtacggcagcacccaacccctgggcagctcttgtgaccggtgccctggctggtacatgtttcagttccaccggatcctgcagtacgccctgccgagacaggagtcccagcggccattcttttggattttcatggacaacttgctgctgaccgaggatgaccaggaaactaccactcggttcctgcagaccgaagccgtgaccctgcaggacgtgagaggccgggactaccagaacgccatgcgggtgtggtccaacatccctggactgaaaagcaagcacgcacctctgacccctaaagaagaggagtacctgcaggcccaggtgcggagcagaagcaagctggacgcccctaaggtggatctgctggtgaagaattgcctcctgcccctgagagagtacttcaagtatttcagccagaatagtctgcccctgggaggcagcggcggcggcgtggccttcagggacgtgatcgtggacttcacccaggaggagtggcagcagctgaagcccgcccagaaggacctgtacagggacgtgatgatggagatctactggaacctggtgagcctggacctggagaccgagggcgacatgaacgagcccgaccccgagaaggacagctgggaggacaggaccagcatcgtggtggtggagggcctgatgaggaacggcgcccagggctacgcctgcgagaaggccggcatccagggctgcagggtgggcggcccaagcagcggcgcccctcctcccagcggcggcaggcggcccaagcagcggcgcccctcctcccagcggcggcagcccagccggctccccaacctctaccgaggagggcacctctgagtccgccacccccgagagcggccctggcacctccaccgagcccagcgagggcagcgcacccggcagccctgccggcagccccacctccacagaggagggaaccagcaccgagcccagcgaaggcagcgccccaggcaccagcaccgagcctagtgagcaggagattaaacggatcaacaagatcagaagaagacttgtgaaagacagcaacaccaagaaggccggcaagacaggccccatgaaaaccctgctggttagagtgatgacacccgatctgagagagcggctggaaaacctgagaaagaagcctgaaaatatcccccagcccatcagcaatacatctagagccaacctgaataagctgctgaccgattacaccgaaatgaagaaggcgatcctgcatgtgtactgggaagagttccagaaggaccctgtgggcctgatgagccgggtggcccagcctgccagcaagaagatcgatcagaacaagctgaaacctgagatggacgagaagggcaacctgaccaccgccggctttgcctgctctcagtgtggccagcccctgttcgtgtacaagctggagcaggtgtctgagaagggcaaggcttacaccaactacttcggacggtgcaatgtggccgagcacgaaaagctgatcctgctggcccagctgaagcccgagaaggatagcgacgaagccgtgacatatagcctgggaaagtttgggcagagggccctggatttctacagcattcatgtgaccaaggagtccacccaccccgtgaagcccctggcccagatcgccggaaacagatacgcctccggacctgtgggaaaggccctgagcgacgcatgtatgggcacaatcgcctccttcctgtctaagtaccaggacatcatcatcgaacaccagaaggtggtgaagggcaaccagaagagactggagagcctgcgggagctggccggcaaggaaaacctggaataccctagcgtgaccctgccacctcagcctcacaccaaggagggcgttgatgcctacaacgaagtgatcgcccgggtgcgaatgtgggtgaacctgaacctgtggcagaagctgaagctaagcagagatgatgccaagcctctgctgagactgaagggattcccttcctttcctctggtcgagagacaggccaacgaagtggactggtgggacatggtgtgtaacgtgaagaagctgatcaacgagaaaaaggaggatggcaaggtgttttggcagaatctggctggctacaagagacaggaagccctgagaccatacctgagcagcgaggaagatcggaagaagggaaagaaattcgctcggtaccagctgggcgacctgctgctgcacctggaaaagaagcacggcgaggactggggaaaggtgtacgacgaggcctgggagcggattgacaagaaagtggaaggcctgagcaagcacatcaagctggaagaggaacggagaagcgaggacgcccagagcaaggccgccctgaccgactggctgcgggctaaggccagcttcgtgatcgagggcctgaaggaggccgacaaggacgagttctgcagatgcgagctgaagctgcagaagtggtacggggacctgcggggaaagcccttcgccatcgaagccgagaacagcatcctggacatcagcggcttcagcaagcagtacaactgtgccttcatctggcagaaggacggcgtgaagaagctgaacctgtacctgatcatcaactacttcaagggcggcaagctgcggttcaagaagatcaaacctgaagccttcgaagccaacagattctacaccgtgatcaacaaaaagagcggcgagatcgtgcccatggaggtgaacttcaacttcgacgaccccaacctgatcatcctgcctctggcctttggcaagagacagggcagagaattcatctggaacgacctgctgtccctggaaaccggcagcctgaagctggccaacggaagagtgatcgagaagacactgtacaacagaagaacccggcaggatgagcctgccctgttcgtggccctgaccttcgagcggcgggaggtcctggactcctccaatatcaaaccaatgaacctgatcggcgtggcaagaggcgaaaacatccccgccgtgatcgccctgaccgaccccgagggctgcccactgagccggtttaaggatagcctgggaaacccaacccacatcctgagaatcggcgagagctataaggagaagcagcggaccatccaggccaagaaggaggtggagcagcggagagccggcggctacagccggaagtacgccagcaaagccaagaatctggcagacgatatggtgagaaacaccgctagagatctgctgtactacgccgtgacccaggatgccatgctgatcttcgccaacctgagccggggcttcggccggcagggcaagcggaccttcatggccgagagacagtacacacggatggaggactggctgaccgccaagctggcctacgagggcctgagcaagacctacctgtccaagacactggcccagtacacctccaagacatgcagcaactgtgggtttaccatcaccagcgccgactacgacagggtgctggagaagctgaagaagacagcaacaggctggatgaccacaattaacggcaaggagctgaaggtggagggccagattacctactacaacagatacaagagacagaacgtagtcaaggacctgtccgtcgagctggatagactgagcgaagaatctgtgaacaacgacatctcctcctggacaaagggcagaagcggagaagctctgagcctcctgaagaaaagattctcccatagacccgtgcaggagaagttcgtgtgcctgaactgcggcttcgagacacacgcagccgagcaagccgccctgaacatcgccagatcctggctgttcctgcggagccaggagtacaagaaataccagacaaacaagacaaccggcaacaccgataagagagccttcgtcgagacctggcagtccttttaccggaagaagcttaaggaggtgtggaaacctgccgtgcggtctggcggatctggcggaggctccaccagccccaagaaaaagagaaaagtctaagctgccttctgcggggcttgccttctggccatgcccttcttctctcccttgcacctgtacctcttggtctttgaataaagcctgagtaggaaggctagcaaaaaaaaaaaaaaaaaaaaaaaaaaaaaaaaaaaaaaaaaaaaaaaaaaaaaaaaaaaaaaaaaaaaaaaaaaaaaaaagcccagccggctccccaacctctaccgaggagggcacctctgagtccgccacccccgagagcggccctggcacctccaccgagcccagcgagggcagcgcacccggcagccctgccggcagccccacctccacagaggagggaaccagcaccgagcccagcgaaggcagcgccccaggcaccagcaccgagcctagtgagcaggagattaaacggatcaacaagatcagaagaagacttgtgaaagacagcaacaccaagaaggccggcaagacaggccccatgaaaaccctgctggttagagtgatgacacccgatctgagagagcggctggaaaacctgagaaagaagcctgaaaatatcccccagcccatcagcaatacatctagagccaacctgaataagctgctgaccgattacaccgaaatgaagaaggcgatcctgcatgtgtactgggaagagttccagaaggaccctgtgggcctgatgagccgggtggcccagcctgccagcaagaagatcgatcagaacaagctgaaacctgagatggacgagaagggcaacctgaccaccgccggctttgcctgctctcagtgtggccagcccctgttcgtgtacaagctggagcaggtgtctgagaagggcaaggcttacaccaactacttcggacggtgcaatgtggccgagcacgaaaagctgatcctgctggcccagctgaagcccgagaaggatagcgacgaagccgtgacatatagcctgggaaagtttgggcagagggccctggatttctacagcattcatgtgaccaaggagtccacccaccccgtgaagcccctggcccagatcgccggaaacagatacgcctccggacctgtgggaaaggccctgagcgacgcatgtatgggcacaatcgcctccttcctgtctaagtaccaggacatcatcatcgaacaccagaaggtggtgaagggcaaccagaagagactggagagcctgcgggagctggccggcaaggaaaacctggaataccctagcgtgaccctgccacctcagcctcacaccaaggagggcgttgatgcctacaacgaagtgatcgcccgggtgcgaatgtgggtgaacctgaacctgtggcagaagctgaagctaagcagagatgatgccaagcctctgctgagactgaagggattcccttcctttcctctggtcgagagacaggccaacgaagtggactggtgggacatggtgtgtaacgtgaagaagctgatcaacgagaaaaaggaggatggcaaggtgttttggcagaatctggctggctacaagagacaggaagccctgagaccatacctgagcagcgaggaagatcggaagaagggaaagaaattcgctcggtaccagctgggcgacctgctgctgcacctggaaaagaagcacggcgaggactggggaaaggtgtacgacgaggcctgggagcggattgacaagaaagtggaaggcctgagcaagcacatcaagctggaagaggaacggagaagcgaggacgcccagagcaaggccgccctgaccgactggctgcgggctaaggccagcttcgtgatcgagggcctgaaggaggccgacaaggacgagttctgcagatgcgagctgaagctgcagaagtggtacggggacctgcggggaaagcccttcgccatcgaagccgagaacagcatcctggacatcagcggcttcagcaagcagtacaactgtgccttcatctggcagaaggacggcgtgaagaagctgaacctgtacctgatcatcaactacttcaagggcggcaagctgcggttcaagaagatcaaacctgaagccttcgaagccaacagattctacaccgtgatcaacaaaaagagcggcgagatcgtgcccatggaggtgaacttcaacttcgacgaccccaacctgatcatcctgcctctggcctttggcaagagacagggcagagaattcatctggaacgacctgctgtccctggaaaccggcagcctgaagctggccaacggaagagtgatcgagaagacactgtacaacagaagaacccggcaggatgagcctgccctgttcgtggccctgaccttcgagcggcgggaggtcctggactcctccaatatcaaaccaatgaacctgatcggcgtggcaagaggcgaaaacatccccgccgtgatcgccctgaccgaccccgagggctgcccactgagccggtttaaggatagcctgggaaacccaacccacatcctgagaatcggcgagagctataaggagaagcagcggaccatccaggccaagaaggaggtggagcagcggagagccggcggctacagccggaagtacgccagcaaagccaagaatctggcagacgatatggtgagaaacaccgctagagatctgctgtactacgccgtgacccaggatgccatgctgatcttcgccaacctgagccggggcttcggccggcagggcaagcggaccttcatggccgagagacagtacacacggatggaggactggctgaccgccaagctggcctacgagggcctgagcaagacctacctgtccaagacactggcccagtacacctccaagacatgcagcaactgtgggtttaccatcaccagcgccgactacgacagggtgctggagaagctgaagaagacagcaacaggctggatgaccacaattaacggcaaggagctgaaggtggagggccagattacctactacaacagatacaagagacagaacgtagtcaaggacctgtccgtcgagctggatagactgagcgaagaatctgtgaacaacgacatctcctcctggacaaagggcagaagcggagaagctctgagcctcctgaagaaaagattctcccatagacccgtgcaggagaagttcgtgtgcctgaactgcggcttcgagacacacgcagccgagcaagccgccctgaacatcgccagatcctggctgttcctgcggagccaggagtacaagaaataccagacaaacaagacaaccggcaacaccgataagagagccttcgtcgagacctggcagtccttttaccggaagaagcttaaggaggtgtggaaacctgccgtgcggtctggcggatctggcggaggctccaccagccccaagaaaaagagaaaagtctaagctgccttctgcggggcttgccttctggccatgcccttcttctctcccttgcacctgtacctcttggtctttgaataaagcctgagtaggaaggctagcaaaaaaaaaaaaaaaaaaaaaaaaaaaaaaaaaaaaaaaaaaaaaaaaaaaaaaaaaaaaaaaaaaaaaaaaaaaaaaaa

SEQ ID NO: 9615 - RNA, 8787 nt, synthetic construct
  source 1..8787: mol_type = other RNA
aggaaataagagagaaaagaagagtaagaagaaatataagagccaccatggcccctaagaagaagcgtaaagtgagccggatgaaccacgaccaggagttcgacccccctaaggtgtaccctcccgtccccgccgagaagagaaagcccatccgggtcctgagcctgttcgatggcatcgccaccggtctgctggtgctgaaggacctgggcatccaggtggataggtacattgcctccgaggtgtgcgaggactccatcaccgtgggaatggtgcgtcatcagggcaagatcatgtacgtgggcgacgtgcggagcgtgacacagaagcatatccaggagtggggccctttcgacctggtgatcggcggcagcccttgcaatgacctgagcatcgtgaacccagcccggaagggcctgtacgagggaaccggcagactgttcttcgagttttacagactgctgcacgacgcccggcctaaggaaggcgacgaccggcccttcttttggctgttcgagaatgtggtggccatgggagtcagcgacaagcgggatattagccggttcctggagagcaaccccgtgatgatcgatgccaaggaagtgagcgccgcccaccgggccagatacttctggggcaatctgcctggcatgaacagacccctggccagcaccgtgaacgacaagctggagctgcaggagtgcctggagcacggccggatcgccaagttcagcaaggtgagaaccatcaccacccgaagcaacagcatcaaacaaggcaaggaccagcactttcctgtgttcatgaacgagaaggaggacatcctgtggtgtaccgagatggagagagtgttcgggttcccagtccactacacagatgtcagcaacatgtctagactggccagacagagactgctgggaagaagctggtccgtccctgtgatcagacacctgttcgcccctctgaaggagtacttcgcctgcgtgagcagcggcaacagcaacgccaacagccggggccccagcttctctagcggcctggtgccactgtccctgagagggagccacatgggccccatggagatctacaaaaccgtgagcgcctggaagcggcagcctgtgcgcgtgctgagcctgtttcggaatatcgataaagtcctgaaaagcctgggattcctggagagcggctctggctccggcggtggcaccctgaagtacgtggaggatgtgacaaacgtggtcagacgggatgtggagaagtggggccccttcgatctggtgtacggcagcacccaacccctgggcagctcttgtgaccggtgccctggctggtacatgtttcagttccaccggatcctgcagtacgccctgccgagacaggagtcccagcggccattcttttggattttcatggacaacttgctgctgaccgaggatgaccaggaaactaccactcggttcctgcagaccgaagccgtgaccctgcaggacgtgagaggccgggactaccagaacgccatgcgggtgtggtccaacatccctggactgaaaagcaagcacgcacctctgacccctaaagaagaggagtacctgcaggcccaggtgcggagcagaagcaagctggacgcccctaaggtggatctgctggtgaagaattgcctcctgcccctgagagagtacttcaagtatttcagccagaatagtctgcccctgggaggcagcggcggcggcggcccctggaccctgctgaccttcagggacgtggccatcgagttcagccaggaggagtggggctgcctgaaccacagccagagggagctgtacagggacgtgatgctggagacctacggccacctgctgttcctgggcctggtgagcaagcccgacctggtgatcctgctggagcagaagaaggagctgtggggcgtgaagaggaaggagaccgtgggctgccagttcgagggccacgtgaccggcggcccaagcagcggcgcccctcctcccagcggcggcaggcggcccaagcagcggcgcccctcctcccagcggcggcagcccagccggctccccaacctctaccgaggagggcacctctgagtccgccacccccgagagcggccctggcacctccaccgagcccagcgagggcagcgcacccggcagccctgccggcagccccacctccacagaggagggaaccagcaccgagcccagcgaaggcagcgccccaggcaccagcaccgagcctagtgagcaggagattaaacggatcaacaagatcagaagaagacttgtgaaagacagcaacaccaagaaggccggcaagacaggccccatgaaaaccctgctggttagagtgatgacacccgatctgagagagcggctggaaaacctgagaaagaagcctgaaaatatcccccagcccatcagcaatacatctagagccaacctgaataagctgctgaccgattacaccgaaatgaagaaggcgatcctgcatgtgtactgggaagagttccagaaggaccctgtgggcctgatgagccgggtggcccagcctgccagcaagaagatcgatcagaacaagctgaaacctgagatggacgagaagggcaacctgaccaccgccggctttgcctgctctcagtgtggccagcccctgttcgtgtacaagctggagcaggtgtctgagaagggcaaggcttacaccaactacttcggacggtgcaatgtggccgagcacgaaaagctgatcctgctggcccagctgaagcccgagaaggatagcgacgaagccgtgacatatagcctgggaaagtttgggcagagggccctggatttctacagcattcatgtgaccaaggagtccacccaccccgtgaagcccctggcccagatcgccggaaacagatacgcctccggacctgtgggaaaggccctgagcgacgcatgtatgggcacaatcgcctccttcctgtctaagtaccaggacatcatcatcgaacaccagaaggtggtgaagggcaaccagaagagactggagagcctgcgggagctggccggcaaggaaaacctggaataccctagcgtgaccctgccacctcagcctcacaccaaggagggcgttgatgcctacaacgaagtgatcgcccgggtgcgaatgtgggtgaacctgaacctgtggcagaagctgaagctaagcagagatgatgccaagcctctgctgagactgaagggattcccttcctttcctctggtcgagagacaggccaacgaagtggactggtgggacatggtgtgtaacgtgaagaagctgatcaacgagaaaaaggaggatggcaaggtgttttggcagaatctggctggctacaagagacaggaagccctgagaccatacctgagcagcgaggaagatcggaagaagggaaagaaattcgctcggtaccagctgggcgacctgctgctgcacctggaaaagaagcacggcgaggactggggaaaggtgtacgacgaggcctgggagcggattgacaagaaagtggaaggcctgagcaagcacatcaagctggaagaggaacggagaagcgaggacgcccagagcaaggccgccctgaccgactggctgcgggctaaggccagcttcgtgatcgagggcctgaaggaggccgacaaggacgagttctgcagatgcgagctgaagctgcagaagtggtacggggacctgcggggaaagcccttcgccatcgaagccgagaacagcatcctggacatcagcggcttcagcaagcagtacaactgtgccttcatctggcagaaggacggcgtgaagaagctgaacctgtacctgatcatcaactacttcaagggcggcaagctgcggttcaagaagatcaaacctgaagccttcgaagccaacagattctacaccgtgatcaacaaaaagagcggcgagatcgtgcccatggaggtgaacttcaacttcgacgaccccaacctgatcatcctgcctctggcctttggcaagagacagggcagagaattcatctggaacgacctgctgtccctggaaaccggcagcctgaagctggccaacggaagagtgatcgagaagacactgtacaacagaagaacccggcaggatgagcctgccctgttcgtggccctgaccttcgagcggcgggaggtcctggactcctccaatatcaaaccaatgaacctgatcggcgtggcaagaggcgaaaacatccccgccgtgatcgccctgaccgaccccgagggctgcccactgagccggtttaaggatagcctgggaaacccaacccacatcctgagaatcggcgagagctataaggagaagcagcggaccatccaggccaagaaggaggtggagcagcggagagccggcggctacagccggaagtacgccagcaaagccaagaatctggcagacgatatggtgagaaacaccgctagagatctgctgtactacgccgtgacccaggatgccatgctgatcttcgccaacctgagccggggcttcggccggcagggcaagcggaccttcatggccgagagacagtacacacggatggaggactggctgaccgccaagctggcctacgagggcctgagcaagacctacctgtccaagacactggcccagtacacctccaagacatgcagcaactgtgggtttaccatcaccagcgccgactacgacagggtgctggagaagctgaagaagacagcaacaggctggatgaccacaattaacggcaaggagctgaaggtggagggccagattacctactacaacagatacaagagacagaacgtagtcaaggacctgtccgtcgagctggatagactgagcgaagaatctgtgaacaacgacatctcctcctggacaaagggcagaagcggagaagctctgagcctcctgaagaaaagattctcccatagacccgtgcaggagaagttcgtgtgcctgaactgcggcttcgagacacacgcagccgagcaagccgccctgaacatcgccagatcctggctgttcctgcggagccaggagtacaagaaataccagacaaacaagacaaccggcaacaccgataagagagccttcgtcgagacctggcagtccttttaccggaagaagcttaaggaggtgtggaaacctgccgtgcggtctggcggatctggcggaggctccaccagccccaagaaaaagagaaaagtctaagctgccttctgcggggcttgccttctggccatgcccttcttctctcccttgcacctgtacctcttggtctttgaataaagcctgagtaggaaggctagcaaaaaaaaaaaaaaaaaaaaaaaaaaaaaaaaaaaaaaaaaaaaaaaaaaaaaaaaaaaaaaaaaaaaaaaaaaaaaaaagcccagccggctccccaacctctaccgaggagggcacctctgagtccgccacccccgagagcggccctggcacctccaccgagcccagcgagggcagcgcacccggcagccctgccggcagccccacctccacagaggagggaaccagcaccgagcccagcgaaggcagcgccccaggcaccagcaccgagcctagtgagcaggagattaaacggatcaacaagatcagaagaagacttgtgaaagacagcaacaccaagaaggccggcaagacaggccccatgaaaaccctgctggttagagtgatgacacccgatctgagagagcggctggaaaacctgagaaagaagcctgaaaatatcccccagcccatcagcaatacatctagagccaacctgaataagctgctgaccgattacaccgaaatgaagaaggcgatcctgcatgtgtactgggaagagttccagaaggaccctgtgggcctgatgagccgggtggcccagcctgccagcaagaagatcgatcagaacaagctgaaacctgagatggacgagaagggcaacctgaccaccgccggctttgcctgctctcagtgtggccagcccctgttcgtgtacaagctggagcaggtgtctgagaagggcaaggcttacaccaactacttcggacggtgcaatgtggccgagcacgaaaagctgatcctgctggcccagctgaagcccgagaaggatagcgacgaagccgtgacatatagcctgggaaagtttgggcagagggccctggatttctacagcattcatgtgaccaaggagtccacccaccccgtgaagcccctggcccagatcgccggaaacagatacgcctccggacctgtgggaaaggccctgagcgacgcatgtatgggcacaatcgcctccttcctgtctaagtaccaggacatcatcatcgaacaccagaaggtggtgaagggcaaccagaagagactggagagcctgcgggagctggccggcaaggaaaacctggaataccctagcgtgaccctgccacctcagcctcacaccaaggagggcgttgatgcctacaacgaagtgatcgcccgggtgcgaatgtgggtgaacctgaacctgtggcagaagctgaagctaagcagagatgatgccaagcctctgctgagactgaagggattcccttcctttcctctggtcgagagacaggccaacgaagtggactggtgggacatggtgtgtaacgtgaagaagctgatcaacgagaaaaaggaggatggcaaggtgttttggcagaatctggctggctacaagagacaggaagccctgagaccatacctgagcagcgaggaagatcggaagaagggaaagaaattcgctcggtaccagctgggcgacctgctgctgcacctggaaaagaagcacggcgaggactggggaaaggtgtacgacgaggcctgggagcggattgacaagaaagtggaaggcctgagcaagcacatcaagctggaagaggaacggagaagcgaggacgcccagagcaaggccgccctgaccgactggctgcgggctaaggccagcttcgtgatcgagggcctgaaggaggccgacaaggacgagttctgcagatgcgagctgaagctgcagaagtggtacggggacctgcggggaaagcccttcgccatcgaagccgagaacagcatcctggacatcagcggcttcagcaagcagtacaactgtgccttcatctggcagaaggacggcgtgaagaagctgaacctgtacctgatcatcaactacttcaagggcggcaagctgcggttcaagaagatcaaacctgaagccttcgaagccaacagattctacaccgtgatcaacaaaaagagcggcgagatcgtgcccatggaggtgaacttcaacttcgacgaccccaacctgatcatcctgcctctggcctttggcaagagacagggcagagaattcatctggaacgacctgctgtccctggaaaccggcagcctgaagctggccaacggaagagtgatcgagaagacactgtacaacagaagaacccggcaggatgagcctgccctgttcgtggccctgaccttcgagcggcgggaggtcctggactcctccaatatcaaaccaatgaacctgatcggcgtggcaagaggcgaaaacatccccgccgtgatcgccctgaccgaccccgagggctgcccactgagccggtttaaggatagcctgggaaacccaacccacatcctgagaatcggcgagagctataaggagaagcagcggaccatccaggccaagaaggaggtggagcagcggagagccggcggctacagccggaagtacgccagcaaagccaagaatctggcagacgatatggtgagaaacaccgctagagatctgctgtactacgccgtgacccaggatgccatgctgatcttcgccaacctgagccggggcttcggccggcagggcaagcggaccttcatggccgagagacagtacacacggatggaggactggctgaccgccaagctggcctacgagggcctgagcaagacctacctgtccaagacactggcccagtacacctccaagacatgcagcaactgtgggtttaccatcaccagcgccgactacgacagggtgctggagaagctgaagaagacagcaacaggctggatgaccacaattaacggcaaggagctgaaggtggagggccagattacctactacaacagatacaagagacagaacgtagtcaaggacctgtccgtcgagctggatagactgagcgaagaatctgtgaacaacgacatctcctcctggacaaagggcagaagcggagaagctctgagcctcctgaagaaaagattctcccatagacccgtgcaggagaagttcgtgtgcctgaactgcggcttcgagacacacgcagccgagcaagccgccctgaacatcgccagatcctggctgttcctgcggagccaggagtacaagaaataccagacaaacaagacaaccggcaacaccgataagagagccttcgtcgagacctggcagtccttttaccggaagaagcttaaggaggtgtggaaacctgccgtgcggtctggcggatctggcggaggctccaccagccccaagaaaaagagaaaagtctaagctgccttctgcggggcttgccttctggccatgcccttcttctctcccttgcacctgtacctcttggtctttgaataaagcctgagtaggaaggctagcaaaaaaaaaaaaaaaaaaaaaaaaaaaaaaaaaaaaaaaaaaaaaaaaaaaaaaaaaaaaaaaaaaaaaaaaaaaaaaaa

SEQ ID NO: 9616 - RNA, 8787 nt, synthetic construct
  source 1..8787: mol_type = other RNA
aggaaataagagagaaaagaagagtaagaagaaatataagagccaccatggcccctaagaagaagcgtaaagtgagccggatgaaccacgaccaggagttcgacccccctaaggtgtaccctcccgtccccgccgagaagagaaagcccatccgggtcctgagcctgttcgatggcatcgccaccggtctgctggtgctgaaggacctgggcatccaggtggataggtacattgcctccgaggtgtgcgaggactccatcaccgtgggaatggtgcgtcatcagggcaagatcatgtacgtgggcgacgtgcggagcgtgacacagaagcatatccaggagtggggccctttcgacctggtgatcggcggcagcccttgcaatgacctgagcatcgtgaacccagcccggaagggcctgtacgagggaaccggcagactgttcttcgagttttacagactgctgcacgacgcccggcctaaggaaggcgacgaccggcccttcttttggctgttcgagaatgtggtggccatgggagtcagcgacaagcgggatattagccggttcctggagagcaaccccgtgatgatcgatgccaaggaagtgagcgccgcccaccgggccagatacttctggggcaatctgcctggcatgaacagacccctggccagcaccgtgaacgacaagctggagctgcaggagtgcctggagcacggccggatcgccaagttcagcaaggtgagaaccatcaccacccgaagcaacagcatcaaacaaggcaaggaccagcactttcctgtgttcatgaacgagaaggaggacatcctgtggtgtaccgagatggagagagtgttcgggttcccagtccactacacagatgtcagcaacatgtctagactggccagacagagactgctgggaagaagctggtccgtccctgtgatcagacacctgttcgcccctctgaaggagtacttcgcctgcgtgagcagcggcaacagcaacgccaacagccggggccccagcttctctagcggcctggtgccactgtccctgagagggagccacatgggccccatggagatctacaaaaccgtgagcgcctggaagcggcagcctgtgcgcgtgctgagcctgtttcggaatatcgataaagtcctgaaaagcctgggattcctggagagcggctctggctccggcggtggcaccctgaagtacgtggaggatgtgacaaacgtggtcagacgggatgtggagaagtggggccccttcgatctggtgtacggcagcacccaacccctgggcagctcttgtgaccggtgccctggctggtacatgtttcagttccaccggatcctgcagtacgccctgccgagacaggagtcccagcggccattcttttggattttcatggacaacttgctgctgaccgaggatgaccaggaaactaccactcggttcctgcagaccgaagccgtgaccctgcaggacgtgagaggccgggactaccagaacgccatgcgggtgtggtccaacatccctggactgaaaagcaagcacgcacctctgacccctaaagaagaggagtacctgcaggcccaggtgcggagcagaagcaagctggacgcccctaaggtggatctgctggtgaagaattgcctcctgcccctgagagagtacttcaagtatttcagccagaatagtctgcccctgggaggcagcggcggcggcagcaaggcccccgtgaccttcggcgacctggtgatctacttcagccaggaggagtgggagtggctgagccccatccagaaggacctgtacgaggaggtgatgctggagaactaccacaccctggtgagcctgggcctggtgagcaggaggcccaacatcatcaccctgctggagaagggcaaggccccctggatggtggagcccagcaggaggaggaggggccccgagagcggcagcaagaggggcggcccaagcagcggcgcccctcctcccagcggcggcaggcggcccaagcagcggcgcccctcctcccagcggcggcagcccagccggctccccaacctctaccgaggagggcacctctgagtccgccacccccgagagcggccctggcacctccaccgagcccagcgagggcagcgcacccggcagccctgccggcagccccacctccacagaggagggaaccagcaccgagcccagcgaaggcagcgccccaggcaccagcaccgagcctagtgagcaggagattaaacggatcaacaagatcagaagaagacttgtgaaagacagcaacaccaagaaggccggcaagacaggccccatgaaaaccctgctggttagagtgatgacacccgatctgagagagcggctggaaaacctgagaaagaagcctgaaaatatcccccagcccatcagcaatacatctagagccaacctgaataagctgctgaccgattacaccgaaatgaagaaggcgatcctgcatgtgtactgggaagagttccagaaggaccctgtgggcctgatgagccgggtggcccagcctgccagcaagaagatcgatcagaacaagctgaaacctgagatggacgagaagggcaacctgaccaccgccggctttgcctgctctcagtgtggccagcccctgttcgtgtacaagctggagcaggtgtctgagaagggcaaggcttacaccaactacttcggacggtgcaatgtggccgagcacgaaaagctgatcctgctggcccagctgaagcccgagaaggatagcgacgaagccgtgacatatagcctgggaaagtttgggcagagggccctggatttctacagcattcatgtgaccaaggagtccacccaccccgtgaagcccctggcccagatcgccggaaacagatacgcctccggacctgtgggaaaggccctgagcgacgcatgtatgggcacaatcgcctccttcctgtctaagtaccaggacatcatcatcgaacaccagaaggtggtgaagggcaaccagaagagactggagagcctgcgggagctggccggcaaggaaaacctggaataccctagcgtgaccctgccacctcagcctcacaccaaggagggcgttgatgcctacaacgaagtgatcgcccgggtgcgaatgtgggtgaacctgaacctgtggcagaagctgaagctaagcagagatgatgccaagcctctgctgagactgaagggattcccttcctttcctctggtcgagagacaggccaacgaagtggactggtgggacatggtgtgtaacgtgaagaagctgatcaacgagaaaaaggaggatggcaaggtgttttggcagaatctggctggctacaagagacaggaagccctgagaccatacctgagcagcgaggaagatcggaagaagggaaagaaattcgctcggtaccagctgggcgacctgctgctgcacctggaaaagaagcacggcgaggactggggaaaggtgtacgacgaggcctgggagcggattgacaagaaagtggaaggcctgagcaagcacatcaagctggaagaggaacggagaagcgaggacgcccagagcaaggccgccctgaccgactggctgcgggctaaggccagcttcgtgatcgagggcctgaaggaggccgacaaggacgagttctgcagatgcgagctgaagctgcagaagtggtacggggacctgcggggaaagcccttcgccatcgaagccgagaacagcatcctggacatcagcggcttcagcaagcagtacaactgtgccttcatctggcagaaggacggcgtgaagaagctgaacctgtacctgatcatcaactacttcaagggcggcaagctgcggttcaagaagatcaaacctgaagccttcgaagccaacagattctacaccgtgatcaacaaaaagagcggcgagatcgtgcccatggaggtgaacttcaacttcgacgaccccaacctgatcatcctgcctctggcctttggcaagagacagggcagagaattcatctggaacgacctgctgtccctggaaaccggcagcctgaagctggccaacggaagagtgatcgagaagacactgtacaacagaagaacccggcaggatgagcctgccctgttcgtggccctgaccttcgagcggcgggaggtcctggactcctccaatatcaaaccaatgaacctgatcggcgtggcaagaggcgaaaacatccccgccgtgatcgccctgaccgaccccgagggctgcccactgagccggtttaaggatagcctgggaaacccaacccacatcctgagaatcggcgagagctataaggagaagcagcggaccatccaggccaagaaggaggtggagcagcggagagccggcggctacagccggaagtacgccagcaaagccaagaatctggcagacgatatggtgagaaacaccgctagagatctgctgtactacgccgtgacccaggatgccatgctgatcttcgccaacctgagccggggcttcggccggcagggcaagcggaccttcatggccgagagacagtacacacggatggaggactggctgaccgccaagctggcctacgagggcctgagcaagacctacctgtccaagacactggcccagtacacctccaagacatgcagcaactgtgggtttaccatcaccagcgccgactacgacagggtgctggagaagctgaagaagacagcaacaggctggatgaccacaattaacggcaaggagctgaaggtggagggccagattacctactacaacagatacaagagacagaacgtagtcaaggacctgtccgtcgagctggatagactgagcgaagaatctgtgaacaacgacatctcctcctggacaaagggcagaagcggagaagctctgagcctcctgaagaaaagattctcccatagacccgtgcaggagaagttcgtgtgcctgaactgcggcttcgagacacacgcagccgagcaagccgccctgaacatcgccagatcctggctgttcctgcggagccaggagtacaagaaataccagacaaacaagacaaccggcaacaccgataagagagccttcgtcgagacctggcagtccttttaccggaagaagcttaaggaggtgtggaaacctgccgtgcggtctggcggatctggcggaggctccaccagccccaagaaaaagagaaaagtctaagctgccttctgcggggcttgccttctggccatgcccttcttctctcccttgcacctgtacctcttggtctttgaataaagcctgagtaggaaggctagcaaaaaaaaaaaaaaaaaaaaaaaaaaaaaaaaaaaaaaaaaaaaaaaaaaaaaaaaaaaaaaaaaaaaaaaaaaaaaaaagcccagccggctccccaacctctaccgaggagggcacctctgagtccgccacccccgagagcggccctggcacctccaccgagcccagcgagggcagcgcacccggcagccctgccggcagccccacctccacagaggagggaaccagcaccgagcccagcgaaggcagcgccccaggcaccagcaccgagcctagtgagcaggagattaaacggatcaacaagatcagaagaagacttgtgaaagacagcaacaccaagaaggccggcaagacaggccccatgaaaaccctgctggttagagtgatgacacccgatctgagagagcggctggaaaacctgagaaagaagcctgaaaatatcccccagcccatcagcaatacatctagagccaacctgaataagctgctgaccgattacaccgaaatgaagaaggcgatcctgcatgtgtactgggaagagttccagaaggaccctgtgggcctgatgagccgggtggcccagcctgccagcaagaagatcgatcagaacaagctgaaacctgagatggacgagaagggcaacctgaccaccgccggctttgcctgctctcagtgtggccagcccctgttcgtgtacaagctggagcaggtgtctgagaagggcaaggcttacaccaactacttcggacggtgcaatgtggccgagcacgaaaagctgatcctgctggcccagctgaagcccgagaaggatagcgacgaagccgtgacatatagcctgggaaagtttgggcagagggccctggatttctacagcattcatgtgaccaaggagtccacccaccccgtgaagcccctggcccagatcgccggaaacagatacgcctccggacctgtgggaaaggccctgagcgacgcatgtatgggcacaatcgcctccttcctgtctaagtaccaggacatcatcatcgaacaccagaaggtggtgaagggcaaccagaagagactggagagcctgcgggagctggccggcaaggaaaacctggaataccctagcgtgaccctgccacctcagcctcacaccaaggagggcgttgatgcctacaacgaagtgatcgcccgggtgcgaatgtgggtgaacctgaacctgtggcagaagctgaagctaagcagagatgatgccaagcctctgctgagactgaagggattcccttcctttcctctggtcgagagacaggccaacgaagtggactggtgggacatggtgtgtaacgtgaagaagctgatcaacgagaaaaaggaggatggcaaggtgttttggcagaatctggctggctacaagagacaggaagccctgagaccatacctgagcagcgaggaagatcggaagaagggaaagaaattcgctcggtaccagctgggcgacctgctgctgcacctggaaaagaagcacggcgaggactggggaaaggtgtacgacgaggcctgggagcggattgacaagaaagtggaaggcctgagcaagcacatcaagctggaagaggaacggagaagcgaggacgcccagagcaaggccgccctgaccgactggctgcgggctaaggccagcttcgtgatcgagggcctgaaggaggccgacaaggacgagttctgcagatgcgagctgaagctgcagaagtggtacggggacctgcggggaaagcccttcgccatcgaagccgagaacagcatcctggacatcagcggcttcagcaagcagtacaactgtgccttcatctggcagaaggacggcgtgaagaagctgaacctgtacctgatcatcaactacttcaagggcggcaagctgcggttcaagaagatcaaacctgaagccttcgaagccaacagattctacaccgtgatcaacaaaaagagcggcgagatcgtgcccatggaggtgaacttcaacttcgacgaccccaacctgatcatcctgcctctggcctttggcaagagacagggcagagaattcatctggaacgacctgctgtccctggaaaccggcagcctgaagctggccaacggaagagtgatcgagaagacactgtacaacagaagaacccggcaggatgagcctgccctgttcgtggccctgaccttcgagcggcgggaggtcctggactcctccaatatcaaaccaatgaacctgatcggcgtggcaagaggcgaaaacatccccgccgtgatcgccctgaccgaccccgagggctgcccactgagccggtttaaggatagcctgggaaacccaacccacatcctgagaatcggcgagagctataaggagaagcagcggaccatccaggccaagaaggaggtggagcagcggagagccggcggctacagccggaagtacgccagcaaagccaagaatctggcagacgatatggtgagaaacaccgctagagatctgctgtactacgccgtgacccaggatgccatgctgatcttcgccaacctgagccggggcttcggccggcagggcaagcggaccttcatggccgagagacagtacacacggatggaggactggctgaccgccaagctggcctacgagggcctgagcaagacctacctgtccaagacactggcccagtacacctccaagacatgcagcaactgtgggtttaccatcaccagcgccgactacgacagggtgctggagaagctgaagaagacagcaacaggctggatgaccacaattaacggcaaggagctgaaggtggagggccagattacctactacaacagatacaagagacagaacgtagtcaaggacctgtccgtcgagctggatagactgagcgaagaatctgtgaacaacgacatctcctcctggacaaagggcagaagcggagaagctctgagcctcctgaagaaaagattctcccatagacccgtgcaggagaagttcgtgtgcctgaactgcggcttcgagacacacgcagccgagcaagccgccctgaacatcgccagatcctggctgttcctgcggagccaggagtacaagaaataccagacaaacaagacaaccggcaacaccgataagagagccttcgtcgagacctggcagtccttttaccggaagaagcttaaggaggtgtggaaacctgccgtgcggtctggcggatctggcggaggctccaccagccccaagaaaaagagaaaagtctaagctgccttctgcggggcttgccttctggccatgcccttcttctctcccttgcacctgtacctcttggtctttgaataaagcctgagtaggaaggctagcaaaaaaaaaaaaaaaaaaaaaaaaaaaaaaaaaaaaaaaaaaaaaaaaaaaaaaaaaaaaaaaaaaaaaaaaaaaaaaaa

SEQ ID NO: 9617 - RNA, 8787 nt, synthetic construct
  source 1..8787: mol_type = other RNA
aggaaataagagagaaaagaagagtaagaagaaatataagagccaccatggcccctaagaagaagcgtaaagtgagccggatgaaccacgaccaggagttcgacccccctaaggtgtaccctcccgtccccgccgagaagagaaagcccatccgggtcctgagcctgttcgatggcatcgccaccggtctgctggtgctgaaggacctgggcatccaggtggataggtacattgcctccgaggtgtgcgaggactccatcaccgtgggaatggtgcgtcatcagggcaagatcatgtacgtgggcgacgtgcggagcgtgacacagaagcatatccaggagtggggccctttcgacctggtgatcggcggcagcccttgcaatgacctgagcatcgtgaacccagcccggaagggcctgtacgagggaaccggcagactgttcttcgagttttacagactgctgcacgacgcccggcctaaggaaggcgacgaccggcccttcttttggctgttcgagaatgtggtggccatgggagtcagcgacaagcgggatattagccggttcctggagagcaaccccgtgatgatcgatgccaaggaagtgagcgccgcccaccgggccagatacttctggggcaatctgcctggcatgaacagacccctggccagcaccgtgaacgacaagctggagctgcaggagtgcctggagcacggccggatcgccaagttcagcaaggtgagaaccatcaccacccgaagcaacagcatcaaacaaggcaaggaccagcactttcctgtgttcatgaacgagaaggaggacatcctgtggtgtaccgagatggagagagtgttcgggttcccagtccactacacagatgtcagcaacatgtctagactggccagacagagactgctgggaagaagctggtccgtccctgtgatcagacacctgttcgcccctctgaaggagtacttcgcctgcgtgagcagcggcaacagcaacgccaacagccggggccccagcttctctagcggcctggtgccactgtccctgagagggagccacatgggccccatggagatctacaaaaccgtgagcgcctggaagcggcagcctgtgcgcgtgctgagcctgtttcggaatatcgataaagtcctgaaaagcctgggattcctggagagcggctctggctccggcggtggcaccctgaagtacgtggaggatgtgacaaacgtggtcagacgggatgtggagaagtggggccccttcgatctggtgtacggcagcacccaacccctgggcagctcttgtgaccggtgccctggctggtacatgtttcagttccaccggatcctgcagtacgccctgccgagacaggagtcccagcggccattcttttggattttcatggacaacttgctgctgaccgaggatgaccaggaaactaccactcggttcctgcagaccgaagccgtgaccctgcaggacgtgagaggccgggactaccagaacgccatgcgggtgtggtccaacatccctggactgaaaagcaagcacgcacctctgacccctaaagaagaggagtacctgcaggcccaggtgcggagcagaagcaagctggacgcccctaaggtggatctgctggtgaagaattgcctcctgcccctgagagagtacttcaagtatttcagccagaatagtctgcccctgggaggcagcggcggcggcgagcccgtgagcttcgaggaggtggccgtgtacttcagcagggaggagtgggccctgctggaccccgcccagagggccctgtactgggacgtgatgctggagacctacgagtgcgtggccagcctggcccccctgcccggccccaagcccatggtgatcagcctgctggaggagggcgaggagccctggatccccgacgtgggcagccccgaggccgtggccggcgacgtgagccccggcgagggcggcccaagcagcggcgcccctcctcccagcggcggcaggcggcccaagcagcggcgcccctcctcccagcggcggcagcccagccggctccccaacctctaccgaggagggcacctctgagtccgccacccccgagagcggccctggcacctccaccgagcccagcgagggcagcgcacccggcagccctgccggcagccccacctccacagaggagggaaccagcaccgagcccagcgaaggcagcgccccaggcaccagcaccgagcctagtgagcaggagattaaacggatcaacaagatcagaagaagacttgtgaaagacagcaacaccaagaaggccggcaagacaggccccatgaaaaccctgctggttagagtgatgacacccgatctgagagagcggctggaaaacctgagaaagaagcctgaaaatatcccccagcccatcagcaatacatctagagccaacctgaataagctgctgaccgattacaccgaaatgaagaaggcgatcctgcatgtgtactgggaagagttccagaaggaccctgtgggcctgatgagccgggtggcccagcctgccagcaagaagatcgatcagaacaagctgaaacctgagatggacgagaagggcaacctgaccaccgccggctttgcctgctctcagtgtggccagcccctgttcgtgtacaagctggagcaggtgtctgagaagggcaaggcttacaccaactacttcggacggtgcaatgtggccgagcacgaaaagctgatcctgctggcccagctgaagcccgagaaggatagcgacgaagccgtgacatatagcctgggaaagtttgggcagagggccctggatttctacagcattcatgtgaccaaggagtccacccaccccgtgaagcccctggcccagatcgccggaaacagatacgcctccggacctgtgggaaaggccctgagcgacgcatgtatgggcacaatcgcctccttcctgtctaagtaccaggacatcatcatcgaacaccagaaggtggtgaagggcaaccagaagagactggagagcctgcgggagctggccggcaaggaaaacctggaataccctagcgtgaccctgccacctcagcctcacaccaaggagggcgttgatgcctacaacgaagtgatcgcccgggtgcgaatgtgggtgaacctgaacctgtggcagaagctgaagctaagcagagatgatgccaagcctctgctgagactgaagggattcccttcctttcctctggtcgagagacaggccaacgaagtggactggtgggacatggtgtgtaacgtgaagaagctgatcaacgagaaaaaggaggatggcaaggtgttttggcagaatctggctggctacaagagacaggaagccctgagaccatacctgagcagcgaggaagatcggaagaagggaaagaaattcgctcggtaccagctgggcgacctgctgctgcacctggaaaagaagcacggcgaggactggggaaaggtgtacgacgaggcctgggagcggattgacaagaaagtggaaggcctgagcaagcacatcaagctggaagaggaacggagaagcgaggacgcccagagcaaggccgccctgaccgactggctgcgggctaaggccagcttcgtgatcgagggcctgaaggaggccgacaaggacgagttctgcagatgcgagctgaagctgcagaagtggtacggggacctgcggggaaagcccttcgccatcgaagccgagaacagcatcctggacatcagcggcttcagcaagcagtacaactgtgccttcatctggcagaaggacggcgtgaagaagctgaacctgtacctgatcatcaactacttcaagggcggcaagctgcggttcaagaagatcaaacctgaagccttcgaagccaacagattctacaccgtgatcaacaaaaagagcggcgagatcgtgcccatggaggtgaacttcaacttcgacgaccccaacctgatcatcctgcctctggcctttggcaagagacagggcagagaattcatctggaacgacctgctgtccctggaaaccggcagcctgaagctggccaacggaagagtgatcgagaagacactgtacaacagaagaacccggcaggatgagcctgccctgttcgtggccctgaccttcgagcggcgggaggtcctggactcctccaatatcaaaccaatgaacctgatcggcgtggcaagaggcgaaaacatccccgccgtgatcgccctgaccgaccccgagggctgcccactgagccggtttaaggatagcctgggaaacccaacccacatcctgagaatcggcgagagctataaggagaagcagcggaccatccaggccaagaaggaggtggagcagcggagagccggcggctacagccggaagtacgccagcaaagccaagaatctggcagacgatatggtgagaaacaccgctagagatctgctgtactacgccgtgacccaggatgccatgctgatcttcgccaacctgagccggggcttcggccggcagggcaagcggaccttcatggccgagagacagtacacacggatggaggactggctgaccgccaagctggcctacgagggcctgagcaagacctacctgtccaagacactggcccagtacacctccaagacatgcagcaactgtgggtttaccatcaccagcgccgactacgacagggtgctggagaagctgaagaagacagcaacaggctggatgaccacaattaacggcaaggagctgaaggtggagggccagattacctactacaacagatacaagagacagaacgtagtcaaggacctgtccgtcgagctggatagactgagcgaagaatctgtgaacaacgacatctcctcctggacaaagggcagaagcggagaagctctgagcctcctgaagaaaagattctcccatagacccgtgcaggagaagttcgtgtgcctgaactgcggcttcgagacacacgcagccgagcaagccgccctgaacatcgccagatcctggctgttcctgcggagccaggagtacaagaaataccagacaaacaagacaaccggcaacaccgataagagagccttcgtcgagacctggcagtccttttaccggaagaagcttaaggaggtgtggaaacctgccgtgcggtctggcggatctggcggaggctccaccagccccaagaaaaagagaaaagtctaagctgccttctgcggggcttgccttctggccatgcccttcttctctcccttgcacctgtacctcttggtctttgaataaagcctgagtaggaaggctagcaaaaaaaaaaaaaaaaaaaaaaaaaaaaaaaaaaaaaaaaaaaaaaaaaaaaaaaaaaaaaaaaaaaaaaaaaaaaaaaagcccagccggctccccaacctctaccgaggagggcacctctgagtccgccacccccgagagcggccctggcacctccaccgagcccagcgagggcagcgcacccggcagccctgccggcagccccacctccacagaggagggaaccagcaccgagcccagcgaaggcagcgccccaggcaccagcaccgagcctagtgagcaggagattaaacggatcaacaagatcagaagaagacttgtgaaagacagcaacaccaagaaggccggcaagacaggccccatgaaaaccctgctggttagagtgatgacacccgatctgagagagcggctggaaaacctgagaaagaagcctgaaaatatcccccagcccatcagcaatacatctagagccaacctgaataagctgctgaccgattacaccgaaatgaagaaggcgatcctgcatgtgtactgggaagagttccagaaggaccctgtgggcctgatgagccgggtggcccagcctgccagcaagaagatcgatcagaacaagctgaaacctgagatggacgagaagggcaacctgaccaccgccggctttgcctgctctcagtgtggccagcccctgttcgtgtacaagctggagcaggtgtctgagaagggcaaggcttacaccaactacttcggacggtgcaatgtggccgagcacgaaaagctgatcctgctggcccagctgaagcccgagaaggatagcgacgaagccgtgacatatagcctgggaaagtttgggcagagggccctggatttctacagcattcatgtgaccaaggagtccacccaccccgtgaagcccctggcccagatcgccggaaacagatacgcctccggacctgtgggaaaggccctgagcgacgcatgtatgggcacaatcgcctccttcctgtctaagtaccaggacatcatcatcgaacaccagaaggtggtgaagggcaaccagaagagactggagagcctgcgggagctggccggcaaggaaaacctggaataccctagcgtgaccctgccacctcagcctcacaccaaggagggcgttgatgcctacaacgaagtgatcgcccgggtgcgaatgtgggtgaacctgaacctgtggcagaagctgaagctaagcagagatgatgccaagcctctgctgagactgaagggattcccttcctttcctctggtcgagagacaggccaacgaagtggactggtgggacatggtgtgtaacgtgaagaagctgatcaacgagaaaaaggaggatggcaaggtgttttggcagaatctggctggctacaagagacaggaagccctgagaccatacctgagcagcgaggaagatcggaagaagggaaagaaattcgctcggtaccagctgggcgacctgctgctgcacctggaaaagaagcacggcgaggactggggaaaggtgtacgacgaggcctgggagcggattgacaagaaagtggaaggcctgagcaagcacatcaagctggaagaggaacggagaagcgaggacgcccagagcaaggccgccctgaccgactggctgcgggctaaggccagcttcgtgatcgagggcctgaaggaggccgacaaggacgagttctgcagatgcgagctgaagctgcagaagtggtacggggacctgcggggaaagcccttcgccatcgaagccgagaacagcatcctggacatcagcggcttcagcaagcagtacaactgtgccttcatctggcagaaggacggcgtgaagaagctgaacctgtacctgatcatcaactacttcaagggcggcaagctgcggttcaagaagatcaaacctgaagccttcgaagccaacagattctacaccgtgatcaacaaaaagagcggcgagatcgtgcccatggaggtgaacttcaacttcgacgaccccaacctgatcatcctgcctctggcctttggcaagagacagggcagagaattcatctggaacgacctgctgtccctggaaaccggcagcctgaagctggccaacggaagagtgatcgagaagacactgtacaacagaagaacccggcaggatgagcctgccctgttcgtggccctgaccttcgagcggcgggaggtcctggactcctccaatatcaaaccaatgaacctgatcggcgtggcaagaggcgaaaacatccccgccgtgatcgccctgaccgaccccgagggctgcccactgagccggtttaaggatagcctgggaaacccaacccacatcctgagaatcggcgagagctataaggagaagcagcggaccatccaggccaagaaggaggtggagcagcggagagccggcggctacagccggaagtacgccagcaaagccaagaatctggcagacgatatggtgagaaacaccgctagagatctgctgtactacgccgtgacccaggatgccatgctgatcttcgccaacctgagccggggcttcggccggcagggcaagcggaccttcatggccgagagacagtacacacggatggaggactggctgaccgccaagctggcctacgagggcctgagcaagacctacctgtccaagacactggcccagtacacctccaagacatgcagcaactgtgggtttaccatcaccagcgccgactacgacagggtgctggagaagctgaagaagacagcaacaggctggatgaccacaattaacggcaaggagctgaaggtggagggccagattacctactacaacagatacaagagacagaacgtagtcaaggacctgtccgtcgagctggatagactgagcgaagaatctgtgaacaacgacatctcctcctggacaaagggcagaagcggagaagctctgagcctcctgaagaaaagattctcccatagacccgtgcaggagaagttcgtgtgcctgaactgcggcttcgagacacacgcagccgagcaagccgccctgaacatcgccagatcctggctgttcctgcggagccaggagtacaagaaataccagacaaacaagacaaccggcaacaccgataagagagccttcgtcgagacctggcagtccttttaccggaagaagcttaaggaggtgtggaaacctgccgtgcggtctggcggatctggcggaggctccaccagccccaagaaaaagagaaaagtctaagctgccttctgcggggcttgccttctggccatgcccttcttctctcccttgcacctgtacctcttggtctttgaataaagcctgagtaggaaggctagcaaaaaaaaaaaaaaaaaaaaaaaaaaaaaaaaaaaaaaaaaaaaaaaaaaaaaaaaaaaaaaaaaaaaaaaaaaaaaaaa

SEQ ID NO: 9618 - RNA, 8787 nt, synthetic construct
  source 1..8787: mol_type = other RNA
aggaaataagagagaaaagaagagtaagaagaaatataagagccaccatggcccctaagaagaagcgtaaagtgagccggatgaaccacgaccaggagttcgacccccctaaggtgtaccctcccgtccccgccgagaagagaaagcccatccgggtcctgagcctgttcgatggcatcgccaccggtctgctggtgctgaaggacctgggcatccaggtggataggtacattgcctccgaggtgtgcgaggactccatcaccgtgggaatggtgcgtcatcagggcaagatcatgtacgtgggcgacgtgcggagcgtgacacagaagcatatccaggagtggggccctttcgacctggtgatcggcggcagcccttgcaatgacctgagcatcgtgaacccagcccggaagggcctgtacgagggaaccggcagactgttcttcgagttttacagactgctgcacgacgcccggcctaaggaaggcgacgaccggcccttcttttggctgttcgagaatgtggtggccatgggagtcagcgacaagcgggatattagccggttcctggagagcaaccccgtgatgatcgatgccaaggaagtgagcgccgcccaccgggccagatacttctggggcaatctgcctggcatgaacagacccctggccagcaccgtgaacgacaagctggagctgcaggagtgcctggagcacggccggatcgccaagttcagcaaggtgagaaccatcaccacccgaagcaacagcatcaaacaaggcaaggaccagcactttcctgtgttcatgaacgagaaggaggacatcctgtggtgtaccgagatggagagagtgttcgggttcccagtccactacacagatgtcagcaacatgtctagactggccagacagagactgctgggaagaagctggtccgtccctgtgatcagacacctgttcgcccctctgaaggagtacttcgcctgcgtgagcagcggcaacagcaacgccaacagccggggccccagcttctctagcggcctggtgccactgtccctgagagggagccacatgggccccatggagatctacaaaaccgtgagcgcctggaagcggcagcctgtgcgcgtgctgagcctgtttcggaatatcgataaagtcctgaaaagcctgggattcctggagagcggctctggctccggcggtggcaccctgaagtacgtggaggatgtgacaaacgtggtcagacgggatgtggagaagtggggccccttcgatctggtgtacggcagcacccaacccctgggcagctcttgtgaccggtgccctggctggtacatgtttcagttccaccggatcctgcagtacgccctgccgagacaggagtcccagcggccattcttttggattttcatggacaacttgctgctgaccgaggatgaccaggaaactaccactcggttcctgcagaccgaagccgtgaccctgcaggacgtgagaggccgggactaccagaacgccatgcgggtgtggtccaacatccctggactgaaaagcaagcacgcacctctgacccctaaagaagaggagtacctgcaggcccaggtgcggagcagaagcaagctggacgcccctaaggtggatctgctggtgaagaattgcctcctgcccctgagagagtacttcaagtatttcagccagaatagtctgcccctgggaggcagcggcggcggcgcccagggcagcctgaccctgaaggacgtggccgtggacttcacctgggaggagtggcagctgctggaccccgaccagaaggacctgtacagggacgtgatgctggagaactacagcaacctggtgagcgtgggctaccaggtgaacaagcccgacatcctgagcatgctggagcagggcgagcccccctggaccctggaggacgaggtgcacagccacccccaccccgagaccgacaaggtgggcggcccaagcagcggcgcccctcctcccagcggcggcaggcggcccaagcagcggcgcccctcctcccagcggcggcagcccagccggctccccaacctctaccgaggagggcacctctgagtccgccacccccgagagcggccctggcacctccaccgagcccagcgagggcagcgcacccggcagccctgccggcagccccacctccacagaggagggaaccagcaccgagcccagcgaaggcagcgccccaggcaccagcaccgagcctagtgagcaggagattaaacggatcaacaagatcagaagaagacttgtgaaagacagcaacaccaagaaggccggcaagacaggccccatgaaaaccctgctggttagagtgatgacacccgatctgagagagcggctggaaaacctgagaaagaagcctgaaaatatcccccagcccatcagcaatacatctagagccaacctgaataagctgctgaccgattacaccgaaatgaagaaggcgatcctgcatgtgtactgggaagagttccagaaggaccctgtgggcctgatgagccgggtggcccagcctgccagcaagaagatcgatcagaacaagctgaaacctgagatggacgagaagggcaacctgaccaccgccggctttgcctgctctcagtgtggccagcccctgttcgtgtacaagctggagcaggtgtctgagaagggcaaggcttacaccaactacttcggacggtgcaatgtggccgagcacgaaaagctgatcctgctggcccagctgaagcccgagaaggatagcgacgaagccgtgacatatagcctgggaaagtttgggcagagggccctggatttctacagcattcatgtgaccaaggagtccacccaccccgtgaagcccctggcccagatcgccggaaacagatacgcctccggacctgtgggaaaggccctgagcgacgcatgtatgggcacaatcgcctccttcctgtctaagtaccaggacatcatcatcgaacaccagaaggtggtgaagggcaaccagaagagactggagagcctgcgggagctggccggcaaggaaaacctggaataccctagcgtgaccctgccacctcagcctcacaccaaggagggcgttgatgcctacaacgaagtgatcgcccgggtgcgaatgtgggtgaacctgaacctgtggcagaagctgaagctaagcagagatgatgccaagcctctgctgagactgaagggattcccttcctttcctctggtcgagagacaggccaacgaagtggactggtgggacatggtgtgtaacgtgaagaagctgatcaacgagaaaaaggaggatggcaaggtgttttggcagaatctggctggctacaagagacaggaagccctgagaccatacctgagcagcgaggaagatcggaagaagggaaagaaattcgctcggtaccagctgggcgacctgctgctgcacctggaaaagaagcacggcgaggactggggaaaggtgtacgacgaggcctgggagcggattgacaagaaagtggaaggcctgagcaagcacatcaagctggaagaggaacggagaagcgaggacgcccagagcaaggccgccctgaccgactggctgcgggctaaggccagcttcgtgatcgagggcctgaaggaggccgacaaggacgagttctgcagatgcgagctgaagctgcagaagtggtacggggacctgcggggaaagcccttcgccatcgaagccgagaacagcatcctggacatcagcggcttcagcaagcagtacaactgtgccttcatctggcagaaggacggcgtgaagaagctgaacctgtacctgatcatcaactacttcaagggcggcaagctgcggttcaagaagatcaaacctgaagccttcgaagccaacagattctacaccgtgatcaacaaaaagagcggcgagatcgtgcccatggaggtgaacttcaacttcgacgaccccaacctgatcatcctgcctctggcctttggcaagagacagggcagagaattcatctggaacgacctgctgtccctggaaaccggcagcctgaagctggccaacggaagagtgatcgagaagacactgtacaacagaagaacccggcaggatgagcctgccctgttcgtggccctgaccttcgagcggcgggaggtcctggactcctccaatatcaaaccaatgaacctgatcggcgtggcaagaggcgaaaacatccccgccgtgatcgccctgaccgaccccgagggctgcccactgagccggtttaaggatagcctgggaaacccaacccacatcctgagaatcggcgagagctataaggagaagcagcggaccatccaggccaagaaggaggtggagcagcggagagccggcggctacagccggaagtacgccagcaaagccaagaatctggcagacgatatggtgagaaacaccgctagagatctgctgtactacgccgtgacccaggatgccatgctgatcttcgccaacctgagccggggcttcggccggcagggcaagcggaccttcatggccgagagacagtacacacggatggaggactggctgaccgccaagctggcctacgagggcctgagcaagacctacctgtccaagacactggcccagtacacctccaagacatgcagcaactgtgggtttaccatcaccagcgccgactacgacagggtgctggagaagctgaagaagacagcaacaggctggatgaccacaattaacggcaaggagctgaaggtggagggccagattacctactacaacagatacaagagacagaacgtagtcaaggacctgtccgtcgagctggatagactgagcgaagaatctgtgaacaacgacatctcctcctggacaaagggcagaagcggagaagctctgagcctcctgaagaaaagattctcccatagacccgtgcaggagaagttcgtgtgcctgaactgcggcttcgagacacacgcagccgagcaagccgccctgaacatcgccagatcctggctgttcctgcggagccaggagtacaagaaataccagacaaacaagacaaccggcaacaccgataagagagccttcgtcgagacctggcagtccttttaccggaagaagcttaaggaggtgtggaaacctgccgtgcggtctggcggatctggcggaggctccaccagccccaagaaaaagagaaaagtctaagctgccttctgcggggcttgccttctggccatgcccttcttctctcccttgcacctgtacctcttggtctttgaataaagcctgagtaggaaggctagcaaaaaaaaaaaaaaaaaaaaaaaaaaaaaaaaaaaaaaaaaaaaaaaaaaaaaaaaaaaaaaaaaaaaaaaaaaaaaaaagcccagccggctccccaacctctaccgaggagggcacctctgagtccgccacccccgagagcggccctggcacctccaccgagcccagcgagggcagcgcacccggcagccctgccggcagccccacctccacagaggagggaaccagcaccgagcccagcgaaggcagcgccccaggcaccagcaccgagcctagtgagcaggagattaaacggatcaacaagatcagaagaagacttgtgaaagacagcaacaccaagaaggccggcaagacaggccccatgaaaaccctgctggttagagtgatgacacccgatctgagagagcggctggaaaacctgagaaagaagcctgaaaatatcccccagcccatcagcaatacatctagagccaacctgaataagctgctgaccgattacaccgaaatgaagaaggcgatcctgcatgtgtactgggaagagttccagaaggaccctgtgggcctgatgagccgggtggcccagcctgccagcaagaagatcgatcagaacaagctgaaacctgagatggacgagaagggcaacctgaccaccgccggctttgcctgctctcagtgtggccagcccctgttcgtgtacaagctggagcaggtgtctgagaagggcaaggcttacaccaactacttcggacggtgcaatgtggccgagcacgaaaagctgatcctgctggcccagctgaagcccgagaaggatagcgacgaagccgtgacatatagcctgggaaagtttgggcagagggccctggatttctacagcattcatgtgaccaaggagtccacccaccccgtgaagcccctggcccagatcgccggaaacagatacgcctccggacctgtgggaaaggccctgagcgacgcatgtatgggcacaatcgcctccttcctgtctaagtaccaggacatcatcatcgaacaccagaaggtggtgaagggcaaccagaagagactggagagcctgcgggagctggccggcaaggaaaacctggaataccctagcgtgaccctgccacctcagcctcacaccaaggagggcgttgatgcctacaacgaagtgatcgcccgggtgcgaatgtgggtgaacctgaacctgtggcagaagctgaagctaagcagagatgatgccaagcctctgctgagactgaagggattcccttcctttcctctggtcgagagacaggccaacgaagtggactggtgggacatggtgtgtaacgtgaagaagctgatcaacgagaaaaaggaggatggcaaggtgttttggcagaatctggctggctacaagagacaggaagccctgagaccatacctgagcagcgaggaagatcggaagaagggaaagaaattcgctcggtaccagctgggcgacctgctgctgcacctggaaaagaagcacggcgaggactggggaaaggtgtacgacgaggcctgggagcggattgacaagaaagtggaaggcctgagcaagcacatcaagctggaagaggaacggagaagcgaggacgcccagagcaaggccgccctgaccgactggctgcgggctaaggccagcttcgtgatcgagggcctgaaggaggccgacaaggacgagttctgcagatgcgagctgaagctgcagaagtggtacggggacctgcggggaaagcccttcgccatcgaagccgagaacagcatcctggacatcagcggcttcagcaagcagtacaactgtgccttcatctggcagaaggacggcgtgaagaagctgaacctgtacctgatcatcaactacttcaagggcggcaagctgcggttcaagaagatcaaacctgaagccttcgaagccaacagattctacaccgtgatcaacaaaaagagcggcgagatcgtgcccatggaggtgaacttcaacttcgacgaccccaacctgatcatcctgcctctggcctttggcaagagacagggcagagaattcatctggaacgacctgctgtccctggaaaccggcagcctgaagctggccaacggaagagtgatcgagaagacactgtacaacagaagaacccggcaggatgagcctgccctgttcgtggccctgaccttcgagcggcgggaggtcctggactcctccaatatcaaaccaatgaacctgatcggcgtggcaagaggcgaaaacatccccgccgtgatcgccctgaccgaccccgagggctgcccactgagccggtttaaggatagcctgggaaacccaacccacatcctgagaatcggcgagagctataaggagaagcagcggaccatccaggccaagaaggaggtggagcagcggagagccggcggctacagccggaagtacgccagcaaagccaagaatctggcagacgatatggtgagaaacaccgctagagatctgctgtactacgccgtgacccaggatgccatgctgatcttcgccaacctgagccggggcttcggccggcagggcaagcggaccttcatggccgagagacagtacacacggatggaggactggctgaccgccaagctggcctacgagggcctgagcaagacctacctgtccaagacactggcccagtacacctccaagacatgcagcaactgtgggtttaccatcaccagcgccgactacgacagggtgctggagaagctgaagaagacagcaacaggctggatgaccacaattaacggcaaggagctgaaggtggagggccagattacctactacaacagatacaagagacagaacgtagtcaaggacctgtccgtcgagctggatagactgagcgaagaatctgtgaacaacgacatctcctcctggacaaagggcagaagcggagaagctctgagcctcctgaagaaaagattctcccatagacccgtgcaggagaagttcgtgtgcctgaactgcggcttcgagacacacgcagccgagcaagccgccctgaacatcgccagatcctggctgttcctgcggagccaggagtacaagaaataccagacaaacaagacaaccggcaacaccgataagagagccttcgtcgagacctggcagtccttttaccggaagaagcttaaggaggtgtggaaacctgccgtgcggtctggcggatctggcggaggctccaccagccccaagaaaaagagaaaagtctaagctgccttctgcggggcttgccttctggccatgcccttcttctctcccttgcacctgtacctcttggtctttgaataaagcctgagtaggaaggctagcaaaaaaaaaaaaaaaaaaaaaaaaaaaaaaaaaaaaaaaaaaaaaaaaaaaaaaaaaaaaaaaaaaaaaaaaaaaaaaaa

SEQ ID NO: 9619 - RNA, 8787 nt, synthetic construct
  source 1..8787: mol_type = other RNA
aggaaataagagagaaaagaagagtaagaagaaatataagagccaccatggcccctaagaagaagcgtaaagtgagccggatgaaccacgaccaggagttcgacccccctaaggtgtaccctcccgtccccgccgagaagagaaagcccatccgggtcctgagcctgttcgatggcatcgccaccggtctgctggtgctgaaggacctgggcatccaggtggataggtacattgcctccgaggtgtgcgaggactccatcaccgtgggaatggtgcgtcatcagggcaagatcatgtacgtgggcgacgtgcggagcgtgacacagaagcatatccaggagtggggccctttcgacctggtgatcggcggcagcccttgcaatgacctgagcatcgtgaacccagcccggaagggcctgtacgagggaaccggcagactgttcttcgagttttacagactgctgcacgacgcccggcctaaggaaggcgacgaccggcccttcttttggctgttcgagaatgtggtggccatgggagtcagcgacaagcgggatattagccggttcctggagagcaaccccgtgatgatcgatgccaaggaagtgagcgccgcccaccgggccagatacttctggggcaatctgcctggcatgaacagacccctggccagcaccgtgaacgacaagctggagctgcaggagtgcctggagcacggccggatcgccaagttcagcaaggtgagaaccatcaccacccgaagcaacagcatcaaacaaggcaaggaccagcactttcctgtgttcatgaacgagaaggaggacatcctgtggtgtaccgagatggagagagtgttcgggttcccagtccactacacagatgtcagcaacatgtctagactggccagacagagactgctgggaagaagctggtccgtccctgtgatcagacacctgttcgcccctctgaaggagtacttcgcctgcgtgagcagcggcaacagcaacgccaacagccggggccccagcttctctagcggcctggtgccactgtccctgagagggagccacatgggccccatggagatctacaaaaccgtgagcgcctggaagcggcagcctgtgcgcgtgctgagcctgtttcggaatatcgataaagtcctgaaaagcctgggattcctggagagcggctctggctccggcggtggcaccctgaagtacgtggaggatgtgacaaacgtggtcagacgggatgtggagaagtggggccccttcgatctggtgtacggcagcacccaacccctgggcagctcttgtgaccggtgccctggctggtacatgtttcagttccaccggatcctgcagtacgccctgccgagacaggagtcccagcggccattcttttggattttcatggacaacttgctgctgaccgaggatgaccaggaaactaccactcggttcctgcagaccgaagccgtgaccctgcaggacgtgagaggccgggactaccagaacgccatgcgggtgtggtccaacatccctggactgaaaagcaagcacgcacctctgacccctaaagaagaggagtacctgcaggcccaggtgcggagcagaagcaagctggacgcccctaaggtggatctgctggtgaagaattgcctcctgcccctgagagagtacttcaagtatttcagccagaatagtctgcccctgggaggcagcggcggcggcatgttccaggacagcgtggccttcgaggacgtggccgtgaccttcacccaggaggagtgggccctgctggaccccagccagaagaccctgtacagggacgtgatgcaggagaacttcaggaacctggccagcgtgggcaagaagtggaaggcccagaacatctacgtggagtacaagaacctgaggaggaacctgaggaacctgatgggcaagaggctgttcgagagcaaggaggaccaccagggcggcccaagcagcggcgcccctcctcccagcggcggcaggcggcccaagcagcggcgcccctcctcccagcggcggcagcccagccggctccccaacctctaccgaggagggcacctctgagtccgccacccccgagagcggccctggcacctccaccgagcccagcgagggcagcgcacccggcagccctgccggcagccccacctccacagaggagggaaccagcaccgagcccagcgaaggcagcgccccaggcaccagcaccgagcctagtgagcaggagattaaacggatcaacaagatcagaagaagacttgtgaaagacagcaacaccaagaaggccggcaagacaggccccatgaaaaccctgctggttagagtgatgacacccgatctgagagagcggctggaaaacctgagaaagaagcctgaaaatatcccccagcccatcagcaatacatctagagccaacctgaataagctgctgaccgattacaccgaaatgaagaaggcgatcctgcatgtgtactgggaagagttccagaaggaccctgtgggcctgatgagccgggtggcccagcctgccagcaagaagatcgatcagaacaagctgaaacctgagatggacgagaagggcaacctgaccaccgccggctttgcctgctctcagtgtggccagcccctgttcgtgtacaagctggagcaggtgtctgagaagggcaaggcttacaccaactacttcggacggtgcaatgtggccgagcacgaaaagctgatcctgctggcccagctgaagcccgagaaggatagcgacgaagccgtgacatatagcctgggaaagtttgggcagagggccctggatttctacagcattcatgtgaccaaggagtccacccaccccgtgaagcccctggcccagatcgccggaaacagatacgcctccggacctgtgggaaaggccctgagcgacgcatgtatgggcacaatcgcctccttcctgtctaagtaccaggacatcatcatcgaacaccagaaggtggtgaagggcaaccagaagagactggagagcctgcgggagctggccggcaaggaaaacctggaataccctagcgtgaccctgccacctcagcctcacaccaaggagggcgttgatgcctacaacgaagtgatcgcccgggtgcgaatgtgggtgaacctgaacctgtggcagaagctgaagctaagcagagatgatgccaagcctctgctgagactgaagggattcccttcctttcctctggtcgagagacaggccaacgaagtggactggtgggacatggtgtgtaacgtgaagaagctgatcaacgagaaaaaggaggatggcaaggtgttttggcagaatctggctggctacaagagacaggaagccctgagaccatacctgagcagcgaggaagatcggaagaagggaaagaaattcgctcggtaccagctgggcgacctgctgctgcacctggaaaagaagcacggcgaggactggggaaaggtgtacgacgaggcctgggagcggattgacaagaaagtggaaggcctgagcaagcacatcaagctggaagaggaacggagaagcgaggacgcccagagcaaggccgccctgaccgactggctgcgggctaaggccagcttcgtgatcgagggcctgaaggaggccgacaaggacgagttctgcagatgcgagctgaagctgcagaagtggtacggggacctgcggggaaagcccttcgccatcgaagccgagaacagcatcctggacatcagcggcttcagcaagcagtacaactgtgccttcatctggcagaaggacggcgtgaagaagctgaacctgtacctgatcatcaactacttcaagggcggcaagctgcggttcaagaagatcaaacctgaagccttcgaagccaacagattctacaccgtgatcaacaaaaagagcggcgagatcgtgcccatggaggtgaacttcaacttcgacgaccccaacctgatcatcctgcctctggcctttggcaagagacagggcagagaattcatctggaacgacctgctgtccctggaaaccggcagcctgaagctggccaacggaagagtgatcgagaagacactgtacaacagaagaacccggcaggatgagcctgccctgttcgtggccctgaccttcgagcggcgggaggtcctggactcctccaatatcaaaccaatgaacctgatcggcgtggcaagaggcgaaaacatccccgccgtgatcgccctgaccgaccccgagggctgcccactgagccggtttaaggatagcctgggaaacccaacccacatcctgagaatcggcgagagctataaggagaagcagcggaccatccaggccaagaaggaggtggagcagcggagagccggcggctacagccggaagtacgccagcaaagccaagaatctggcagacgatatggtgagaaacaccgctagagatctgctgtactacgccgtgacccaggatgccatgctgatcttcgccaacctgagccggggcttcggccggcagggcaagcggaccttcatggccgagagacagtacacacggatggaggactggctgaccgccaagctggcctacgagggcctgagcaagacctacctgtccaagacactggcccagtacacctccaagacatgcagcaactgtgggtttaccatcaccagcgccgactacgacagggtgctggagaagctgaagaagacagcaacaggctggatgaccacaattaacggcaaggagctgaaggtggagggccagattacctactacaacagatacaagagacagaacgtagtcaaggacctgtccgtcgagctggatagactgagcgaagaatctgtgaacaacgacatctcctcctggacaaagggcagaagcggagaagctctgagcctcctgaagaaaagattctcccatagacccgtgcaggagaagttcgtgtgcctgaactgcggcttcgagacacacgcagccgagcaagccgccctgaacatcgccagatcctggctgttcctgcggagccaggagtacaagaaataccagacaaacaagacaaccggcaacaccgataagagagccttcgtcgagacctggcagtccttttaccggaagaagcttaaggaggtgtggaaacctgccgtgcggtctggcggatctggcggaggctccaccagccccaagaaaaagagaaaagtctaagctgccttctgcggggcttgccttctggccatgcccttcttctctcccttgcacctgtacctcttggtctttgaataaagcctgagtaggaaggctagcaaaaaaaaaaaaaaaaaaaaaaaaaaaaaaaaaaaaaaaaaaaaaaaaaaaaaaaaaaaaaaaaaaaaaaaaaaaaaaaagcccagccggctccccaacctctaccgaggagggcacctctgagtccgccacccccgagagcggccctggcacctccaccgagcccagcgagggcagcgcacccggcagccctgccggcagccccacctccacagaggagggaaccagcaccgagcccagcgaaggcagcgccccaggcaccagcaccgagcctagtgagcaggagattaaacggatcaacaagatcagaagaagacttgtgaaagacagcaacaccaagaaggccggcaagacaggccccatgaaaaccctgctggttagagtgatgacacccgatctgagagagcggctggaaaacctgagaaagaagcctgaaaatatcccccagcccatcagcaatacatctagagccaacctgaataagctgctgaccgattacaccgaaatgaagaaggcgatcctgcatgtgtactgggaagagttccagaaggaccctgtgggcctgatgagccgggtggcccagcctgccagcaagaagatcgatcagaacaagctgaaacctgagatggacgagaagggcaacctgaccaccgccggctttgcctgctctcagtgtggccagcccctgttcgtgtacaagctggagcaggtgtctgagaagggcaaggcttacaccaactacttcggacggtgcaatgtggccgagcacgaaaagctgatcctgctggcccagctgaagcccgagaaggatagcgacgaagccgtgacatatagcctgggaaagtttgggcagagggccctggatttctacagcattcatgtgaccaaggagtccacccaccccgtgaagcccctggcccagatcgccggaaacagatacgcctccggacctgtgggaaaggccctgagcgacgcatgtatgggcacaatcgcctccttcctgtctaagtaccaggacatcatcatcgaacaccagaaggtggtgaagggcaaccagaagagactggagagcctgcgggagctggccggcaaggaaaacctggaataccctagcgtgaccctgccacctcagcctcacaccaaggagggcgttgatgcctacaacgaagtgatcgcccgggtgcgaatgtgggtgaacctgaacctgtggcagaagctgaagctaagcagagatgatgccaagcctctgctgagactgaagggattcccttcctttcctctggtcgagagacaggccaacgaagtggactggtgggacatggtgtgtaacgtgaagaagctgatcaacgagaaaaaggaggatggcaaggtgttttggcagaatctggctggctacaagagacaggaagccctgagaccatacctgagcagcgaggaagatcggaagaagggaaagaaattcgctcggtaccagctgggcgacctgctgctgcacctggaaaagaagcacggcgaggactggggaaaggtgtacgacgaggcctgggagcggattgacaagaaagtggaaggcctgagcaagcacatcaagctggaagaggaacggagaagcgaggacgcccagagcaaggccgccctgaccgactggctgcgggctaaggccagcttcgtgatcgagggcctgaaggaggccgacaaggacgagttctgcagatgcgagctgaagctgcagaagtggtacggggacctgcggggaaagcccttcgccatcgaagccgagaacagcatcctggacatcagcggcttcagcaagcagtacaactgtgccttcatctggcagaaggacggcgtgaagaagctgaacctgtacctgatcatcaactacttcaagggcggcaagctgcggttcaagaagatcaaacctgaagccttcgaagccaacagattctacaccgtgatcaacaaaaagagcggcgagatcgtgcccatggaggtgaacttcaacttcgacgaccccaacctgatcatcctgcctctggcctttggcaagagacagggcagagaattcatctggaacgacctgctgtccctggaaaccggcagcctgaagctggccaacggaagagtgatcgagaagacactgtacaacagaagaacccggcaggatgagcctgccctgttcgtggccctgaccttcgagcggcgggaggtcctggactcctccaatatcaaaccaatgaacctgatcggcgtggcaagaggcgaaaacatccccgccgtgatcgccctgaccgaccccgagggctgcccactgagccggtttaaggatagcctgggaaacccaacccacatcctgagaatcggcgagagctataaggagaagcagcggaccatccaggccaagaaggaggtggagcagcggagagccggcggctacagccggaagtacgccagcaaagccaagaatctggcagacgatatggtgagaaacaccgctagagatctgctgtactacgccgtgacccaggatgccatgctgatcttcgccaacctgagccggggcttcggccggcagggcaagcggaccttcatggccgagagacagtacacacggatggaggactggctgaccgccaagctggcctacgagggcctgagcaagacctacctgtccaagacactggcccagtacacctccaagacatgcagcaactgtgggtttaccatcaccagcgccgactacgacagggtgctggagaagctgaagaagacagcaacaggctggatgaccacaattaacggcaaggagctgaaggtggagggccagattacctactacaacagatacaagagacagaacgtagtcaaggacctgtccgtcgagctggatagactgagcgaagaatctgtgaacaacgacatctcctcctggacaaagggcagaagcggagaagctctgagcctcctgaagaaaagattctcccatagacccgtgcaggagaagttcgtgtgcctgaactgcggcttcgagacacacgcagccgagcaagccgccctgaacatcgccagatcctggctgttcctgcggagccaggagtacaagaaataccagacaaacaagacaaccggcaacaccgataagagagccttcgtcgagacctggcagtccttttaccggaagaagcttaaggaggtgtggaaacctgccgtgcggtctggcggatctggcggaggctccaccagccccaagaaaaagagaaaagtctaagctgccttctgcggggcttgccttctggccatgcccttcttctctcccttgcacctgtacctcttggtctttgaataaagcctgagtaggaaggctagcaaaaaaaaaaaaaaaaaaaaaaaaaaaaaaaaaaaaaaaaaaaaaaaaaaaaaaaaaaaaaaaaaaaaaaaaaaaaaaaa

SEQ ID NO: 9620 - RNA, 8787 nt, synthetic construct
  source 1..8787: mol_type = other RNA
aggaaataagagagaaaagaagagtaagaagaaatataagagccaccatggcccctaagaagaagcgtaaagtgagccggatgaaccacgaccaggagttcgacccccctaaggtgtaccctcccgtccccgccgagaagagaaagcccatccgggtcctgagcctgttcgatggcatcgccaccggtctgctggtgctgaaggacctgggcatccaggtggataggtacattgcctccgaggtgtgcgaggactccatcaccgtgggaatggtgcgtcatcagggcaagatcatgtacgtgggcgacgtgcggagcgtgacacagaagcatatccaggagtggggccctttcgacctggtgatcggcggcagcccttgcaatgacctgagcatcgtgaacccagcccggaagggcctgtacgagggaaccggcagactgttcttcgagttttacagactgctgcacgacgcccggcctaaggaaggcgacgaccggcccttcttttggctgttcgagaatgtggtggccatgggagtcagcgacaagcgggatattagccggttcctggagagcaaccccgtgatgatcgatgccaaggaagtgagcgccgcccaccgggccagatacttctggggcaatctgcctggcatgaacagacccctggccagcaccgtgaacgacaagctggagctgcaggagtgcctggagcacggccggatcgccaagttcagcaaggtgagaaccatcaccacccgaagcaacagcatcaaacaaggcaaggaccagcactttcctgtgttcatgaacgagaaggaggacatcctgtggtgtaccgagatggagagagtgttcgggttcccagtccactacacagatgtcagcaacatgtctagactggccagacagagactgctgggaagaagctggtccgtccctgtgatcagacacctgttcgcccctctgaaggagtacttcgcctgcgtgagcagcggcaacagcaacgccaacagccggggccccagcttctctagcggcctggtgccactgtccctgagagggagccacatgggccccatggagatctacaaaaccgtgagcgcctggaagcggcagcctgtgcgcgtgctgagcctgtttcggaatatcgataaagtcctgaaaagcctgggattcctggagagcggctctggctccggcggtggcaccctgaagtacgtggaggatgtgacaaacgtggtcagacgggatgtggagaagtggggccccttcgatctggtgtacggcagcacccaacccctgggcagctcttgtgaccggtgccctggctggtacatgtttcagttccaccggatcctgcagtacgccctgccgagacaggagtcccagcggccattcttttggattttcatggacaacttgctgctgaccgaggatgaccaggaaactaccactcggttcctgcagaccgaagccgtgaccctgcaggacgtgagaggccgggactaccagaacgccatgcgggtgtggtccaacatccctggactgaaaagcaagcacgcacctctgacccctaaagaagaggagtacctgcaggcccaggtgcggagcagaagcaagctggacgcccctaaggtggatctgctggtgaagaattgcctcctgcccctgagagagtacttcaagtatttcagccagaatagtctgcccctgggaggcagcggcggcggcttcctgctgggcctgctgaccttcagggacgtggccatcgagttcagccaggaggagtggggctgcctgaaccacacccagagggagctgtacagggacgtgatgctggagaactacggccacctgctgttcctgggcctgatcgtgagcaagcccgacctggtgagcttcctggagcagaagaaggagccctgggacgtgaagaggaagaagaccgtggccatccacaggggcaggtgggagggcggcccaagcagcggcgcccctcctcccagcggcggcaggcggcccaagcagcggcgcccctcctcccagcggcggcagcccagccggctccccaacctctaccgaggagggcacctctgagtccgccacccccgagagcggccctggcacctccaccgagcccagcgagggcagcgcacccggcagccctgccggcagccccacctccacagaggagggaaccagcaccgagcccagcgaaggcagcgccccaggcaccagcaccgagcctagtgagcaggagattaaacggatcaacaagatcagaagaagacttgtgaaagacagcaacaccaagaaggccggcaagacaggccccatgaaaaccctgctggttagagtgatgacacccgatctgagagagcggctggaaaacctgagaaagaagcctgaaaatatcccccagcccatcagcaatacatctagagccaacctgaataagctgctgaccgattacaccgaaatgaagaaggcgatcctgcatgtgtactgggaagagttccagaaggaccctgtgggcctgatgagccgggtggcccagcctgccagcaagaagatcgatcagaacaagctgaaacctgagatggacgagaagggcaacctgaccaccgccggctttgcctgctctcagtgtggccagcccctgttcgtgtacaagctggagcaggtgtctgagaagggcaaggcttacaccaactacttcggacggtgcaatgtggccgagcacgaaaagctgatcctgctggcccagctgaagcccgagaaggatagcgacgaagccgtgacatatagcctgggaaagtttgggcagagggccctggatttctacagcattcatgtgaccaaggagtccacccaccccgtgaagcccctggcccagatcgccggaaacagatacgcctccggacctgtgggaaaggccctgagcgacgcatgtatgggcacaatcgcctccttcctgtctaagtaccaggacatcatcatcgaacaccagaaggtggtgaagggcaaccagaagagactggagagcctgcgggagctggccggcaaggaaaacctggaataccctagcgtgaccctgccacctcagcctcacaccaaggagggcgttgatgcctacaacgaagtgatcgcccgggtgcgaatgtgggtgaacctgaacctgtggcagaagctgaagctaagcagagatgatgccaagcctctgctgagactgaagggattcccttcctttcctctggtcgagagacaggccaacgaagtggactggtgggacatggtgtgtaacgtgaagaagctgatcaacgagaaaaaggaggatggcaaggtgttttggcagaatctggctggctacaagagacaggaagccctgagaccatacctgagcagcgaggaagatcggaagaagggaaagaaattcgctcggtaccagctgggcgacctgctgctgcacctggaaaagaagcacggcgaggactggggaaaggtgtacgacgaggcctgggagcggattgacaagaaagtggaaggcctgagcaagcacatcaagctggaagaggaacggagaagcgaggacgcccagagcaaggccgccctgaccgactggctgcgggctaaggccagcttcgtgatcgagggcctgaaggaggccgacaaggacgagttctgcagatgcgagctgaagctgcagaagtggtacggggacctgcggggaaagcccttcgccatcgaagccgagaacagcatcctggacatcagcggcttcagcaagcagtacaactgtgccttcatctggcagaaggacggcgtgaagaagctgaacctgtacctgatcatcaactacttcaagggcggcaagctgcggttcaagaagatcaaacctgaagccttcgaagccaacagattctacaccgtgatcaacaaaaagagcggcgagatcgtgcccatggaggtgaacttcaacttcgacgaccccaacctgatcatcctgcctctggcctttggcaagagacagggcagagaattcatctggaacgacctgctgtccctggaaaccggcagcctgaagctggccaacggaagagtgatcgagaagacactgtacaacagaagaacccggcaggatgagcctgccctgttcgtggccctgaccttcgagcggcgggaggtcctggactcctccaatatcaaaccaatgaacctgatcggcgtggcaagaggcgaaaacatccccgccgtgatcgccctgaccgaccccgagggctgcccactgagccggtttaaggatagcctgggaaacccaacccacatcctgagaatcggcgagagctataaggagaagcagcggaccatccaggccaagaaggaggtggagcagcggagagccggcggctacagccggaagtacgccagcaaagccaagaatctggcagacgatatggtgagaaacaccgctagagatctgctgtactacgccgtgacccaggatgccatgctgatcttcgccaacctgagccggggcttcggccggcagggcaagcggaccttcatggccgagagacagtacacacggatggaggactggctgaccgccaagctggcctacgagggcctgagcaagacctacctgtccaagacactggcccagtacacctccaagacatgcagcaactgtgggtttaccatcaccagcgccgactacgacagggtgctggagaagctgaagaagacagcaacaggctggatgaccacaattaacggcaaggagctgaaggtggagggccagattacctactacaacagatacaagagacagaacgtagtcaaggacctgtccgtcgagctggatagactgagcgaagaatctgtgaacaacgacatctcctcctggacaaagggcagaagcggagaagctctgagcctcctgaagaaaagattctcccatagacccgtgcaggagaagttcgtgtgcctgaactgcggcttcgagacacacgcagccgagcaagccgccctgaacatcgccagatcctggctgttcctgcggagccaggagtacaagaaataccagacaaacaagacaaccggcaacaccgataagagagccttcgtcgagacctggcagtccttttaccggaagaagcttaaggaggtgtggaaacctgccgtgcggtctggcggatctggcggaggctccaccagccccaagaaaaagagaaaagtctaagctgccttctgcggggcttgccttctggccatgcccttcttctctcccttgcacctgtacctcttggtctttgaataaagcctgagtaggaaggctagcaaaaaaaaaaaaaaaaaaaaaaaaaaaaaaaaaaaaaaaaaaaaaaaaaaaaaaaaaaaaaaaaaaaaaaaaaaaaaaaagcccagccggctccccaacctctaccgaggagggcacctctgagtccgccacccccgagagcggccctggcacctccaccgagcccagcgagggcagcgcacccggcagccctgccggcagccccacctccacagaggagggaaccagcaccgagcccagcgaaggcagcgccccaggcaccagcaccgagcctagtgagcaggagattaaacggatcaacaagatcagaagaagacttgtgaaagacagcaacaccaagaaggccggcaagacaggccccatgaaaaccctgctggttagagtgatgacacccgatctgagagagcggctggaaaacctgagaaagaagcctgaaaatatcccccagcccatcagcaatacatctagagccaacctgaataagctgctgaccgattacaccgaaatgaagaaggcgatcctgcatgtgtactgggaagagttccagaaggaccctgtgggcctgatgagccgggtggcccagcctgccagcaagaagatcgatcagaacaagctgaaacctgagatggacgagaagggcaacctgaccaccgccggctttgcctgctctcagtgtggccagcccctgttcgtgtacaagctggagcaggtgtctgagaagggcaaggcttacaccaactacttcggacggtgcaatgtggccgagcacgaaaagctgatcctgctggcccagctgaagcccgagaaggatagcgacgaagccgtgacatatagcctgggaaagtttgggcagagggccctggatttctacagcattcatgtgaccaaggagtccacccaccccgtgaagcccctggcccagatcgccggaaacagatacgcctccggacctgtgggaaaggccctgagcgacgcatgtatgggcacaatcgcctccttcctgtctaagtaccaggacatcatcatcgaacaccagaaggtggtgaagggcaaccagaagagactggagagcctgcgggagctggccggcaaggaaaacctggaataccctagcgtgaccctgccacctcagcctcacaccaaggagggcgttgatgcctacaacgaagtgatcgcccgggtgcgaatgtgggtgaacctgaacctgtggcagaagctgaagctaagcagagatgatgccaagcctctgctgagactgaagggattcccttcctttcctctggtcgagagacaggccaacgaagtggactggtgggacatggtgtgtaacgtgaagaagctgatcaacgagaaaaaggaggatggcaaggtgttttggcagaatctggctggctacaagagacaggaagccctgagaccatacctgagcagcgaggaagatcggaagaagggaaagaaattcgctcggtaccagctgggcgacctgctgctgcacctggaaaagaagcacggcgaggactggggaaaggtgtacgacgaggcctgggagcggattgacaagaaagtggaaggcctgagcaagcacatcaagctggaagaggaacggagaagcgaggacgcccagagcaaggccgccctgaccgactggctgcgggctaaggccagcttcgtgatcgagggcctgaaggaggccgacaaggacgagttctgcagatgcgagctgaagctgcagaagtggtacggggacctgcggggaaagcccttcgccatcgaagccgagaacagcatcctggacatcagcggcttcagcaagcagtacaactgtgccttcatctggcagaaggacggcgtgaagaagctgaacctgtacctgatcatcaactacttcaagggcggcaagctgcggttcaagaagatcaaacctgaagccttcgaagccaacagattctacaccgtgatcaacaaaaagagcggcgagatcgtgcccatggaggtgaacttcaacttcgacgaccccaacctgatcatcctgcctctggcctttggcaagagacagggcagagaattcatctggaacgacctgctgtccctggaaaccggcagcctgaagctggccaacggaagagtgatcgagaagacactgtacaacagaagaacccggcaggatgagcctgccctgttcgtggccctgaccttcgagcggcgggaggtcctggactcctccaatatcaaaccaatgaacctgatcggcgtggcaagaggcgaaaacatccccgccgtgatcgccctgaccgaccccgagggctgcccactgagccggtttaaggatagcctgggaaacccaacccacatcctgagaatcggcgagagctataaggagaagcagcggaccatccaggccaagaaggaggtggagcagcggagagccggcggctacagccggaagtacgccagcaaagccaagaatctggcagacgatatggtgagaaacaccgctagagatctgctgtactacgccgtgacccaggatgccatgctgatcttcgccaacctgagccggggcttcggccggcagggcaagcggaccttcatggccgagagacagtacacacggatggaggactggctgaccgccaagctggcctacgagggcctgagcaagacctacctgtccaagacactggcccagtacacctccaagacatgcagcaactgtgggtttaccatcaccagcgccgactacgacagggtgctggagaagctgaagaagacagcaacaggctggatgaccacaattaacggcaaggagctgaaggtggagggccagattacctactacaacagatacaagagacagaacgtagtcaaggacctgtccgtcgagctggatagactgagcgaagaatctgtgaacaacgacatctcctcctggacaaagggcagaagcggagaagctctgagcctcctgaagaaaagattctcccatagacccgtgcaggagaagttcgtgtgcctgaactgcggcttcgagacacacgcagccgagcaagccgccctgaacatcgccagatcctggctgttcctgcggagccaggagtacaagaaataccagacaaacaagacaaccggcaacaccgataagagagccttcgtcgagacctggcagtccttttaccggaagaagcttaaggaggtgtggaaacctgccgtgcggtctggcggatctggcggaggctccaccagccccaagaaaaagagaaaagtctaagctgccttctgcggggcttgccttctggccatgcccttcttctctcccttgcacctgtacctcttggtctttgaataaagcctgagtaggaaggctagcaaaaaaaaaaaaaaaaaaaaaaaaaaaaaaaaaaaaaaaaaaaaaaaaaaaaaaaaaaaaaaaaaaaaaaaaaaaaaaaa

SEQ ID NO: 9621 - RNA, 8787 nt, synthetic construct
  source 1..8787: mol_type = other RNA
aggaaataagagagaaaagaagagtaagaagaaatataagagccaccatggcccctaagaagaagcgtaaagtgagccggatgaaccacgaccaggagttcgacccccctaaggtgtaccctcccgtccccgccgagaagagaaagcccatccgggtcctgagcctgttcgatggcatcgccaccggtctgctggtgctgaaggacctgggcatccaggtggataggtacattgcctccgaggtgtgcgaggactccatcaccgtgggaatggtgcgtcatcagggcaagatcatgtacgtgggcgacgtgcggagcgtgacacagaagcatatccaggagtggggccctttcgacctggtgatcggcggcagcccttgcaatgacctgagcatcgtgaacccagcccggaagggcctgtacgagggaaccggcagactgttcttcgagttttacagactgctgcacgacgcccggcctaaggaaggcgacgaccggcccttcttttggctgttcgagaatgtggtggccatgggagtcagcgacaagcgggatattagccggttcctggagagcaaccccgtgatgatcgatgccaaggaagtgagcgccgcccaccgggccagatacttctggggcaatctgcctggcatgaacagacccctggccagcaccgtgaacgacaagctggagctgcaggagtgcctggagcacggccggatcgccaagttcagcaaggtgagaaccatcaccacccgaagcaacagcatcaaacaaggcaaggaccagcactttcctgtgttcatgaacgagaaggaggacatcctgtggtgtaccgagatggagagagtgttcgggttcccagtccactacacagatgtcagcaacatgtctagactggccagacagagactgctgggaagaagctggtccgtccctgtgatcagacacctgttcgcccctctgaaggagtacttcgcctgcgtgagcagcggcaacagcaacgccaacagccggggccccagcttctctagcggcctggtgccactgtccctgagagggagccacatgggccccatggagatctacaaaaccgtgagcgcctggaagcggcagcctgtgcgcgtgctgagcctgtttcggaatatcgataaagtcctgaaaagcctgggattcctggagagcggctctggctccggcggtggcaccctgaagtacgtggaggatgtgacaaacgtggtcagacgggatgtggagaagtggggccccttcgatctggtgtacggcagcacccaacccctgggcagctcttgtgaccggtgccctggctggtacatgtttcagttccaccggatcctgcagtacgccctgccgagacaggagtcccagcggccattcttttggattttcatggacaacttgctgctgaccgaggatgaccaggaaactaccactcggttcctgcagaccgaagccgtgaccctgcaggacgtgagaggccgggactaccagaacgccatgcgggtgtggtccaacatccctggactgaaaagcaagcacgcacctctgacccctaaagaagaggagtacctgcaggcccaggtgcggagcagaagcaagctggacgcccctaaggtggatctgctggtgaagaattgcctcctgcccctgagagagtacttcaagtatttcagccagaatagtctgcccctgggaggcagcggcggcggcagcaaggcccccgtgaccttcggcgacctggccatctacttcagccaggaggagtgggagtggctgagccccatgcagaaggacctgtacgaggacgtgatgctggagaactaccacaacctggtgagcgtgggcctggcctgcaggaggcccaacatcatcgccctgctggagaagggcaaggccccctgggtgatcgagcccagcaggaggaggtggggccccgagagcggcagcaagtacggcggcccaagcagcggcgcccctcctcccagcggcggcaggcggcccaagcagcggcgcccctcctcccagcggcggcagcccagccggctccccaacctctaccgaggagggcacctctgagtccgccacccccgagagcggccctggcacctccaccgagcccagcgagggcagcgcacccggcagccctgccggcagccccacctccacagaggagggaaccagcaccgagcccagcgaaggcagcgccccaggcaccagcaccgagcctagtgagcaggagattaaacggatcaacaagatcagaagaagacttgtgaaagacagcaacaccaagaaggccggcaagacaggccccatgaaaaccctgctggttagagtgatgacacccgatctgagagagcggctggaaaacctgagaaagaagcctgaaaatatcccccagcccatcagcaatacatctagagccaacctgaataagctgctgaccgattacaccgaaatgaagaaggcgatcctgcatgtgtactgggaagagttccagaaggaccctgtgggcctgatgagccgggtggcccagcctgccagcaagaagatcgatcagaacaagctgaaacctgagatggacgagaagggcaacctgaccaccgccggctttgcctgctctcagtgtggccagcccctgttcgtgtacaagctggagcaggtgtctgagaagggcaaggcttacaccaactacttcggacggtgcaatgtggccgagcacgaaaagctgatcctgctggcccagctgaagcccgagaaggatagcgacgaagccgtgacatatagcctgggaaagtttgggcagagggccctggatttctacagcattcatgtgaccaaggagtccacccaccccgtgaagcccctggcccagatcgccggaaacagatacgcctccggacctgtgggaaaggccctgagcgacgcatgtatgggcacaatcgcctccttcctgtctaagtaccaggacatcatcatcgaacaccagaaggtggtgaagggcaaccagaagagactggagagcctgcgggagctggccggcaaggaaaacctggaataccctagcgtgaccctgccacctcagcctcacaccaaggagggcgttgatgcctacaacgaagtgatcgcccgggtgcgaatgtgggtgaacctgaacctgtggcagaagctgaagctaagcagagatgatgccaagcctctgctgagactgaagggattcccttcctttcctctggtcgagagacaggccaacgaagtggactggtgggacatggtgtgtaacgtgaagaagctgatcaacgagaaaaaggaggatggcaaggtgttttggcagaatctggctggctacaagagacaggaagccctgagaccatacctgagcagcgaggaagatcggaagaagggaaagaaattcgctcggtaccagctgggcgacctgctgctgcacctggaaaagaagcacggcgaggactggggaaaggtgtacgacgaggcctgggagcggattgacaagaaagtggaaggcctgagcaagcacatcaagctggaagaggaacggagaagcgaggacgcccagagcaaggccgccctgaccgactggctgcgggctaaggccagcttcgtgatcgagggcctgaaggaggccgacaaggacgagttctgcagatgcgagctgaagctgcagaagtggtacggggacctgcggggaaagcccttcgccatcgaagccgagaacagcatcctggacatcagcggcttcagcaagcagtacaactgtgccttcatctggcagaaggacggcgtgaagaagctgaacctgtacctgatcatcaactacttcaagggcggcaagctgcggttcaagaagatcaaacctgaagccttcgaagccaacagattctacaccgtgatcaacaaaaagagcggcgagatcgtgcccatggaggtgaacttcaacttcgacgaccccaacctgatcatcctgcctctggcctttggcaagagacagggcagagaattcatctggaacgacctgctgtccctggaaaccggcagcctgaagctggccaacggaagagtgatcgagaagacactgtacaacagaagaacccggcaggatgagcctgccctgttcgtggccctgaccttcgagcggcgggaggtcctggactcctccaatatcaaaccaatgaacctgatcggcgtggcaagaggcgaaaacatccccgccgtgatcgccctgaccgaccccgagggctgcccactgagccggtttaaggatagcctgggaaacccaacccacatcctgagaatcggcgagagctataaggagaagcagcggaccatccaggccaagaaggaggtggagcagcggagagccggcggctacagccggaagtacgccagcaaagccaagaatctggcagacgatatggtgagaaacaccgctagagatctgctgtactacgccgtgacccaggatgccatgctgatcttcgccaacctgagccggggcttcggccggcagggcaagcggaccttcatggccgagagacagtacacacggatggaggactggctgaccgccaagctggcctacgagggcctgagcaagacctacctgtccaagacactggcccagtacacctccaagacatgcagcaactgtgggtttaccatcaccagcgccgactacgacagggtgctggagaagctgaagaagacagcaacaggctggatgaccacaattaacggcaaggagctgaaggtggagggccagattacctactacaacagatacaagagacagaacgtagtcaaggacctgtccgtcgagctggatagactgagcgaagaatctgtgaacaacgacatctcctcctggacaaagggcagaagcggagaagctctgagcctcctgaagaaaagattctcccatagacccgtgcaggagaagttcgtgtgcctgaactgcggcttcgagacacacgcagccgagcaagccgccctgaacatcgccagatcctggctgttcctgcggagccaggagtacaagaaataccagacaaacaagacaaccggcaacaccgataagagagccttcgtcgagacctggcagtccttttaccggaagaagcttaaggaggtgtggaaacctgccgtgcggtctggcggatctggcggaggctccaccagccccaagaaaaagagaaaagtctaagctgccttctgcggggcttgccttctggccatgcccttcttctctcccttgcacctgtacctcttggtctttgaataaagcctgagtaggaaggctagcaaaaaaaaaaaaaaaaaaaaaaaaaaaaaaaaaaaaaaaaaaaaaaaaaaaaaaaaaaaaaaaaaaaaaaaaaaaaaaaagcccagccggctccccaacctctaccgaggagggcacctctgagtccgccacccccgagagcggccctggcacctccaccgagcccagcgagggcagcgcacccggcagccctgccggcagccccacctccacagaggagggaaccagcaccgagcccagcgaaggcagcgccccaggcaccagcaccgagcctagtgagcaggagattaaacggatcaacaagatcagaagaagacttgtgaaagacagcaacaccaagaaggccggcaagacaggccccatgaaaaccctgctggttagagtgatgacacccgatctgagagagcggctggaaaacctgagaaagaagcctgaaaatatcccccagcccatcagcaatacatctagagccaacctgaataagctgctgaccgattacaccgaaatgaagaaggcgatcctgcatgtgtactgggaagagttccagaaggaccctgtgggcctgatgagccgggtggcccagcctgccagcaagaagatcgatcagaacaagctgaaacctgagatggacgagaagggcaacctgaccaccgccggctttgcctgctctcagtgtggccagcccctgttcgtgtacaagctggagcaggtgtctgagaagggcaaggcttacaccaactacttcggacggtgcaatgtggccgagcacgaaaagctgatcctgctggcccagctgaagcccgagaaggatagcgacgaagccgtgacatatagcctgggaaagtttgggcagagggccctggatttctacagcattcatgtgaccaaggagtccacccaccccgtgaagcccctggcccagatcgccggaaacagatacgcctccggacctgtgggaaaggccctgagcgacgcatgtatgggcacaatcgcctccttcctgtctaagtaccaggacatcatcatcgaacaccagaaggtggtgaagggcaaccagaagagactggagagcctgcgggagctggccggcaaggaaaacctggaataccctagcgtgaccctgccacctcagcctcacaccaaggagggcgttgatgcctacaacgaagtgatcgcccgggtgcgaatgtgggtgaacctgaacctgtggcagaagctgaagctaagcagagatgatgccaagcctctgctgagactgaagggattcccttcctttcctctggtcgagagacaggccaacgaagtggactggtgggacatggtgtgtaacgtgaagaagctgatcaacgagaaaaaggaggatggcaaggtgttttggcagaatctggctggctacaagagacaggaagccctgagaccatacctgagcagcgaggaagatcggaagaagggaaagaaattcgctcggtaccagctgggcgacctgctgctgcacctggaaaagaagcacggcgaggactggggaaaggtgtacgacgaggcctgggagcggattgacaagaaagtggaaggcctgagcaagcacatcaagctggaagaggaacggagaagcgaggacgcccagagcaaggccgccctgaccgactggctgcgggctaaggccagcttcgtgatcgagggcctgaaggaggccgacaaggacgagttctgcagatgcgagctgaagctgcagaagtggtacggggacctgcggggaaagcccttcgccatcgaagccgagaacagcatcctggacatcagcggcttcagcaagcagtacaactgtgccttcatctggcagaaggacggcgtgaagaagctgaacctgtacctgatcatcaactacttcaagggcggcaagctgcggttcaagaagatcaaacctgaagccttcgaagccaacagattctacaccgtgatcaacaaaaagagcggcgagatcgtgcccatggaggtgaacttcaacttcgacgaccccaacctgatcatcctgcctctggcctttggcaagagacagggcagagaattcatctggaacgacctgctgtccctggaaaccggcagcctgaagctggccaacggaagagtgatcgagaagacactgtacaacagaagaacccggcaggatgagcctgccctgttcgtggccctgaccttcgagcggcgggaggtcctggactcctccaatatcaaaccaatgaacctgatcggcgtggcaagaggcgaaaacatccccgccgtgatcgccctgaccgaccccgagggctgcccactgagccggtttaaggatagcctgggaaacccaacccacatcctgagaatcggcgagagctataaggagaagcagcggaccatccaggccaagaaggaggtggagcagcggagagccggcggctacagccggaagtacgccagcaaagccaagaatctggcagacgatatggtgagaaacaccgctagagatctgctgtactacgccgtgacccaggatgccatgctgatcttcgccaacctgagccggggcttcggccggcagggcaagcggaccttcatggccgagagacagtacacacggatggaggactggctgaccgccaagctggcctacgagggcctgagcaagacctacctgtccaagacactggcccagtacacctccaagacatgcagcaactgtgggtttaccatcaccagcgccgactacgacagggtgctggagaagctgaagaagacagcaacaggctggatgaccacaattaacggcaaggagctgaaggtggagggccagattacctactacaacagatacaagagacagaacgtagtcaaggacctgtccgtcgagctggatagactgagcgaagaatctgtgaacaacgacatctcctcctggacaaagggcagaagcggagaagctctgagcctcctgaagaaaagattctcccatagacccgtgcaggagaagttcgtgtgcctgaactgcggcttcgagacacacgcagccgagcaagccgccctgaacatcgccagatcctggctgttcctgcggagccaggagtacaagaaataccagacaaacaagacaaccggcaacaccgataagagagccttcgtcgagacctggcagtccttttaccggaagaagcttaaggaggtgtggaaacctgccgtgcggtctggcggatctggcggaggctccaccagccccaagaaaaagagaaaagtctaagctgccttctgcggggcttgccttctggccatgcccttcttctctcccttgcacctgtacctcttggtctttgaataaagcctgagtaggaaggctagcaaaaaaaaaaaaaaaaaaaaaaaaaaaaaaaaaaaaaaaaaaaaaaaaaaaaaaaaaaaaaaaaaaaaaaaaaaaaaaaa

SEQ ID NO: 9622 - RNA, 8787 nt, synthetic construct
  source 1..8787: mol_type = other RNA
aggaaataagagagaaaagaagagtaagaagaaatataagagccaccatggcccctaagaagaagcgtaaagtgagccggatgaaccacgaccaggagttcgacccccctaaggtgtaccctcccgtccccgccgagaagagaaagcccatccgggtcctgagcctgttcgatggcatcgccaccggtctgctggtgctgaaggacctgggcatccaggtggataggtacattgcctccgaggtgtgcgaggactccatcaccgtgggaatggtgcgtcatcagggcaagatcatgtacgtgggcgacgtgcggagcgtgacacagaagcatatccaggagtggggccctttcgacctggtgatcggcggcagcccttgcaatgacctgagcatcgtgaacccagcccggaagggcctgtacgagggaaccggcagactgttcttcgagttttacagactgctgcacgacgcccggcctaaggaaggcgacgaccggcccttcttttggctgttcgagaatgtggtggccatgggagtcagcgacaagcgggatattagccggttcctggagagcaaccccgtgatgatcgatgccaaggaagtgagcgccgcccaccgggccagatacttctggggcaatctgcctggcatgaacagacccctggccagcaccgtgaacgacaagctggagctgcaggagtgcctggagcacggccggatcgccaagttcagcaaggtgagaaccatcaccacccgaagcaacagcatcaaacaaggcaaggaccagcactttcctgtgttcatgaacgagaaggaggacatcctgtggtgtaccgagatggagagagtgttcgggttcccagtccactacacagatgtcagcaacatgtctagactggccagacagagactgctgggaagaagctggtccgtccctgtgatcagacacctgttcgcccctctgaaggagtacttcgcctgcgtgagcagcggcaacagcaacgccaacagccggggccccagcttctctagcggcctggtgccactgtccctgagagggagccacatgggccccatggagatctacaaaaccgtgagcgcctggaagcggcagcctgtgcgcgtgctgagcctgtttcggaatatcgataaagtcctgaaaagcctgggattcctggagagcggctctggctccggcggtggcaccctgaagtacgtggaggatgtgacaaacgtggtcagacgggatgtggagaagtggggccccttcgatctggtgtacggcagcacccaacccctgggcagctcttgtgaccggtgccctggctggtacatgtttcagttccaccggatcctgcagtacgccctgccgagacaggagtcccagcggccattcttttggattttcatggacaacttgctgctgaccgaggatgaccaggaaactaccactcggttcctgcagaccgaagccgtgaccctgcaggacgtgagaggccgggactaccagaacgccatgcgggtgtggtccaacatccctggactgaaaagcaagcacgcacctctgacccctaaagaagaggagtacctgcaggcccaggtgcggagcagaagcaagctggacgcccctaaggtggatctgctggtgaagaattgcctcctgcccctgagagagtacttcaagtatttcagccagaatagtctgcccctgggaggcagcggcggcggcatgatgaccgccgtgagcctgaccaccaggagccaggagagcgtggccttcgaggacgtggccgtgtacttcaccaccaaggagtgggccatcatggtgcccgccgagagggccctgtacagggacgtgatgctggagaactacgaggccgtggccttcgtggtgccccccaccagcaagcccgccctggtgagccacctggagcagggcaaggagagctgcttcatcaggccccagggcgtgggcggcccaagcagcggcgcccctcctcccagcggcggcaggcggcccaagcagcggcgcccctcctcccagcggcggcagcccagccggctccccaacctctaccgaggagggcacctctgagtccgccacccccgagagcggccctggcacctccaccgagcccagcgagggcagcgcacccggcagccctgccggcagccccacctccacagaggagggaaccagcaccgagcccagcgaaggcagcgccccaggcaccagcaccgagcctagtgagcaggagattaaacggatcaacaagatcagaagaagacttgtgaaagacagcaacaccaagaaggccggcaagacaggccccatgaaaaccctgctggttagagtgatgacacccgatctgagagagcggctggaaaacctgagaaagaagcctgaaaatatcccccagcccatcagcaatacatctagagccaacctgaataagctgctgaccgattacaccgaaatgaagaaggcgatcctgcatgtgtactgggaagagttccagaaggaccctgtgggcctgatgagccgggtggcccagcctgccagcaagaagatcgatcagaacaagctgaaacctgagatggacgagaagggcaacctgaccaccgccggctttgcctgctctcagtgtggccagcccctgttcgtgtacaagctggagcaggtgtctgagaagggcaaggcttacaccaactacttcggacggtgcaatgtggccgagcacgaaaagctgatcctgctggcccagctgaagcccgagaaggatagcgacgaagccgtgacatatagcctgggaaagtttgggcagagggccctggatttctacagcattcatgtgaccaaggagtccacccaccccgtgaagcccctggcccagatcgccggaaacagatacgcctccggacctgtgggaaaggccctgagcgacgcatgtatgggcacaatcgcctccttcctgtctaagtaccaggacatcatcatcgaacaccagaaggtggtgaagggcaaccagaagagactggagagcctgcgggagctggccggcaaggaaaacctggaataccctagcgtgaccctgccacctcagcctcacaccaaggagggcgttgatgcctacaacgaagtgatcgcccgggtgcgaatgtgggtgaacctgaacctgtggcagaagctgaagctaagcagagatgatgccaagcctctgctgagactgaagggattcccttcctttcctctggtcgagagacaggccaacgaagtggactggtgggacatggtgtgtaacgtgaagaagctgatcaacgagaaaaaggaggatggcaaggtgttttggcagaatctggctggctacaagagacaggaagccctgagaccatacctgagcagcgaggaagatcggaagaagggaaagaaattcgctcggtaccagctgggcgacctgctgctgcacctggaaaagaagcacggcgaggactggggaaaggtgtacgacgaggcctgggagcggattgacaagaaagtggaaggcctgagcaagcacatcaagctggaagaggaacggagaagcgaggacgcccagagcaaggccgccctgaccgactggctgcgggctaaggccagcttcgtgatcgagggcctgaaggaggccgacaaggacgagttctgcagatgcgagctgaagctgcagaagtggtacggggacctgcggggaaagcccttcgccatcgaagccgagaacagcatcctggacatcagcggcttcagcaagcagtacaactgtgccttcatctggcagaaggacggcgtgaagaagctgaacctgtacctgatcatcaactacttcaagggcggcaagctgcggttcaagaagatcaaacctgaagccttcgaagccaacagattctacaccgtgatcaacaaaaagagcggcgagatcgtgcccatggaggtgaacttcaacttcgacgaccccaacctgatcatcctgcctctggcctttggcaagagacagggcagagaattcatctggaacgacctgctgtccctggaaaccggcagcctgaagctggccaacggaagagtgatcgagaagacactgtacaacagaagaacccggcaggatgagcctgccctgttcgtggccctgaccttcgagcggcgggaggtcctggactcctccaatatcaaaccaatgaacctgatcggcgtggcaagaggcgaaaacatccccgccgtgatcgccctgaccgaccccgagggctgcccactgagccggtttaaggatagcctgggaaacccaacccacatcctgagaatcggcgagagctataaggagaagcagcggaccatccaggccaagaaggaggtggagcagcggagagccggcggctacagccggaagtacgccagcaaagccaagaatctggcagacgatatggtgagaaacaccgctagagatctgctgtactacgccgtgacccaggatgccatgctgatcttcgccaacctgagccggggcttcggccggcagggcaagcggaccttcatggccgagagacagtacacacggatggaggactggctgaccgccaagctggcctacgagggcctgagcaagacctacctgtccaagacactggcccagtacacctccaagacatgcagcaactgtgggtttaccatcaccagcgccgactacgacagggtgctggagaagctgaagaagacagcaacaggctggatgaccacaattaacggcaaggagctgaaggtggagggccagattacctactacaacagatacaagagacagaacgtagtcaaggacctgtccgtcgagctggatagactgagcgaagaatctgtgaacaacgacatctcctcctggacaaagggcagaagcggagaagctctgagcctcctgaagaaaagattctcccatagacccgtgcaggagaagttcgtgtgcctgaactgcggcttcgagacacacgcagccgagcaagccgccctgaacatcgccagatcctggctgttcctgcggagccaggagtacaagaaataccagacaaacaagacaaccggcaacaccgataagagagccttcgtcgagacctggcagtccttttaccggaagaagcttaaggaggtgtggaaacctgccgtgcggtctggcggatctggcggaggctccaccagccccaagaaaaagagaaaagtctaagctgccttctgcggggcttgccttctggccatgcccttcttctctcccttgcacctgtacctcttggtctttgaataaagcctgagtaggaaggctagcaaaaaaaaaaaaaaaaaaaaaaaaaaaaaaaaaaaaaaaaaaaaaaaaaaaaaaaaaaaaaaaaaaaaaaaaaaaaaaaagcccagccggctccccaacctctaccgaggagggcacctctgagtccgccacccccgagagcggccctggcacctccaccgagcccagcgagggcagcgcacccggcagccctgccggcagccccacctccacagaggagggaaccagcaccgagcccagcgaaggcagcgccccaggcaccagcaccgagcctagtgagcaggagattaaacggatcaacaagatcagaagaagacttgtgaaagacagcaacaccaagaaggccggcaagacaggccccatgaaaaccctgctggttagagtgatgacacccgatctgagagagcggctggaaaacctgagaaagaagcctgaaaatatcccccagcccatcagcaatacatctagagccaacctgaataagctgctgaccgattacaccgaaatgaagaaggcgatcctgcatgtgtactgggaagagttccagaaggaccctgtgggcctgatgagccgggtggcccagcctgccagcaagaagatcgatcagaacaagctgaaacctgagatggacgagaagggcaacctgaccaccgccggctttgcctgctctcagtgtggccagcccctgttcgtgtacaagctggagcaggtgtctgagaagggcaaggcttacaccaactacttcggacggtgcaatgtggccgagcacgaaaagctgatcctgctggcccagctgaagcccgagaaggatagcgacgaagccgtgacatatagcctgggaaagtttgggcagagggccctggatttctacagcattcatgtgaccaaggagtccacccaccccgtgaagcccctggcccagatcgccggaaacagatacgcctccggacctgtgggaaaggccctgagcgacgcatgtatgggcacaatcgcctccttcctgtctaagtaccaggacatcatcatcgaacaccagaaggtggtgaagggcaaccagaagagactggagagcctgcgggagctggccggcaaggaaaacctggaataccctagcgtgaccctgccacctcagcctcacaccaaggagggcgttgatgcctacaacgaagtgatcgcccgggtgcgaatgtgggtgaacctgaacctgtggcagaagctgaagctaagcagagatgatgccaagcctctgctgagactgaagggattcccttcctttcctctggtcgagagacaggccaacgaagtggactggtgggacatggtgtgtaacgtgaagaagctgatcaacgagaaaaaggaggatggcaaggtgttttggcagaatctggctggctacaagagacaggaagccctgagaccatacctgagcagcgaggaagatcggaagaagggaaagaaattcgctcggtaccagctgggcgacctgctgctgcacctggaaaagaagcacggcgaggactggggaaaggtgtacgacgaggcctgggagcggattgacaagaaagtggaaggcctgagcaagcacatcaagctggaagaggaacggagaagcgaggacgcccagagcaaggccgccctgaccgactggctgcgggctaaggccagcttcgtgatcgagggcctgaaggaggccgacaaggacgagttctgcagatgcgagctgaagctgcagaagtggtacggggacctgcggggaaagcccttcgccatcgaagccgagaacagcatcctggacatcagcggcttcagcaagcagtacaactgtgccttcatctggcagaaggacggcgtgaagaagctgaacctgtacctgatcatcaactacttcaagggcggcaagctgcggttcaagaagatcaaacctgaagccttcgaagccaacagattctacaccgtgatcaacaaaaagagcggcgagatcgtgcccatggaggtgaacttcaacttcgacgaccccaacctgatcatcctgcctctggcctttggcaagagacagggcagagaattcatctggaacgacctgctgtccctggaaaccggcagcctgaagctggccaacggaagagtgatcgagaagacactgtacaacagaagaacccggcaggatgagcctgccctgttcgtggccctgaccttcgagcggcgggaggtcctggactcctccaatatcaaaccaatgaacctgatcggcgtggcaagaggcgaaaacatccccgccgtgatcgccctgaccgaccccgagggctgcccactgagccggtttaaggatagcctgggaaacccaacccacatcctgagaatcggcgagagctataaggagaagcagcggaccatccaggccaagaaggaggtggagcagcggagagccggcggctacagccggaagtacgccagcaaagccaagaatctggcagacgatatggtgagaaacaccgctagagatctgctgtactacgccgtgacccaggatgccatgctgatcttcgccaacctgagccggggcttcggccggcagggcaagcggaccttcatggccgagagacagtacacacggatggaggactggctgaccgccaagctggcctacgagggcctgagcaagacctacctgtccaagacactggcccagtacacctccaagacatgcagcaactgtgggtttaccatcaccagcgccgactacgacagggtgctggagaagctgaagaagacagcaacaggctggatgaccacaattaacggcaaggagctgaaggtggagggccagattacctactacaacagatacaagagacagaacgtagtcaaggacctgtccgtcgagctggatagactgagcgaagaatctgtgaacaacgacatctcctcctggacaaagggcagaagcggagaagctctgagcctcctgaagaaaagattctcccatagacccgtgcaggagaagttcgtgtgcctgaactgcggcttcgagacacacgcagccgagcaagccgccctgaacatcgccagatcctggctgttcctgcggagccaggagtacaagaaataccagacaaacaagacaaccggcaacaccgataagagagccttcgtcgagacctggcagtccttttaccggaagaagcttaaggaggtgtggaaacctgccgtgcggtctggcggatctggcggaggctccaccagccccaagaaaaagagaaaagtctaagctgccttctgcggggcttgccttctggccatgcccttcttctctcccttgcacctgtacctcttggtctttgaataaagcctgagtaggaaggctagcaaaaaaaaaaaaaaaaaaaaaaaaaaaaaaaaaaaaaaaaaaaaaaaaaaaaaaaaaaaaaaaaaaaaaaaaaaaaaaaa

SEQ ID NO: 9623 - RNA, 8787 nt, synthetic construct
  source 1..8787: mol_type = other RNA
aggaaataagagagaaaagaagagtaagaagaaatataagagccaccatggcccctaagaagaagcgtaaagtgagccggatgaaccacgaccaggagttcgacccccctaaggtgtaccctcccgtccccgccgagaagagaaagcccatccgggtcctgagcctgttcgatggcatcgccaccggtctgctggtgctgaaggacctgggcatccaggtggataggtacattgcctccgaggtgtgcgaggactccatcaccgtgggaatggtgcgtcatcagggcaagatcatgtacgtgggcgacgtgcggagcgtgacacagaagcatatccaggagtggggccctttcgacctggtgatcggcggcagcccttgcaatgacctgagcatcgtgaacccagcccggaagggcctgtacgagggaaccggcagactgttcttcgagttttacagactgctgcacgacgcccggcctaaggaaggcgacgaccggcccttcttttggctgttcgagaatgtggtggccatgggagtcagcgacaagcgggatattagccggttcctggagagcaaccccgtgatgatcgatgccaaggaagtgagcgccgcccaccgggccagatacttctggggcaatctgcctggcatgaacagacccctggccagcaccgtgaacgacaagctggagctgcaggagtgcctggagcacggccggatcgccaagttcagcaaggtgagaaccatcaccacccgaagcaacagcatcaaacaaggcaaggaccagcactttcctgtgttcatgaacgagaaggaggacatcctgtggtgtaccgagatggagagagtgttcgggttcccagtccactacacagatgtcagcaacatgtctagactggccagacagagactgctgggaagaagctggtccgtccctgtgatcagacacctgttcgcccctctgaaggagtacttcgcctgcgtgagcagcggcaacagcaacgccaacagccggggccccagcttctctagcggcctggtgccactgtccctgagagggagccacatgggccccatggagatctacaaaaccgtgagcgcctggaagcggcagcctgtgcgcgtgctgagcctgtttcggaatatcgataaagtcctgaaaagcctgggattcctggagagcggctctggctccggcggtggcaccctgaagtacgtggaggatgtgacaaacgtggtcagacgggatgtggagaagtggggccccttcgatctggtgtacggcagcacccaacccctgggcagctcttgtgaccggtgccctggctggtacatgtttcagttccaccggatcctgcagtacgccctgccgagacaggagtcccagcggccattcttttggattttcatggacaacttgctgctgaccgaggatgaccaggaaactaccactcggttcctgcagaccgaagccgtgaccctgcaggacgtgagaggccgggactaccagaacgccatgcgggtgtggtccaacatccctggactgaaaagcaagcacgcacctctgacccctaaagaagaggagtacctgcaggcccaggtgcggagcagaagcaagctggacgcccctaaggtggatctgctggtgaagaattgcctcctgcccctgagagagtacttcaagtatttcagccagaatagtctgcccctgggaggcagcggcggcggcctgctgaccttcgaggacgtggccatcagcttcagcgaggaggagtggaagctgatggaccccgcccagaagatgctgtacagcgacgtgatgcaggagaactacgagaccgtgatcagcctgggcctgaagctgaagaaggacaccggcaacgaccagcccatcagcaccagcaccctggagatccaggccagcggctgcaaggtgctgaggaaggccaggatgaaggtggcccagaagaccggcggcccaagcagcggcgcccctcctcccagcggcggcaggcggcccaagcagcggcgcccctcctcccagcggcggcagcccagccggctccccaacctctaccgaggagggcacctctgagtccgccacccccgagagcggccctggcacctccaccgagcccagcgagggcagcgcacccggcagccctgccggcagccccacctccacagaggagggaaccagcaccgagcccagcgaaggcagcgccccaggcaccagcaccgagcctagtgagcaggagattaaacggatcaacaagatcagaagaagacttgtgaaagacagcaacaccaagaaggccggcaagacaggccccatgaaaaccctgctggttagagtgatgacacccgatctgagagagcggctggaaaacctgagaaagaagcctgaaaatatcccccagcccatcagcaatacatctagagccaacctgaataagctgctgaccgattacaccgaaatgaagaaggcgatcctgcatgtgtactgggaagagttccagaaggaccctgtgggcctgatgagccgggtggcccagcctgccagcaagaagatcgatcagaacaagctgaaacctgagatggacgagaagggcaacctgaccaccgccggctttgcctgctctcagtgtggccagcccctgttcgtgtacaagctggagcaggtgtctgagaagggcaaggcttacaccaactacttcggacggtgcaatgtggccgagcacgaaaagctgatcctgctggcccagctgaagcccgagaaggatagcgacgaagccgtgacatatagcctgggaaagtttgggcagagggccctggatttctacagcattcatgtgaccaaggagtccacccaccccgtgaagcccctggcccagatcgccggaaacagatacgcctccggacctgtgggaaaggccctgagcgacgcatgtatgggcacaatcgcctccttcctgtctaagtaccaggacatcatcatcgaacaccagaaggtggtgaagggcaaccagaagagactggagagcctgcgggagctggccggcaaggaaaacctggaataccctagcgtgaccctgccacctcagcctcacaccaaggagggcgttgatgcctacaacgaagtgatcgcccgggtgcgaatgtgggtgaacctgaacctgtggcagaagctgaagctaagcagagatgatgccaagcctctgctgagactgaagggattcccttcctttcctctggtcgagagacaggccaacgaagtggactggtgggacatggtgtgtaacgtgaagaagctgatcaacgagaaaaaggaggatggcaaggtgttttggcagaatctggctggctacaagagacaggaagccctgagaccatacctgagcagcgaggaagatcggaagaagggaaagaaattcgctcggtaccagctgggcgacctgctgctgcacctggaaaagaagcacggcgaggactggggaaaggtgtacgacgaggcctgggagcggattgacaagaaagtggaaggcctgagcaagcacatcaagctggaagaggaacggagaagcgaggacgcccagagcaaggccgccctgaccgactggctgcgggctaaggccagcttcgtgatcgagggcctgaaggaggccgacaaggacgagttctgcagatgcgagctgaagctgcagaagtggtacggggacctgcggggaaagcccttcgccatcgaagccgagaacagcatcctggacatcagcggcttcagcaagcagtacaactgtgccttcatctggcagaaggacggcgtgaagaagctgaacctgtacctgatcatcaactacttcaagggcggcaagctgcggttcaagaagatcaaacctgaagccttcgaagccaacagattctacaccgtgatcaacaaaaagagcggcgagatcgtgcccatggaggtgaacttcaacttcgacgaccccaacctgatcatcctgcctctggcctttggcaagagacagggcagagaattcatctggaacgacctgctgtccctggaaaccggcagcctgaagctggccaacggaagagtgatcgagaagacactgtacaacagaagaacccggcaggatgagcctgccctgttcgtggccctgaccttcgagcggcgggaggtcctggactcctccaatatcaaaccaatgaacctgatcggcgtggcaagaggcgaaaacatccccgccgtgatcgccctgaccgaccccgagggctgcccactgagccggtttaaggatagcctgggaaacccaacccacatcctgagaatcggcgagagctataaggagaagcagcggaccatccaggccaagaaggaggtggagcagcggagagccggcggctacagccggaagtacgccagcaaagccaagaatctggcagacgatatggtgagaaacaccgctagagatctgctgtactacgccgtgacccaggatgccatgctgatcttcgccaacctgagccggggcttcggccggcagggcaagcggaccttcatggccgagagacagtacacacggatggaggactggctgaccgccaagctggcctacgagggcctgagcaagacctacctgtccaagacactggcccagtacacctccaagacatgcagcaactgtgggtttaccatcaccagcgccgactacgacagggtgctggagaagctgaagaagacagcaacaggctggatgaccacaattaacggcaaggagctgaaggtggagggccagattacctactacaacagatacaagagacagaacgtagtcaaggacctgtccgtcgagctggatagactgagcgaagaatctgtgaacaacgacatctcctcctggacaaagggcagaagcggagaagctctgagcctcctgaagaaaagattctcccatagacccgtgcaggagaagttcgtgtgcctgaactgcggcttcgagacacacgcagccgagcaagccgccctgaacatcgccagatcctggctgttcctgcggagccaggagtacaagaaataccagacaaacaagacaaccggcaacaccgataagagagccttcgtcgagacctggcagtccttttaccggaagaagcttaaggaggtgtggaaacctgccgtgcggtctggcggatctggcggaggctccaccagccccaagaaaaagagaaaagtctaagctgccttctgcggggcttgccttctggccatgcccttcttctctcccttgcacctgtacctcttggtctttgaataaagcctgagtaggaaggctagcaaaaaaaaaaaaaaaaaaaaaaaaaaaaaaaaaaaaaaaaaaaaaaaaaaaaaaaaaaaaaaaaaaaaaaaaaaaaaaaagcccagccggctccccaacctctaccgaggagggcacctctgagtccgccacccccgagagcggccctggcacctccaccgagcccagcgagggcagcgcacccggcagccctgccggcagccccacctccacagaggagggaaccagcaccgagcccagcgaaggcagcgccccaggcaccagcaccgagcctagtgagcaggagattaaacggatcaacaagatcagaagaagacttgtgaaagacagcaacaccaagaaggccggcaagacaggccccatgaaaaccctgctggttagagtgatgacacccgatctgagagagcggctggaaaacctgagaaagaagcctgaaaatatcccccagcccatcagcaatacatctagagccaacctgaataagctgctgaccgattacaccgaaatgaagaaggcgatcctgcatgtgtactgggaagagttccagaaggaccctgtgggcctgatgagccgggtggcccagcctgccagcaagaagatcgatcagaacaagctgaaacctgagatggacgagaagggcaacctgaccaccgccggctttgcctgctctcagtgtggccagcccctgttcgtgtacaagctggagcaggtgtctgagaagggcaaggcttacaccaactacttcggacggtgcaatgtggccgagcacgaaaagctgatcctgctggcccagctgaagcccgagaaggatagcgacgaagccgtgacatatagcctgggaaagtttgggcagagggccctggatttctacagcattcatgtgaccaaggagtccacccaccccgtgaagcccctggcccagatcgccggaaacagatacgcctccggacctgtgggaaaggccctgagcgacgcatgtatgggcacaatcgcctccttcctgtctaagtaccaggacatcatcatcgaacaccagaaggtggtgaagggcaaccagaagagactggagagcctgcgggagctggccggcaaggaaaacctggaataccctagcgtgaccctgccacctcagcctcacaccaaggagggcgttgatgcctacaacgaagtgatcgcccgggtgcgaatgtgggtgaacctgaacctgtggcagaagctgaagctaagcagagatgatgccaagcctctgctgagactgaagggattcccttcctttcctctggtcgagagacaggccaacgaagtggactggtgggacatggtgtgtaacgtgaagaagctgatcaacgagaaaaaggaggatggcaaggtgttttggcagaatctggctggctacaagagacaggaagccctgagaccatacctgagcagcgaggaagatcggaagaagggaaagaaattcgctcggtaccagctgggcgacctgctgctgcacctggaaaagaagcacggcgaggactggggaaaggtgtacgacgaggcctgggagcggattgacaagaaagtggaaggcctgagcaagcacatcaagctggaagaggaacggagaagcgaggacgcccagagcaaggccgccctgaccgactggctgcgggctaaggccagcttcgtgatcgagggcctgaaggaggccgacaaggacgagttctgcagatgcgagctgaagctgcagaagtggtacggggacctgcggggaaagcccttcgccatcgaagccgagaacagcatcctggacatcagcggcttcagcaagcagtacaactgtgccttcatctggcagaaggacggcgtgaagaagctgaacctgtacctgatcatcaactacttcaagggcggcaagctgcggttcaagaagatcaaacctgaagccttcgaagccaacagattctacaccgtgatcaacaaaaagagcggcgagatcgtgcccatggaggtgaacttcaacttcgacgaccccaacctgatcatcctgcctctggcctttggcaagagacagggcagagaattcatctggaacgacctgctgtccctggaaaccggcagcctgaagctggccaacggaagagtgatcgagaagacactgtacaacagaagaacccggcaggatgagcctgccctgttcgtggccctgaccttcgagcggcgggaggtcctggactcctccaatatcaaaccaatgaacctgatcggcgtggcaagaggcgaaaacatccccgccgtgatcgccctgaccgaccccgagggctgcccactgagccggtttaaggatagcctgggaaacccaacccacatcctgagaatcggcgagagctataaggagaagcagcggaccatccaggccaagaaggaggtggagcagcggagagccggcggctacagccggaagtacgccagcaaagccaagaatctggcagacgatatggtgagaaacaccgctagagatctgctgtactacgccgtgacccaggatgccatgctgatcttcgccaacctgagccggggcttcggccggcagggcaagcggaccttcatggccgagagacagtacacacggatggaggactggctgaccgccaagctggcctacgagggcctgagcaagacctacctgtccaagacactggcccagtacacctccaagacatgcagcaactgtgggtttaccatcaccagcgccgactacgacagggtgctggagaagctgaagaagacagcaacaggctggatgaccacaattaacggcaaggagctgaaggtggagggccagattacctactacaacagatacaagagacagaacgtagtcaaggacctgtccgtcgagctggatagactgagcgaagaatctgtgaacaacgacatctcctcctggacaaagggcagaagcggagaagctctgagcctcctgaagaaaagattctcccatagacccgtgcaggagaagttcgtgtgcctgaactgcggcttcgagacacacgcagccgagcaagccgccctgaacatcgccagatcctggctgttcctgcggagccaggagtacaagaaataccagacaaacaagacaaccggcaacaccgataagagagccttcgtcgagacctggcagtccttttaccggaagaagcttaaggaggtgtggaaacctgccgtgcggtctggcggatctggcggaggctccaccagccccaagaaaaagagaaaagtctaagctgccttctgcggggcttgccttctggccatgcccttcttctctcccttgcacctgtacctcttggtctttgaataaagcctgagtaggaaggctagcaaaaaaaaaaaaaaaaaaaaaaaaaaaaaaaaaaaaaaaaaaaaaaaaaaaaaaaaaaaaaaaaaaaaaaaaaaaaaaaa

SEQ ID NO: 9624 - RNA, 8787 nt, synthetic construct
  source 1..8787: mol_type = other RNA
aggaaataagagagaaaagaagagtaagaagaaatataagagccaccatggcccctaagaagaagcgtaaagtgagccggatgaaccacgaccaggagttcgacccccctaaggtgtaccctcccgtccccgccgagaagagaaagcccatccgggtcctgagcctgttcgatggcatcgccaccggtctgctggtgctgaaggacctgggcatccaggtggataggtacattgcctccgaggtgtgcgaggactccatcaccgtgggaatggtgcgtcatcagggcaagatcatgtacgtgggcgacgtgcggagcgtgacacagaagcatatccaggagtggggccctttcgacctggtgatcggcggcagcccttgcaatgacctgagcatcgtgaacccagcccggaagggcctgtacgagggaaccggcagactgttcttcgagttttacagactgctgcacgacgcccggcctaaggaaggcgacgaccggcccttcttttggctgttcgagaatgtggtggccatgggagtcagcgacaagcgggatattagccggttcctggagagcaaccccgtgatgatcgatgccaaggaagtgagcgccgcccaccgggccagatacttctggggcaatctgcctggcatgaacagacccctggccagcaccgtgaacgacaagctggagctgcaggagtgcctggagcacggccggatcgccaagttcagcaaggtgagaaccatcaccacccgaagcaacagcatcaaacaaggcaaggaccagcactttcctgtgttcatgaacgagaaggaggacatcctgtggtgtaccgagatggagagagtgttcgggttcccagtccactacacagatgtcagcaacatgtctagactggccagacagagactgctgggaagaagctggtccgtccctgtgatcagacacctgttcgcccctctgaaggagtacttcgcctgcgtgagcagcggcaacagcaacgccaacagccggggccccagcttctctagcggcctggtgccactgtccctgagagggagccacatgggccccatggagatctacaaaaccgtgagcgcctggaagcggcagcctgtgcgcgtgctgagcctgtttcggaatatcgataaagtcctgaaaagcctgggattcctggagagcggctctggctccggcggtggcaccctgaagtacgtggaggatgtgacaaacgtggtcagacgggatgtggagaagtggggccccttcgatctggtgtacggcagcacccaacccctgggcagctcttgtgaccggtgccctggctggtacatgtttcagttccaccggatcctgcagtacgccctgccgagacaggagtcccagcggccattcttttggattttcatggacaacttgctgctgaccgaggatgaccaggaaactaccactcggttcctgcagaccgaagccgtgaccctgcaggacgtgagaggccgggactaccagaacgccatgcgggtgtggtccaacatccctggactgaaaagcaagcacgcacctctgacccctaaagaagaggagtacctgcaggcccaggtgcggagcagaagcaagctggacgcccctaaggtggatctgctggtgaagaattgcctcctgcccctgagagagtacttcaagtatttcagccagaatagtctgcccctgggaggcagcggcggcggcagggtggtgttcgaggacgtggccgtgtacttcagccaggaggagtggggcctgctggacgaggcccagaggcacctgtaccacgccgtgatgaccgagaacttcgccctggtgaccagcctgggctgctggcacggcgcccagtacgaggaggcccccagcgagcagagcgtgagcgtgggcatgagcgaggtgggcacccccaagcccgaccccagcaccaagaaggcccagccctacgagggcggcccaagcagcggcgcccctcctcccagcggcggcaggcggcccaagcagcggcgcccctcctcccagcggcggcagcccagccggctccccaacctctaccgaggagggcacctctgagtccgccacccccgagagcggccctggcacctccaccgagcccagcgagggcagcgcacccggcagccctgccggcagccccacctccacagaggagggaaccagcaccgagcccagcgaaggcagcgccccaggcaccagcaccgagcctagtgagcaggagattaaacggatcaacaagatcagaagaagacttgtgaaagacagcaacaccaagaaggccggcaagacaggccccatgaaaaccctgctggttagagtgatgacacccgatctgagagagcggctggaaaacctgagaaagaagcctgaaaatatcccccagcccatcagcaatacatctagagccaacctgaataagctgctgaccgattacaccgaaatgaagaaggcgatcctgcatgtgtactgggaagagttccagaaggaccctgtgggcctgatgagccgggtggcccagcctgccagcaagaagatcgatcagaacaagctgaaacctgagatggacgagaagggcaacctgaccaccgccggctttgcctgctctcagtgtggccagcccctgttcgtgtacaagctggagcaggtgtctgagaagggcaaggcttacaccaactacttcggacggtgcaatgtggccgagcacgaaaagctgatcctgctggcccagctgaagcccgagaaggatagcgacgaagccgtgacatatagcctgggaaagtttgggcagagggccctggatttctacagcattcatgtgaccaaggagtccacccaccccgtgaagcccctggcccagatcgccggaaacagatacgcctccggacctgtgggaaaggccctgagcgacgcatgtatgggcacaatcgcctccttcctgtctaagtaccaggacatcatcatcgaacaccagaaggtggtgaagggcaaccagaagagactggagagcctgcgggagctggccggcaaggaaaacctggaataccctagcgtgaccctgccacctcagcctcacaccaaggagggcgttgatgcctacaacgaagtgatcgcccgggtgcgaatgtgggtgaacctgaacctgtggcagaagctgaagctaagcagagatgatgccaagcctctgctgagactgaagggattcccttcctttcctctggtcgagagacaggccaacgaagtggactggtgggacatggtgtgtaacgtgaagaagctgatcaacgagaaaaaggaggatggcaaggtgttttggcagaatctggctggctacaagagacaggaagccctgagaccatacctgagcagcgaggaagatcggaagaagggaaagaaattcgctcggtaccagctgggcgacctgctgctgcacctggaaaagaagcacggcgaggactggggaaaggtgtacgacgaggcctgggagcggattgacaagaaagtggaaggcctgagcaagcacatcaagctggaagaggaacggagaagcgaggacgcccagagcaaggccgccctgaccgactggctgcgggctaaggccagcttcgtgatcgagggcctgaaggaggccgacaaggacgagttctgcagatgcgagctgaagctgcagaagtggtacggggacctgcggggaaagcccttcgccatcgaagccgagaacagcatcctggacatcagcggcttcagcaagcagtacaactgtgccttcatctggcagaaggacggcgtgaagaagctgaacctgtacctgatcatcaactacttcaagggcggcaagctgcggttcaagaagatcaaacctgaagccttcgaagccaacagattctacaccgtgatcaacaaaaagagcggcgagatcgtgcccatggaggtgaacttcaacttcgacgaccccaacctgatcatcctgcctctggcctttggcaagagacagggcagagaattcatctggaacgacctgctgtccctggaaaccggcagcctgaagctggccaacggaagagtgatcgagaagacactgtacaacagaagaacccggcaggatgagcctgccctgttcgtggccctgaccttcgagcggcgggaggtcctggactcctccaatatcaaaccaatgaacctgatcggcgtggcaagaggcgaaaacatccccgccgtgatcgccctgaccgaccccgagggctgcccactgagccggtttaaggatagcctgggaaacccaacccacatcctgagaatcggcgagagctataaggagaagcagcggaccatccaggccaagaaggaggtggagcagcggagagccggcggctacagccggaagtacgccagcaaagccaagaatctggcagacgatatggtgagaaacaccgctagagatctgctgtactacgccgtgacccaggatgccatgctgatcttcgccaacctgagccggggcttcggccggcagggcaagcggaccttcatggccgagagacagtacacacggatggaggactggctgaccgccaagctggcctacgagggcctgagcaagacctacctgtccaagacactggcccagtacacctccaagacatgcagcaactgtgggtttaccatcaccagcgccgactacgacagggtgctggagaagctgaagaagacagcaacaggctggatgaccacaattaacggcaaggagctgaaggtggagggccagattacctactacaacagatacaagagacagaacgtagtcaaggacctgtccgtcgagctggatagactgagcgaagaatctgtgaacaacgacatctcctcctggacaaagggcagaagcggagaagctctgagcctcctgaagaaaagattctcccatagacccgtgcaggagaagttcgtgtgcctgaactgcggcttcgagacacacgcagccgagcaagccgccctgaacatcgccagatcctggctgttcctgcggagccaggagtacaagaaataccagacaaacaagacaaccggcaacaccgataagagagccttcgtcgagacctggcagtccttttaccggaagaagcttaaggaggtgtggaaacctgccgtgcggtctggcggatctggcggaggctccaccagccccaagaaaaagagaaaagtctaagctgccttctgcggggcttgccttctggccatgcccttcttctctcccttgcacctgtacctcttggtctttgaataaagcctgagtaggaaggctagcaaaaaaaaaaaaaaaaaaaaaaaaaaaaaaaaaaaaaaaaaaaaaaaaaaaaaaaaaaaaaaaaaaaaaaaaaaaaaaaagcccagccggctccccaacctctaccgaggagggcacctctgagtccgccacccccgagagcggccctggcacctccaccgagcccagcgagggcagcgcacccggcagccctgccggcagccccacctccacagaggagggaaccagcaccgagcccagcgaaggcagcgccccaggcaccagcaccgagcctagtgagcaggagattaaacggatcaacaagatcagaagaagacttgtgaaagacagcaacaccaagaaggccggcaagacaggccccatgaaaaccctgctggttagagtgatgacacccgatctgagagagcggctggaaaacctgagaaagaagcctgaaaatatcccccagcccatcagcaatacatctagagccaacctgaataagctgctgaccgattacaccgaaatgaagaaggcgatcctgcatgtgtactgggaagagttccagaaggaccctgtgggcctgatgagccgggtggcccagcctgccagcaagaagatcgatcagaacaagctgaaacctgagatggacgagaagggcaacctgaccaccgccggctttgcctgctctcagtgtggccagcccctgttcgtgtacaagctggagcaggtgtctgagaagggcaaggcttacaccaactacttcggacggtgcaatgtggccgagcacgaaaagctgatcctgctggcccagctgaagcccgagaaggatagcgacgaagccgtgacatatagcctgggaaagtttgggcagagggccctggatttctacagcattcatgtgaccaaggagtccacccaccccgtgaagcccctggcccagatcgccggaaacagatacgcctccggacctgtgggaaaggccctgagcgacgcatgtatgggcacaatcgcctccttcctgtctaagtaccaggacatcatcatcgaacaccagaaggtggtgaagggcaaccagaagagactggagagcctgcgggagctggccggcaaggaaaacctggaataccctagcgtgaccctgccacctcagcctcacaccaaggagggcgttgatgcctacaacgaagtgatcgcccgggtgcgaatgtgggtgaacctgaacctgtggcagaagctgaagctaagcagagatgatgccaagcctctgctgagactgaagggattcccttcctttcctctggtcgagagacaggccaacgaagtggactggtgggacatggtgtgtaacgtgaagaagctgatcaacgagaaaaaggaggatggcaaggtgttttggcagaatctggctggctacaagagacaggaagccctgagaccatacctgagcagcgaggaagatcggaagaagggaaagaaattcgctcggtaccagctgggcgacctgctgctgcacctggaaaagaagcacggcgaggactggggaaaggtgtacgacgaggcctgggagcggattgacaagaaagtggaaggcctgagcaagcacatcaagctggaagaggaacggagaagcgaggacgcccagagcaaggccgccctgaccgactggctgcgggctaaggccagcttcgtgatcgagggcctgaaggaggccgacaaggacgagttctgcagatgcgagctgaagctgcagaagtggtacggggacctgcggggaaagcccttcgccatcgaagccgagaacagcatcctggacatcagcggcttcagcaagcagtacaactgtgccttcatctggcagaaggacggcgtgaagaagctgaacctgtacctgatcatcaactacttcaagggcggcaagctgcggttcaagaagatcaaacctgaagccttcgaagccaacagattctacaccgtgatcaacaaaaagagcggcgagatcgtgcccatggaggtgaacttcaacttcgacgaccccaacctgatcatcctgcctctggcctttggcaagagacagggcagagaattcatctggaacgacctgctgtccctggaaaccggcagcctgaagctggccaacggaagagtgatcgagaagacactgtacaacagaagaacccggcaggatgagcctgccctgttcgtggccctgaccttcgagcggcgggaggtcctggactcctccaatatcaaaccaatgaacctgatcggcgtggcaagaggcgaaaacatccccgccgtgatcgccctgaccgaccccgagggctgcccactgagccggtttaaggatagcctgggaaacccaacccacatcctgagaatcggcgagagctataaggagaagcagcggaccatccaggccaagaaggaggtggagcagcggagagccggcggctacagccggaagtacgccagcaaagccaagaatctggcagacgatatggtgagaaacaccgctagagatctgctgtactacgccgtgacccaggatgccatgctgatcttcgccaacctgagccggggcttcggccggcagggcaagcggaccttcatggccgagagacagtacacacggatggaggactggctgaccgccaagctggcctacgagggcctgagcaagacctacctgtccaagacactggcccagtacacctccaagacatgcagcaactgtgggtttaccatcaccagcgccgactacgacagggtgctggagaagctgaagaagacagcaacaggctggatgaccacaattaacggcaaggagctgaaggtggagggccagattacctactacaacagatacaagagacagaacgtagtcaaggacctgtccgtcgagctggatagactgagcgaagaatctgtgaacaacgacatctcctcctggacaaagggcagaagcggagaagctctgagcctcctgaagaaaagattctcccatagacccgtgcaggagaagttcgtgtgcctgaactgcggcttcgagacacacgcagccgagcaagccgccctgaacatcgccagatcctggctgttcctgcggagccaggagtacaagaaataccagacaaacaagacaaccggcaacaccgataagagagccttcgtcgagacctggcagtccttttaccggaagaagcttaaggaggtgtggaaacctgccgtgcggtctggcggatctggcggaggctccaccagccccaagaaaaagagaaaagtctaagctgccttctgcggggcttgccttctggccatgcccttcttctctcccttgcacctgtacctcttggtctttgaataaagcctgagtaggaaggctagcaaaaaaaaaaaaaaaaaaaaaaaaaaaaaaaaaaaaaaaaaaaaaaaaaaaaaaaaaaaaaaaaaaaaaaaaaaaaaaaa

SEQ ID NO: 9625 - RNA, 8787 nt, synthetic construct
  source 1..8787: mol_type = other RNA
aggaaataagagagaaaagaagagtaagaagaaatataagagccaccatggcccctaagaagaagcgtaaagtgagccggatgaaccacgaccaggagttcgacccccctaaggtgtaccctcccgtccccgccgagaagagaaagcccatccgggtcctgagcctgttcgatggcatcgccaccggtctgctggtgctgaaggacctgggcatccaggtggataggtacattgcctccgaggtgtgcgaggactccatcaccgtgggaatggtgcgtcatcagggcaagatcatgtacgtgggcgacgtgcggagcgtgacacagaagcatatccaggagtggggccctttcgacctggtgatcggcggcagcccttgcaatgacctgagcatcgtgaacccagcccggaagggcctgtacgagggaaccggcagactgttcttcgagttttacagactgctgcacgacgcccggcctaaggaaggcgacgaccggcccttcttttggctgttcgagaatgtggtggccatgggagtcagcgacaagcgggatattagccggttcctggagagcaaccccgtgatgatcgatgccaaggaagtgagcgccgcccaccgggccagatacttctggggcaatctgcctggcatgaacagacccctggccagcaccgtgaacgacaagctggagctgcaggagtgcctggagcacggccggatcgccaagttcagcaaggtgagaaccatcaccacccgaagcaacagcatcaaacaaggcaaggaccagcactttcctgtgttcatgaacgagaaggaggacatcctgtggtgtaccgagatggagagagtgttcgggttcccagtccactacacagatgtcagcaacatgtctagactggccagacagagactgctgggaagaagctggtccgtccctgtgatcagacacctgttcgcccctctgaaggagtacttcgcctgcgtgagcagcggcaacagcaacgccaacagccggggccccagcttctctagcggcctggtgccactgtccctgagagggagccacatgggccccatggagatctacaaaaccgtgagcgcctggaagcggcagcctgtgcgcgtgctgagcctgtttcggaatatcgataaagtcctgaaaagcctgggattcctggagagcggctctggctccggcggtggcaccctgaagtacgtggaggatgtgacaaacgtggtcagacgggatgtggagaagtggggccccttcgatctggtgtacggcagcacccaacccctgggcagctcttgtgaccggtgccctggctggtacatgtttcagttccaccggatcctgcagtacgccctgccgagacaggagtcccagcggccattcttttggattttcatggacaacttgctgctgaccgaggatgaccaggaaactaccactcggttcctgcagaccgaagccgtgaccctgcaggacgtgagaggccgggactaccagaacgccatgcgggtgtggtccaacatccctggactgaaaagcaagcacgcacctctgacccctaaagaagaggagtacctgcaggcccaggtgcggagcagaagcaagctggacgcccctaaggtggatctgctggtgaagaattgcctcctgcccctgagagagtacttcaagtatttcagccagaatagtctgcccctgggaggcagcggcggcggcatggtgaccttcgaggacgtggccgtgcacttcaccaagaccgagtggaccggcctgagccccgcccagagggccctgtacaggagcgtgatgctggagaacttcggcaacctgaccgccctgggctaccccgtgcccaagcccgccctgatcagcctgctggagggcggcgacatggcctggggcctggaggcccaggacgacgcccccgccgagaggaccaagaacatctgcaagggcaggggcggcccaagcagcggcgcccctcctcccagcggcggcaggcggcccaagcagcggcgcccctcctcccagcggcggcagcccagccggctccccaacctctaccgaggagggcacctctgagtccgccacccccgagagcggccctggcacctccaccgagcccagcgagggcagcgcacccggcagccctgccggcagccccacctccacagaggagggaaccagcaccgagcccagcgaaggcagcgccccaggcaccagcaccgagcctagtgagcaggagattaaacggatcaacaagatcagaagaagacttgtgaaagacagcaacaccaagaaggccggcaagacaggccccatgaaaaccctgctggttagagtgatgacacccgatctgagagagcggctggaaaacctgagaaagaagcctgaaaatatcccccagcccatcagcaatacatctagagccaacctgaataagctgctgaccgattacaccgaaatgaagaaggcgatcctgcatgtgtactgggaagagttccagaaggaccctgtgggcctgatgagccgggtggcccagcctgccagcaagaagatcgatcagaacaagctgaaacctgagatggacgagaagggcaacctgaccaccgccggctttgcctgctctcagtgtggccagcccctgttcgtgtacaagctggagcaggtgtctgagaagggcaaggcttacaccaactacttcggacggtgcaatgtggccgagcacgaaaagctgatcctgctggcccagctgaagcccgagaaggatagcgacgaagccgtgacatatagcctgggaaagtttgggcagagggccctggatttctacagcattcatgtgaccaaggagtccacccaccccgtgaagcccctggcccagatcgccggaaacagatacgcctccggacctgtgggaaaggccctgagcgacgcatgtatgggcacaatcgcctccttcctgtctaagtaccaggacatcatcatcgaacaccagaaggtggtgaagggcaaccagaagagactggagagcctgcgggagctggccggcaaggaaaacctggaataccctagcgtgaccctgccacctcagcctcacaccaaggagggcgttgatgcctacaacgaagtgatcgcccgggtgcgaatgtgggtgaacctgaacctgtggcagaagctgaagctaagcagagatgatgccaagcctctgctgagactgaagggattcccttcctttcctctggtcgagagacaggccaacgaagtggactggtgggacatggtgtgtaacgtgaagaagctgatcaacgagaaaaaggaggatggcaaggtgttttggcagaatctggctggctacaagagacaggaagccctgagaccatacctgagcagcgaggaagatcggaagaagggaaagaaattcgctcggtaccagctgggcgacctgctgctgcacctggaaaagaagcacggcgaggactggggaaaggtgtacgacgaggcctgggagcggattgacaagaaagtggaaggcctgagcaagcacatcaagctggaagaggaacggagaagcgaggacgcccagagcaaggccgccctgaccgactggctgcgggctaaggccagcttcgtgatcgagggcctgaaggaggccgacaaggacgagttctgcagatgcgagctgaagctgcagaagtggtacggggacctgcggggaaagcccttcgccatcgaagccgagaacagcatcctggacatcagcggcttcagcaagcagtacaactgtgccttcatctggcagaaggacggcgtgaagaagctgaacctgtacctgatcatcaactacttcaagggcggcaagctgcggttcaagaagatcaaacctgaagccttcgaagccaacagattctacaccgtgatcaacaaaaagagcggcgagatcgtgcccatggaggtgaacttcaacttcgacgaccccaacctgatcatcctgcctctggcctttggcaagagacagggcagagaattcatctggaacgacctgctgtccctggaaaccggcagcctgaagctggccaacggaagagtgatcgagaagacactgtacaacagaagaacccggcaggatgagcctgccctgttcgtggccctgaccttcgagcggcgggaggtcctggactcctccaatatcaaaccaatgaacctgatcggcgtggcaagaggcgaaaacatccccgccgtgatcgccctgaccgaccccgagggctgcccactgagccggtttaaggatagcctgggaaacccaacccacatcctgagaatcggcgagagctataaggagaagcagcggaccatccaggccaagaaggaggtggagcagcggagagccggcggctacagccggaagtacgccagcaaagccaagaatctggcagacgatatggtgagaaacaccgctagagatctgctgtactacgccgtgacccaggatgccatgctgatcttcgccaacctgagccggggcttcggccggcagggcaagcggaccttcatggccgagagacagtacacacggatggaggactggctgaccgccaagctggcctacgagggcctgagcaagacctacctgtccaagacactggcccagtacacctccaagacatgcagcaactgtgggtttaccatcaccagcgccgactacgacagggtgctggagaagctgaagaagacagcaacaggctggatgaccacaattaacggcaaggagctgaaggtggagggccagattacctactacaacagatacaagagacagaacgtagtcaaggacctgtccgtcgagctggatagactgagcgaagaatctgtgaacaacgacatctcctcctggacaaagggcagaagcggagaagctctgagcctcctgaagaaaagattctcccatagacccgtgcaggagaagttcgtgtgcctgaactgcggcttcgagacacacgcagccgagcaagccgccctgaacatcgccagatcctggctgttcctgcggagccaggagtacaagaaataccagacaaacaagacaaccggcaacaccgataagagagccttcgtcgagacctggcagtccttttaccggaagaagcttaaggaggtgtggaaacctgccgtgcggtctggcggatctggcggaggctccaccagccccaagaaaaagagaaaagtctaagctgccttctgcggggcttgccttctggccatgcccttcttctctcccttgcacctgtacctcttggtctttgaataaagcctgagtaggaaggctagcaaaaaaaaaaaaaaaaaaaaaaaaaaaaaaaaaaaaaaaaaaaaaaaaaaaaaaaaaaaaaaaaaaaaaaaaaaaaaaaagcccagccggctccccaacctctaccgaggagggcacctctgagtccgccacccccgagagcggccctggcacctccaccgagcccagcgagggcagcgcacccggcagccctgccggcagccccacctccacagaggagggaaccagcaccgagcccagcgaaggcagcgccccaggcaccagcaccgagcctagtgagcaggagattaaacggatcaacaagatcagaagaagacttgtgaaagacagcaacaccaagaaggccggcaagacaggccccatgaaaaccctgctggttagagtgatgacacccgatctgagagagcggctggaaaacctgagaaagaagcctgaaaatatcccccagcccatcagcaatacatctagagccaacctgaataagctgctgaccgattacaccgaaatgaagaaggcgatcctgcatgtgtactgggaagagttccagaaggaccctgtgggcctgatgagccgggtggcccagcctgccagcaagaagatcgatcagaacaagctgaaacctgagatggacgagaagggcaacctgaccaccgccggctttgcctgctctcagtgtggccagcccctgttcgtgtacaagctggagcaggtgtctgagaagggcaaggcttacaccaactacttcggacggtgcaatgtggccgagcacgaaaagctgatcctgctggcccagctgaagcccgagaaggatagcgacgaagccgtgacatatagcctgggaaagtttgggcagagggccctggatttctacagcattcatgtgaccaaggagtccacccaccccgtgaagcccctggcccagatcgccggaaacagatacgcctccggacctgtgggaaaggccctgagcgacgcatgtatgggcacaatcgcctccttcctgtctaagtaccaggacatcatcatcgaacaccagaaggtggtgaagggcaaccagaagagactggagagcctgcgggagctggccggcaaggaaaacctggaataccctagcgtgaccctgccacctcagcctcacaccaaggagggcgttgatgcctacaacgaagtgatcgcccgggtgcgaatgtgggtgaacctgaacctgtggcagaagctgaagctaagcagagatgatgccaagcctctgctgagactgaagggattcccttcctttcctctggtcgagagacaggccaacgaagtggactggtgggacatggtgtgtaacgtgaagaagctgatcaacgagaaaaaggaggatggcaaggtgttttggcagaatctggctggctacaagagacaggaagccctgagaccatacctgagcagcgaggaagatcggaagaagggaaagaaattcgctcggtaccagctgggcgacctgctgctgcacctggaaaagaagcacggcgaggactggggaaaggtgtacgacgaggcctgggagcggattgacaagaaagtggaaggcctgagcaagcacatcaagctggaagaggaacggagaagcgaggacgcccagagcaaggccgccctgaccgactggctgcgggctaaggccagcttcgtgatcgagggcctgaaggaggccgacaaggacgagttctgcagatgcgagctgaagctgcagaagtggtacggggacctgcggggaaagcccttcgccatcgaagccgagaacagcatcctggacatcagcggcttcagcaagcagtacaactgtgccttcatctggcagaaggacggcgtgaagaagctgaacctgtacctgatcatcaactacttcaagggcggcaagctgcggttcaagaagatcaaacctgaagccttcgaagccaacagattctacaccgtgatcaacaaaaagagcggcgagatcgtgcccatggaggtgaacttcaacttcgacgaccccaacctgatcatcctgcctctggcctttggcaagagacagggcagagaattcatctggaacgacctgctgtccctggaaaccggcagcctgaagctggccaacggaagagtgatcgagaagacactgtacaacagaagaacccggcaggatgagcctgccctgttcgtggccctgaccttcgagcggcgggaggtcctggactcctccaatatcaaaccaatgaacctgatcggcgtggcaagaggcgaaaacatccccgccgtgatcgccctgaccgaccccgagggctgcccactgagccggtttaaggatagcctgggaaacccaacccacatcctgagaatcggcgagagctataaggagaagcagcggaccatccaggccaagaaggaggtggagcagcggagagccggcggctacagccggaagtacgccagcaaagccaagaatctggcagacgatatggtgagaaacaccgctagagatctgctgtactacgccgtgacccaggatgccatgctgatcttcgccaacctgagccggggcttcggccggcagggcaagcggaccttcatggccgagagacagtacacacggatggaggactggctgaccgccaagctggcctacgagggcctgagcaagacctacctgtccaagacactggcccagtacacctccaagacatgcagcaactgtgggtttaccatcaccagcgccgactacgacagggtgctggagaagctgaagaagacagcaacaggctggatgaccacaattaacggcaaggagctgaaggtggagggccagattacctactacaacagatacaagagacagaacgtagtcaaggacctgtccgtcgagctggatagactgagcgaagaatctgtgaacaacgacatctcctcctggacaaagggcagaagcggagaagctctgagcctcctgaagaaaagattctcccatagacccgtgcaggagaagttcgtgtgcctgaactgcggcttcgagacacacgcagccgagcaagccgccctgaacatcgccagatcctggctgttcctgcggagccaggagtacaagaaataccagacaaacaagacaaccggcaacaccgataagagagccttcgtcgagacctggcagtccttttaccggaagaagcttaaggaggtgtggaaacctgccgtgcggtctggcggatctggcggaggctccaccagccccaagaaaaagagaaaagtctaagctgccttctgcggggcttgccttctggccatgcccttcttctctcccttgcacctgtacctcttggtctttgaataaagcctgagtaggaaggctagcaaaaaaaaaaaaaaaaaaaaaaaaaaaaaaaaaaaaaaaaaaaaaaaaaaaaaaaaaaaaaaaaaaaaaaaaaaaaaaaa

SEQ ID NO: 9626 - RNA, 8787 nt, synthetic construct
  source 1..8787: mol_type = other RNA
aggaaataagagagaaaagaagagtaagaagaaatataagagccaccatggcccctaagaagaagcgtaaagtgagccggatgaaccacgaccaggagttcgacccccctaaggtgtaccctcccgtccccgccgagaagagaaagcccatccgggtcctgagcctgttcgatggcatcgccaccggtctgctggtgctgaaggacctgggcatccaggtggataggtacattgcctccgaggtgtgcgaggactccatcaccgtgggaatggtgcgtcatcagggcaagatcatgtacgtgggcgacgtgcggagcgtgacacagaagcatatccaggagtggggccctttcgacctggtgatcggcggcagcccttgcaatgacctgagcatcgtgaacccagcccggaagggcctgtacgagggaaccggcagactgttcttcgagttttacagactgctgcacgacgcccggcctaaggaaggcgacgaccggcccttcttttggctgttcgagaatgtggtggccatgggagtcagcgacaagcgggatattagccggttcctggagagcaaccccgtgatgatcgatgccaaggaagtgagcgccgcccaccgggccagatacttctggggcaatctgcctggcatgaacagacccctggccagcaccgtgaacgacaagctggagctgcaggagtgcctggagcacggccggatcgccaagttcagcaaggtgagaaccatcaccacccgaagcaacagcatcaaacaaggcaaggaccagcactttcctgtgttcatgaacgagaaggaggacatcctgtggtgtaccgagatggagagagtgttcgggttcccagtccactacacagatgtcagcaacatgtctagactggccagacagagactgctgggaagaagctggtccgtccctgtgatcagacacctgttcgcccctctgaaggagtacttcgcctgcgtgagcagcggcaacagcaacgccaacagccggggccccagcttctctagcggcctggtgccactgtccctgagagggagccacatgggccccatggagatctacaaaaccgtgagcgcctggaagcggcagcctgtgcgcgtgctgagcctgtttcggaatatcgataaagtcctgaaaagcctgggattcctggagagcggctctggctccggcggtggcaccctgaagtacgtggaggatgtgacaaacgtggtcagacgggatgtggagaagtggggccccttcgatctggtgtacggcagcacccaacccctgggcagctcttgtgaccggtgccctggctggtacatgtttcagttccaccggatcctgcagtacgccctgccgagacaggagtcccagcggccattcttttggattttcatggacaacttgctgctgaccgaggatgaccaggaaactaccactcggttcctgcagaccgaagccgtgaccctgcaggacgtgagaggccgggactaccagaacgccatgcgggtgtggtccaacatccctggactgaaaagcaagcacgcacctctgacccctaaagaagaggagtacctgcaggcccaggtgcggagcagaagcaagctggacgcccctaaggtggatctgctggtgaagaattgcctcctgcccctgagagagtacttcaagtatttcagccagaatagtctgcccctgggaggcagcggcggcggcggcgagagcctggagagcagggtgaccctgggcagcctgaccgccgagagccaggagctgctgaccttcaaggacgtgagcgtggacttcacccaggaggagtggggccagctggcccccgcccacaggaacctgtacagggaggtgatgctggagaactacggcaacctggtgagcgtgggctaccagctgagcaagcccggcgtgatcagccagctggagaagggcgaggagccctggctgggcggcccaagcagcggcgcccctcctcccagcggcggcaggcggcccaagcagcggcgcccctcctcccagcggcggcagcccagccggctccccaacctctaccgaggagggcacctctgagtccgccacccccgagagcggccctggcacctccaccgagcccagcgagggcagcgcacccggcagccctgccggcagccccacctccacagaggagggaaccagcaccgagcccagcgaaggcagcgccccaggcaccagcaccgagcctagtgagcaggagattaaacggatcaacaagatcagaagaagacttgtgaaagacagcaacaccaagaaggccggcaagacaggccccatgaaaaccctgctggttagagtgatgacacccgatctgagagagcggctggaaaacctgagaaagaagcctgaaaatatcccccagcccatcagcaatacatctagagccaacctgaataagctgctgaccgattacaccgaaatgaagaaggcgatcctgcatgtgtactgggaagagttccagaaggaccctgtgggcctgatgagccgggtggcccagcctgccagcaagaagatcgatcagaacaagctgaaacctgagatggacgagaagggcaacctgaccaccgccggctttgcctgctctcagtgtggccagcccctgttcgtgtacaagctggagcaggtgtctgagaagggcaaggcttacaccaactacttcggacggtgcaatgtggccgagcacgaaaagctgatcctgctggcccagctgaagcccgagaaggatagcgacgaagccgtgacatatagcctgggaaagtttgggcagagggccctggatttctacagcattcatgtgaccaaggagtccacccaccccgtgaagcccctggcccagatcgccggaaacagatacgcctccggacctgtgggaaaggccctgagcgacgcatgtatgggcacaatcgcctccttcctgtctaagtaccaggacatcatcatcgaacaccagaaggtggtgaagggcaaccagaagagactggagagcctgcgggagctggccggcaaggaaaacctggaataccctagcgtgaccctgccacctcagcctcacaccaaggagggcgttgatgcctacaacgaagtgatcgcccgggtgcgaatgtgggtgaacctgaacctgtggcagaagctgaagctaagcagagatgatgccaagcctctgctgagactgaagggattcccttcctttcctctggtcgagagacaggccaacgaagtggactggtgggacatggtgtgtaacgtgaagaagctgatcaacgagaaaaaggaggatggcaaggtgttttggcagaatctggctggctacaagagacaggaagccctgagaccatacctgagcagcgaggaagatcggaagaagggaaagaaattcgctcggtaccagctgggcgacctgctgctgcacctggaaaagaagcacggcgaggactggggaaaggtgtacgacgaggcctgggagcggattgacaagaaagtggaaggcctgagcaagcacatcaagctggaagaggaacggagaagcgaggacgcccagagcaaggccgccctgaccgactggctgcgggctaaggccagcttcgtgatcgagggcctgaaggaggccgacaaggacgagttctgcagatgcgagctgaagctgcagaagtggtacggggacctgcggggaaagcccttcgccatcgaagccgagaacagcatcctggacatcagcggcttcagcaagcagtacaactgtgccttcatctggcagaaggacggcgtgaagaagctgaacctgtacctgatcatcaactacttcaagggcggcaagctgcggttcaagaagatcaaacctgaagccttcgaagccaacagattctacaccgtgatcaacaaaaagagcggcgagatcgtgcccatggaggtgaacttcaacttcgacgaccccaacctgatcatcctgcctctggcctttggcaagagacagggcagagaattcatctggaacgacctgctgtccctggaaaccggcagcctgaagctggccaacggaagagtgatcgagaagacactgtacaacagaagaacccggcaggatgagcctgccctgttcgtggccctgaccttcgagcggcgggaggtcctggactcctccaatatcaaaccaatgaacctgatcggcgtggcaagaggcgaaaacatccccgccgtgatcgccctgaccgaccccgagggctgcccactgagccggtttaaggatagcctgggaaacccaacccacatcctgagaatcggcgagagctataaggagaagcagcggaccatccaggccaagaaggaggtggagcagcggagagccggcggctacagccggaagtacgccagcaaagccaagaatctggcagacgatatggtgagaaacaccgctagagatctgctgtactacgccgtgacccaggatgccatgctgatcttcgccaacctgagccggggcttcggccggcagggcaagcggaccttcatggccgagagacagtacacacggatggaggactggctgaccgccaagctggcctacgagggcctgagcaagacctacctgtccaagacactggcccagtacacctccaagacatgcagcaactgtgggtttaccatcaccagcgccgactacgacagggtgctggagaagctgaagaagacagcaacaggctggatgaccacaattaacggcaaggagctgaaggtggagggccagattacctactacaacagatacaagagacagaacgtagtcaaggacctgtccgtcgagctggatagactgagcgaagaatctgtgaacaacgacatctcctcctggacaaagggcagaagcggagaagctctgagcctcctgaagaaaagattctcccatagacccgtgcaggagaagttcgtgtgcctgaactgcggcttcgagacacacgcagccgagcaagccgccctgaacatcgccagatcctggctgttcctgcggagccaggagtacaagaaataccagacaaacaagacaaccggcaacaccgataagagagccttcgtcgagacctggcagtccttttaccggaagaagcttaaggaggtgtggaaacctgccgtgcggtctggcggatctggcggaggctccaccagccccaagaaaaagagaaaagtctaagctgccttctgcggggcttgccttctggccatgcccttcttctctcccttgcacctgtacctcttggtctttgaataaagcctgagtaggaaggctagcaaaaaaaaaaaaaaaaaaaaaaaaaaaaaaaaaaaaaaaaaaaaaaaaaaaaaaaaaaaaaaaaaaaaaaaaaaaaaaaagcccagccggctccccaacctctaccgaggagggcacctctgagtccgccacccccgagagcggccctggcacctccaccgagcccagcgagggcagcgcacccggcagccctgccggcagccccacctccacagaggagggaaccagcaccgagcccagcgaaggcagcgccccaggcaccagcaccgagcctagtgagcaggagattaaacggatcaacaagatcagaagaagacttgtgaaagacagcaacaccaagaaggccggcaagacaggccccatgaaaaccctgctggttagagtgatgacacccgatctgagagagcggctggaaaacctgagaaagaagcctgaaaatatcccccagcccatcagcaatacatctagagccaacctgaataagctgctgaccgattacaccgaaatgaagaaggcgatcctgcatgtgtactgggaagagttccagaaggaccctgtgggcctgatgagccgggtggcccagcctgccagcaagaagatcgatcagaacaagctgaaacctgagatggacgagaagggcaacctgaccaccgccggctttgcctgctctcagtgtggccagcccctgttcgtgtacaagctggagcaggtgtctgagaagggcaaggcttacaccaactacttcggacggtgcaatgtggccgagcacgaaaagctgatcctgctggcccagctgaagcccgagaaggatagcgacgaagccgtgacatatagcctgggaaagtttgggcagagggccctggatttctacagcattcatgtgaccaaggagtccacccaccccgtgaagcccctggcccagatcgccggaaacagatacgcctccggacctgtgggaaaggccctgagcgacgcatgtatgggcacaatcgcctccttcctgtctaagtaccaggacatcatcatcgaacaccagaaggtggtgaagggcaaccagaagagactggagagcctgcgggagctggccggcaaggaaaacctggaataccctagcgtgaccctgccacctcagcctcacaccaaggagggcgttgatgcctacaacgaagtgatcgcccgggtgcgaatgtgggtgaacctgaacctgtggcagaagctgaagctaagcagagatgatgccaagcctctgctgagactgaagggattcccttcctttcctctggtcgagagacaggccaacgaagtggactggtgggacatggtgtgtaacgtgaagaagctgatcaacgagaaaaaggaggatggcaaggtgttttggcagaatctggctggctacaagagacaggaagccctgagaccatacctgagcagcgaggaagatcggaagaagggaaagaaattcgctcggtaccagctgggcgacctgctgctgcacctggaaaagaagcacggcgaggactggggaaaggtgtacgacgaggcctgggagcggattgacaagaaagtggaaggcctgagcaagcacatcaagctggaagaggaacggagaagcgaggacgcccagagcaaggccgccctgaccgactggctgcgggctaaggccagcttcgtgatcgagggcctgaaggaggccgacaaggacgagttctgcagatgcgagctgaagctgcagaagtggtacggggacctgcggggaaagcccttcgccatcgaagccgagaacagcatcctggacatcagcggcttcagcaagcagtacaactgtgccttcatctggcagaaggacggcgtgaagaagctgaacctgtacctgatcatcaactacttcaagggcggcaagctgcggttcaagaagatcaaacctgaagccttcgaagccaacagattctacaccgtgatcaacaaaaagagcggcgagatcgtgcccatggaggtgaacttcaacttcgacgaccccaacctgatcatcctgcctctggcctttggcaagagacagggcagagaattcatctggaacgacctgctgtccctggaaaccggcagcctgaagctggccaacggaagagtgatcgagaagacactgtacaacagaagaacccggcaggatgagcctgccctgttcgtggccctgaccttcgagcggcgggaggtcctggactcctccaatatcaaaccaatgaacctgatcggcgtggcaagaggcgaaaacatccccgccgtgatcgccctgaccgaccccgagggctgcccactgagccggtttaaggatagcctgggaaacccaacccacatcctgagaatcggcgagagctataaggagaagcagcggaccatccaggccaagaaggaggtggagcagcggagagccggcggctacagccggaagtacgccagcaaagccaagaatctggcagacgatatggtgagaaacaccgctagagatctgctgtactacgccgtgacccaggatgccatgctgatcttcgccaacctgagccggggcttcggccggcagggcaagcggaccttcatggccgagagacagtacacacggatggaggactggctgaccgccaagctggcctacgagggcctgagcaagacctacctgtccaagacactggcccagtacacctccaagacatgcagcaactgtgggtttaccatcaccagcgccgactacgacagggtgctggagaagctgaagaagacagcaacaggctggatgaccacaattaacggcaaggagctgaaggtggagggccagattacctactacaacagatacaagagacagaacgtagtcaaggacctgtccgtcgagctggatagactgagcgaagaatctgtgaacaacgacatctcctcctggacaaagggcagaagcggagaagctctgagcctcctgaagaaaagattctcccatagacccgtgcaggagaagttcgtgtgcctgaactgcggcttcgagacacacgcagccgagcaagccgccctgaacatcgccagatcctggctgttcctgcggagccaggagtacaagaaataccagacaaacaagacaaccggcaacaccgataagagagccttcgtcgagacctggcagtccttttaccggaagaagcttaaggaggtgtggaaacctgccgtgcggtctggcggatctggcggaggctccaccagccccaagaaaaagagaaaagtctaagctgccttctgcggggcttgccttctggccatgcccttcttctctcccttgcacctgtacctcttggtctttgaataaagcctgagtaggaaggctagcaaaaaaaaaaaaaaaaaaaaaaaaaaaaaaaaaaaaaaaaaaaaaaaaaaaaaaaaaaaaaaaaaaaaaaaaaaaaaaaa

SEQ ID NO: 9627 - RNA, 8787 nt, synthetic construct
  source 1..8787: mol_type = other RNA
aggaaataagagagaaaagaagagtaagaagaaatataagagccaccatggcccctaagaagaagcgtaaagtgagccggatgaaccacgaccaggagttcgacccccctaaggtgtaccctcccgtccccgccgagaagagaaagcccatccgggtcctgagcctgttcgatggcatcgccaccggtctgctggtgctgaaggacctgggcatccaggtggataggtacattgcctccgaggtgtgcgaggactccatcaccgtgggaatggtgcgtcatcagggcaagatcatgtacgtgggcgacgtgcggagcgtgacacagaagcatatccaggagtggggccctttcgacctggtgatcggcggcagcccttgcaatgacctgagcatcgtgaacccagcccggaagggcctgtacgagggaaccggcagactgttcttcgagttttacagactgctgcacgacgcccggcctaaggaaggcgacgaccggcccttcttttggctgttcgagaatgtggtggccatgggagtcagcgacaagcgggatattagccggttcctggagagcaaccccgtgatgatcgatgccaaggaagtgagcgccgcccaccgggccagatacttctggggcaatctgcctggcatgaacagacccctggccagcaccgtgaacgacaagctggagctgcaggagtgcctggagcacggccggatcgccaagttcagcaaggtgagaaccatcaccacccgaagcaacagcatcaaacaaggcaaggaccagcactttcctgtgttcatgaacgagaaggaggacatcctgtggtgtaccgagatggagagagtgttcgggttcccagtccactacacagatgtcagcaacatgtctagactggccagacagagactgctgggaagaagctggtccgtccctgtgatcagacacctgttcgcccctctgaaggagtacttcgcctgcgtgagcagcggcaacagcaacgccaacagccggggccccagcttctctagcggcctggtgccactgtccctgagagggagccacatgggccccatggagatctacaaaaccgtgagcgcctggaagcggcagcctgtgcgcgtgctgagcctgtttcggaatatcgataaagtcctgaaaagcctgggattcctggagagcggctctggctccggcggtggcaccctgaagtacgtggaggatgtgacaaacgtggtcagacgggatgtggagaagtggggccccttcgatctggtgtacggcagcacccaacccctgggcagctcttgtgaccggtgccctggctggtacatgtttcagttccaccggatcctgcagtacgccctgccgagacaggagtcccagcggccattcttttggattttcatggacaacttgctgctgaccgaggatgaccaggaaactaccactcggttcctgcagaccgaagccgtgaccctgcaggacgtgagaggccgggactaccagaacgccatgcgggtgtggtccaacatccctggactgaaaagcaagcacgcacctctgacccctaaagaagaggagtacctgcaggcccaggtgcggagcagaagcaagctggacgcccctaaggtggatctgctggtgaagaattgcctcctgcccctgagagagtacttcaagtatttcagccagaatagtctgcccctgggaggcagcggcggcggcgccgccggcagggtgaccttcgaggacgtgaccgtgagcttcaccaagggcgagtggcagcagctgaaccccgagcagagggagctgtacagggacgtgatgctggagaactacggcaacctggtgagcgtgggcctggaggagaccagcaagcccagcgtgatcctgaggctggaggagggcaaggagccctggagcgaggaggaggtgctgaggggcggcaggcccgagaagaactgggacggcggcccaagcagcggcgcccctcctcccagcggcggcaggcggcccaagcagcggcgcccctcctcccagcggcggcagcccagccggctccccaacctctaccgaggagggcacctctgagtccgccacccccgagagcggccctggcacctccaccgagcccagcgagggcagcgcacccggcagccctgccggcagccccacctccacagaggagggaaccagcaccgagcccagcgaaggcagcgccccaggcaccagcaccgagcctagtgagcaggagattaaacggatcaacaagatcagaagaagacttgtgaaagacagcaacaccaagaaggccggcaagacaggccccatgaaaaccctgctggttagagtgatgacacccgatctgagagagcggctggaaaacctgagaaagaagcctgaaaatatcccccagcccatcagcaatacatctagagccaacctgaataagctgctgaccgattacaccgaaatgaagaaggcgatcctgcatgtgtactgggaagagttccagaaggaccctgtgggcctgatgagccgggtggcccagcctgccagcaagaagatcgatcagaacaagctgaaacctgagatggacgagaagggcaacctgaccaccgccggctttgcctgctctcagtgtggccagcccctgttcgtgtacaagctggagcaggtgtctgagaagggcaaggcttacaccaactacttcggacggtgcaatgtggccgagcacgaaaagctgatcctgctggcccagctgaagcccgagaaggatagcgacgaagccgtgacatatagcctgggaaagtttgggcagagggccctggatttctacagcattcatgtgaccaaggagtccacccaccccgtgaagcccctggcccagatcgccggaaacagatacgcctccggacctgtgggaaaggccctgagcgacgcatgtatgggcacaatcgcctccttcctgtctaagtaccaggacatcatcatcgaacaccagaaggtggtgaagggcaaccagaagagactggagagcctgcgggagctggccggcaaggaaaacctggaataccctagcgtgaccctgccacctcagcctcacaccaaggagggcgttgatgcctacaacgaagtgatcgcccgggtgcgaatgtgggtgaacctgaacctgtggcagaagctgaagctaagcagagatgatgccaagcctctgctgagactgaagggattcccttcctttcctctggtcgagagacaggccaacgaagtggactggtgggacatggtgtgtaacgtgaagaagctgatcaacgagaaaaaggaggatggcaaggtgttttggcagaatctggctggctacaagagacaggaagccctgagaccatacctgagcagcgaggaagatcggaagaagggaaagaaattcgctcggtaccagctgggcgacctgctgctgcacctggaaaagaagcacggcgaggactggggaaaggtgtacgacgaggcctgggagcggattgacaagaaagtggaaggcctgagcaagcacatcaagctggaagaggaacggagaagcgaggacgcccagagcaaggccgccctgaccgactggctgcgggctaaggccagcttcgtgatcgagggcctgaaggaggccgacaaggacgagttctgcagatgcgagctgaagctgcagaagtggtacggggacctgcggggaaagcccttcgccatcgaagccgagaacagcatcctggacatcagcggcttcagcaagcagtacaactgtgccttcatctggcagaaggacggcgtgaagaagctgaacctgtacctgatcatcaactacttcaagggcggcaagctgcggttcaagaagatcaaacctgaagccttcgaagccaacagattctacaccgtgatcaacaaaaagagcggcgagatcgtgcccatggaggtgaacttcaacttcgacgaccccaacctgatcatcctgcctctggcctttggcaagagacagggcagagaattcatctggaacgacctgctgtccctggaaaccggcagcctgaagctggccaacggaagagtgatcgagaagacactgtacaacagaagaacccggcaggatgagcctgccctgttcgtggccctgaccttcgagcggcgggaggtcctggactcctccaatatcaaaccaatgaacctgatcggcgtggcaagaggcgaaaacatccccgccgtgatcgccctgaccgaccccgagggctgcccactgagccggtttaaggatagcctgggaaacccaacccacatcctgagaatcggcgagagctataaggagaagcagcggaccatccaggccaagaaggaggtggagcagcggagagccggcggctacagccggaagtacgccagcaaagccaagaatctggcagacgatatggtgagaaacaccgctagagatctgctgtactacgccgtgacccaggatgccatgctgatcttcgccaacctgagccggggcttcggccggcagggcaagcggaccttcatggccgagagacagtacacacggatggaggactggctgaccgccaagctggcctacgagggcctgagcaagacctacctgtccaagacactggcccagtacacctccaagacatgcagcaactgtgggtttaccatcaccagcgccgactacgacagggtgctggagaagctgaagaagacagcaacaggctggatgaccacaattaacggcaaggagctgaaggtggagggccagattacctactacaacagatacaagagacagaacgtagtcaaggacctgtccgtcgagctggatagactgagcgaagaatctgtgaacaacgacatctcctcctggacaaagggcagaagcggagaagctctgagcctcctgaagaaaagattctcccatagacccgtgcaggagaagttcgtgtgcctgaactgcggcttcgagacacacgcagccgagcaagccgccctgaacatcgccagatcctggctgttcctgcggagccaggagtacaagaaataccagacaaacaagacaaccggcaacaccgataagagagccttcgtcgagacctggcagtccttttaccggaagaagcttaaggaggtgtggaaacctgccgtgcggtctggcggatctggcggaggctccaccagccccaagaaaaagagaaaagtctaagctgccttctgcggggcttgccttctggccatgcccttcttctctcccttgcacctgtacctcttggtctttgaataaagcctgagtaggaaggctagcaaaaaaaaaaaaaaaaaaaaaaaaaaaaaaaaaaaaaaaaaaaaaaaaaaaaaaaaaaaaaaaaaaaaaaaaaaaaaaaagcccagccggctccccaacctctaccgaggagggcacctctgagtccgccacccccgagagcggccctggcacctccaccgagcccagcgagggcagcgcacccggcagccctgccggcagccccacctccacagaggagggaaccagcaccgagcccagcgaaggcagcgccccaggcaccagcaccgagcctagtgagcaggagattaaacggatcaacaagatcagaagaagacttgtgaaagacagcaacaccaagaaggccggcaagacaggccccatgaaaaccctgctggttagagtgatgacacccgatctgagagagcggctggaaaacctgagaaagaagcctgaaaatatcccccagcccatcagcaatacatctagagccaacctgaataagctgctgaccgattacaccgaaatgaagaaggcgatcctgcatgtgtactgggaagagttccagaaggaccctgtgggcctgatgagccgggtggcccagcctgccagcaagaagatcgatcagaacaagctgaaacctgagatggacgagaagggcaacctgaccaccgccggctttgcctgctctcagtgtggccagcccctgttcgtgtacaagctggagcaggtgtctgagaagggcaaggcttacaccaactacttcggacggtgcaatgtggccgagcacgaaaagctgatcctgctggcccagctgaagcccgagaaggatagcgacgaagccgtgacatatagcctgggaaagtttgggcagagggccctggatttctacagcattcatgtgaccaaggagtccacccaccccgtgaagcccctggcccagatcgccggaaacagatacgcctccggacctgtgggaaaggccctgagcgacgcatgtatgggcacaatcgcctccttcctgtctaagtaccaggacatcatcatcgaacaccagaaggtggtgaagggcaaccagaagagactggagagcctgcgggagctggccggcaaggaaaacctggaataccctagcgtgaccctgccacctcagcctcacaccaaggagggcgttgatgcctacaacgaagtgatcgcccgggtgcgaatgtgggtgaacctgaacctgtggcagaagctgaagctaagcagagatgatgccaagcctctgctgagactgaagggattcccttcctttcctctggtcgagagacaggccaacgaagtggactggtgggacatggtgtgtaacgtgaagaagctgatcaacgagaaaaaggaggatggcaaggtgttttggcagaatctggctggctacaagagacaggaagccctgagaccatacctgagcagcgaggaagatcggaagaagggaaagaaattcgctcggtaccagctgggcgacctgctgctgcacctggaaaagaagcacggcgaggactggggaaaggtgtacgacgaggcctgggagcggattgacaagaaagtggaaggcctgagcaagcacatcaagctggaagaggaacggagaagcgaggacgcccagagcaaggccgccctgaccgactggctgcgggctaaggccagcttcgtgatcgagggcctgaaggaggccgacaaggacgagttctgcagatgcgagctgaagctgcagaagtggtacggggacctgcggggaaagcccttcgccatcgaagccgagaacagcatcctggacatcagcggcttcagcaagcagtacaactgtgccttcatctggcagaaggacggcgtgaagaagctgaacctgtacctgatcatcaactacttcaagggcggcaagctgcggttcaagaagatcaaacctgaagccttcgaagccaacagattctacaccgtgatcaacaaaaagagcggcgagatcgtgcccatggaggtgaacttcaacttcgacgaccccaacctgatcatcctgcctctggcctttggcaagagacagggcagagaattcatctggaacgacctgctgtccctggaaaccggcagcctgaagctggccaacggaagagtgatcgagaagacactgtacaacagaagaacccggcaggatgagcctgccctgttcgtggccctgaccttcgagcggcgggaggtcctggactcctccaatatcaaaccaatgaacctgatcggcgtggcaagaggcgaaaacatccccgccgtgatcgccctgaccgaccccgagggctgcccactgagccggtttaaggatagcctgggaaacccaacccacatcctgagaatcggcgagagctataaggagaagcagcggaccatccaggccaagaaggaggtggagcagcggagagccggcggctacagccggaagtacgccagcaaagccaagaatctggcagacgatatggtgagaaacaccgctagagatctgctgtactacgccgtgacccaggatgccatgctgatcttcgccaacctgagccggggcttcggccggcagggcaagcggaccttcatggccgagagacagtacacacggatggaggactggctgaccgccaagctggcctacgagggcctgagcaagacctacctgtccaagacactggcccagtacacctccaagacatgcagcaactgtgggtttaccatcaccagcgccgactacgacagggtgctggagaagctgaagaagacagcaacaggctggatgaccacaattaacggcaaggagctgaaggtggagggccagattacctactacaacagatacaagagacagaacgtagtcaaggacctgtccgtcgagctggatagactgagcgaagaatctgtgaacaacgacatctcctcctggacaaagggcagaagcggagaagctctgagcctcctgaagaaaagattctcccatagacccgtgcaggagaagttcgtgtgcctgaactgcggcttcgagacacacgcagccgagcaagccgccctgaacatcgccagatcctggctgttcctgcggagccaggagtacaagaaataccagacaaacaagacaaccggcaacaccgataagagagccttcgtcgagacctggcagtccttttaccggaagaagcttaaggaggtgtggaaacctgccgtgcggtctggcggatctggcggaggctccaccagccccaagaaaaagagaaaagtctaagctgccttctgcggggcttgccttctggccatgcccttcttctctcccttgcacctgtacctcttggtctttgaataaagcctgagtaggaaggctagcaaaaaaaaaaaaaaaaaaaaaaaaaaaaaaaaaaaaaaaaaaaaaaaaaaaaaaaaaaaaaaaaaaaaaaaaaaaaaaaa

SEQ ID NO: 9628 - RNA, 8787 nt, synthetic construct
  source 1..8787: mol_type = other RNA
aggaaataagagagaaaagaagagtaagaagaaatataagagccaccatggcccctaagaagaagcgtaaagtgagccggatgaaccacgaccaggagttcgacccccctaaggtgtaccctcccgtccccgccgagaagagaaagcccatccgggtcctgagcctgttcgatggcatcgccaccggtctgctggtgctgaaggacctgggcatccaggtggataggtacattgcctccgaggtgtgcgaggactccatcaccgtgggaatggtgcgtcatcagggcaagatcatgtacgtgggcgacgtgcggagcgtgacacagaagcatatccaggagtggggccctttcgacctggtgatcggcggcagcccttgcaatgacctgagcatcgtgaacccagcccggaagggcctgtacgagggaaccggcagactgttcttcgagttttacagactgctgcacgacgcccggcctaaggaaggcgacgaccggcccttcttttggctgttcgagaatgtggtggccatgggagtcagcgacaagcgggatattagccggttcctggagagcaaccccgtgatgatcgatgccaaggaagtgagcgccgcccaccgggccagatacttctggggcaatctgcctggcatgaacagacccctggccagcaccgtgaacgacaagctggagctgcaggagtgcctggagcacggccggatcgccaagttcagcaaggtgagaaccatcaccacccgaagcaacagcatcaaacaaggcaaggaccagcactttcctgtgttcatgaacgagaaggaggacatcctgtggtgtaccgagatggagagagtgttcgggttcccagtccactacacagatgtcagcaacatgtctagactggccagacagagactgctgggaagaagctggtccgtccctgtgatcagacacctgttcgcccctctgaaggagtacttcgcctgcgtgagcagcggcaacagcaacgccaacagccggggccccagcttctctagcggcctggtgccactgtccctgagagggagccacatgggccccatggagatctacaaaaccgtgagcgcctggaagcggcagcctgtgcgcgtgctgagcctgtttcggaatatcgataaagtcctgaaaagcctgggattcctggagagcggctctggctccggcggtggcaccctgaagtacgtggaggatgtgacaaacgtggtcagacgggatgtggagaagtggggccccttcgatctggtgtacggcagcacccaacccctgggcagctcttgtgaccggtgccctggctggtacatgtttcagttccaccggatcctgcagtacgccctgccgagacaggagtcccagcggccattcttttggattttcatggacaacttgctgctgaccgaggatgaccaggaaactaccactcggttcctgcagaccgaagccgtgaccctgcaggacgtgagaggccgggactaccagaacgccatgcgggtgtggtccaacatccctggactgaaaagcaagcacgcacctctgacccctaaagaagaggagtacctgcaggcccaggtgcggagcagaagcaagctggacgcccctaaggtggatctgctggtgaagaattgcctcctgcccctgagagagtacttcaagtatttcagccagaatagtctgcccctgggaggcagcggcggcggcgcccacaggagcctgatgttcagcgacgtgagcatcgtgttcagccaggaggagtgggagtacctggacctggagcagagggacctgtacagggacgtgatgctggagaactacagcaacctggtgagcctgggctgcttcatcagcaagcccgacgtgatcagcctgctggagcagggcaaggagccctggaaggtggtgaggaagggcaggaggaggtacgccgacctggagaccaggtacggcggcccaagcagcggcgcccctcctcccagcggcggcaggcggcccaagcagcggcgcccctcctcccagcggcggcagcccagccggctccccaacctctaccgaggagggcacctctgagtccgccacccccgagagcggccctggcacctccaccgagcccagcgagggcagcgcacccggcagccctgccggcagccccacctccacagaggagggaaccagcaccgagcccagcgaaggcagcgccccaggcaccagcaccgagcctagtgagcaggagattaaacggatcaacaagatcagaagaagacttgtgaaagacagcaacaccaagaaggccggcaagacaggccccatgaaaaccctgctggttagagtgatgacacccgatctgagagagcggctggaaaacctgagaaagaagcctgaaaatatcccccagcccatcagcaatacatctagagccaacctgaataagctgctgaccgattacaccgaaatgaagaaggcgatcctgcatgtgtactgggaagagttccagaaggaccctgtgggcctgatgagccgggtggcccagcctgccagcaagaagatcgatcagaacaagctgaaacctgagatggacgagaagggcaacctgaccaccgccggctttgcctgctctcagtgtggccagcccctgttcgtgtacaagctggagcaggtgtctgagaagggcaaggcttacaccaactacttcggacggtgcaatgtggccgagcacgaaaagctgatcctgctggcccagctgaagcccgagaaggatagcgacgaagccgtgacatatagcctgggaaagtttgggcagagggccctggatttctacagcattcatgtgaccaaggagtccacccaccccgtgaagcccctggcccagatcgccggaaacagatacgcctccggacctgtgggaaaggccctgagcgacgcatgtatgggcacaatcgcctccttcctgtctaagtaccaggacatcatcatcgaacaccagaaggtggtgaagggcaaccagaagagactggagagcctgcgggagctggccggcaaggaaaacctggaataccctagcgtgaccctgccacctcagcctcacaccaaggagggcgttgatgcctacaacgaagtgatcgcccgggtgcgaatgtgggtgaacctgaacctgtggcagaagctgaagctaagcagagatgatgccaagcctctgctgagactgaagggattcccttcctttcctctggtcgagagacaggccaacgaagtggactggtgggacatggtgtgtaacgtgaagaagctgatcaacgagaaaaaggaggatggcaaggtgttttggcagaatctggctggctacaagagacaggaagccctgagaccatacctgagcagcgaggaagatcggaagaagggaaagaaattcgctcggtaccagctgggcgacctgctgctgcacctggaaaagaagcacggcgaggactggggaaaggtgtacgacgaggcctgggagcggattgacaagaaagtggaaggcctgagcaagcacatcaagctggaagaggaacggagaagcgaggacgcccagagcaaggccgccctgaccgactggctgcgggctaaggccagcttcgtgatcgagggcctgaaggaggccgacaaggacgagttctgcagatgcgagctgaagctgcagaagtggtacggggacctgcggggaaagcccttcgccatcgaagccgagaacagcatcctggacatcagcggcttcagcaagcagtacaactgtgccttcatctggcagaaggacggcgtgaagaagctgaacctgtacctgatcatcaactacttcaagggcggcaagctgcggttcaagaagatcaaacctgaagccttcgaagccaacagattctacaccgtgatcaacaaaaagagcggcgagatcgtgcccatggaggtgaacttcaacttcgacgaccccaacctgatcatcctgcctctggcctttggcaagagacagggcagagaattcatctggaacgacctgctgtccctggaaaccggcagcctgaagctggccaacggaagagtgatcgagaagacactgtacaacagaagaacccggcaggatgagcctgccctgttcgtggccctgaccttcgagcggcgggaggtcctggactcctccaatatcaaaccaatgaacctgatcggcgtggcaagaggcgaaaacatccccgccgtgatcgccctgaccgaccccgagggctgcccactgagccggtttaaggatagcctgggaaacccaacccacatcctgagaatcggcgagagctataaggagaagcagcggaccatccaggccaagaaggaggtggagcagcggagagccggcggctacagccggaagtacgccagcaaagccaagaatctggcagacgatatggtgagaaacaccgctagagatctgctgtactacgccgtgacccaggatgccatgctgatcttcgccaacctgagccggggcttcggccggcagggcaagcggaccttcatggccgagagacagtacacacggatggaggactggctgaccgccaagctggcctacgagggcctgagcaagacctacctgtccaagacactggcccagtacacctccaagacatgcagcaactgtgggtttaccatcaccagcgccgactacgacagggtgctggagaagctgaagaagacagcaacaggctggatgaccacaattaacggcaaggagctgaaggtggagggccagattacctactacaacagatacaagagacagaacgtagtcaaggacctgtccgtcgagctggatagactgagcgaagaatctgtgaacaacgacatctcctcctggacaaagggcagaagcggagaagctctgagcctcctgaagaaaagattctcccatagacccgtgcaggagaagttcgtgtgcctgaactgcggcttcgagacacacgcagccgagcaagccgccctgaacatcgccagatcctggctgttcctgcggagccaggagtacaagaaataccagacaaacaagacaaccggcaacaccgataagagagccttcgtcgagacctggcagtccttttaccggaagaagcttaaggaggtgtggaaacctgccgtgcggtctggcggatctggcggaggctccaccagccccaagaaaaagagaaaagtctaagctgccttctgcggggcttgccttctggccatgcccttcttctctcccttgcacctgtacctcttggtctttgaataaagcctgagtaggaaggctagcaaaaaaaaaaaaaaaaaaaaaaaaaaaaaaaaaaaaaaaaaaaaaaaaaaaaaaaaaaaaaaaaaaaaaaaaaaaaaaaagcccagccggctccccaacctctaccgaggagggcacctctgagtccgccacccccgagagcggccctggcacctccaccgagcccagcgagggcagcgcacccggcagccctgccggcagccccacctccacagaggagggaaccagcaccgagcccagcgaaggcagcgccccaggcaccagcaccgagcctagtgagcaggagattaaacggatcaacaagatcagaagaagacttgtgaaagacagcaacaccaagaaggccggcaagacaggccccatgaaaaccctgctggttagagtgatgacacccgatctgagagagcggctggaaaacctgagaaagaagcctgaaaatatcccccagcccatcagcaatacatctagagccaacctgaataagctgctgaccgattacaccgaaatgaagaaggcgatcctgcatgtgtactgggaagagttccagaaggaccctgtgggcctgatgagccgggtggcccagcctgccagcaagaagatcgatcagaacaagctgaaacctgagatggacgagaagggcaacctgaccaccgccggctttgcctgctctcagtgtggccagcccctgttcgtgtacaagctggagcaggtgtctgagaagggcaaggcttacaccaactacttcggacggtgcaatgtggccgagcacgaaaagctgatcctgctggcccagctgaagcccgagaaggatagcgacgaagccgtgacatatagcctgggaaagtttgggcagagggccctggatttctacagcattcatgtgaccaaggagtccacccaccccgtgaagcccctggcccagatcgccggaaacagatacgcctccggacctgtgggaaaggccctgagcgacgcatgtatgggcacaatcgcctccttcctgtctaagtaccaggacatcatcatcgaacaccagaaggtggtgaagggcaaccagaagagactggagagcctgcgggagctggccggcaaggaaaacctggaataccctagcgtgaccctgccacctcagcctcacaccaaggagggcgttgatgcctacaacgaagtgatcgcccgggtgcgaatgtgggtgaacctgaacctgtggcagaagctgaagctaagcagagatgatgccaagcctctgctgagactgaagggattcccttcctttcctctggtcgagagacaggccaacgaagtggactggtgggacatggtgtgtaacgtgaagaagctgatcaacgagaaaaaggaggatggcaaggtgttttggcagaatctggctggctacaagagacaggaagccctgagaccatacctgagcagcgaggaagatcggaagaagggaaagaaattcgctcggtaccagctgggcgacctgctgctgcacctggaaaagaagcacggcgaggactggggaaaggtgtacgacgaggcctgggagcggattgacaagaaagtggaaggcctgagcaagcacatcaagctggaagaggaacggagaagcgaggacgcccagagcaaggccgccctgaccgactggctgcgggctaaggccagcttcgtgatcgagggcctgaaggaggccgacaaggacgagttctgcagatgcgagctgaagctgcagaagtggtacggggacctgcggggaaagcccttcgccatcgaagccgagaacagcatcctggacatcagcggcttcagcaagcagtacaactgtgccttcatctggcagaaggacggcgtgaagaagctgaacctgtacctgatcatcaactacttcaagggcggcaagctgcggttcaagaagatcaaacctgaagccttcgaagccaacagattctacaccgtgatcaacaaaaagagcggcgagatcgtgcccatggaggtgaacttcaacttcgacgaccccaacctgatcatcctgcctctggcctttggcaagagacagggcagagaattcatctggaacgacctgctgtccctggaaaccggcagcctgaagctggccaacggaagagtgatcgagaagacactgtacaacagaagaacccggcaggatgagcctgccctgttcgtggccctgaccttcgagcggcgggaggtcctggactcctccaatatcaaaccaatgaacctgatcggcgtggcaagaggcgaaaacatccccgccgtgatcgccctgaccgaccccgagggctgcccactgagccggtttaaggatagcctgggaaacccaacccacatcctgagaatcggcgagagctataaggagaagcagcggaccatccaggccaagaaggaggtggagcagcggagagccggcggctacagccggaagtacgccagcaaagccaagaatctggcagacgatatggtgagaaacaccgctagagatctgctgtactacgccgtgacccaggatgccatgctgatcttcgccaacctgagccggggcttcggccggcagggcaagcggaccttcatggccgagagacagtacacacggatggaggactggctgaccgccaagctggcctacgagggcctgagcaagacctacctgtccaagacactggcccagtacacctccaagacatgcagcaactgtgggtttaccatcaccagcgccgactacgacagggtgctggagaagctgaagaagacagcaacaggctggatgaccacaattaacggcaaggagctgaaggtggagggccagattacctactacaacagatacaagagacagaacgtagtcaaggacctgtccgtcgagctggatagactgagcgaagaatctgtgaacaacgacatctcctcctggacaaagggcagaagcggagaagctctgagcctcctgaagaaaagattctcccatagacccgtgcaggagaagttcgtgtgcctgaactgcggcttcgagacacacgcagccgagcaagccgccctgaacatcgccagatcctggctgttcctgcggagccaggagtacaagaaataccagacaaacaagacaaccggcaacaccgataagagagccttcgtcgagacctggcagtccttttaccggaagaagcttaaggaggtgtggaaacctgccgtgcggtctggcggatctggcggaggctccaccagccccaagaaaaagagaaaagtctaagctgccttctgcggggcttgccttctggccatgcccttcttctctcccttgcacctgtacctcttggtctttgaataaagcctgagtaggaaggctagcaaaaaaaaaaaaaaaaaaaaaaaaaaaaaaaaaaaaaaaaaaaaaaaaaaaaaaaaaaaaaaaaaaaaaaaaaaaaaaaa

SEQ ID NO: 9629 - RNA, 8787 nt, synthetic construct
  source 1..8787: mol_type = other RNA
aggaaataagagagaaaagaagagtaagaagaaatataagagccaccatggcccctaagaagaagcgtaaagtgagccggatgaaccacgaccaggagttcgacccccctaaggtgtaccctcccgtccccgccgagaagagaaagcccatccgggtcctgagcctgttcgatggcatcgccaccggtctgctggtgctgaaggacctgggcatccaggtggataggtacattgcctccgaggtgtgcgaggactccatcaccgtgggaatggtgcgtcatcagggcaagatcatgtacgtgggcgacgtgcggagcgtgacacagaagcatatccaggagtggggccctttcgacctggtgatcggcggcagcccttgcaatgacctgagcatcgtgaacccagcccggaagggcctgtacgagggaaccggcagactgttcttcgagttttacagactgctgcacgacgcccggcctaaggaaggcgacgaccggcccttcttttggctgttcgagaatgtggtggccatgggagtcagcgacaagcgggatattagccggttcctggagagcaaccccgtgatgatcgatgccaaggaagtgagcgccgcccaccgggccagatacttctggggcaatctgcctggcatgaacagacccctggccagcaccgtgaacgacaagctggagctgcaggagtgcctggagcacggccggatcgccaagttcagcaaggtgagaaccatcaccacccgaagcaacagcatcaaacaaggcaaggaccagcactttcctgtgttcatgaacgagaaggaggacatcctgtggtgtaccgagatggagagagtgttcgggttcccagtccactacacagatgtcagcaacatgtctagactggccagacagagactgctgggaagaagctggtccgtccctgtgatcagacacctgttcgcccctctgaaggagtacttcgcctgcgtgagcagcggcaacagcaacgccaacagccggggccccagcttctctagcggcctggtgccactgtccctgagagggagccacatgggccccatggagatctacaaaaccgtgagcgcctggaagcggcagcctgtgcgcgtgctgagcctgtttcggaatatcgataaagtcctgaaaagcctgggattcctggagagcggctctggctccggcggtggcaccctgaagtacgtggaggatgtgacaaacgtggtcagacgggatgtggagaagtggggccccttcgatctggtgtacggcagcacccaacccctgggcagctcttgtgaccggtgccctggctggtacatgtttcagttccaccggatcctgcagtacgccctgccgagacaggagtcccagcggccattcttttggattttcatggacaacttgctgctgaccgaggatgaccaggaaactaccactcggttcctgcagaccgaagccgtgaccctgcaggacgtgagaggccgggactaccagaacgccatgcgggtgtggtccaacatccctggactgaaaagcaagcacgcacctctgacccctaaagaagaggagtacctgcaggcccaggtgcggagcagaagcaagctggacgcccctaaggtggatctgctggtgaagaattgcctcctgcccctgagagagtacttcaagtatttcagccagaatagtctgcccctgggaggcagcggcggcggcatgaccaaggcccaggagagcctgaccctgaaggacgtggccgtggacttcacctgggaggagtggcagctgctgggccccgcccagaagaggctgtacagggacgtgatgctggagaactacagcaacctggtgagcgtgggctaccaggccagcaagcccgacgccctgaccaagctggagcagggcgagcccctgtggaccctggaggacgagatccacagccccgcccaccccgagatcggcggcccaagcagcggcgcccctcctcccagcggcggcaggcggcccaagcagcggcgcccctcctcccagcggcggcagcccagccggctccccaacctctaccgaggagggcacctctgagtccgccacccccgagagcggccctggcacctccaccgagcccagcgagggcagcgcacccggcagccctgccggcagccccacctccacagaggagggaaccagcaccgagcccagcgaaggcagcgccccaggcaccagcaccgagcctagtgagcaggagattaaacggatcaacaagatcagaagaagacttgtgaaagacagcaacaccaagaaggccggcaagacaggccccatgaaaaccctgctggttagagtgatgacacccgatctgagagagcggctggaaaacctgagaaagaagcctgaaaatatcccccagcccatcagcaatacatctagagccaacctgaataagctgctgaccgattacaccgaaatgaagaaggcgatcctgcatgtgtactgggaagagttccagaaggaccctgtgggcctgatgagccgggtggcccagcctgccagcaagaagatcgatcagaacaagctgaaacctgagatggacgagaagggcaacctgaccaccgccggctttgcctgctctcagtgtggccagcccctgttcgtgtacaagctggagcaggtgtctgagaagggcaaggcttacaccaactacttcggacggtgcaatgtggccgagcacgaaaagctgatcctgctggcccagctgaagcccgagaaggatagcgacgaagccgtgacatatagcctgggaaagtttgggcagagggccctggatttctacagcattcatgtgaccaaggagtccacccaccccgtgaagcccctggcccagatcgccggaaacagatacgcctccggacctgtgggaaaggccctgagcgacgcatgtatgggcacaatcgcctccttcctgtctaagtaccaggacatcatcatcgaacaccagaaggtggtgaagggcaaccagaagagactggagagcctgcgggagctggccggcaaggaaaacctggaataccctagcgtgaccctgccacctcagcctcacaccaaggagggcgttgatgcctacaacgaagtgatcgcccgggtgcgaatgtgggtgaacctgaacctgtggcagaagctgaagctaagcagagatgatgccaagcctctgctgagactgaagggattcccttcctttcctctggtcgagagacaggccaacgaagtggactggtgggacatggtgtgtaacgtgaagaagctgatcaacgagaaaaaggaggatggcaaggtgttttggcagaatctggctggctacaagagacaggaagccctgagaccatacctgagcagcgaggaagatcggaagaagggaaagaaattcgctcggtaccagctgggcgacctgctgctgcacctggaaaagaagcacggcgaggactggggaaaggtgtacgacgaggcctgggagcggattgacaagaaagtggaaggcctgagcaagcacatcaagctggaagaggaacggagaagcgaggacgcccagagcaaggccgccctgaccgactggctgcgggctaaggccagcttcgtgatcgagggcctgaaggaggccgacaaggacgagttctgcagatgcgagctgaagctgcagaagtggtacggggacctgcggggaaagcccttcgccatcgaagccgagaacagcatcctggacatcagcggcttcagcaagcagtacaactgtgccttcatctggcagaaggacggcgtgaagaagctgaacctgtacctgatcatcaactacttcaagggcggcaagctgcggttcaagaagatcaaacctgaagccttcgaagccaacagattctacaccgtgatcaacaaaaagagcggcgagatcgtgcccatggaggtgaacttcaacttcgacgaccccaacctgatcatcctgcctctggcctttggcaagagacagggcagagaattcatctggaacgacctgctgtccctggaaaccggcagcctgaagctggccaacggaagagtgatcgagaagacactgtacaacagaagaacccggcaggatgagcctgccctgttcgtggccctgaccttcgagcggcgggaggtcctggactcctccaatatcaaaccaatgaacctgatcggcgtggcaagaggcgaaaacatccccgccgtgatcgccctgaccgaccccgagggctgcccactgagccggtttaaggatagcctgggaaacccaacccacatcctgagaatcggcgagagctataaggagaagcagcggaccatccaggccaagaaggaggtggagcagcggagagccggcggctacagccggaagtacgccagcaaagccaagaatctggcagacgatatggtgagaaacaccgctagagatctgctgtactacgccgtgacccaggatgccatgctgatcttcgccaacctgagccggggcttcggccggcagggcaagcggaccttcatggccgagagacagtacacacggatggaggactggctgaccgccaagctggcctacgagggcctgagcaagacctacctgtccaagacactggcccagtacacctccaagacatgcagcaactgtgggtttaccatcaccagcgccgactacgacagggtgctggagaagctgaagaagacagcaacaggctggatgaccacaattaacggcaaggagctgaaggtggagggccagattacctactacaacagatacaagagacagaacgtagtcaaggacctgtccgtcgagctggatagactgagcgaagaatctgtgaacaacgacatctcctcctggacaaagggcagaagcggagaagctctgagcctcctgaagaaaagattctcccatagacccgtgcaggagaagttcgtgtgcctgaactgcggcttcgagacacacgcagccgagcaagccgccctgaacatcgccagatcctggctgttcctgcggagccaggagtacaagaaataccagacaaacaagacaaccggcaacaccgataagagagccttcgtcgagacctggcagtccttttaccggaagaagcttaaggaggtgtggaaacctgccgtgcggtctggcggatctggcggaggctccaccagccccaagaaaaagagaaaagtctaagctgccttctgcggggcttgccttctggccatgcccttcttctctcccttgcacctgtacctcttggtctttgaataaagcctgagtaggaaggctagcaaaaaaaaaaaaaaaaaaaaaaaaaaaaaaaaaaaaaaaaaaaaaaaaaaaaaaaaaaaaaaaaaaaaaaaaaaaaaaaagcccagccggctccccaacctctaccgaggagggcacctctgagtccgccacccccgagagcggccctggcacctccaccgagcccagcgagggcagcgcacccggcagccctgccggcagccccacctccacagaggagggaaccagcaccgagcccagcgaaggcagcgccccaggcaccagcaccgagcctagtgagcaggagattaaacggatcaacaagatcagaagaagacttgtgaaagacagcaacaccaagaaggccggcaagacaggccccatgaaaaccctgctggttagagtgatgacacccgatctgagagagcggctggaaaacctgagaaagaagcctgaaaatatcccccagcccatcagcaatacatctagagccaacctgaataagctgctgaccgattacaccgaaatgaagaaggcgatcctgcatgtgtactgggaagagttccagaaggaccctgtgggcctgatgagccgggtggcccagcctgccagcaagaagatcgatcagaacaagctgaaacctgagatggacgagaagggcaacctgaccaccgccggctttgcctgctctcagtgtggccagcccctgttcgtgtacaagctggagcaggtgtctgagaagggcaaggcttacaccaactacttcggacggtgcaatgtggccgagcacgaaaagctgatcctgctggcccagctgaagcccgagaaggatagcgacgaagccgtgacatatagcctgggaaagtttgggcagagggccctggatttctacagcattcatgtgaccaaggagtccacccaccccgtgaagcccctggcccagatcgccggaaacagatacgcctccggacctgtgggaaaggccctgagcgacgcatgtatgggcacaatcgcctccttcctgtctaagtaccaggacatcatcatcgaacaccagaaggtggtgaagggcaaccagaagagactggagagcctgcgggagctggccggcaaggaaaacctggaataccctagcgtgaccctgccacctcagcctcacaccaaggagggcgttgatgcctacaacgaagtgatcgcccgggtgcgaatgtgggtgaacctgaacctgtggcagaagctgaagctaagcagagatgatgccaagcctctgctgagactgaagggattcccttcctttcctctggtcgagagacaggccaacgaagtggactggtgggacatggtgtgtaacgtgaagaagctgatcaacgagaaaaaggaggatggcaaggtgttttggcagaatctggctggctacaagagacaggaagccctgagaccatacctgagcagcgaggaagatcggaagaagggaaagaaattcgctcggtaccagctgggcgacctgctgctgcacctggaaaagaagcacggcgaggactggggaaaggtgtacgacgaggcctgggagcggattgacaagaaagtggaaggcctgagcaagcacatcaagctggaagaggaacggagaagcgaggacgcccagagcaaggccgccctgaccgactggctgcgggctaaggccagcttcgtgatcgagggcctgaaggaggccgacaaggacgagttctgcagatgcgagctgaagctgcagaagtggtacggggacctgcggggaaagcccttcgccatcgaagccgagaacagcatcctggacatcagcggcttcagcaagcagtacaactgtgccttcatctggcagaaggacggcgtgaagaagctgaacctgtacctgatcatcaactacttcaagggcggcaagctgcggttcaagaagatcaaacctgaagccttcgaagccaacagattctacaccgtgatcaacaaaaagagcggcgagatcgtgcccatggaggtgaacttcaacttcgacgaccccaacctgatcatcctgcctctggcctttggcaagagacagggcagagaattcatctggaacgacctgctgtccctggaaaccggcagcctgaagctggccaacggaagagtgatcgagaagacactgtacaacagaagaacccggcaggatgagcctgccctgttcgtggccctgaccttcgagcggcgggaggtcctggactcctccaatatcaaaccaatgaacctgatcggcgtggcaagaggcgaaaacatccccgccgtgatcgccctgaccgaccccgagggctgcccactgagccggtttaaggatagcctgggaaacccaacccacatcctgagaatcggcgagagctataaggagaagcagcggaccatccaggccaagaaggaggtggagcagcggagagccggcggctacagccggaagtacgccagcaaagccaagaatctggcagacgatatggtgagaaacaccgctagagatctgctgtactacgccgtgacccaggatgccatgctgatcttcgccaacctgagccggggcttcggccggcagggcaagcggaccttcatggccgagagacagtacacacggatggaggactggctgaccgccaagctggcctacgagggcctgagcaagacctacctgtccaagacactggcccagtacacctccaagacatgcagcaactgtgggtttaccatcaccagcgccgactacgacagggtgctggagaagctgaagaagacagcaacaggctggatgaccacaattaacggcaaggagctgaaggtggagggccagattacctactacaacagatacaagagacagaacgtagtcaaggacctgtccgtcgagctggatagactgagcgaagaatctgtgaacaacgacatctcctcctggacaaagggcagaagcggagaagctctgagcctcctgaagaaaagattctcccatagacccgtgcaggagaagttcgtgtgcctgaactgcggcttcgagacacacgcagccgagcaagccgccctgaacatcgccagatcctggctgttcctgcggagccaggagtacaagaaataccagacaaacaagacaaccggcaacaccgataagagagccttcgtcgagacctggcagtccttttaccggaagaagcttaaggaggtgtggaaacctgccgtgcggtctggcggatctggcggaggctccaccagccccaagaaaaagagaaaagtctaagctgccttctgcggggcttgccttctggccatgcccttcttctctcccttgcacctgtacctcttggtctttgaataaagcctgagtaggaaggctagcaaaaaaaaaaaaaaaaaaaaaaaaaaaaaaaaaaaaaaaaaaaaaaaaaaaaaaaaaaaaaaaaaaaaaaaaaaaaaaaa

SEQ ID NO: 9630 - RNA, 8787 nt, synthetic construct
  source 1..8787: mol_type = other RNA
aggaaataagagagaaaagaagagtaagaagaaatataagagccaccatggcccctaagaagaagcgtaaagtgagccggatgaaccacgaccaggagttcgacccccctaaggtgtaccctcccgtccccgccgagaagagaaagcccatccgggtcctgagcctgttcgatggcatcgccaccggtctgctggtgctgaaggacctgggcatccaggtggataggtacattgcctccgaggtgtgcgaggactccatcaccgtgggaatggtgcgtcatcagggcaagatcatgtacgtgggcgacgtgcggagcgtgacacagaagcatatccaggagtggggccctttcgacctggtgatcggcggcagcccttgcaatgacctgagcatcgtgaacccagcccggaagggcctgtacgagggaaccggcagactgttcttcgagttttacagactgctgcacgacgcccggcctaaggaaggcgacgaccggcccttcttttggctgttcgagaatgtggtggccatgggagtcagcgacaagcgggatattagccggttcctggagagcaaccccgtgatgatcgatgccaaggaagtgagcgccgcccaccgggccagatacttctggggcaatctgcctggcatgaacagacccctggccagcaccgtgaacgacaagctggagctgcaggagtgcctggagcacggccggatcgccaagttcagcaaggtgagaaccatcaccacccgaagcaacagcatcaaacaaggcaaggaccagcactttcctgtgttcatgaacgagaaggaggacatcctgtggtgtaccgagatggagagagtgttcgggttcccagtccactacacagatgtcagcaacatgtctagactggccagacagagactgctgggaagaagctggtccgtccctgtgatcagacacctgttcgcccctctgaaggagtacttcgcctgcgtgagcagcggcaacagcaacgccaacagccggggccccagcttctctagcggcctggtgccactgtccctgagagggagccacatgggccccatggagatctacaaaaccgtgagcgcctggaagcggcagcctgtgcgcgtgctgagcctgtttcggaatatcgataaagtcctgaaaagcctgggattcctggagagcggctctggctccggcggtggcaccctgaagtacgtggaggatgtgacaaacgtggtcagacgggatgtggagaagtggggccccttcgatctggtgtacggcagcacccaacccctgggcagctcttgtgaccggtgccctggctggtacatgtttcagttccaccggatcctgcagtacgccctgccgagacaggagtcccagcggccattcttttggattttcatggacaacttgctgctgaccgaggatgaccaggaaactaccactcggttcctgcagaccgaagccgtgaccctgcaggacgtgagaggccgggactaccagaacgccatgcgggtgtggtccaacatccctggactgaaaagcaagcacgcacctctgacccctaaagaagaggagtacctgcaggcccaggtgcggagcagaagcaagctggacgcccctaaggtggatctgctggtgaagaattgcctcctgcccctgagagagtacttcaagtatttcagccagaatagtctgcccctgggaggcagcggcggcggcatgatgaccgccgtgagcctgaccaccaggccccaggagagcgtggccttcgaggacgtggccgtgtacttcaccaccaaggagtgggccatcatggtgcccgccgagagggccctgtacagggacgtgatgctggagaactacgaggccgtggccttcgtggtgccccccaccagcaagcccgccctggtgagccacctggagcagggcaaggagagctgcttcacccagccccagggcgtgggcggcccaagcagcggcgcccctcctcccagcggcggcaggcggcccaagcagcggcgcccctcctcccagcggcggcagcccagccggctccccaacctctaccgaggagggcacctctgagtccgccacccccgagagcggccctggcacctccaccgagcccagcgagggcagcgcacccggcagccctgccggcagccccacctccacagaggagggaaccagcaccgagcccagcgaaggcagcgccccaggcaccagcaccgagcctagtgagcaggagattaaacggatcaacaagatcagaagaagacttgtgaaagacagcaacaccaagaaggccggcaagacaggccccatgaaaaccctgctggttagagtgatgacacccgatctgagagagcggctggaaaacctgagaaagaagcctgaaaatatcccccagcccatcagcaatacatctagagccaacctgaataagctgctgaccgattacaccgaaatgaagaaggcgatcctgcatgtgtactgggaagagttccagaaggaccctgtgggcctgatgagccgggtggcccagcctgccagcaagaagatcgatcagaacaagctgaaacctgagatggacgagaagggcaacctgaccaccgccggctttgcctgctctcagtgtggccagcccctgttcgtgtacaagctggagcaggtgtctgagaagggcaaggcttacaccaactacttcggacggtgcaatgtggccgagcacgaaaagctgatcctgctggcccagctgaagcccgagaaggatagcgacgaagccgtgacatatagcctgggaaagtttgggcagagggccctggatttctacagcattcatgtgaccaaggagtccacccaccccgtgaagcccctggcccagatcgccggaaacagatacgcctccggacctgtgggaaaggccctgagcgacgcatgtatgggcacaatcgcctccttcctgtctaagtaccaggacatcatcatcgaacaccagaaggtggtgaagggcaaccagaagagactggagagcctgcgggagctggccggcaaggaaaacctggaataccctagcgtgaccctgccacctcagcctcacaccaaggagggcgttgatgcctacaacgaagtgatcgcccgggtgcgaatgtgggtgaacctgaacctgtggcagaagctgaagctaagcagagatgatgccaagcctctgctgagactgaagggattcccttcctttcctctggtcgagagacaggccaacgaagtggactggtgggacatggtgtgtaacgtgaagaagctgatcaacgagaaaaaggaggatggcaaggtgttttggcagaatctggctggctacaagagacaggaagccctgagaccatacctgagcagcgaggaagatcggaagaagggaaagaaattcgctcggtaccagctgggcgacctgctgctgcacctggaaaagaagcacggcgaggactggggaaaggtgtacgacgaggcctgggagcggattgacaagaaagtggaaggcctgagcaagcacatcaagctggaagaggaacggagaagcgaggacgcccagagcaaggccgccctgaccgactggctgcgggctaaggccagcttcgtgatcgagggcctgaaggaggccgacaaggacgagttctgcagatgcgagctgaagctgcagaagtggtacggggacctgcggggaaagcccttcgccatcgaagccgagaacagcatcctggacatcagcggcttcagcaagcagtacaactgtgccttcatctggcagaaggacggcgtgaagaagctgaacctgtacctgatcatcaactacttcaagggcggcaagctgcggttcaagaagatcaaacctgaagccttcgaagccaacagattctacaccgtgatcaacaaaaagagcggcgagatcgtgcccatggaggtgaacttcaacttcgacgaccccaacctgatcatcctgcctctggcctttggcaagagacagggcagagaattcatctggaacgacctgctgtccctggaaaccggcagcctgaagctggccaacggaagagtgatcgagaagacactgtacaacagaagaacccggcaggatgagcctgccctgttcgtggccctgaccttcgagcggcgggaggtcctggactcctccaatatcaaaccaatgaacctgatcggcgtggcaagaggcgaaaacatccccgccgtgatcgccctgaccgaccccgagggctgcccactgagccggtttaaggatagcctgggaaacccaacccacatcctgagaatcggcgagagctataaggagaagcagcggaccatccaggccaagaaggaggtggagcagcggagagccggcggctacagccggaagtacgccagcaaagccaagaatctggcagacgatatggtgagaaacaccgctagagatctgctgtactacgccgtgacccaggatgccatgctgatcttcgccaacctgagccggggcttcggccggcagggcaagcggaccttcatggccgagagacagtacacacggatggaggactggctgaccgccaagctggcctacgagggcctgagcaagacctacctgtccaagacactggcccagtacacctccaagacatgcagcaactgtgggtttaccatcaccagcgccgactacgacagggtgctggagaagctgaagaagacagcaacaggctggatgaccacaattaacggcaaggagctgaaggtggagggccagattacctactacaacagatacaagagacagaacgtagtcaaggacctgtccgtcgagctggatagactgagcgaagaatctgtgaacaacgacatctcctcctggacaaagggcagaagcggagaagctctgagcctcctgaagaaaagattctcccatagacccgtgcaggagaagttcgtgtgcctgaactgcggcttcgagacacacgcagccgagcaagccgccctgaacatcgccagatcctggctgttcctgcggagccaggagtacaagaaataccagacaaacaagacaaccggcaacaccgataagagagccttcgtcgagacctggcagtccttttaccggaagaagcttaaggaggtgtggaaacctgccgtgcggtctggcggatctggcggaggctccaccagccccaagaaaaagagaaaagtctaagctgccttctgcggggcttgccttctggccatgcccttcttctctcccttgcacctgtacctcttggtctttgaataaagcctgagtaggaaggctagcaaaaaaaaaaaaaaaaaaaaaaaaaaaaaaaaaaaaaaaaaaaaaaaaaaaaaaaaaaaaaaaaaaaaaaaaaaaaaaaagcccagccggctccccaacctctaccgaggagggcacctctgagtccgccacccccgagagcggccctggcacctccaccgagcccagcgagggcagcgcacccggcagccctgccggcagccccacctccacagaggagggaaccagcaccgagcccagcgaaggcagcgccccaggcaccagcaccgagcctagtgagcaggagattaaacggatcaacaagatcagaagaagacttgtgaaagacagcaacaccaagaaggccggcaagacaggccccatgaaaaccctgctggttagagtgatgacacccgatctgagagagcggctggaaaacctgagaaagaagcctgaaaatatcccccagcccatcagcaatacatctagagccaacctgaataagctgctgaccgattacaccgaaatgaagaaggcgatcctgcatgtgtactgggaagagttccagaaggaccctgtgggcctgatgagccgggtggcccagcctgccagcaagaagatcgatcagaacaagctgaaacctgagatggacgagaagggcaacctgaccaccgccggctttgcctgctctcagtgtggccagcccctgttcgtgtacaagctggagcaggtgtctgagaagggcaaggcttacaccaactacttcggacggtgcaatgtggccgagcacgaaaagctgatcctgctggcccagctgaagcccgagaaggatagcgacgaagccgtgacatatagcctgggaaagtttgggcagagggccctggatttctacagcattcatgtgaccaaggagtccacccaccccgtgaagcccctggcccagatcgccggaaacagatacgcctccggacctgtgggaaaggccctgagcgacgcatgtatgggcacaatcgcctccttcctgtctaagtaccaggacatcatcatcgaacaccagaaggtggtgaagggcaaccagaagagactggagagcctgcgggagctggccggcaaggaaaacctggaataccctagcgtgaccctgccacctcagcctcacaccaaggagggcgttgatgcctacaacgaagtgatcgcccgggtgcgaatgtgggtgaacctgaacctgtggcagaagctgaagctaagcagagatgatgccaagcctctgctgagactgaagggattcccttcctttcctctggtcgagagacaggccaacgaagtggactggtgggacatggtgtgtaacgtgaagaagctgatcaacgagaaaaaggaggatggcaaggtgttttggcagaatctggctggctacaagagacaggaagccctgagaccatacctgagcagcgaggaagatcggaagaagggaaagaaattcgctcggtaccagctgggcgacctgctgctgcacctggaaaagaagcacggcgaggactggggaaaggtgtacgacgaggcctgggagcggattgacaagaaagtggaaggcctgagcaagcacatcaagctggaagaggaacggagaagcgaggacgcccagagcaaggccgccctgaccgactggctgcgggctaaggccagcttcgtgatcgagggcctgaaggaggccgacaaggacgagttctgcagatgcgagctgaagctgcagaagtggtacggggacctgcggggaaagcccttcgccatcgaagccgagaacagcatcctggacatcagcggcttcagcaagcagtacaactgtgccttcatctggcagaaggacggcgtgaagaagctgaacctgtacctgatcatcaactacttcaagggcggcaagctgcggttcaagaagatcaaacctgaagccttcgaagccaacagattctacaccgtgatcaacaaaaagagcggcgagatcgtgcccatggaggtgaacttcaacttcgacgaccccaacctgatcatcctgcctctggcctttggcaagagacagggcagagaattcatctggaacgacctgctgtccctggaaaccggcagcctgaagctggccaacggaagagtgatcgagaagacactgtacaacagaagaacccggcaggatgagcctgccctgttcgtggccctgaccttcgagcggcgggaggtcctggactcctccaatatcaaaccaatgaacctgatcggcgtggcaagaggcgaaaacatccccgccgtgatcgccctgaccgaccccgagggctgcccactgagccggtttaaggatagcctgggaaacccaacccacatcctgagaatcggcgagagctataaggagaagcagcggaccatccaggccaagaaggaggtggagcagcggagagccggcggctacagccggaagtacgccagcaaagccaagaatctggcagacgatatggtgagaaacaccgctagagatctgctgtactacgccgtgacccaggatgccatgctgatcttcgccaacctgagccggggcttcggccggcagggcaagcggaccttcatggccgagagacagtacacacggatggaggactggctgaccgccaagctggcctacgagggcctgagcaagacctacctgtccaagacactggcccagtacacctccaagacatgcagcaactgtgggtttaccatcaccagcgccgactacgacagggtgctggagaagctgaagaagacagcaacaggctggatgaccacaattaacggcaaggagctgaaggtggagggccagattacctactacaacagatacaagagacagaacgtagtcaaggacctgtccgtcgagctggatagactgagcgaagaatctgtgaacaacgacatctcctcctggacaaagggcagaagcggagaagctctgagcctcctgaagaaaagattctcccatagacccgtgcaggagaagttcgtgtgcctgaactgcggcttcgagacacacgcagccgagcaagccgccctgaacatcgccagatcctggctgttcctgcggagccaggagtacaagaaataccagacaaacaagacaaccggcaacaccgataagagagccttcgtcgagacctggcagtccttttaccggaagaagcttaaggaggtgtggaaacctgccgtgcggtctggcggatctggcggaggctccaccagccccaagaaaaagagaaaagtctaagctgccttctgcggggcttgccttctggccatgcccttcttctctcccttgcacctgtacctcttggtctttgaataaagcctgagtaggaaggctagcaaaaaaaaaaaaaaaaaaaaaaaaaaaaaaaaaaaaaaaaaaaaaaaaaaaaaaaaaaaaaaaaaaaaaaaaaaaaaaaa

SEQ ID NO: 9631 - RNA, 8787 nt, synthetic construct
  source 1..8787: mol_type = other RNA
aggaaataagagagaaaagaagagtaagaagaaatataagagccaccatggcccctaagaagaagcgtaaagtgagccggatgaaccacgaccaggagttcgacccccctaaggtgtaccctcccgtccccgccgagaagagaaagcccatccgggtcctgagcctgttcgatggcatcgccaccggtctgctggtgctgaaggacctgggcatccaggtggataggtacattgcctccgaggtgtgcgaggactccatcaccgtgggaatggtgcgtcatcagggcaagatcatgtacgtgggcgacgtgcggagcgtgacacagaagcatatccaggagtggggccctttcgacctggtgatcggcggcagcccttgcaatgacctgagcatcgtgaacccagcccggaagggcctgtacgagggaaccggcagactgttcttcgagttttacagactgctgcacgacgcccggcctaaggaaggcgacgaccggcccttcttttggctgttcgagaatgtggtggccatgggagtcagcgacaagcgggatattagccggttcctggagagcaaccccgtgatgatcgatgccaaggaagtgagcgccgcccaccgggccagatacttctggggcaatctgcctggcatgaacagacccctggccagcaccgtgaacgacaagctggagctgcaggagtgcctggagcacggccggatcgccaagttcagcaaggtgagaaccatcaccacccgaagcaacagcatcaaacaaggcaaggaccagcactttcctgtgttcatgaacgagaaggaggacatcctgtggtgtaccgagatggagagagtgttcgggttcccagtccactacacagatgtcagcaacatgtctagactggccagacagagactgctgggaagaagctggtccgtccctgtgatcagacacctgttcgcccctctgaaggagtacttcgcctgcgtgagcagcggcaacagcaacgccaacagccggggccccagcttctctagcggcctggtgccactgtccctgagagggagccacatgggccccatggagatctacaaaaccgtgagcgcctggaagcggcagcctgtgcgcgtgctgagcctgtttcggaatatcgataaagtcctgaaaagcctgggattcctggagagcggctctggctccggcggtggcaccctgaagtacgtggaggatgtgacaaacgtggtcagacgggatgtggagaagtggggccccttcgatctggtgtacggcagcacccaacccctgggcagctcttgtgaccggtgccctggctggtacatgtttcagttccaccggatcctgcagtacgccctgccgagacaggagtcccagcggccattcttttggattttcatggacaacttgctgctgaccgaggatgaccaggaaactaccactcggttcctgcagaccgaagccgtgaccctgcaggacgtgagaggccgggactaccagaacgccatgcgggtgtggtccaacatccctggactgaaaagcaagcacgcacctctgacccctaaagaagaggagtacctgcaggcccaggtgcggagcagaagcaagctggacgcccctaaggtggatctgctggtgaagaattgcctcctgcccctgagagagtacttcaagtatttcagccagaatagtctgcccctgggaggcagcggcggcggccagatgcaggtgaagttcgaggacatcgccatcagcttcagccaggaggagtgggagtacctgaacgaggagcagaaggagctgtacagggaggtgatggaggagaactaccagaccctgctgagcctggccaccgacagccccaccttcacccccaagatcatcagctacatcaagaggggcgaggagccctacatcaggggcgagcccgacagcgaggagagggagagcggcaagagcagcggcggcccaagcagcggcgcccctcctcccagcggcggcaggcggcccaagcagcggcgcccctcctcccagcggcggcagcccagccggctccccaacctctaccgaggagggcacctctgagtccgccacccccgagagcggccctggcacctccaccgagcccagcgagggcagcgcacccggcagccctgccggcagccccacctccacagaggagggaaccagcaccgagcccagcgaaggcagcgccccaggcaccagcaccgagcctagtgagcaggagattaaacggatcaacaagatcagaagaagacttgtgaaagacagcaacaccaagaaggccggcaagacaggccccatgaaaaccctgctggttagagtgatgacacccgatctgagagagcggctggaaaacctgagaaagaagcctgaaaatatcccccagcccatcagcaatacatctagagccaacctgaataagctgctgaccgattacaccgaaatgaagaaggcgatcctgcatgtgtactgggaagagttccagaaggaccctgtgggcctgatgagccgggtggcccagcctgccagcaagaagatcgatcagaacaagctgaaacctgagatggacgagaagggcaacctgaccaccgccggctttgcctgctctcagtgtggccagcccctgttcgtgtacaagctggagcaggtgtctgagaagggcaaggcttacaccaactacttcggacggtgcaatgtggccgagcacgaaaagctgatcctgctggcccagctgaagcccgagaaggatagcgacgaagccgtgacatatagcctgggaaagtttgggcagagggccctggatttctacagcattcatgtgaccaaggagtccacccaccccgtgaagcccctggcccagatcgccggaaacagatacgcctccggacctgtgggaaaggccctgagcgacgcatgtatgggcacaatcgcctccttcctgtctaagtaccaggacatcatcatcgaacaccagaaggtggtgaagggcaaccagaagagactggagagcctgcgggagctggccggcaaggaaaacctggaataccctagcgtgaccctgccacctcagcctcacaccaaggagggcgttgatgcctacaacgaagtgatcgcccgggtgcgaatgtgggtgaacctgaacctgtggcagaagctgaagctaagcagagatgatgccaagcctctgctgagactgaagggattcccttcctttcctctggtcgagagacaggccaacgaagtggactggtgggacatggtgtgtaacgtgaagaagctgatcaacgagaaaaaggaggatggcaaggtgttttggcagaatctggctggctacaagagacaggaagccctgagaccatacctgagcagcgaggaagatcggaagaagggaaagaaattcgctcggtaccagctgggcgacctgctgctgcacctggaaaagaagcacggcgaggactggggaaaggtgtacgacgaggcctgggagcggattgacaagaaagtggaaggcctgagcaagcacatcaagctggaagaggaacggagaagcgaggacgcccagagcaaggccgccctgaccgactggctgcgggctaaggccagcttcgtgatcgagggcctgaaggaggccgacaaggacgagttctgcagatgcgagctgaagctgcagaagtggtacggggacctgcggggaaagcccttcgccatcgaagccgagaacagcatcctggacatcagcggcttcagcaagcagtacaactgtgccttcatctggcagaaggacggcgtgaagaagctgaacctgtacctgatcatcaactacttcaagggcggcaagctgcggttcaagaagatcaaacctgaagccttcgaagccaacagattctacaccgtgatcaacaaaaagagcggcgagatcgtgcccatggaggtgaacttcaacttcgacgaccccaacctgatcatcctgcctctggcctttggcaagagacagggcagagaattcatctggaacgacctgctgtccctggaaaccggcagcctgaagctggccaacggaagagtgatcgagaagacactgtacaacagaagaacccggcaggatgagcctgccctgttcgtggccctgaccttcgagcggcgggaggtcctggactcctccaatatcaaaccaatgaacctgatcggcgtggcaagaggcgaaaacatccccgccgtgatcgccctgaccgaccccgagggctgcccactgagccggtttaaggatagcctgggaaacccaacccacatcctgagaatcggcgagagctataaggagaagcagcggaccatccaggccaagaaggaggtggagcagcggagagccggcggctacagccggaagtacgccagcaaagccaagaatctggcagacgatatggtgagaaacaccgctagagatctgctgtactacgccgtgacccaggatgccatgctgatcttcgccaacctgagccggggcttcggccggcagggcaagcggaccttcatggccgagagacagtacacacggatggaggactggctgaccgccaagctggcctacgagggcctgagcaagacctacctgtccaagacactggcccagtacacctccaagacatgcagcaactgtgggtttaccatcaccagcgccgactacgacagggtgctggagaagctgaagaagacagcaacaggctggatgaccacaattaacggcaaggagctgaaggtggagggccagattacctactacaacagatacaagagacagaacgtagtcaaggacctgtccgtcgagctggatagactgagcgaagaatctgtgaacaacgacatctcctcctggacaaagggcagaagcggagaagctctgagcctcctgaagaaaagattctcccatagacccgtgcaggagaagttcgtgtgcctgaactgcggcttcgagacacacgcagccgagcaagccgccctgaacatcgccagatcctggctgttcctgcggagccaggagtacaagaaataccagacaaacaagacaaccggcaacaccgataagagagccttcgtcgagacctggcagtccttttaccggaagaagcttaaggaggtgtggaaacctgccgtgcggtctggcggatctggcggaggctccaccagccccaagaaaaagagaaaagtctaagctgccttctgcggggcttgccttctggccatgcccttcttctctcccttgcacctgtacctcttggtctttgaataaagcctgagtaggaaggctagcaaaaaaaaaaaaaaaaaaaaaaaaaaaaaaaaaaaaaaaaaaaaaaaaaaaaaaaaaaaaaaaaaaaaaaaaaaaaaaaagcccagccggctccccaacctctaccgaggagggcacctctgagtccgccacccccgagagcggccctggcacctccaccgagcccagcgagggcagcgcacccggcagccctgccggcagccccacctccacagaggagggaaccagcaccgagcccagcgaaggcagcgccccaggcaccagcaccgagcctagtgagcaggagattaaacggatcaacaagatcagaagaagacttgtgaaagacagcaacaccaagaaggccggcaagacaggccccatgaaaaccctgctggttagagtgatgacacccgatctgagagagcggctggaaaacctgagaaagaagcctgaaaatatcccccagcccatcagcaatacatctagagccaacctgaataagctgctgaccgattacaccgaaatgaagaaggcgatcctgcatgtgtactgggaagagttccagaaggaccctgtgggcctgatgagccgggtggcccagcctgccagcaagaagatcgatcagaacaagctgaaacctgagatggacgagaagggcaacctgaccaccgccggctttgcctgctctcagtgtggccagcccctgttcgtgtacaagctggagcaggtgtctgagaagggcaaggcttacaccaactacttcggacggtgcaatgtggccgagcacgaaaagctgatcctgctggcccagctgaagcccgagaaggatagcgacgaagccgtgacatatagcctgggaaagtttgggcagagggccctggatttctacagcattcatgtgaccaaggagtccacccaccccgtgaagcccctggcccagatcgccggaaacagatacgcctccggacctgtgggaaaggccctgagcgacgcatgtatgggcacaatcgcctccttcctgtctaagtaccaggacatcatcatcgaacaccagaaggtggtgaagggcaaccagaagagactggagagcctgcgggagctggccggcaaggaaaacctggaataccctagcgtgaccctgccacctcagcctcacaccaaggagggcgttgatgcctacaacgaagtgatcgcccgggtgcgaatgtgggtgaacctgaacctgtggcagaagctgaagctaagcagagatgatgccaagcctctgctgagactgaagggattcccttcctttcctctggtcgagagacaggccaacgaagtggactggtgggacatggtgtgtaacgtgaagaagctgatcaacgagaaaaaggaggatggcaaggtgttttggcagaatctggctggctacaagagacaggaagccctgagaccatacctgagcagcgaggaagatcggaagaagggaaagaaattcgctcggtaccagctgggcgacctgctgctgcacctggaaaagaagcacggcgaggactggggaaaggtgtacgacgaggcctgggagcggattgacaagaaagtggaaggcctgagcaagcacatcaagctggaagaggaacggagaagcgaggacgcccagagcaaggccgccctgaccgactggctgcgggctaaggccagcttcgtgatcgagggcctgaaggaggccgacaaggacgagttctgcagatgcgagctgaagctgcagaagtggtacggggacctgcggggaaagcccttcgccatcgaagccgagaacagcatcctggacatcagcggcttcagcaagcagtacaactgtgccttcatctggcagaaggacggcgtgaagaagctgaacctgtacctgatcatcaactacttcaagggcggcaagctgcggttcaagaagatcaaacctgaagccttcgaagccaacagattctacaccgtgatcaacaaaaagagcggcgagatcgtgcccatggaggtgaacttcaacttcgacgaccccaacctgatcatcctgcctctggcctttggcaagagacagggcagagaattcatctggaacgacctgctgtccctggaaaccggcagcctgaagctggccaacggaagagtgatcgagaagacactgtacaacagaagaacccggcaggatgagcctgccctgttcgtggccctgaccttcgagcggcgggaggtcctggactcctccaatatcaaaccaatgaacctgatcggcgtggcaagaggcgaaaacatccccgccgtgatcgccctgaccgaccccgagggctgcccactgagccggtttaaggatagcctgggaaacccaacccacatcctgagaatcggcgagagctataaggagaagcagcggaccatccaggccaagaaggaggtggagcagcggagagccggcggctacagccggaagtacgccagcaaagccaagaatctggcagacgatatggtgagaaacaccgctagagatctgctgtactacgccgtgacccaggatgccatgctgatcttcgccaacctgagccggggcttcggccggcagggcaagcggaccttcatggccgagagacagtacacacggatggaggactggctgaccgccaagctggcctacgagggcctgagcaagacctacctgtccaagacactggcccagtacacctccaagacatgcagcaactgtgggtttaccatcaccagcgccgactacgacagggtgctggagaagctgaagaagacagcaacaggctggatgaccacaattaacggcaaggagctgaaggtggagggccagattacctactacaacagatacaagagacagaacgtagtcaaggacctgtccgtcgagctggatagactgagcgaagaatctgtgaacaacgacatctcctcctggacaaagggcagaagcggagaagctctgagcctcctgaagaaaagattctcccatagacccgtgcaggagaagttcgtgtgcctgaactgcggcttcgagacacacgcagccgagcaagccgccctgaacatcgccagatcctggctgttcctgcggagccaggagtacaagaaataccagacaaacaagacaaccggcaacaccgataagagagccttcgtcgagacctggcagtccttttaccggaagaagcttaaggaggtgtggaaacctgccgtgcggtctggcggatctggcggaggctccaccagccccaagaaaaagagaaaagtctaagctgccttctgcggggcttgccttctggccatgcccttcttctctcccttgcacctgtacctcttggtctttgaataaagcctgagtaggaaggctagcaaaaaaaaaaaaaaaaaaaaaaaaaaaaaaaaaaaaaaaaaaaaaaaaaaaaaaaaaaaaaaaaaaaaaaaaaaaaaaaa

SEQ ID NO: 9632 - RNA, 8787 nt, synthetic construct
  source 1..8787: mol_type = other RNA
aggaaataagagagaaaagaagagtaagaagaaatataagagccaccatggcccctaagaagaagcgtaaagtgagccggatgaaccacgaccaggagttcgacccccctaaggtgtaccctcccgtccccgccgagaagagaaagcccatccgggtcctgagcctgttcgatggcatcgccaccggtctgctggtgctgaaggacctgggcatccaggtggataggtacattgcctccgaggtgtgcgaggactccatcaccgtgggaatggtgcgtcatcagggcaagatcatgtacgtgggcgacgtgcggagcgtgacacagaagcatatccaggagtggggccctttcgacctggtgatcggcggcagcccttgcaatgacctgagcatcgtgaacccagcccggaagggcctgtacgagggaaccggcagactgttcttcgagttttacagactgctgcacgacgcccggcctaaggaaggcgacgaccggcccttcttttggctgttcgagaatgtggtggccatgggagtcagcgacaagcgggatattagccggttcctggagagcaaccccgtgatgatcgatgccaaggaagtgagcgccgcccaccgggccagatacttctggggcaatctgcctggcatgaacagacccctggccagcaccgtgaacgacaagctggagctgcaggagtgcctggagcacggccggatcgccaagttcagcaaggtgagaaccatcaccacccgaagcaacagcatcaaacaaggcaaggaccagcactttcctgtgttcatgaacgagaaggaggacatcctgtggtgtaccgagatggagagagtgttcgggttcccagtccactacacagatgtcagcaacatgtctagactggccagacagagactgctgggaagaagctggtccgtccctgtgatcagacacctgttcgcccctctgaaggagtacttcgcctgcgtgagcagcggcaacagcaacgccaacagccggggccccagcttctctagcggcctggtgccactgtccctgagagggagccacatgggccccatggagatctacaaaaccgtgagcgcctggaagcggcagcctgtgcgcgtgctgagcctgtttcggaatatcgataaagtcctgaaaagcctgggattcctggagagcggctctggctccggcggtggcaccctgaagtacgtggaggatgtgacaaacgtggtcagacgggatgtggagaagtggggccccttcgatctggtgtacggcagcacccaacccctgggcagctcttgtgaccggtgccctggctggtacatgtttcagttccaccggatcctgcagtacgccctgccgagacaggagtcccagcggccattcttttggattttcatggacaacttgctgctgaccgaggatgaccaggaaactaccactcggttcctgcagaccgaagccgtgaccctgcaggacgtgagaggccgggactaccagaacgccatgcgggtgtggtccaacatccctggactgaaaagcaagcacgcacctctgacccctaaagaagaggagtacctgcaggcccaggtgcggagcagaagcaagctggacgcccctaaggtggatctgctggtgaagaattgcctcctgcccctgagagagtacttcaagtatttcagccagaatagtctgcccctgggaggcagcggcggcggcgtgcaggccagcctgagcttcgaggacgtggccgtgcacttcacctgggaggagtggcagctgctggaccccagccagaaggacctgtacaggaacgtgatgtgggagaactactgcaacctggtgagcgtgggctaccagacccccaagcccgacagcttcttccagctggagcagggcgagcccccctggaccgtggagggcgccggccagagccagacctgccccggcaccagggccagcggcggcccaagcagcggcgcccctcctcccagcggcggcaggcggcccaagcagcggcgcccctcctcccagcggcggcagcccagccggctccccaacctctaccgaggagggcacctctgagtccgccacccccgagagcggccctggcacctccaccgagcccagcgagggcagcgcacccggcagccctgccggcagccccacctccacagaggagggaaccagcaccgagcccagcgaaggcagcgccccaggcaccagcaccgagcctagtgagcaggagattaaacggatcaacaagatcagaagaagacttgtgaaagacagcaacaccaagaaggccggcaagacaggccccatgaaaaccctgctggttagagtgatgacacccgatctgagagagcggctggaaaacctgagaaagaagcctgaaaatatcccccagcccatcagcaatacatctagagccaacctgaataagctgctgaccgattacaccgaaatgaagaaggcgatcctgcatgtgtactgggaagagttccagaaggaccctgtgggcctgatgagccgggtggcccagcctgccagcaagaagatcgatcagaacaagctgaaacctgagatggacgagaagggcaacctgaccaccgccggctttgcctgctctcagtgtggccagcccctgttcgtgtacaagctggagcaggtgtctgagaagggcaaggcttacaccaactacttcggacggtgcaatgtggccgagcacgaaaagctgatcctgctggcccagctgaagcccgagaaggatagcgacgaagccgtgacatatagcctgggaaagtttgggcagagggccctggatttctacagcattcatgtgaccaaggagtccacccaccccgtgaagcccctggcccagatcgccggaaacagatacgcctccggacctgtgggaaaggccctgagcgacgcatgtatgggcacaatcgcctccttcctgtctaagtaccaggacatcatcatcgaacaccagaaggtggtgaagggcaaccagaagagactggagagcctgcgggagctggccggcaaggaaaacctggaataccctagcgtgaccctgccacctcagcctcacaccaaggagggcgttgatgcctacaacgaagtgatcgcccgggtgcgaatgtgggtgaacctgaacctgtggcagaagctgaagctaagcagagatgatgccaagcctctgctgagactgaagggattcccttcctttcctctggtcgagagacaggccaacgaagtggactggtgggacatggtgtgtaacgtgaagaagctgatcaacgagaaaaaggaggatggcaaggtgttttggcagaatctggctggctacaagagacaggaagccctgagaccatacctgagcagcgaggaagatcggaagaagggaaagaaattcgctcggtaccagctgggcgacctgctgctgcacctggaaaagaagcacggcgaggactggggaaaggtgtacgacgaggcctgggagcggattgacaagaaagtggaaggcctgagcaagcacatcaagctggaagaggaacggagaagcgaggacgcccagagcaaggccgccctgaccgactggctgcgggctaaggccagcttcgtgatcgagggcctgaaggaggccgacaaggacgagttctgcagatgcgagctgaagctgcagaagtggtacggggacctgcggggaaagcccttcgccatcgaagccgagaacagcatcctggacatcagcggcttcagcaagcagtacaactgtgccttcatctggcagaaggacggcgtgaagaagctgaacctgtacctgatcatcaactacttcaagggcggcaagctgcggttcaagaagatcaaacctgaagccttcgaagccaacagattctacaccgtgatcaacaaaaagagcggcgagatcgtgcccatggaggtgaacttcaacttcgacgaccccaacctgatcatcctgcctctggcctttggcaagagacagggcagagaattcatctggaacgacctgctgtccctggaaaccggcagcctgaagctggccaacggaagagtgatcgagaagacactgtacaacagaagaacccggcaggatgagcctgccctgttcgtggccctgaccttcgagcggcgggaggtcctggactcctccaatatcaaaccaatgaacctgatcggcgtggcaagaggcgaaaacatccccgccgtgatcgccctgaccgaccccgagggctgcccactgagccggtttaaggatagcctgggaaacccaacccacatcctgagaatcggcgagagctataaggagaagcagcggaccatccaggccaagaaggaggtggagcagcggagagccggcggctacagccggaagtacgccagcaaagccaagaatctggcagacgatatggtgagaaacaccgctagagatctgctgtactacgccgtgacccaggatgccatgctgatcttcgccaacctgagccggggcttcggccggcagggcaagcggaccttcatggccgagagacagtacacacggatggaggactggctgaccgccaagctggcctacgagggcctgagcaagacctacctgtccaagacactggcccagtacacctccaagacatgcagcaactgtgggtttaccatcaccagcgccgactacgacagggtgctggagaagctgaagaagacagcaacaggctggatgaccacaattaacggcaaggagctgaaggtggagggccagattacctactacaacagatacaagagacagaacgtagtcaaggacctgtccgtcgagctggatagactgagcgaagaatctgtgaacaacgacatctcctcctggacaaagggcagaagcggagaagctctgagcctcctgaagaaaagattctcccatagacccgtgcaggagaagttcgtgtgcctgaactgcggcttcgagacacacgcagccgagcaagccgccctgaacatcgccagatcctggctgttcctgcggagccaggagtacaagaaataccagacaaacaagacaaccggcaacaccgataagagagccttcgtcgagacctggcagtccttttaccggaagaagcttaaggaggtgtggaaacctgccgtgcggtctggcggatctggcggaggctccaccagccccaagaaaaagagaaaagtctaagctgccttctgcggggcttgccttctggccatgcccttcttctctcccttgcacctgtacctcttggtctttgaataaagcctgagtaggaaggctagcaaaaaaaaaaaaaaaaaaaaaaaaaaaaaaaaaaaaaaaaaaaaaaaaaaaaaaaaaaaaaaaaaaaaaaaaaaaaaaaagcccagccggctccccaacctctaccgaggagggcacctctgagtccgccacccccgagagcggccctggcacctccaccgagcccagcgagggcagcgcacccggcagccctgccggcagccccacctccacagaggagggaaccagcaccgagcccagcgaaggcagcgccccaggcaccagcaccgagcctagtgagcaggagattaaacggatcaacaagatcagaagaagacttgtgaaagacagcaacaccaagaaggccggcaagacaggccccatgaaaaccctgctggttagagtgatgacacccgatctgagagagcggctggaaaacctgagaaagaagcctgaaaatatcccccagcccatcagcaatacatctagagccaacctgaataagctgctgaccgattacaccgaaatgaagaaggcgatcctgcatgtgtactgggaagagttccagaaggaccctgtgggcctgatgagccgggtggcccagcctgccagcaagaagatcgatcagaacaagctgaaacctgagatggacgagaagggcaacctgaccaccgccggctttgcctgctctcagtgtggccagcccctgttcgtgtacaagctggagcaggtgtctgagaagggcaaggcttacaccaactacttcggacggtgcaatgtggccgagcacgaaaagctgatcctgctggcccagctgaagcccgagaaggatagcgacgaagccgtgacatatagcctgggaaagtttgggcagagggccctggatttctacagcattcatgtgaccaaggagtccacccaccccgtgaagcccctggcccagatcgccggaaacagatacgcctccggacctgtgggaaaggccctgagcgacgcatgtatgggcacaatcgcctccttcctgtctaagtaccaggacatcatcatcgaacaccagaaggtggtgaagggcaaccagaagagactggagagcctgcgggagctggccggcaaggaaaacctggaataccctagcgtgaccctgccacctcagcctcacaccaaggagggcgttgatgcctacaacgaagtgatcgcccgggtgcgaatgtgggtgaacctgaacctgtggcagaagctgaagctaagcagagatgatgccaagcctctgctgagactgaagggattcccttcctttcctctggtcgagagacaggccaacgaagtggactggtgggacatggtgtgtaacgtgaagaagctgatcaacgagaaaaaggaggatggcaaggtgttttggcagaatctggctggctacaagagacaggaagccctgagaccatacctgagcagcgaggaagatcggaagaagggaaagaaattcgctcggtaccagctgggcgacctgctgctgcacctggaaaagaagcacggcgaggactggggaaaggtgtacgacgaggcctgggagcggattgacaagaaagtggaaggcctgagcaagcacatcaagctggaagaggaacggagaagcgaggacgcccagagcaaggccgccctgaccgactggctgcgggctaaggccagcttcgtgatcgagggcctgaaggaggccgacaaggacgagttctgcagatgcgagctgaagctgcagaagtggtacggggacctgcggggaaagcccttcgccatcgaagccgagaacagcatcctggacatcagcggcttcagcaagcagtacaactgtgccttcatctggcagaaggacggcgtgaagaagctgaacctgtacctgatcatcaactacttcaagggcggcaagctgcggttcaagaagatcaaacctgaagccttcgaagccaacagattctacaccgtgatcaacaaaaagagcggcgagatcgtgcccatggaggtgaacttcaacttcgacgaccccaacctgatcatcctgcctctggcctttggcaagagacagggcagagaattcatctggaacgacctgctgtccctggaaaccggcagcctgaagctggccaacggaagagtgatcgagaagacactgtacaacagaagaacccggcaggatgagcctgccctgttcgtggccctgaccttcgagcggcgggaggtcctggactcctccaatatcaaaccaatgaacctgatcggcgtggcaagaggcgaaaacatccccgccgtgatcgccctgaccgaccccgagggctgcccactgagccggtttaaggatagcctgggaaacccaacccacatcctgagaatcggcgagagctataaggagaagcagcggaccatccaggccaagaaggaggtggagcagcggagagccggcggctacagccggaagtacgccagcaaagccaagaatctggcagacgatatggtgagaaacaccgctagagatctgctgtactacgccgtgacccaggatgccatgctgatcttcgccaacctgagccggggcttcggccggcagggcaagcggaccttcatggccgagagacagtacacacggatggaggactggctgaccgccaagctggcctacgagggcctgagcaagacctacctgtccaagacactggcccagtacacctccaagacatgcagcaactgtgggtttaccatcaccagcgccgactacgacagggtgctggagaagctgaagaagacagcaacaggctggatgaccacaattaacggcaaggagctgaaggtggagggccagattacctactacaacagatacaagagacagaacgtagtcaaggacctgtccgtcgagctggatagactgagcgaagaatctgtgaacaacgacatctcctcctggacaaagggcagaagcggagaagctctgagcctcctgaagaaaagattctcccatagacccgtgcaggagaagttcgtgtgcctgaactgcggcttcgagacacacgcagccgagcaagccgccctgaacatcgccagatcctggctgttcctgcggagccaggagtacaagaaataccagacaaacaagacaaccggcaacaccgataagagagccttcgtcgagacctggcagtccttttaccggaagaagcttaaggaggtgtggaaacctgccgtgcggtctggcggatctggcggaggctccaccagccccaagaaaaagagaaaagtctaagctgccttctgcggggcttgccttctggccatgcccttcttctctcccttgcacctgtacctcttggtctttgaataaagcctgagtaggaaggctagcaaaaaaaaaaaaaaaaaaaaaaaaaaaaaaaaaaaaaaaaaaaaaaaaaaaaaaaaaaaaaaaaaaaaaaaaaaaaaaaa

SEQ ID NO: 9633 - RNA, 8787 nt, synthetic construct
  source 1..8787: mol_type = other RNA
aggaaataagagagaaaagaagagtaagaagaaatataagagccaccatggcccctaagaagaagcgtaaagtgagccggatgaaccacgaccaggagttcgacccccctaaggtgtaccctcccgtccccgccgagaagagaaagcccatccgggtcctgagcctgttcgatggcatcgccaccggtctgctggtgctgaaggacctgggcatccaggtggataggtacattgcctccgaggtgtgcgaggactccatcaccgtgggaatggtgcgtcatcagggcaagatcatgtacgtgggcgacgtgcggagcgtgacacagaagcatatccaggagtggggccctttcgacctggtgatcggcggcagcccttgcaatgacctgagcatcgtgaacccagcccggaagggcctgtacgagggaaccggcagactgttcttcgagttttacagactgctgcacgacgcccggcctaaggaaggcgacgaccggcccttcttttggctgttcgagaatgtggtggccatgggagtcagcgacaagcgggatattagccggttcctggagagcaaccccgtgatgatcgatgccaaggaagtgagcgccgcccaccgggccagatacttctggggcaatctgcctggcatgaacagacccctggccagcaccgtgaacgacaagctggagctgcaggagtgcctggagcacggccggatcgccaagttcagcaaggtgagaaccatcaccacccgaagcaacagcatcaaacaaggcaaggaccagcactttcctgtgttcatgaacgagaaggaggacatcctgtggtgtaccgagatggagagagtgttcgggttcccagtccactacacagatgtcagcaacatgtctagactggccagacagagactgctgggaagaagctggtccgtccctgtgatcagacacctgttcgcccctctgaaggagtacttcgcctgcgtgagcagcggcaacagcaacgccaacagccggggccccagcttctctagcggcctggtgccactgtccctgagagggagccacatgggccccatggagatctacaaaaccgtgagcgcctggaagcggcagcctgtgcgcgtgctgagcctgtttcggaatatcgataaagtcctgaaaagcctgggattcctggagagcggctctggctccggcggtggcaccctgaagtacgtggaggatgtgacaaacgtggtcagacgggatgtggagaagtggggccccttcgatctggtgtacggcagcacccaacccctgggcagctcttgtgaccggtgccctggctggtacatgtttcagttccaccggatcctgcagtacgccctgccgagacaggagtcccagcggccattcttttggattttcatggacaacttgctgctgaccgaggatgaccaggaaactaccactcggttcctgcagaccgaagccgtgaccctgcaggacgtgagaggccgggactaccagaacgccatgcgggtgtggtccaacatccctggactgaaaagcaagcacgcacctctgacccctaaagaagaggagtacctgcaggcccaggtgcggagcagaagcaagctggacgcccctaaggtggatctgctggtgaagaattgcctcctgcccctgagagagtacttcaagtatttcagccagaatagtctgcccctgggaggcagcggcggcggcatgatgttccaggacagcgtggccttcgaggacgtggccgtgaccttcacccaggaggagtgggccctgctggaccccagccagaagaacctgtacagggacgtgatgcaggagaccttcaagaacctggccagcatcggcaagaagtggaaggcccagaacatctacgtggagtacaagaacctgaggaggaacctgaggatcgtgggcgagaggctgttcgagagcaaggagggccaccagggcggcccaagcagcggcgcccctcctcccagcggcggcaggcggcccaagcagcggcgcccctcctcccagcggcggcagcccagccggctccccaacctctaccgaggagggcacctctgagtccgccacccccgagagcggccctggcacctccaccgagcccagcgagggcagcgcacccggcagccctgccggcagccccacctccacagaggagggaaccagcaccgagcccagcgaaggcagcgccccaggcaccagcaccgagcctagtgagcaggagattaaacggatcaacaagatcagaagaagacttgtgaaagacagcaacaccaagaaggccggcaagacaggccccatgaaaaccctgctggttagagtgatgacacccgatctgagagagcggctggaaaacctgagaaagaagcctgaaaatatcccccagcccatcagcaatacatctagagccaacctgaataagctgctgaccgattacaccgaaatgaagaaggcgatcctgcatgtgtactgggaagagttccagaaggaccctgtgggcctgatgagccgggtggcccagcctgccagcaagaagatcgatcagaacaagctgaaacctgagatggacgagaagggcaacctgaccaccgccggctttgcctgctctcagtgtggccagcccctgttcgtgtacaagctggagcaggtgtctgagaagggcaaggcttacaccaactacttcggacggtgcaatgtggccgagcacgaaaagctgatcctgctggcccagctgaagcccgagaaggatagcgacgaagccgtgacatatagcctgggaaagtttgggcagagggccctggatttctacagcattcatgtgaccaaggagtccacccaccccgtgaagcccctggcccagatcgccggaaacagatacgcctccggacctgtgggaaaggccctgagcgacgcatgtatgggcacaatcgcctccttcctgtctaagtaccaggacatcatcatcgaacaccagaaggtggtgaagggcaaccagaagagactggagagcctgcgggagctggccggcaaggaaaacctggaataccctagcgtgaccctgccacctcagcctcacaccaaggagggcgttgatgcctacaacgaagtgatcgcccgggtgcgaatgtgggtgaacctgaacctgtggcagaagctgaagctaagcagagatgatgccaagcctctgctgagactgaagggattcccttcctttcctctggtcgagagacaggccaacgaagtggactggtgggacatggtgtgtaacgtgaagaagctgatcaacgagaaaaaggaggatggcaaggtgttttggcagaatctggctggctacaagagacaggaagccctgagaccatacctgagcagcgaggaagatcggaagaagggaaagaaattcgctcggtaccagctgggcgacctgctgctgcacctggaaaagaagcacggcgaggactggggaaaggtgtacgacgaggcctgggagcggattgacaagaaagtggaaggcctgagcaagcacatcaagctggaagaggaacggagaagcgaggacgcccagagcaaggccgccctgaccgactggctgcgggctaaggccagcttcgtgatcgagggcctgaaggaggccgacaaggacgagttctgcagatgcgagctgaagctgcagaagtggtacggggacctgcggggaaagcccttcgccatcgaagccgagaacagcatcctggacatcagcggcttcagcaagcagtacaactgtgccttcatctggcagaaggacggcgtgaagaagctgaacctgtacctgatcatcaactacttcaagggcggcaagctgcggttcaagaagatcaaacctgaagccttcgaagccaacagattctacaccgtgatcaacaaaaagagcggcgagatcgtgcccatggaggtgaacttcaacttcgacgaccccaacctgatcatcctgcctctggcctttggcaagagacagggcagagaattcatctggaacgacctgctgtccctggaaaccggcagcctgaagctggccaacggaagagtgatcgagaagacactgtacaacagaagaacccggcaggatgagcctgccctgttcgtggccctgaccttcgagcggcgggaggtcctggactcctccaatatcaaaccaatgaacctgatcggcgtggcaagaggcgaaaacatccccgccgtgatcgccctgaccgaccccgagggctgcccactgagccggtttaaggatagcctgggaaacccaacccacatcctgagaatcggcgagagctataaggagaagcagcggaccatccaggccaagaaggaggtggagcagcggagagccggcggctacagccggaagtacgccagcaaagccaagaatctggcagacgatatggtgagaaacaccgctagagatctgctgtactacgccgtgacccaggatgccatgctgatcttcgccaacctgagccggggcttcggccggcagggcaagcggaccttcatggccgagagacagtacacacggatggaggactggctgaccgccaagctggcctacgagggcctgagcaagacctacctgtccaagacactggcccagtacacctccaagacatgcagcaactgtgggtttaccatcaccagcgccgactacgacagggtgctggagaagctgaagaagacagcaacaggctggatgaccacaattaacggcaaggagctgaaggtggagggccagattacctactacaacagatacaagagacagaacgtagtcaaggacctgtccgtcgagctggatagactgagcgaagaatctgtgaacaacgacatctcctcctggacaaagggcagaagcggagaagctctgagcctcctgaagaaaagattctcccatagacccgtgcaggagaagttcgtgtgcctgaactgcggcttcgagacacacgcagccgagcaagccgccctgaacatcgccagatcctggctgttcctgcggagccaggagtacaagaaataccagacaaacaagacaaccggcaacaccgataagagagccttcgtcgagacctggcagtccttttaccggaagaagcttaaggaggtgtggaaacctgccgtgcggtctggcggatctggcggaggctccaccagccccaagaaaaagagaaaagtctaagctgccttctgcggggcttgccttctggccatgcccttcttctctcccttgcacctgtacctcttggtctttgaataaagcctgagtaggaaggctagcaaaaaaaaaaaaaaaaaaaaaaaaaaaaaaaaaaaaaaaaaaaaaaaaaaaaaaaaaaaaaaaaaaaaaaaaaaaaaaaagcccagccggctccccaacctctaccgaggagggcacctctgagtccgccacccccgagagcggccctggcacctccaccgagcccagcgagggcagcgcacccggcagccctgccggcagccccacctccacagaggagggaaccagcaccgagcccagcgaaggcagcgccccaggcaccagcaccgagcctagtgagcaggagattaaacggatcaacaagatcagaagaagacttgtgaaagacagcaacaccaagaaggccggcaagacaggccccatgaaaaccctgctggttagagtgatgacacccgatctgagagagcggctggaaaacctgagaaagaagcctgaaaatatcccccagcccatcagcaatacatctagagccaacctgaataagctgctgaccgattacaccgaaatgaagaaggcgatcctgcatgtgtactgggaagagttccagaaggaccctgtgggcctgatgagccgggtggcccagcctgccagcaagaagatcgatcagaacaagctgaaacctgagatggacgagaagggcaacctgaccaccgccggctttgcctgctctcagtgtggccagcccctgttcgtgtacaagctggagcaggtgtctgagaagggcaaggcttacaccaactacttcggacggtgcaatgtggccgagcacgaaaagctgatcctgctggcccagctgaagcccgagaaggatagcgacgaagccgtgacatatagcctgggaaagtttgggcagagggccctggatttctacagcattcatgtgaccaaggagtccacccaccccgtgaagcccctggcccagatcgccggaaacagatacgcctccggacctgtgggaaaggccctgagcgacgcatgtatgggcacaatcgcctccttcctgtctaagtaccaggacatcatcatcgaacaccagaaggtggtgaagggcaaccagaagagactggagagcctgcgggagctggccggcaaggaaaacctggaataccctagcgtgaccctgccacctcagcctcacaccaaggagggcgttgatgcctacaacgaagtgatcgcccgggtgcgaatgtgggtgaacctgaacctgtggcagaagctgaagctaagcagagatgatgccaagcctctgctgagactgaagggattcccttcctttcctctggtcgagagacaggccaacgaagtggactggtgggacatggtgtgtaacgtgaagaagctgatcaacgagaaaaaggaggatggcaaggtgttttggcagaatctggctggctacaagagacaggaagccctgagaccatacctgagcagcgaggaagatcggaagaagggaaagaaattcgctcggtaccagctgggcgacctgctgctgcacctggaaaagaagcacggcgaggactggggaaaggtgtacgacgaggcctgggagcggattgacaagaaagtggaaggcctgagcaagcacatcaagctggaagaggaacggagaagcgaggacgcccagagcaaggccgccctgaccgactggctgcgggctaaggccagcttcgtgatcgagggcctgaaggaggccgacaaggacgagttctgcagatgcgagctgaagctgcagaagtggtacggggacctgcggggaaagcccttcgccatcgaagccgagaacagcatcctggacatcagcggcttcagcaagcagtacaactgtgccttcatctggcagaaggacggcgtgaagaagctgaacctgtacctgatcatcaactacttcaagggcggcaagctgcggttcaagaagatcaaacctgaagccttcgaagccaacagattctacaccgtgatcaacaaaaagagcggcgagatcgtgcccatggaggtgaacttcaacttcgacgaccccaacctgatcatcctgcctctggcctttggcaagagacagggcagagaattcatctggaacgacctgctgtccctggaaaccggcagcctgaagctggccaacggaagagtgatcgagaagacactgtacaacagaagaacccggcaggatgagcctgccctgttcgtggccctgaccttcgagcggcgggaggtcctggactcctccaatatcaaaccaatgaacctgatcggcgtggcaagaggcgaaaacatccccgccgtgatcgccctgaccgaccccgagggctgcccactgagccggtttaaggatagcctgggaaacccaacccacatcctgagaatcggcgagagctataaggagaagcagcggaccatccaggccaagaaggaggtggagcagcggagagccggcggctacagccggaagtacgccagcaaagccaagaatctggcagacgatatggtgagaaacaccgctagagatctgctgtactacgccgtgacccaggatgccatgctgatcttcgccaacctgagccggggcttcggccggcagggcaagcggaccttcatggccgagagacagtacacacggatggaggactggctgaccgccaagctggcctacgagggcctgagcaagacctacctgtccaagacactggcccagtacacctccaagacatgcagcaactgtgggtttaccatcaccagcgccgactacgacagggtgctggagaagctgaagaagacagcaacaggctggatgaccacaattaacggcaaggagctgaaggtggagggccagattacctactacaacagatacaagagacagaacgtagtcaaggacctgtccgtcgagctggatagactgagcgaagaatctgtgaacaacgacatctcctcctggacaaagggcagaagcggagaagctctgagcctcctgaagaaaagattctcccatagacccgtgcaggagaagttcgtgtgcctgaactgcggcttcgagacacacgcagccgagcaagccgccctgaacatcgccagatcctggctgttcctgcggagccaggagtacaagaaataccagacaaacaagacaaccggcaacaccgataagagagccttcgtcgagacctggcagtccttttaccggaagaagcttaaggaggtgtggaaacctgccgtgcggtctggcggatctggcggaggctccaccagccccaagaaaaagagaaaagtctaagctgccttctgcggggcttgccttctggccatgcccttcttctctcccttgcacctgtacctcttggtctttgaataaagcctgagtaggaaggctagcaaaaaaaaaaaaaaaaaaaaaaaaaaaaaaaaaaaaaaaaaaaaaaaaaaaaaaaaaaaaaaaaaaaaaaaaaaaaaaaa

SEQ ID NO: 9634 - RNA, 8787 nt, synthetic construct
  source 1..8787: mol_type = other RNA
aggaaataagagagaaaagaagagtaagaagaaatataagagccaccatggcccctaagaagaagcgtaaagtgagccggatgaaccacgaccaggagttcgacccccctaaggtgtaccctcccgtccccgccgagaagagaaagcccatccgggtcctgagcctgttcgatggcatcgccaccggtctgctggtgctgaaggacctgggcatccaggtggataggtacattgcctccgaggtgtgcgaggactccatcaccgtgggaatggtgcgtcatcagggcaagatcatgtacgtgggcgacgtgcggagcgtgacacagaagcatatccaggagtggggccctttcgacctggtgatcggcggcagcccttgcaatgacctgagcatcgtgaacccagcccggaagggcctgtacgagggaaccggcagactgttcttcgagttttacagactgctgcacgacgcccggcctaaggaaggcgacgaccggcccttcttttggctgttcgagaatgtggtggccatgggagtcagcgacaagcgggatattagccggttcctggagagcaaccccgtgatgatcgatgccaaggaagtgagcgccgcccaccgggccagatacttctggggcaatctgcctggcatgaacagacccctggccagcaccgtgaacgacaagctggagctgcaggagtgcctggagcacggccggatcgccaagttcagcaaggtgagaaccatcaccacccgaagcaacagcatcaaacaaggcaaggaccagcactttcctgtgttcatgaacgagaaggaggacatcctgtggtgtaccgagatggagagagtgttcgggttcccagtccactacacagatgtcagcaacatgtctagactggccagacagagactgctgggaagaagctggtccgtccctgtgatcagacacctgttcgcccctctgaaggagtacttcgcctgcgtgagcagcggcaacagcaacgccaacagccggggccccagcttctctagcggcctggtgccactgtccctgagagggagccacatgggccccatggagatctacaaaaccgtgagcgcctggaagcggcagcctgtgcgcgtgctgagcctgtttcggaatatcgataaagtcctgaaaagcctgggattcctggagagcggctctggctccggcggtggcaccctgaagtacgtggaggatgtgacaaacgtggtcagacgggatgtggagaagtggggccccttcgatctggtgtacggcagcacccaacccctgggcagctcttgtgaccggtgccctggctggtacatgtttcagttccaccggatcctgcagtacgccctgccgagacaggagtcccagcggccattcttttggattttcatggacaacttgctgctgaccgaggatgaccaggaaactaccactcggttcctgcagaccgaagccgtgaccctgcaggacgtgagaggccgggactaccagaacgccatgcgggtgtggtccaacatccctggactgaaaagcaagcacgcacctctgacccctaaagaagaggagtacctgcaggcccaggtgcggagcagaagcaagctggacgcccctaaggtggatctgctggtgaagaattgcctcctgcccctgagagagtacttcaagtatttcagccagaatagtctgcccctgggaggcagcggcggcggcggcctggtgatgttcaaggacgtggccatcgacgtgagccaggaggagtgggagtgcctgaaccccgcccagaggaacctgtacaaggacgtgatgctggagaactacagcaacctggtgagcctgggcctgagcgtgagcaagcccgccatgatcaccagcctggagcagggcaaggagccctggatggtgctgagggaggtgaccggcgagaggtgccccgacctggtgagcaagtgcgagggcggcccaagcagcggcgcccctcctcccagcggcggcaggcggcccaagcagcggcgcccctcctcccagcggcggcagcccagccggctccccaacctctaccgaggagggcacctctgagtccgccacccccgagagcggccctggcacctccaccgagcccagcgagggcagcgcacccggcagccctgccggcagccccacctccacagaggagggaaccagcaccgagcccagcgaaggcagcgccccaggcaccagcaccgagcctagtgagcaggagattaaacggatcaacaagatcagaagaagacttgtgaaagacagcaacaccaagaaggccggcaagacaggccccatgaaaaccctgctggttagagtgatgacacccgatctgagagagcggctggaaaacctgagaaagaagcctgaaaatatcccccagcccatcagcaatacatctagagccaacctgaataagctgctgaccgattacaccgaaatgaagaaggcgatcctgcatgtgtactgggaagagttccagaaggaccctgtgggcctgatgagccgggtggcccagcctgccagcaagaagatcgatcagaacaagctgaaacctgagatggacgagaagggcaacctgaccaccgccggctttgcctgctctcagtgtggccagcccctgttcgtgtacaagctggagcaggtgtctgagaagggcaaggcttacaccaactacttcggacggtgcaatgtggccgagcacgaaaagctgatcctgctggcccagctgaagcccgagaaggatagcgacgaagccgtgacatatagcctgggaaagtttgggcagagggccctggatttctacagcattcatgtgaccaaggagtccacccaccccgtgaagcccctggcccagatcgccggaaacagatacgcctccggacctgtgggaaaggccctgagcgacgcatgtatgggcacaatcgcctccttcctgtctaagtaccaggacatcatcatcgaacaccagaaggtggtgaagggcaaccagaagagactggagagcctgcgggagctggccggcaaggaaaacctggaataccctagcgtgaccctgccacctcagcctcacaccaaggagggcgttgatgcctacaacgaagtgatcgcccgggtgcgaatgtgggtgaacctgaacctgtggcagaagctgaagctaagcagagatgatgccaagcctctgctgagactgaagggattcccttcctttcctctggtcgagagacaggccaacgaagtggactggtgggacatggtgtgtaacgtgaagaagctgatcaacgagaaaaaggaggatggcaaggtgttttggcagaatctggctggctacaagagacaggaagccctgagaccatacctgagcagcgaggaagatcggaagaagggaaagaaattcgctcggtaccagctgggcgacctgctgctgcacctggaaaagaagcacggcgaggactggggaaaggtgtacgacgaggcctgggagcggattgacaagaaagtggaaggcctgagcaagcacatcaagctggaagaggaacggagaagcgaggacgcccagagcaaggccgccctgaccgactggctgcgggctaaggccagcttcgtgatcgagggcctgaaggaggccgacaaggacgagttctgcagatgcgagctgaagctgcagaagtggtacggggacctgcggggaaagcccttcgccatcgaagccgagaacagcatcctggacatcagcggcttcagcaagcagtacaactgtgccttcatctggcagaaggacggcgtgaagaagctgaacctgtacctgatcatcaactacttcaagggcggcaagctgcggttcaagaagatcaaacctgaagccttcgaagccaacagattctacaccgtgatcaacaaaaagagcggcgagatcgtgcccatggaggtgaacttcaacttcgacgaccccaacctgatcatcctgcctctggcctttggcaagagacagggcagagaattcatctggaacgacctgctgtccctggaaaccggcagcctgaagctggccaacggaagagtgatcgagaagacactgtacaacagaagaacccggcaggatgagcctgccctgttcgtggccctgaccttcgagcggcgggaggtcctggactcctccaatatcaaaccaatgaacctgatcggcgtggcaagaggcgaaaacatccccgccgtgatcgccctgaccgaccccgagggctgcccactgagccggtttaaggatagcctgggaaacccaacccacatcctgagaatcggcgagagctataaggagaagcagcggaccatccaggccaagaaggaggtggagcagcggagagccggcggctacagccggaagtacgccagcaaagccaagaatctggcagacgatatggtgagaaacaccgctagagatctgctgtactacgccgtgacccaggatgccatgctgatcttcgccaacctgagccggggcttcggccggcagggcaagcggaccttcatggccgagagacagtacacacggatggaggactggctgaccgccaagctggcctacgagggcctgagcaagacctacctgtccaagacactggcccagtacacctccaagacatgcagcaactgtgggtttaccatcaccagcgccgactacgacagggtgctggagaagctgaagaagacagcaacaggctggatgaccacaattaacggcaaggagctgaaggtggagggccagattacctactacaacagatacaagagacagaacgtagtcaaggacctgtccgtcgagctggatagactgagcgaagaatctgtgaacaacgacatctcctcctggacaaagggcagaagcggagaagctctgagcctcctgaagaaaagattctcccatagacccgtgcaggagaagttcgtgtgcctgaactgcggcttcgagacacacgcagccgagcaagccgccctgaacatcgccagatcctggctgttcctgcggagccaggagtacaagaaataccagacaaacaagacaaccggcaacaccgataagagagccttcgtcgagacctggcagtccttttaccggaagaagcttaaggaggtgtggaaacctgccgtgcggtctggcggatctggcggaggctccaccagccccaagaaaaagagaaaagtctaagctgccttctgcggggcttgccttctggccatgcccttcttctctcccttgcacctgtacctcttggtctttgaataaagcctgagtaggaaggctagcaaaaaaaaaaaaaaaaaaaaaaaaaaaaaaaaaaaaaaaaaaaaaaaaaaaaaaaaaaaaaaaaaaaaaaaaaaaaaaaagcccagccggctccccaacctctaccgaggagggcacctctgagtccgccacccccgagagcggccctggcacctccaccgagcccagcgagggcagcgcacccggcagccctgccggcagccccacctccacagaggagggaaccagcaccgagcccagcgaaggcagcgccccaggcaccagcaccgagcctagtgagcaggagattaaacggatcaacaagatcagaagaagacttgtgaaagacagcaacaccaagaaggccggcaagacaggccccatgaaaaccctgctggttagagtgatgacacccgatctgagagagcggctggaaaacctgagaaagaagcctgaaaatatcccccagcccatcagcaatacatctagagccaacctgaataagctgctgaccgattacaccgaaatgaagaaggcgatcctgcatgtgtactgggaagagttccagaaggaccctgtgggcctgatgagccgggtggcccagcctgccagcaagaagatcgatcagaacaagctgaaacctgagatggacgagaagggcaacctgaccaccgccggctttgcctgctctcagtgtggccagcccctgttcgtgtacaagctggagcaggtgtctgagaagggcaaggcttacaccaactacttcggacggtgcaatgtggccgagcacgaaaagctgatcctgctggcccagctgaagcccgagaaggatagcgacgaagccgtgacatatagcctgggaaagtttgggcagagggccctggatttctacagcattcatgtgaccaaggagtccacccaccccgtgaagcccctggcccagatcgccggaaacagatacgcctccggacctgtgggaaaggccctgagcgacgcatgtatgggcacaatcgcctccttcctgtctaagtaccaggacatcatcatcgaacaccagaaggtggtgaagggcaaccagaagagactggagagcctgcgggagctggccggcaaggaaaacctggaataccctagcgtgaccctgccacctcagcctcacaccaaggagggcgttgatgcctacaacgaagtgatcgcccgggtgcgaatgtgggtgaacctgaacctgtggcagaagctgaagctaagcagagatgatgccaagcctctgctgagactgaagggattcccttcctttcctctggtcgagagacaggccaacgaagtggactggtgggacatggtgtgtaacgtgaagaagctgatcaacgagaaaaaggaggatggcaaggtgttttggcagaatctggctggctacaagagacaggaagccctgagaccatacctgagcagcgaggaagatcggaagaagggaaagaaattcgctcggtaccagctgggcgacctgctgctgcacctggaaaagaagcacggcgaggactggggaaaggtgtacgacgaggcctgggagcggattgacaagaaagtggaaggcctgagcaagcacatcaagctggaagaggaacggagaagcgaggacgcccagagcaaggccgccctgaccgactggctgcgggctaaggccagcttcgtgatcgagggcctgaaggaggccgacaaggacgagttctgcagatgcgagctgaagctgcagaagtggtacggggacctgcggggaaagcccttcgccatcgaagccgagaacagcatcctggacatcagcggcttcagcaagcagtacaactgtgccttcatctggcagaaggacggcgtgaagaagctgaacctgtacctgatcatcaactacttcaagggcggcaagctgcggttcaagaagatcaaacctgaagccttcgaagccaacagattctacaccgtgatcaacaaaaagagcggcgagatcgtgcccatggaggtgaacttcaacttcgacgaccccaacctgatcatcctgcctctggcctttggcaagagacagggcagagaattcatctggaacgacctgctgtccctggaaaccggcagcctgaagctggccaacggaagagtgatcgagaagacactgtacaacagaagaacccggcaggatgagcctgccctgttcgtggccctgaccttcgagcggcgggaggtcctggactcctccaatatcaaaccaatgaacctgatcggcgtggcaagaggcgaaaacatccccgccgtgatcgccctgaccgaccccgagggctgcccactgagccggtttaaggatagcctgggaaacccaacccacatcctgagaatcggcgagagctataaggagaagcagcggaccatccaggccaagaaggaggtggagcagcggagagccggcggctacagccggaagtacgccagcaaagccaagaatctggcagacgatatggtgagaaacaccgctagagatctgctgtactacgccgtgacccaggatgccatgctgatcttcgccaacctgagccggggcttcggccggcagggcaagcggaccttcatggccgagagacagtacacacggatggaggactggctgaccgccaagctggcctacgagggcctgagcaagacctacctgtccaagacactggcccagtacacctccaagacatgcagcaactgtgggtttaccatcaccagcgccgactacgacagggtgctggagaagctgaagaagacagcaacaggctggatgaccacaattaacggcaaggagctgaaggtggagggccagattacctactacaacagatacaagagacagaacgtagtcaaggacctgtccgtcgagctggatagactgagcgaagaatctgtgaacaacgacatctcctcctggacaaagggcagaagcggagaagctctgagcctcctgaagaaaagattctcccatagacccgtgcaggagaagttcgtgtgcctgaactgcggcttcgagacacacgcagccgagcaagccgccctgaacatcgccagatcctggctgttcctgcggagccaggagtacaagaaataccagacaaacaagacaaccggcaacaccgataagagagccttcgtcgagacctggcagtccttttaccggaagaagcttaaggaggtgtggaaacctgccgtgcggtctggcggatctggcggaggctccaccagccccaagaaaaagagaaaagtctaagctgccttctgcggggcttgccttctggccatgcccttcttctctcccttgcacctgtacctcttggtctttgaataaagcctgagtaggaaggctagcaaaaaaaaaaaaaaaaaaaaaaaaaaaaaaaaaaaaaaaaaaaaaaaaaaaaaaaaaaaaaaaaaaaaaaaaaaaaaaaa

SEQ ID NO: 9635 - RNA, 8787 nt, synthetic construct
  source 1..8787: mol_type = other RNA
aggaaataagagagaaaagaagagtaagaagaaatataagagccaccatggcccctaagaagaagcgtaaagtgagccggatgaaccacgaccaggagttcgacccccctaaggtgtaccctcccgtccccgccgagaagagaaagcccatccgggtcctgagcctgttcgatggcatcgccaccggtctgctggtgctgaaggacctgggcatccaggtggataggtacattgcctccgaggtgtgcgaggactccatcaccgtgggaatggtgcgtcatcagggcaagatcatgtacgtgggcgacgtgcggagcgtgacacagaagcatatccaggagtggggccctttcgacctggtgatcggcggcagcccttgcaatgacctgagcatcgtgaacccagcccggaagggcctgtacgagggaaccggcagactgttcttcgagttttacagactgctgcacgacgcccggcctaaggaaggcgacgaccggcccttcttttggctgttcgagaatgtggtggccatgggagtcagcgacaagcgggatattagccggttcctggagagcaaccccgtgatgatcgatgccaaggaagtgagcgccgcccaccgggccagatacttctggggcaatctgcctggcatgaacagacccctggccagcaccgtgaacgacaagctggagctgcaggagtgcctggagcacggccggatcgccaagttcagcaaggtgagaaccatcaccacccgaagcaacagcatcaaacaaggcaaggaccagcactttcctgtgttcatgaacgagaaggaggacatcctgtggtgtaccgagatggagagagtgttcgggttcccagtccactacacagatgtcagcaacatgtctagactggccagacagagactgctgggaagaagctggtccgtccctgtgatcagacacctgttcgcccctctgaaggagtacttcgcctgcgtgagcagcggcaacagcaacgccaacagccggggccccagcttctctagcggcctggtgccactgtccctgagagggagccacatgggccccatggagatctacaaaaccgtgagcgcctggaagcggcagcctgtgcgcgtgctgagcctgtttcggaatatcgataaagtcctgaaaagcctgggattcctggagagcggctctggctccggcggtggcaccctgaagtacgtggaggatgtgacaaacgtggtcagacgggatgtggagaagtggggccccttcgatctggtgtacggcagcacccaacccctgggcagctcttgtgaccggtgccctggctggtacatgtttcagttccaccggatcctgcagtacgccctgccgagacaggagtcccagcggccattcttttggattttcatggacaacttgctgctgaccgaggatgaccaggaaactaccactcggttcctgcagaccgaagccgtgaccctgcaggacgtgagaggccgggactaccagaacgccatgcgggtgtggtccaacatccctggactgaaaagcaagcacgcacctctgacccctaaagaagaggagtacctgcaggcccaggtgcggagcagaagcaagctggacgcccctaaggtggatctgctggtgaagaattgcctcctgcccctgagagagtacttcaagtatttcagccagaatagtctgcccctgggaggcagcggcggcggcgcccaggagaccgtgaccttcaaggacgtggccgtggacttcacccaggaggagtggggccagctggaccccgtgcagaggaccctgtacagggacgtgatgctggagacctacggccacctgctgagcgtgggcaaccagatcgccaagcccgaggtgatcagcctgctggagcagggcgaggagccctggagcatggagagggtgtaccccccccagaggacctgccccgagtggatgaggggcggcccaagcagcggcgcccctcctcccagcggcggcaggcggcccaagcagcggcgcccctcctcccagcggcggcagcccagccggctccccaacctctaccgaggagggcacctctgagtccgccacccccgagagcggccctggcacctccaccgagcccagcgagggcagcgcacccggcagccctgccggcagccccacctccacagaggagggaaccagcaccgagcccagcgaaggcagcgccccaggcaccagcaccgagcctagtgagcaggagattaaacggatcaacaagatcagaagaagacttgtgaaagacagcaacaccaagaaggccggcaagacaggccccatgaaaaccctgctggttagagtgatgacacccgatctgagagagcggctggaaaacctgagaaagaagcctgaaaatatcccccagcccatcagcaatacatctagagccaacctgaataagctgctgaccgattacaccgaaatgaagaaggcgatcctgcatgtgtactgggaagagttccagaaggaccctgtgggcctgatgagccgggtggcccagcctgccagcaagaagatcgatcagaacaagctgaaacctgagatggacgagaagggcaacctgaccaccgccggctttgcctgctctcagtgtggccagcccctgttcgtgtacaagctggagcaggtgtctgagaagggcaaggcttacaccaactacttcggacggtgcaatgtggccgagcacgaaaagctgatcctgctggcccagctgaagcccgagaaggatagcgacgaagccgtgacatatagcctgggaaagtttgggcagagggccctggatttctacagcattcatgtgaccaaggagtccacccaccccgtgaagcccctggcccagatcgccggaaacagatacgcctccggacctgtgggaaaggccctgagcgacgcatgtatgggcacaatcgcctccttcctgtctaagtaccaggacatcatcatcgaacaccagaaggtggtgaagggcaaccagaagagactggagagcctgcgggagctggccggcaaggaaaacctggaataccctagcgtgaccctgccacctcagcctcacaccaaggagggcgttgatgcctacaacgaagtgatcgcccgggtgcgaatgtgggtgaacctgaacctgtggcagaagctgaagctaagcagagatgatgccaagcctctgctgagactgaagggattcccttcctttcctctggtcgagagacaggccaacgaagtggactggtgggacatggtgtgtaacgtgaagaagctgatcaacgagaaaaaggaggatggcaaggtgttttggcagaatctggctggctacaagagacaggaagccctgagaccatacctgagcagcgaggaagatcggaagaagggaaagaaattcgctcggtaccagctgggcgacctgctgctgcacctggaaaagaagcacggcgaggactggggaaaggtgtacgacgaggcctgggagcggattgacaagaaagtggaaggcctgagcaagcacatcaagctggaagaggaacggagaagcgaggacgcccagagcaaggccgccctgaccgactggctgcgggctaaggccagcttcgtgatcgagggcctgaaggaggccgacaaggacgagttctgcagatgcgagctgaagctgcagaagtggtacggggacctgcggggaaagcccttcgccatcgaagccgagaacagcatcctggacatcagcggcttcagcaagcagtacaactgtgccttcatctggcagaaggacggcgtgaagaagctgaacctgtacctgatcatcaactacttcaagggcggcaagctgcggttcaagaagatcaaacctgaagccttcgaagccaacagattctacaccgtgatcaacaaaaagagcggcgagatcgtgcccatggaggtgaacttcaacttcgacgaccccaacctgatcatcctgcctctggcctttggcaagagacagggcagagaattcatctggaacgacctgctgtccctggaaaccggcagcctgaagctggccaacggaagagtgatcgagaagacactgtacaacagaagaacccggcaggatgagcctgccctgttcgtggccctgaccttcgagcggcgggaggtcctggactcctccaatatcaaaccaatgaacctgatcggcgtggcaagaggcgaaaacatccccgccgtgatcgccctgaccgaccccgagggctgcccactgagccggtttaaggatagcctgggaaacccaacccacatcctgagaatcggcgagagctataaggagaagcagcggaccatccaggccaagaaggaggtggagcagcggagagccggcggctacagccggaagtacgccagcaaagccaagaatctggcagacgatatggtgagaaacaccgctagagatctgctgtactacgccgtgacccaggatgccatgctgatcttcgccaacctgagccggggcttcggccggcagggcaagcggaccttcatggccgagagacagtacacacggatggaggactggctgaccgccaagctggcctacgagggcctgagcaagacctacctgtccaagacactggcccagtacacctccaagacatgcagcaactgtgggtttaccatcaccagcgccgactacgacagggtgctggagaagctgaagaagacagcaacaggctggatgaccacaattaacggcaaggagctgaaggtggagggccagattacctactacaacagatacaagagacagaacgtagtcaaggacctgtccgtcgagctggatagactgagcgaagaatctgtgaacaacgacatctcctcctggacaaagggcagaagcggagaagctctgagcctcctgaagaaaagattctcccatagacccgtgcaggagaagttcgtgtgcctgaactgcggcttcgagacacacgcagccgagcaagccgccctgaacatcgccagatcctggctgttcctgcggagccaggagtacaagaaataccagacaaacaagacaaccggcaacaccgataagagagccttcgtcgagacctggcagtccttttaccggaagaagcttaaggaggtgtggaaacctgccgtgcggtctggcggatctggcggaggctccaccagccccaagaaaaagagaaaagtctaagctgccttctgcggggcttgccttctggccatgcccttcttctctcccttgcacctgtacctcttggtctttgaataaagcctgagtaggaaggctagcaaaaaaaaaaaaaaaaaaaaaaaaaaaaaaaaaaaaaaaaaaaaaaaaaaaaaaaaaaaaaaaaaaaaaaaaaaaaaaaagcccagccggctccccaacctctaccgaggagggcacctctgagtccgccacccccgagagcggccctggcacctccaccgagcccagcgagggcagcgcacccggcagccctgccggcagccccacctccacagaggagggaaccagcaccgagcccagcgaaggcagcgccccaggcaccagcaccgagcctagtgagcaggagattaaacggatcaacaagatcagaagaagacttgtgaaagacagcaacaccaagaaggccggcaagacaggccccatgaaaaccctgctggttagagtgatgacacccgatctgagagagcggctggaaaacctgagaaagaagcctgaaaatatcccccagcccatcagcaatacatctagagccaacctgaataagctgctgaccgattacaccgaaatgaagaaggcgatcctgcatgtgtactgggaagagttccagaaggaccctgtgggcctgatgagccgggtggcccagcctgccagcaagaagatcgatcagaacaagctgaaacctgagatggacgagaagggcaacctgaccaccgccggctttgcctgctctcagtgtggccagcccctgttcgtgtacaagctggagcaggtgtctgagaagggcaaggcttacaccaactacttcggacggtgcaatgtggccgagcacgaaaagctgatcctgctggcccagctgaagcccgagaaggatagcgacgaagccgtgacatatagcctgggaaagtttgggcagagggccctggatttctacagcattcatgtgaccaaggagtccacccaccccgtgaagcccctggcccagatcgccggaaacagatacgcctccggacctgtgggaaaggccctgagcgacgcatgtatgggcacaatcgcctccttcctgtctaagtaccaggacatcatcatcgaacaccagaaggtggtgaagggcaaccagaagagactggagagcctgcgggagctggccggcaaggaaaacctggaataccctagcgtgaccctgccacctcagcctcacaccaaggagggcgttgatgcctacaacgaagtgatcgcccgggtgcgaatgtgggtgaacctgaacctgtggcagaagctgaagctaagcagagatgatgccaagcctctgctgagactgaagggattcccttcctttcctctggtcgagagacaggccaacgaagtggactggtgggacatggtgtgtaacgtgaagaagctgatcaacgagaaaaaggaggatggcaaggtgttttggcagaatctggctggctacaagagacaggaagccctgagaccatacctgagcagcgaggaagatcggaagaagggaaagaaattcgctcggtaccagctgggcgacctgctgctgcacctggaaaagaagcacggcgaggactggggaaaggtgtacgacgaggcctgggagcggattgacaagaaagtggaaggcctgagcaagcacatcaagctggaagaggaacggagaagcgaggacgcccagagcaaggccgccctgaccgactggctgcgggctaaggccagcttcgtgatcgagggcctgaaggaggccgacaaggacgagttctgcagatgcgagctgaagctgcagaagtggtacggggacctgcggggaaagcccttcgccatcgaagccgagaacagcatcctggacatcagcggcttcagcaagcagtacaactgtgccttcatctggcagaaggacggcgtgaagaagctgaacctgtacctgatcatcaactacttcaagggcggcaagctgcggttcaagaagatcaaacctgaagccttcgaagccaacagattctacaccgtgatcaacaaaaagagcggcgagatcgtgcccatggaggtgaacttcaacttcgacgaccccaacctgatcatcctgcctctggcctttggcaagagacagggcagagaattcatctggaacgacctgctgtccctggaaaccggcagcctgaagctggccaacggaagagtgatcgagaagacactgtacaacagaagaacccggcaggatgagcctgccctgttcgtggccctgaccttcgagcggcgggaggtcctggactcctccaatatcaaaccaatgaacctgatcggcgtggcaagaggcgaaaacatccccgccgtgatcgccctgaccgaccccgagggctgcccactgagccggtttaaggatagcctgggaaacccaacccacatcctgagaatcggcgagagctataaggagaagcagcggaccatccaggccaagaaggaggtggagcagcggagagccggcggctacagccggaagtacgccagcaaagccaagaatctggcagacgatatggtgagaaacaccgctagagatctgctgtactacgccgtgacccaggatgccatgctgatcttcgccaacctgagccggggcttcggccggcagggcaagcggaccttcatggccgagagacagtacacacggatggaggactggctgaccgccaagctggcctacgagggcctgagcaagacctacctgtccaagacactggcccagtacacctccaagacatgcagcaactgtgggtttaccatcaccagcgccgactacgacagggtgctggagaagctgaagaagacagcaacaggctggatgaccacaattaacggcaaggagctgaaggtggagggccagattacctactacaacagatacaagagacagaacgtagtcaaggacctgtccgtcgagctggatagactgagcgaagaatctgtgaacaacgacatctcctcctggacaaagggcagaagcggagaagctctgagcctcctgaagaaaagattctcccatagacccgtgcaggagaagttcgtgtgcctgaactgcggcttcgagacacacgcagccgagcaagccgccctgaacatcgccagatcctggctgttcctgcggagccaggagtacaagaaataccagacaaacaagacaaccggcaacaccgataagagagccttcgtcgagacctggcagtccttttaccggaagaagcttaaggaggtgtggaaacctgccgtgcggtctggcggatctggcggaggctccaccagccccaagaaaaagagaaaagtctaagctgccttctgcggggcttgccttctggccatgcccttcttctctcccttgcacctgtacctcttggtctttgaataaagcctgagtaggaaggctagcaaaaaaaaaaaaaaaaaaaaaaaaaaaaaaaaaaaaaaaaaaaaaaaaaaaaaaaaaaaaaaaaaaaaaaaaaaaaaaaa

SEQ ID NO: 9636 - RNA, 8787 nt, synthetic construct
  source 1..8787: mol_type = other RNA
aggaaataagagagaaaagaagagtaagaagaaatataagagccaccatggcccctaagaagaagcgtaaagtgagccggatgaaccacgaccaggagttcgacccccctaaggtgtaccctcccgtccccgccgagaagagaaagcccatccgggtcctgagcctgttcgatggcatcgccaccggtctgctggtgctgaaggacctgggcatccaggtggataggtacattgcctccgaggtgtgcgaggactccatcaccgtgggaatggtgcgtcatcagggcaagatcatgtacgtgggcgacgtgcggagcgtgacacagaagcatatccaggagtggggccctttcgacctggtgatcggcggcagcccttgcaatgacctgagcatcgtgaacccagcccggaagggcctgtacgagggaaccggcagactgttcttcgagttttacagactgctgcacgacgcccggcctaaggaaggcgacgaccggcccttcttttggctgttcgagaatgtggtggccatgggagtcagcgacaagcgggatattagccggttcctggagagcaaccccgtgatgatcgatgccaaggaagtgagcgccgcccaccgggccagatacttctggggcaatctgcctggcatgaacagacccctggccagcaccgtgaacgacaagctggagctgcaggagtgcctggagcacggccggatcgccaagttcagcaaggtgagaaccatcaccacccgaagcaacagcatcaaacaaggcaaggaccagcactttcctgtgttcatgaacgagaaggaggacatcctgtggtgtaccgagatggagagagtgttcgggttcccagtccactacacagatgtcagcaacatgtctagactggccagacagagactgctgggaagaagctggtccgtccctgtgatcagacacctgttcgcccctctgaaggagtacttcgcctgcgtgagcagcggcaacagcaacgccaacagccggggccccagcttctctagcggcctggtgccactgtccctgagagggagccacatgggccccatggagatctacaaaaccgtgagcgcctggaagcggcagcctgtgcgcgtgctgagcctgtttcggaatatcgataaagtcctgaaaagcctgggattcctggagagcggctctggctccggcggtggcaccctgaagtacgtggaggatgtgacaaacgtggtcagacgggatgtggagaagtggggccccttcgatctggtgtacggcagcacccaacccctgggcagctcttgtgaccggtgccctggctggtacatgtttcagttccaccggatcctgcagtacgccctgccgagacaggagtcccagcggccattcttttggattttcatggacaacttgctgctgaccgaggatgaccaggaaactaccactcggttcctgcagaccgaagccgtgaccctgcaggacgtgagaggccgggactaccagaacgccatgcgggtgtggtccaacatccctggactgaaaagcaagcacgcacctctgacccctaaagaagaggagtacctgcaggcccaggtgcggagcagaagcaagctggacgcccctaaggtggatctgctggtgaagaattgcctcctgcccctgagagagtacttcaagtatttcagccagaatagtctgcccctgggaggcagcggcggcggcgccagggccagcctgagcttcgaggacgtggccgtgggcttcagctgggaggagtggcagctgctggcccccagccagaaggacctgtacagggacgtgatgctggagaactacaggaacctggtgagcgtgggctaccaggccagcaagcccgacagcgtgttccagctggagcagggcgagcccccctggatggtggagggcgccgcccagagccagacctgccagggctaccccgccaccggcggcccaagcagcggcgcccctcctcccagcggcggcaggcggcccaagcagcggcgcccctcctcccagcggcggcagcccagccggctccccaacctctaccgaggagggcacctctgagtccgccacccccgagagcggccctggcacctccaccgagcccagcgagggcagcgcacccggcagccctgccggcagccccacctccacagaggagggaaccagcaccgagcccagcgaaggcagcgccccaggcaccagcaccgagcctagtgagcaggagattaaacggatcaacaagatcagaagaagacttgtgaaagacagcaacaccaagaaggccggcaagacaggccccatgaaaaccctgctggttagagtgatgacacccgatctgagagagcggctggaaaacctgagaaagaagcctgaaaatatcccccagcccatcagcaatacatctagagccaacctgaataagctgctgaccgattacaccgaaatgaagaaggcgatcctgcatgtgtactgggaagagttccagaaggaccctgtgggcctgatgagccgggtggcccagcctgccagcaagaagatcgatcagaacaagctgaaacctgagatggacgagaagggcaacctgaccaccgccggctttgcctgctctcagtgtggccagcccctgttcgtgtacaagctggagcaggtgtctgagaagggcaaggcttacaccaactacttcggacggtgcaatgtggccgagcacgaaaagctgatcctgctggcccagctgaagcccgagaaggatagcgacgaagccgtgacatatagcctgggaaagtttgggcagagggccctggatttctacagcattcatgtgaccaaggagtccacccaccccgtgaagcccctggcccagatcgccggaaacagatacgcctccggacctgtgggaaaggccctgagcgacgcatgtatgggcacaatcgcctccttcctgtctaagtaccaggacatcatcatcgaacaccagaaggtggtgaagggcaaccagaagagactggagagcctgcgggagctggccggcaaggaaaacctggaataccctagcgtgaccctgccacctcagcctcacaccaaggagggcgttgatgcctacaacgaagtgatcgcccgggtgcgaatgtgggtgaacctgaacctgtggcagaagctgaagctaagcagagatgatgccaagcctctgctgagactgaagggattcccttcctttcctctggtcgagagacaggccaacgaagtggactggtgggacatggtgtgtaacgtgaagaagctgatcaacgagaaaaaggaggatggcaaggtgttttggcagaatctggctggctacaagagacaggaagccctgagaccatacctgagcagcgaggaagatcggaagaagggaaagaaattcgctcggtaccagctgggcgacctgctgctgcacctggaaaagaagcacggcgaggactggggaaaggtgtacgacgaggcctgggagcggattgacaagaaagtggaaggcctgagcaagcacatcaagctggaagaggaacggagaagcgaggacgcccagagcaaggccgccctgaccgactggctgcgggctaaggccagcttcgtgatcgagggcctgaaggaggccgacaaggacgagttctgcagatgcgagctgaagctgcagaagtggtacggggacctgcggggaaagcccttcgccatcgaagccgagaacagcatcctggacatcagcggcttcagcaagcagtacaactgtgccttcatctggcagaaggacggcgtgaagaagctgaacctgtacctgatcatcaactacttcaagggcggcaagctgcggttcaagaagatcaaacctgaagccttcgaagccaacagattctacaccgtgatcaacaaaaagagcggcgagatcgtgcccatggaggtgaacttcaacttcgacgaccccaacctgatcatcctgcctctggcctttggcaagagacagggcagagaattcatctggaacgacctgctgtccctggaaaccggcagcctgaagctggccaacggaagagtgatcgagaagacactgtacaacagaagaacccggcaggatgagcctgccctgttcgtggccctgaccttcgagcggcgggaggtcctggactcctccaatatcaaaccaatgaacctgatcggcgtggcaagaggcgaaaacatccccgccgtgatcgccctgaccgaccccgagggctgcccactgagccggtttaaggatagcctgggaaacccaacccacatcctgagaatcggcgagagctataaggagaagcagcggaccatccaggccaagaaggaggtggagcagcggagagccggcggctacagccggaagtacgccagcaaagccaagaatctggcagacgatatggtgagaaacaccgctagagatctgctgtactacgccgtgacccaggatgccatgctgatcttcgccaacctgagccggggcttcggccggcagggcaagcggaccttcatggccgagagacagtacacacggatggaggactggctgaccgccaagctggcctacgagggcctgagcaagacctacctgtccaagacactggcccagtacacctccaagacatgcagcaactgtgggtttaccatcaccagcgccgactacgacagggtgctggagaagctgaagaagacagcaacaggctggatgaccacaattaacggcaaggagctgaaggtggagggccagattacctactacaacagatacaagagacagaacgtagtcaaggacctgtccgtcgagctggatagactgagcgaagaatctgtgaacaacgacatctcctcctggacaaagggcagaagcggagaagctctgagcctcctgaagaaaagattctcccatagacccgtgcaggagaagttcgtgtgcctgaactgcggcttcgagacacacgcagccgagcaagccgccctgaacatcgccagatcctggctgttcctgcggagccaggagtacaagaaataccagacaaacaagacaaccggcaacaccgataagagagccttcgtcgagacctggcagtccttttaccggaagaagcttaaggaggtgtggaaacctgccgtgcggtctggcggatctggcggaggctccaccagccccaagaaaaagagaaaagtctaagctgccttctgcggggcttgccttctggccatgcccttcttctctcccttgcacctgtacctcttggtctttgaataaagcctgagtaggaaggctagcaaaaaaaaaaaaaaaaaaaaaaaaaaaaaaaaaaaaaaaaaaaaaaaaaaaaaaaaaaaaaaaaaaaaaaaaaaaaaaaagcccagccggctccccaacctctaccgaggagggcacctctgagtccgccacccccgagagcggccctggcacctccaccgagcccagcgagggcagcgcacccggcagccctgccggcagccccacctccacagaggagggaaccagcaccgagcccagcgaaggcagcgccccaggcaccagcaccgagcctagtgagcaggagattaaacggatcaacaagatcagaagaagacttgtgaaagacagcaacaccaagaaggccggcaagacaggccccatgaaaaccctgctggttagagtgatgacacccgatctgagagagcggctggaaaacctgagaaagaagcctgaaaatatcccccagcccatcagcaatacatctagagccaacctgaataagctgctgaccgattacaccgaaatgaagaaggcgatcctgcatgtgtactgggaagagttccagaaggaccctgtgggcctgatgagccgggtggcccagcctgccagcaagaagatcgatcagaacaagctgaaacctgagatggacgagaagggcaacctgaccaccgccggctttgcctgctctcagtgtggccagcccctgttcgtgtacaagctggagcaggtgtctgagaagggcaaggcttacaccaactacttcggacggtgcaatgtggccgagcacgaaaagctgatcctgctggcccagctgaagcccgagaaggatagcgacgaagccgtgacatatagcctgggaaagtttgggcagagggccctggatttctacagcattcatgtgaccaaggagtccacccaccccgtgaagcccctggcccagatcgccggaaacagatacgcctccggacctgtgggaaaggccctgagcgacgcatgtatgggcacaatcgcctccttcctgtctaagtaccaggacatcatcatcgaacaccagaaggtggtgaagggcaaccagaagagactggagagcctgcgggagctggccggcaaggaaaacctggaataccctagcgtgaccctgccacctcagcctcacaccaaggagggcgttgatgcctacaacgaagtgatcgcccgggtgcgaatgtgggtgaacctgaacctgtggcagaagctgaagctaagcagagatgatgccaagcctctgctgagactgaagggattcccttcctttcctctggtcgagagacaggccaacgaagtggactggtgggacatggtgtgtaacgtgaagaagctgatcaacgagaaaaaggaggatggcaaggtgttttggcagaatctggctggctacaagagacaggaagccctgagaccatacctgagcagcgaggaagatcggaagaagggaaagaaattcgctcggtaccagctgggcgacctgctgctgcacctggaaaagaagcacggcgaggactggggaaaggtgtacgacgaggcctgggagcggattgacaagaaagtggaaggcctgagcaagcacatcaagctggaagaggaacggagaagcgaggacgcccagagcaaggccgccctgaccgactggctgcgggctaaggccagcttcgtgatcgagggcctgaaggaggccgacaaggacgagttctgcagatgcgagctgaagctgcagaagtggtacggggacctgcggggaaagcccttcgccatcgaagccgagaacagcatcctggacatcagcggcttcagcaagcagtacaactgtgccttcatctggcagaaggacggcgtgaagaagctgaacctgtacctgatcatcaactacttcaagggcggcaagctgcggttcaagaagatcaaacctgaagccttcgaagccaacagattctacaccgtgatcaacaaaaagagcggcgagatcgtgcccatggaggtgaacttcaacttcgacgaccccaacctgatcatcctgcctctggcctttggcaagagacagggcagagaattcatctggaacgacctgctgtccctggaaaccggcagcctgaagctggccaacggaagagtgatcgagaagacactgtacaacagaagaacccggcaggatgagcctgccctgttcgtggccctgaccttcgagcggcgggaggtcctggactcctccaatatcaaaccaatgaacctgatcggcgtggcaagaggcgaaaacatccccgccgtgatcgccctgaccgaccccgagggctgcccactgagccggtttaaggatagcctgggaaacccaacccacatcctgagaatcggcgagagctataaggagaagcagcggaccatccaggccaagaaggaggtggagcagcggagagccggcggctacagccggaagtacgccagcaaagccaagaatctggcagacgatatggtgagaaacaccgctagagatctgctgtactacgccgtgacccaggatgccatgctgatcttcgccaacctgagccggggcttcggccggcagggcaagcggaccttcatggccgagagacagtacacacggatggaggactggctgaccgccaagctggcctacgagggcctgagcaagacctacctgtccaagacactggcccagtacacctccaagacatgcagcaactgtgggtttaccatcaccagcgccgactacgacagggtgctggagaagctgaagaagacagcaacaggctggatgaccacaattaacggcaaggagctgaaggtggagggccagattacctactacaacagatacaagagacagaacgtagtcaaggacctgtccgtcgagctggatagactgagcgaagaatctgtgaacaacgacatctcctcctggacaaagggcagaagcggagaagctctgagcctcctgaagaaaagattctcccatagacccgtgcaggagaagttcgtgtgcctgaactgcggcttcgagacacacgcagccgagcaagccgccctgaacatcgccagatcctggctgttcctgcggagccaggagtacaagaaataccagacaaacaagacaaccggcaacaccgataagagagccttcgtcgagacctggcagtccttttaccggaagaagcttaaggaggtgtggaaacctgccgtgcggtctggcggatctggcggaggctccaccagccccaagaaaaagagaaaagtctaagctgccttctgcggggcttgccttctggccatgcccttcttctctcccttgcacctgtacctcttggtctttgaataaagcctgagtaggaaggctagcaaaaaaaaaaaaaaaaaaaaaaaaaaaaaaaaaaaaaaaaaaaaaaaaaaaaaaaaaaaaaaaaaaaaaaaaaaaaaaaa

SEQ ID NO: 9637 - RNA, 8787 nt, synthetic construct
  source 1..8787: mol_type = other RNA
aggaaataagagagaaaagaagagtaagaagaaatataagagccaccatggcccctaagaagaagcgtaaagtgagccggatgaaccacgaccaggagttcgacccccctaaggtgtaccctcccgtccccgccgagaagagaaagcccatccgggtcctgagcctgttcgatggcatcgccaccggtctgctggtgctgaaggacctgggcatccaggtggataggtacattgcctccgaggtgtgcgaggactccatcaccgtgggaatggtgcgtcatcagggcaagatcatgtacgtgggcgacgtgcggagcgtgacacagaagcatatccaggagtggggccctttcgacctggtgatcggcggcagcccttgcaatgacctgagcatcgtgaacccagcccggaagggcctgtacgagggaaccggcagactgttcttcgagttttacagactgctgcacgacgcccggcctaaggaaggcgacgaccggcccttcttttggctgttcgagaatgtggtggccatgggagtcagcgacaagcgggatattagccggttcctggagagcaaccccgtgatgatcgatgccaaggaagtgagcgccgcccaccgggccagatacttctggggcaatctgcctggcatgaacagacccctggccagcaccgtgaacgacaagctggagctgcaggagtgcctggagcacggccggatcgccaagttcagcaaggtgagaaccatcaccacccgaagcaacagcatcaaacaaggcaaggaccagcactttcctgtgttcatgaacgagaaggaggacatcctgtggtgtaccgagatggagagagtgttcgggttcccagtccactacacagatgtcagcaacatgtctagactggccagacagagactgctgggaagaagctggtccgtccctgtgatcagacacctgttcgcccctctgaaggagtacttcgcctgcgtgagcagcggcaacagcaacgccaacagccggggccccagcttctctagcggcctggtgccactgtccctgagagggagccacatgggccccatggagatctacaaaaccgtgagcgcctggaagcggcagcctgtgcgcgtgctgagcctgtttcggaatatcgataaagtcctgaaaagcctgggattcctggagagcggctctggctccggcggtggcaccctgaagtacgtggaggatgtgacaaacgtggtcagacgggatgtggagaagtggggccccttcgatctggtgtacggcagcacccaacccctgggcagctcttgtgaccggtgccctggctggtacatgtttcagttccaccggatcctgcagtacgccctgccgagacaggagtcccagcggccattcttttggattttcatggacaacttgctgctgaccgaggatgaccaggaaactaccactcggttcctgcagaccgaagccgtgaccctgcaggacgtgagaggccgggactaccagaacgccatgcgggtgtggtccaacatccctggactgaaaagcaagcacgcacctctgacccctaaagaagaggagtacctgcaggcccaggtgcggagcagaagcaagctggacgcccctaaggtggatctgctggtgaagaattgcctcctgcccctgagagagtacttcaagtatttcagccagaatagtctgcccctgggaggcagcggcggcggcctgcaggtgagcgtgagcttcgaggacgtgaccgtggacttcagcagggaggagtggcagcacctggaccccgcccagaggaggctgtactgggacgtgaccctggagaactacagccacctgctgagcgtgggctaccaggtgcccaagcccgaggtgatcctgaagctggagcagggcgagggcccctggaccctggagggcgagaccccccaccagagctgcagcgacgaggacatcggcggcggcccaagcagcggcgcccctcctcccagcggcggcaggcggcccaagcagcggcgcccctcctcccagcggcggcagcccagccggctccccaacctctaccgaggagggcacctctgagtccgccacccccgagagcggccctggcacctccaccgagcccagcgagggcagcgcacccggcagccctgccggcagccccacctccacagaggagggaaccagcaccgagcccagcgaaggcagcgccccaggcaccagcaccgagcctagtgagcaggagattaaacggatcaacaagatcagaagaagacttgtgaaagacagcaacaccaagaaggccggcaagacaggccccatgaaaaccctgctggttagagtgatgacacccgatctgagagagcggctggaaaacctgagaaagaagcctgaaaatatcccccagcccatcagcaatacatctagagccaacctgaataagctgctgaccgattacaccgaaatgaagaaggcgatcctgcatgtgtactgggaagagttccagaaggaccctgtgggcctgatgagccgggtggcccagcctgccagcaagaagatcgatcagaacaagctgaaacctgagatggacgagaagggcaacctgaccaccgccggctttgcctgctctcagtgtggccagcccctgttcgtgtacaagctggagcaggtgtctgagaagggcaaggcttacaccaactacttcggacggtgcaatgtggccgagcacgaaaagctgatcctgctggcccagctgaagcccgagaaggatagcgacgaagccgtgacatatagcctgggaaagtttgggcagagggccctggatttctacagcattcatgtgaccaaggagtccacccaccccgtgaagcccctggcccagatcgccggaaacagatacgcctccggacctgtgggaaaggccctgagcgacgcatgtatgggcacaatcgcctccttcctgtctaagtaccaggacatcatcatcgaacaccagaaggtggtgaagggcaaccagaagagactggagagcctgcgggagctggccggcaaggaaaacctggaataccctagcgtgaccctgccacctcagcctcacaccaaggagggcgttgatgcctacaacgaagtgatcgcccgggtgcgaatgtgggtgaacctgaacctgtggcagaagctgaagctaagcagagatgatgccaagcctctgctgagactgaagggattcccttcctttcctctggtcgagagacaggccaacgaagtggactggtgggacatggtgtgtaacgtgaagaagctgatcaacgagaaaaaggaggatggcaaggtgttttggcagaatctggctggctacaagagacaggaagccctgagaccatacctgagcagcgaggaagatcggaagaagggaaagaaattcgctcggtaccagctgggcgacctgctgctgcacctggaaaagaagcacggcgaggactggggaaaggtgtacgacgaggcctgggagcggattgacaagaaagtggaaggcctgagcaagcacatcaagctggaagaggaacggagaagcgaggacgcccagagcaaggccgccctgaccgactggctgcgggctaaggccagcttcgtgatcgagggcctgaaggaggccgacaaggacgagttctgcagatgcgagctgaagctgcagaagtggtacggggacctgcggggaaagcccttcgccatcgaagccgagaacagcatcctggacatcagcggcttcagcaagcagtacaactgtgccttcatctggcagaaggacggcgtgaagaagctgaacctgtacctgatcatcaactacttcaagggcggcaagctgcggttcaagaagatcaaacctgaagccttcgaagccaacagattctacaccgtgatcaacaaaaagagcggcgagatcgtgcccatggaggtgaacttcaacttcgacgaccccaacctgatcatcctgcctctggcctttggcaagagacagggcagagaattcatctggaacgacctgctgtccctggaaaccggcagcctgaagctggccaacggaagagtgatcgagaagacactgtacaacagaagaacccggcaggatgagcctgccctgttcgtggccctgaccttcgagcggcgggaggtcctggactcctccaatatcaaaccaatgaacctgatcggcgtggcaagaggcgaaaacatccccgccgtgatcgccctgaccgaccccgagggctgcccactgagccggtttaaggatagcctgggaaacccaacccacatcctgagaatcggcgagagctataaggagaagcagcggaccatccaggccaagaaggaggtggagcagcggagagccggcggctacagccggaagtacgccagcaaagccaagaatctggcagacgatatggtgagaaacaccgctagagatctgctgtactacgccgtgacccaggatgccatgctgatcttcgccaacctgagccggggcttcggccggcagggcaagcggaccttcatggccgagagacagtacacacggatggaggactggctgaccgccaagctggcctacgagggcctgagcaagacctacctgtccaagacactggcccagtacacctccaagacatgcagcaactgtgggtttaccatcaccagcgccgactacgacagggtgctggagaagctgaagaagacagcaacaggctggatgaccacaattaacggcaaggagctgaaggtggagggccagattacctactacaacagatacaagagacagaacgtagtcaaggacctgtccgtcgagctggatagactgagcgaagaatctgtgaacaacgacatctcctcctggacaaagggcagaagcggagaagctctgagcctcctgaagaaaagattctcccatagacccgtgcaggagaagttcgtgtgcctgaactgcggcttcgagacacacgcagccgagcaagccgccctgaacatcgccagatcctggctgttcctgcggagccaggagtacaagaaataccagacaaacaagacaaccggcaacaccgataagagagccttcgtcgagacctggcagtccttttaccggaagaagcttaaggaggtgtggaaacctgccgtgcggtctggcggatctggcggaggctccaccagccccaagaaaaagagaaaagtctaagctgccttctgcggggcttgccttctggccatgcccttcttctctcccttgcacctgtacctcttggtctttgaataaagcctgagtaggaaggctagcaaaaaaaaaaaaaaaaaaaaaaaaaaaaaaaaaaaaaaaaaaaaaaaaaaaaaaaaaaaaaaaaaaaaaaaaaaaaaaaagcccagccggctccccaacctctaccgaggagggcacctctgagtccgccacccccgagagcggccctggcacctccaccgagcccagcgagggcagcgcacccggcagccctgccggcagccccacctccacagaggagggaaccagcaccgagcccagcgaaggcagcgccccaggcaccagcaccgagcctagtgagcaggagattaaacggatcaacaagatcagaagaagacttgtgaaagacagcaacaccaagaaggccggcaagacaggccccatgaaaaccctgctggttagagtgatgacacccgatctgagagagcggctggaaaacctgagaaagaagcctgaaaatatcccccagcccatcagcaatacatctagagccaacctgaataagctgctgaccgattacaccgaaatgaagaaggcgatcctgcatgtgtactgggaagagttccagaaggaccctgtgggcctgatgagccgggtggcccagcctgccagcaagaagatcgatcagaacaagctgaaacctgagatggacgagaagggcaacctgaccaccgccggctttgcctgctctcagtgtggccagcccctgttcgtgtacaagctggagcaggtgtctgagaagggcaaggcttacaccaactacttcggacggtgcaatgtggccgagcacgaaaagctgatcctgctggcccagctgaagcccgagaaggatagcgacgaagccgtgacatatagcctgggaaagtttgggcagagggccctggatttctacagcattcatgtgaccaaggagtccacccaccccgtgaagcccctggcccagatcgccggaaacagatacgcctccggacctgtgggaaaggccctgagcgacgcatgtatgggcacaatcgcctccttcctgtctaagtaccaggacatcatcatcgaacaccagaaggtggtgaagggcaaccagaagagactggagagcctgcgggagctggccggcaaggaaaacctggaataccctagcgtgaccctgccacctcagcctcacaccaaggagggcgttgatgcctacaacgaagtgatcgcccgggtgcgaatgtgggtgaacctgaacctgtggcagaagctgaagctaagcagagatgatgccaagcctctgctgagactgaagggattcccttcctttcctctggtcgagagacaggccaacgaagtggactggtgggacatggtgtgtaacgtgaagaagctgatcaacgagaaaaaggaggatggcaaggtgttttggcagaatctggctggctacaagagacaggaagccctgagaccatacctgagcagcgaggaagatcggaagaagggaaagaaattcgctcggtaccagctgggcgacctgctgctgcacctggaaaagaagcacggcgaggactggggaaaggtgtacgacgaggcctgggagcggattgacaagaaagtggaaggcctgagcaagcacatcaagctggaagaggaacggagaagcgaggacgcccagagcaaggccgccctgaccgactggctgcgggctaaggccagcttcgtgatcgagggcctgaaggaggccgacaaggacgagttctgcagatgcgagctgaagctgcagaagtggtacggggacctgcggggaaagcccttcgccatcgaagccgagaacagcatcctggacatcagcggcttcagcaagcagtacaactgtgccttcatctggcagaaggacggcgtgaagaagctgaacctgtacctgatcatcaactacttcaagggcggcaagctgcggttcaagaagatcaaacctgaagccttcgaagccaacagattctacaccgtgatcaacaaaaagagcggcgagatcgtgcccatggaggtgaacttcaacttcgacgaccccaacctgatcatcctgcctctggcctttggcaagagacagggcagagaattcatctggaacgacctgctgtccctggaaaccggcagcctgaagctggccaacggaagagtgatcgagaagacactgtacaacagaagaacccggcaggatgagcctgccctgttcgtggccctgaccttcgagcggcgggaggtcctggactcctccaatatcaaaccaatgaacctgatcggcgtggcaagaggcgaaaacatccccgccgtgatcgccctgaccgaccccgagggctgcccactgagccggtttaaggatagcctgggaaacccaacccacatcctgagaatcggcgagagctataaggagaagcagcggaccatccaggccaagaaggaggtggagcagcggagagccggcggctacagccggaagtacgccagcaaagccaagaatctggcagacgatatggtgagaaacaccgctagagatctgctgtactacgccgtgacccaggatgccatgctgatcttcgccaacctgagccggggcttcggccggcagggcaagcggaccttcatggccgagagacagtacacacggatggaggactggctgaccgccaagctggcctacgagggcctgagcaagacctacctgtccaagacactggcccagtacacctccaagacatgcagcaactgtgggtttaccatcaccagcgccgactacgacagggtgctggagaagctgaagaagacagcaacaggctggatgaccacaattaacggcaaggagctgaaggtggagggccagattacctactacaacagatacaagagacagaacgtagtcaaggacctgtccgtcgagctggatagactgagcgaagaatctgtgaacaacgacatctcctcctggacaaagggcagaagcggagaagctctgagcctcctgaagaaaagattctcccatagacccgtgcaggagaagttcgtgtgcctgaactgcggcttcgagacacacgcagccgagcaagccgccctgaacatcgccagatcctggctgttcctgcggagccaggagtacaagaaataccagacaaacaagacaaccggcaacaccgataagagagccttcgtcgagacctggcagtccttttaccggaagaagcttaaggaggtgtggaaacctgccgtgcggtctggcggatctggcggaggctccaccagccccaagaaaaagagaaaagtctaagctgccttctgcggggcttgccttctggccatgcccttcttctctcccttgcacctgtacctcttggtctttgaataaagcctgagtaggaaggctagcaaaaaaaaaaaaaaaaaaaaaaaaaaaaaaaaaaaaaaaaaaaaaaaaaaaaaaaaaaaaaaaaaaaaaaaaaaaaaaaa

SEQ ID NO: 9638 - RNA, 8787 nt, synthetic construct
  source 1..8787: mol_type = other RNA
aggaaataagagagaaaagaagagtaagaagaaatataagagccaccatggcccctaagaagaagcgtaaagtgagccggatgaaccacgaccaggagttcgacccccctaaggtgtaccctcccgtccccgccgagaagagaaagcccatccgggtcctgagcctgttcgatggcatcgccaccggtctgctggtgctgaaggacctgggcatccaggtggataggtacattgcctccgaggtgtgcgaggactccatcaccgtgggaatggtgcgtcatcagggcaagatcatgtacgtgggcgacgtgcggagcgtgacacagaagcatatccaggagtggggccctttcgacctggtgatcggcggcagcccttgcaatgacctgagcatcgtgaacccagcccggaagggcctgtacgagggaaccggcagactgttcttcgagttttacagactgctgcacgacgcccggcctaaggaaggcgacgaccggcccttcttttggctgttcgagaatgtggtggccatgggagtcagcgacaagcgggatattagccggttcctggagagcaaccccgtgatgatcgatgccaaggaagtgagcgccgcccaccgggccagatacttctggggcaatctgcctggcatgaacagacccctggccagcaccgtgaacgacaagctggagctgcaggagtgcctggagcacggccggatcgccaagttcagcaaggtgagaaccatcaccacccgaagcaacagcatcaaacaaggcaaggaccagcactttcctgtgttcatgaacgagaaggaggacatcctgtggtgtaccgagatggagagagtgttcgggttcccagtccactacacagatgtcagcaacatgtctagactggccagacagagactgctgggaagaagctggtccgtccctgtgatcagacacctgttcgcccctctgaaggagtacttcgcctgcgtgagcagcggcaacagcaacgccaacagccggggccccagcttctctagcggcctggtgccactgtccctgagagggagccacatgggccccatggagatctacaaaaccgtgagcgcctggaagcggcagcctgtgcgcgtgctgagcctgtttcggaatatcgataaagtcctgaaaagcctgggattcctggagagcggctctggctccggcggtggcaccctgaagtacgtggaggatgtgacaaacgtggtcagacgggatgtggagaagtggggccccttcgatctggtgtacggcagcacccaacccctgggcagctcttgtgaccggtgccctggctggtacatgtttcagttccaccggatcctgcagtacgccctgccgagacaggagtcccagcggccattcttttggattttcatggacaacttgctgctgaccgaggatgaccaggaaactaccactcggttcctgcagaccgaagccgtgaccctgcaggacgtgagaggccgggactaccagaacgccatgcgggtgtggtccaacatccctggactgaaaagcaagcacgcacctctgacccctaaagaagaggagtacctgcaggcccaggtgcggagcagaagcaagctggacgcccctaaggtggatctgctggtgaagaattgcctcctgcccctgagagagtacttcaagtatttcagccagaatagtctgcccctgggaggcagcggcggcggcagctggggccccctgagcttcatggacgtgttcgtggacttcacctgggaggagtggcagctgctggaccccgcccagaagtgcctgtacaggagcgtgatgctggagaactacagcaacctggtgagcctgggctaccagcacaccaagcccgacatcatcttcaagctggagcagggcgaggagctgtgcatggtgcaggcccaggtgcccaaccagacctgccccaacaccgtgtggaagggcggcccaagcagcggcgcccctcctcccagcggcggcaggcggcccaagcagcggcgcccctcctcccagcggcggcagcccagccggctccccaacctctaccgaggagggcacctctgagtccgccacccccgagagcggccctggcacctccaccgagcccagcgagggcagcgcacccggcagccctgccggcagccccacctccacagaggagggaaccagcaccgagcccagcgaaggcagcgccccaggcaccagcaccgagcctagtgagcaggagattaaacggatcaacaagatcagaagaagacttgtgaaagacagcaacaccaagaaggccggcaagacaggccccatgaaaaccctgctggttagagtgatgacacccgatctgagagagcggctggaaaacctgagaaagaagcctgaaaatatcccccagcccatcagcaatacatctagagccaacctgaataagctgctgaccgattacaccgaaatgaagaaggcgatcctgcatgtgtactgggaagagttccagaaggaccctgtgggcctgatgagccgggtggcccagcctgccagcaagaagatcgatcagaacaagctgaaacctgagatggacgagaagggcaacctgaccaccgccggctttgcctgctctcagtgtggccagcccctgttcgtgtacaagctggagcaggtgtctgagaagggcaaggcttacaccaactacttcggacggtgcaatgtggccgagcacgaaaagctgatcctgctggcccagctgaagcccgagaaggatagcgacgaagccgtgacatatagcctgggaaagtttgggcagagggccctggatttctacagcattcatgtgaccaaggagtccacccaccccgtgaagcccctggcccagatcgccggaaacagatacgcctccggacctgtgggaaaggccctgagcgacgcatgtatgggcacaatcgcctccttcctgtctaagtaccaggacatcatcatcgaacaccagaaggtggtgaagggcaaccagaagagactggagagcctgcgggagctggccggcaaggaaaacctggaataccctagcgtgaccctgccacctcagcctcacaccaaggagggcgttgatgcctacaacgaagtgatcgcccgggtgcgaatgtgggtgaacctgaacctgtggcagaagctgaagctaagcagagatgatgccaagcctctgctgagactgaagggattcccttcctttcctctggtcgagagacaggccaacgaagtggactggtgggacatggtgtgtaacgtgaagaagctgatcaacgagaaaaaggaggatggcaaggtgttttggcagaatctggctggctacaagagacaggaagccctgagaccatacctgagcagcgaggaagatcggaagaagggaaagaaattcgctcggtaccagctgggcgacctgctgctgcacctggaaaagaagcacggcgaggactggggaaaggtgtacgacgaggcctgggagcggattgacaagaaagtggaaggcctgagcaagcacatcaagctggaagaggaacggagaagcgaggacgcccagagcaaggccgccctgaccgactggctgcgggctaaggccagcttcgtgatcgagggcctgaaggaggccgacaaggacgagttctgcagatgcgagctgaagctgcagaagtggtacggggacctgcggggaaagcccttcgccatcgaagccgagaacagcatcctggacatcagcggcttcagcaagcagtacaactgtgccttcatctggcagaaggacggcgtgaagaagctgaacctgtacctgatcatcaactacttcaagggcggcaagctgcggttcaagaagatcaaacctgaagccttcgaagccaacagattctacaccgtgatcaacaaaaagagcggcgagatcgtgcccatggaggtgaacttcaacttcgacgaccccaacctgatcatcctgcctctggcctttggcaagagacagggcagagaattcatctggaacgacctgctgtccctggaaaccggcagcctgaagctggccaacggaagagtgatcgagaagacactgtacaacagaagaacccggcaggatgagcctgccctgttcgtggccctgaccttcgagcggcgggaggtcctggactcctccaatatcaaaccaatgaacctgatcggcgtggcaagaggcgaaaacatccccgccgtgatcgccctgaccgaccccgagggctgcccactgagccggtttaaggatagcctgggaaacccaacccacatcctgagaatcggcgagagctataaggagaagcagcggaccatccaggccaagaaggaggtggagcagcggagagccggcggctacagccggaagtacgccagcaaagccaagaatctggcagacgatatggtgagaaacaccgctagagatctgctgtactacgccgtgacccaggatgccatgctgatcttcgccaacctgagccggggcttcggccggcagggcaagcggaccttcatggccgagagacagtacacacggatggaggactggctgaccgccaagctggcctacgagggcctgagcaagacctacctgtccaagacactggcccagtacacctccaagacatgcagcaactgtgggtttaccatcaccagcgccgactacgacagggtgctggagaagctgaagaagacagcaacaggctggatgaccacaattaacggcaaggagctgaaggtggagggccagattacctactacaacagatacaagagacagaacgtagtcaaggacctgtccgtcgagctggatagactgagcgaagaatctgtgaacaacgacatctcctcctggacaaagggcagaagcggagaagctctgagcctcctgaagaaaagattctcccatagacccgtgcaggagaagttcgtgtgcctgaactgcggcttcgagacacacgcagccgagcaagccgccctgaacatcgccagatcctggctgttcctgcggagccaggagtacaagaaataccagacaaacaagacaaccggcaacaccgataagagagccttcgtcgagacctggcagtccttttaccggaagaagcttaaggaggtgtggaaacctgccgtgcggtctggcggatctggcggaggctccaccagccccaagaaaaagagaaaagtctaagctgccttctgcggggcttgccttctggccatgcccttcttctctcccttgcacctgtacctcttggtctttgaataaagcctgagtaggaaggctagcaaaaaaaaaaaaaaaaaaaaaaaaaaaaaaaaaaaaaaaaaaaaaaaaaaaaaaaaaaaaaaaaaaaaaaaaaaaaaaaagcccagccggctccccaacctctaccgaggagggcacctctgagtccgccacccccgagagcggccctggcacctccaccgagcccagcgagggcagcgcacccggcagccctgccggcagccccacctccacagaggagggaaccagcaccgagcccagcgaaggcagcgccccaggcaccagcaccgagcctagtgagcaggagattaaacggatcaacaagatcagaagaagacttgtgaaagacagcaacaccaagaaggccggcaagacaggccccatgaaaaccctgctggttagagtgatgacacccgatctgagagagcggctggaaaacctgagaaagaagcctgaaaatatcccccagcccatcagcaatacatctagagccaacctgaataagctgctgaccgattacaccgaaatgaagaaggcgatcctgcatgtgtactgggaagagttccagaaggaccctgtgggcctgatgagccgggtggcccagcctgccagcaagaagatcgatcagaacaagctgaaacctgagatggacgagaagggcaacctgaccaccgccggctttgcctgctctcagtgtggccagcccctgttcgtgtacaagctggagcaggtgtctgagaagggcaaggcttacaccaactacttcggacggtgcaatgtggccgagcacgaaaagctgatcctgctggcccagctgaagcccgagaaggatagcgacgaagccgtgacatatagcctgggaaagtttgggcagagggccctggatttctacagcattcatgtgaccaaggagtccacccaccccgtgaagcccctggcccagatcgccggaaacagatacgcctccggacctgtgggaaaggccctgagcgacgcatgtatgggcacaatcgcctccttcctgtctaagtaccaggacatcatcatcgaacaccagaaggtggtgaagggcaaccagaagagactggagagcctgcgggagctggccggcaaggaaaacctggaataccctagcgtgaccctgccacctcagcctcacaccaaggagggcgttgatgcctacaacgaagtgatcgcccgggtgcgaatgtgggtgaacctgaacctgtggcagaagctgaagctaagcagagatgatgccaagcctctgctgagactgaagggattcccttcctttcctctggtcgagagacaggccaacgaagtggactggtgggacatggtgtgtaacgtgaagaagctgatcaacgagaaaaaggaggatggcaaggtgttttggcagaatctggctggctacaagagacaggaagccctgagaccatacctgagcagcgaggaagatcggaagaagggaaagaaattcgctcggtaccagctgggcgacctgctgctgcacctggaaaagaagcacggcgaggactggggaaaggtgtacgacgaggcctgggagcggattgacaagaaagtggaaggcctgagcaagcacatcaagctggaagaggaacggagaagcgaggacgcccagagcaaggccgccctgaccgactggctgcgggctaaggccagcttcgtgatcgagggcctgaaggaggccgacaaggacgagttctgcagatgcgagctgaagctgcagaagtggtacggggacctgcggggaaagcccttcgccatcgaagccgagaacagcatcctggacatcagcggcttcagcaagcagtacaactgtgccttcatctggcagaaggacggcgtgaagaagctgaacctgtacctgatcatcaactacttcaagggcggcaagctgcggttcaagaagatcaaacctgaagccttcgaagccaacagattctacaccgtgatcaacaaaaagagcggcgagatcgtgcccatggaggtgaacttcaacttcgacgaccccaacctgatcatcctgcctctggcctttggcaagagacagggcagagaattcatctggaacgacctgctgtccctggaaaccggcagcctgaagctggccaacggaagagtgatcgagaagacactgtacaacagaagaacccggcaggatgagcctgccctgttcgtggccctgaccttcgagcggcgggaggtcctggactcctccaatatcaaaccaatgaacctgatcggcgtggcaagaggcgaaaacatccccgccgtgatcgccctgaccgaccccgagggctgcccactgagccggtttaaggatagcctgggaaacccaacccacatcctgagaatcggcgagagctataaggagaagcagcggaccatccaggccaagaaggaggtggagcagcggagagccggcggctacagccggaagtacgccagcaaagccaagaatctggcagacgatatggtgagaaacaccgctagagatctgctgtactacgccgtgacccaggatgccatgctgatcttcgccaacctgagccggggcttcggccggcagggcaagcggaccttcatggccgagagacagtacacacggatggaggactggctgaccgccaagctggcctacgagggcctgagcaagacctacctgtccaagacactggcccagtacacctccaagacatgcagcaactgtgggtttaccatcaccagcgccgactacgacagggtgctggagaagctgaagaagacagcaacaggctggatgaccacaattaacggcaaggagctgaaggtggagggccagattacctactacaacagatacaagagacagaacgtagtcaaggacctgtccgtcgagctggatagactgagcgaagaatctgtgaacaacgacatctcctcctggacaaagggcagaagcggagaagctctgagcctcctgaagaaaagattctcccatagacccgtgcaggagaagttcgtgtgcctgaactgcggcttcgagacacacgcagccgagcaagccgccctgaacatcgccagatcctggctgttcctgcggagccaggagtacaagaaataccagacaaacaagacaaccggcaacaccgataagagagccttcgtcgagacctggcagtccttttaccggaagaagcttaaggaggtgtggaaacctgccgtgcggtctggcggatctggcggaggctccaccagccccaagaaaaagagaaaagtctaagctgccttctgcggggcttgccttctggccatgcccttcttctctcccttgcacctgtacctcttggtctttgaataaagcctgagtaggaaggctagcaaaaaaaaaaaaaaaaaaaaaaaaaaaaaaaaaaaaaaaaaaaaaaaaaaaaaaaaaaaaaaaaaaaaaaaaaaaaaaaa

SEQ ID NO: 9639 - RNA, 8787 nt, synthetic construct
  source 1..8787: mol_type = other RNA
aggaaataagagagaaaagaagagtaagaagaaatataagagccaccatggcccctaagaagaagcgtaaagtgagccggatgaaccacgaccaggagttcgacccccctaaggtgtaccctcccgtccccgccgagaagagaaagcccatccgggtcctgagcctgttcgatggcatcgccaccggtctgctggtgctgaaggacctgggcatccaggtggataggtacattgcctccgaggtgtgcgaggactccatcaccgtgggaatggtgcgtcatcagggcaagatcatgtacgtgggcgacgtgcggagcgtgacacagaagcatatccaggagtggggccctttcgacctggtgatcggcggcagcccttgcaatgacctgagcatcgtgaacccagcccggaagggcctgtacgagggaaccggcagactgttcttcgagttttacagactgctgcacgacgcccggcctaaggaaggcgacgaccggcccttcttttggctgttcgagaatgtggtggccatgggagtcagcgacaagcgggatattagccggttcctggagagcaaccccgtgatgatcgatgccaaggaagtgagcgccgcccaccgggccagatacttctggggcaatctgcctggcatgaacagacccctggccagcaccgtgaacgacaagctggagctgcaggagtgcctggagcacggccggatcgccaagttcagcaaggtgagaaccatcaccacccgaagcaacagcatcaaacaaggcaaggaccagcactttcctgtgttcatgaacgagaaggaggacatcctgtggtgtaccgagatggagagagtgttcgggttcccagtccactacacagatgtcagcaacatgtctagactggccagacagagactgctgggaagaagctggtccgtccctgtgatcagacacctgttcgcccctctgaaggagtacttcgcctgcgtgagcagcggcaacagcaacgccaacagccggggccccagcttctctagcggcctggtgccactgtccctgagagggagccacatgggccccatggagatctacaaaaccgtgagcgcctggaagcggcagcctgtgcgcgtgctgagcctgtttcggaatatcgataaagtcctgaaaagcctgggattcctggagagcggctctggctccggcggtggcaccctgaagtacgtggaggatgtgacaaacgtggtcagacgggatgtggagaagtggggccccttcgatctggtgtacggcagcacccaacccctgggcagctcttgtgaccggtgccctggctggtacatgtttcagttccaccggatcctgcagtacgccctgccgagacaggagtcccagcggccattcttttggattttcatggacaacttgctgctgaccgaggatgaccaggaaactaccactcggttcctgcagaccgaagccgtgaccctgcaggacgtgagaggccgggactaccagaacgccatgcgggtgtggtccaacatccctggactgaaaagcaagcacgcacctctgacccctaaagaagaggagtacctgcaggcccaggtgcggagcagaagcaagctggacgcccctaaggtggatctgctggtgaagaattgcctcctgcccctgagagagtacttcaagtatttcagccagaatagtctgcccctgggaggcagcggcggcggcgcccaggtggccttcgaggacgtggccgtgtacttcaccgaggagcagtgggccctgctggaccacagccagagggccctgtacagggacgtgatgcaggagaactacgagaccgtggccagcctgggcctgcccatccccggccccgacagcatcagcaggctgcagcagagggaggagagcaggatcgaggcccagcccgtgctggagggcaacgacgtgagcagcgacgacgacctgggcggcggcccaagcagcggcgcccctcctcccagcggcggcaggcggcccaagcagcggcgcccctcctcccagcggcggcagcccagccggctccccaacctctaccgaggagggcacctctgagtccgccacccccgagagcggccctggcacctccaccgagcccagcgagggcagcgcacccggcagccctgccggcagccccacctccacagaggagggaaccagcaccgagcccagcgaaggcagcgccccaggcaccagcaccgagcctagtgagcaggagattaaacggatcaacaagatcagaagaagacttgtgaaagacagcaacaccaagaaggccggcaagacaggccccatgaaaaccctgctggttagagtgatgacacccgatctgagagagcggctggaaaacctgagaaagaagcctgaaaatatcccccagcccatcagcaatacatctagagccaacctgaataagctgctgaccgattacaccgaaatgaagaaggcgatcctgcatgtgtactgggaagagttccagaaggaccctgtgggcctgatgagccgggtggcccagcctgccagcaagaagatcgatcagaacaagctgaaacctgagatggacgagaagggcaacctgaccaccgccggctttgcctgctctcagtgtggccagcccctgttcgtgtacaagctggagcaggtgtctgagaagggcaaggcttacaccaactacttcggacggtgcaatgtggccgagcacgaaaagctgatcctgctggcccagctgaagcccgagaaggatagcgacgaagccgtgacatatagcctgggaaagtttgggcagagggccctggatttctacagcattcatgtgaccaaggagtccacccaccccgtgaagcccctggcccagatcgccggaaacagatacgcctccggacctgtgggaaaggccctgagcgacgcatgtatgggcacaatcgcctccttcctgtctaagtaccaggacatcatcatcgaacaccagaaggtggtgaagggcaaccagaagagactggagagcctgcgggagctggccggcaaggaaaacctggaataccctagcgtgaccctgccacctcagcctcacaccaaggagggcgttgatgcctacaacgaagtgatcgcccgggtgcgaatgtgggtgaacctgaacctgtggcagaagctgaagctaagcagagatgatgccaagcctctgctgagactgaagggattcccttcctttcctctggtcgagagacaggccaacgaagtggactggtgggacatggtgtgtaacgtgaagaagctgatcaacgagaaaaaggaggatggcaaggtgttttggcagaatctggctggctacaagagacaggaagccctgagaccatacctgagcagcgaggaagatcggaagaagggaaagaaattcgctcggtaccagctgggcgacctgctgctgcacctggaaaagaagcacggcgaggactggggaaaggtgtacgacgaggcctgggagcggattgacaagaaagtggaaggcctgagcaagcacatcaagctggaagaggaacggagaagcgaggacgcccagagcaaggccgccctgaccgactggctgcgggctaaggccagcttcgtgatcgagggcctgaaggaggccgacaaggacgagttctgcagatgcgagctgaagctgcagaagtggtacggggacctgcggggaaagcccttcgccatcgaagccgagaacagcatcctggacatcagcggcttcagcaagcagtacaactgtgccttcatctggcagaaggacggcgtgaagaagctgaacctgtacctgatcatcaactacttcaagggcggcaagctgcggttcaagaagatcaaacctgaagccttcgaagccaacagattctacaccgtgatcaacaaaaagagcggcgagatcgtgcccatggaggtgaacttcaacttcgacgaccccaacctgatcatcctgcctctggcctttggcaagagacagggcagagaattcatctggaacgacctgctgtccctggaaaccggcagcctgaagctggccaacggaagagtgatcgagaagacactgtacaacagaagaacccggcaggatgagcctgccctgttcgtggccctgaccttcgagcggcgggaggtcctggactcctccaatatcaaaccaatgaacctgatcggcgtggcaagaggcgaaaacatccccgccgtgatcgccctgaccgaccccgagggctgcccactgagccggtttaaggatagcctgggaaacccaacccacatcctgagaatcggcgagagctataaggagaagcagcggaccatccaggccaagaaggaggtggagcagcggagagccggcggctacagccggaagtacgccagcaaagccaagaatctggcagacgatatggtgagaaacaccgctagagatctgctgtactacgccgtgacccaggatgccatgctgatcttcgccaacctgagccggggcttcggccggcagggcaagcggaccttcatggccgagagacagtacacacggatggaggactggctgaccgccaagctggcctacgagggcctgagcaagacctacctgtccaagacactggcccagtacacctccaagacatgcagcaactgtgggtttaccatcaccagcgccgactacgacagggtgctggagaagctgaagaagacagcaacaggctggatgaccacaattaacggcaaggagctgaaggtggagggccagattacctactacaacagatacaagagacagaacgtagtcaaggacctgtccgtcgagctggatagactgagcgaagaatctgtgaacaacgacatctcctcctggacaaagggcagaagcggagaagctctgagcctcctgaagaaaagattctcccatagacccgtgcaggagaagttcgtgtgcctgaactgcggcttcgagacacacgcagccgagcaagccgccctgaacatcgccagatcctggctgttcctgcggagccaggagtacaagaaataccagacaaacaagacaaccggcaacaccgataagagagccttcgtcgagacctggcagtccttttaccggaagaagcttaaggaggtgtggaaacctgccgtgcggtctggcggatctggcggaggctccaccagccccaagaaaaagagaaaagtctaagctgccttctgcggggcttgccttctggccatgcccttcttctctcccttgcacctgtacctcttggtctttgaataaagcctgagtaggaaggctagcaaaaaaaaaaaaaaaaaaaaaaaaaaaaaaaaaaaaaaaaaaaaaaaaaaaaaaaaaaaaaaaaaaaaaaaaaaaaaaaagcccagccggctccccaacctctaccgaggagggcacctctgagtccgccacccccgagagcggccctggcacctccaccgagcccagcgagggcagcgcacccggcagccctgccggcagccccacctccacagaggagggaaccagcaccgagcccagcgaaggcagcgccccaggcaccagcaccgagcctagtgagcaggagattaaacggatcaacaagatcagaagaagacttgtgaaagacagcaacaccaagaaggccggcaagacaggccccatgaaaaccctgctggttagagtgatgacacccgatctgagagagcggctggaaaacctgagaaagaagcctgaaaatatcccccagcccatcagcaatacatctagagccaacctgaataagctgctgaccgattacaccgaaatgaagaaggcgatcctgcatgtgtactgggaagagttccagaaggaccctgtgggcctgatgagccgggtggcccagcctgccagcaagaagatcgatcagaacaagctgaaacctgagatggacgagaagggcaacctgaccaccgccggctttgcctgctctcagtgtggccagcccctgttcgtgtacaagctggagcaggtgtctgagaagggcaaggcttacaccaactacttcggacggtgcaatgtggccgagcacgaaaagctgatcctgctggcccagctgaagcccgagaaggatagcgacgaagccgtgacatatagcctgggaaagtttgggcagagggccctggatttctacagcattcatgtgaccaaggagtccacccaccccgtgaagcccctggcccagatcgccggaaacagatacgcctccggacctgtgggaaaggccctgagcgacgcatgtatgggcacaatcgcctccttcctgtctaagtaccaggacatcatcatcgaacaccagaaggtggtgaagggcaaccagaagagactggagagcctgcgggagctggccggcaaggaaaacctggaataccctagcgtgaccctgccacctcagcctcacaccaaggagggcgttgatgcctacaacgaagtgatcgcccgggtgcgaatgtgggtgaacctgaacctgtggcagaagctgaagctaagcagagatgatgccaagcctctgctgagactgaagggattcccttcctttcctctggtcgagagacaggccaacgaagtggactggtgggacatggtgtgtaacgtgaagaagctgatcaacgagaaaaaggaggatggcaaggtgttttggcagaatctggctggctacaagagacaggaagccctgagaccatacctgagcagcgaggaagatcggaagaagggaaagaaattcgctcggtaccagctgggcgacctgctgctgcacctggaaaagaagcacggcgaggactggggaaaggtgtacgacgaggcctgggagcggattgacaagaaagtggaaggcctgagcaagcacatcaagctggaagaggaacggagaagcgaggacgcccagagcaaggccgccctgaccgactggctgcgggctaaggccagcttcgtgatcgagggcctgaaggaggccgacaaggacgagttctgcagatgcgagctgaagctgcagaagtggtacggggacctgcggggaaagcccttcgccatcgaagccgagaacagcatcctggacatcagcggcttcagcaagcagtacaactgtgccttcatctggcagaaggacggcgtgaagaagctgaacctgtacctgatcatcaactacttcaagggcggcaagctgcggttcaagaagatcaaacctgaagccttcgaagccaacagattctacaccgtgatcaacaaaaagagcggcgagatcgtgcccatggaggtgaacttcaacttcgacgaccccaacctgatcatcctgcctctggcctttggcaagagacagggcagagaattcatctggaacgacctgctgtccctggaaaccggcagcctgaagctggccaacggaagagtgatcgagaagacactgtacaacagaagaacccggcaggatgagcctgccctgttcgtggccctgaccttcgagcggcgggaggtcctggactcctccaatatcaaaccaatgaacctgatcggcgtggcaagaggcgaaaacatccccgccgtgatcgccctgaccgaccccgagggctgcccactgagccggtttaaggatagcctgggaaacccaacccacatcctgagaatcggcgagagctataaggagaagcagcggaccatccaggccaagaaggaggtggagcagcggagagccggcggctacagccggaagtacgccagcaaagccaagaatctggcagacgatatggtgagaaacaccgctagagatctgctgtactacgccgtgacccaggatgccatgctgatcttcgccaacctgagccggggcttcggccggcagggcaagcggaccttcatggccgagagacagtacacacggatggaggactggctgaccgccaagctggcctacgagggcctgagcaagacctacctgtccaagacactggcccagtacacctccaagacatgcagcaactgtgggtttaccatcaccagcgccgactacgacagggtgctggagaagctgaagaagacagcaacaggctggatgaccacaattaacggcaaggagctgaaggtggagggccagattacctactacaacagatacaagagacagaacgtagtcaaggacctgtccgtcgagctggatagactgagcgaagaatctgtgaacaacgacatctcctcctggacaaagggcagaagcggagaagctctgagcctcctgaagaaaagattctcccatagacccgtgcaggagaagttcgtgtgcctgaactgcggcttcgagacacacgcagccgagcaagccgccctgaacatcgccagatcctggctgttcctgcggagccaggagtacaagaaataccagacaaacaagacaaccggcaacaccgataagagagccttcgtcgagacctggcagtccttttaccggaagaagcttaaggaggtgtggaaacctgccgtgcggtctggcggatctggcggaggctccaccagccccaagaaaaagagaaaagtctaagctgccttctgcggggcttgccttctggccatgcccttcttctctcccttgcacctgtacctcttggtctttgaataaagcctgagtaggaaggctagcaaaaaaaaaaaaaaaaaaaaaaaaaaaaaaaaaaaaaaaaaaaaaaaaaaaaaaaaaaaaaaaaaaaaaaaaaaaaaaaa

SEQ ID NO: 9640 - RNA, 8787 nt, synthetic construct
  source 1..8787: mol_type = other RNA
aggaaataagagagaaaagaagagtaagaagaaatataagagccaccatggcccctaagaagaagcgtaaagtgagccggatgaaccacgaccaggagttcgacccccctaaggtgtaccctcccgtccccgccgagaagagaaagcccatccgggtcctgagcctgttcgatggcatcgccaccggtctgctggtgctgaaggacctgggcatccaggtggataggtacattgcctccgaggtgtgcgaggactccatcaccgtgggaatggtgcgtcatcagggcaagatcatgtacgtgggcgacgtgcggagcgtgacacagaagcatatccaggagtggggccctttcgacctggtgatcggcggcagcccttgcaatgacctgagcatcgtgaacccagcccggaagggcctgtacgagggaaccggcagactgttcttcgagttttacagactgctgcacgacgcccggcctaaggaaggcgacgaccggcccttcttttggctgttcgagaatgtggtggccatgggagtcagcgacaagcgggatattagccggttcctggagagcaaccccgtgatgatcgatgccaaggaagtgagcgccgcccaccgggccagatacttctggggcaatctgcctggcatgaacagacccctggccagcaccgtgaacgacaagctggagctgcaggagtgcctggagcacggccggatcgccaagttcagcaaggtgagaaccatcaccacccgaagcaacagcatcaaacaaggcaaggaccagcactttcctgtgttcatgaacgagaaggaggacatcctgtggtgtaccgagatggagagagtgttcgggttcccagtccactacacagatgtcagcaacatgtctagactggccagacagagactgctgggaagaagctggtccgtccctgtgatcagacacctgttcgcccctctgaaggagtacttcgcctgcgtgagcagcggcaacagcaacgccaacagccggggccccagcttctctagcggcctggtgccactgtccctgagagggagccacatgggccccatggagatctacaaaaccgtgagcgcctggaagcggcagcctgtgcgcgtgctgagcctgtttcggaatatcgataaagtcctgaaaagcctgggattcctggagagcggctctggctccggcggtggcaccctgaagtacgtggaggatgtgacaaacgtggtcagacgggatgtggagaagtggggccccttcgatctggtgtacggcagcacccaacccctgggcagctcttgtgaccggtgccctggctggtacatgtttcagttccaccggatcctgcagtacgccctgccgagacaggagtcccagcggccattcttttggattttcatggacaacttgctgctgaccgaggatgaccaggaaactaccactcggttcctgcagaccgaagccgtgaccctgcaggacgtgagaggccgggactaccagaacgccatgcgggtgtggtccaacatccctggactgaaaagcaagcacgcacctctgacccctaaagaagaggagtacctgcaggcccaggtgcggagcagaagcaagctggacgcccctaaggtggatctgctggtgaagaattgcctcctgcccctgagagagtacttcaagtatttcagccagaatagtctgcccctgggaggcagcggcggcggcttcaggggccccgtgaccttcaaggacatcaccgtggagttcacccaggaggagtggcagctgctggacaacgcccagaggaccctgtacagggaggtgatgcaggagaactaccaccacctgatcagcgtgggctactgcgtgaacaagcccaacgccgtgttcaagctgaagcagggcaaggagccctggatcctggaggtggagttccccaggaggaacaaccccgaggacctgtggaacggcggcccaagcagcggcgcccctcctcccagcggcggcaggcggcccaagcagcggcgcccctcctcccagcggcggcagcccagccggctccccaacctctaccgaggagggcacctctgagtccgccacccccgagagcggccctggcacctccaccgagcccagcgagggcagcgcacccggcagccctgccggcagccccacctccacagaggagggaaccagcaccgagcccagcgaaggcagcgccccaggcaccagcaccgagcctagtgagcaggagattaaacggatcaacaagatcagaagaagacttgtgaaagacagcaacaccaagaaggccggcaagacaggccccatgaaaaccctgctggttagagtgatgacacccgatctgagagagcggctggaaaacctgagaaagaagcctgaaaatatcccccagcccatcagcaatacatctagagccaacctgaataagctgctgaccgattacaccgaaatgaagaaggcgatcctgcatgtgtactgggaagagttccagaaggaccctgtgggcctgatgagccgggtggcccagcctgccagcaagaagatcgatcagaacaagctgaaacctgagatggacgagaagggcaacctgaccaccgccggctttgcctgctctcagtgtggccagcccctgttcgtgtacaagctggagcaggtgtctgagaagggcaaggcttacaccaactacttcggacggtgcaatgtggccgagcacgaaaagctgatcctgctggcccagctgaagcccgagaaggatagcgacgaagccgtgacatatagcctgggaaagtttgggcagagggccctggatttctacagcattcatgtgaccaaggagtccacccaccccgtgaagcccctggcccagatcgccggaaacagatacgcctccggacctgtgggaaaggccctgagcgacgcatgtatgggcacaatcgcctccttcctgtctaagtaccaggacatcatcatcgaacaccagaaggtggtgaagggcaaccagaagagactggagagcctgcgggagctggccggcaaggaaaacctggaataccctagcgtgaccctgccacctcagcctcacaccaaggagggcgttgatgcctacaacgaagtgatcgcccgggtgcgaatgtgggtgaacctgaacctgtggcagaagctgaagctaagcagagatgatgccaagcctctgctgagactgaagggattcccttcctttcctctggtcgagagacaggccaacgaagtggactggtgggacatggtgtgtaacgtgaagaagctgatcaacgagaaaaaggaggatggcaaggtgttttggcagaatctggctggctacaagagacaggaagccctgagaccatacctgagcagcgaggaagatcggaagaagggaaagaaattcgctcggtaccagctgggcgacctgctgctgcacctggaaaagaagcacggcgaggactggggaaaggtgtacgacgaggcctgggagcggattgacaagaaagtggaaggcctgagcaagcacatcaagctggaagaggaacggagaagcgaggacgcccagagcaaggccgccctgaccgactggctgcgggctaaggccagcttcgtgatcgagggcctgaaggaggccgacaaggacgagttctgcagatgcgagctgaagctgcagaagtggtacggggacctgcggggaaagcccttcgccatcgaagccgagaacagcatcctggacatcagcggcttcagcaagcagtacaactgtgccttcatctggcagaaggacggcgtgaagaagctgaacctgtacctgatcatcaactacttcaagggcggcaagctgcggttcaagaagatcaaacctgaagccttcgaagccaacagattctacaccgtgatcaacaaaaagagcggcgagatcgtgcccatggaggtgaacttcaacttcgacgaccccaacctgatcatcctgcctctggcctttggcaagagacagggcagagaattcatctggaacgacctgctgtccctggaaaccggcagcctgaagctggccaacggaagagtgatcgagaagacactgtacaacagaagaacccggcaggatgagcctgccctgttcgtggccctgaccttcgagcggcgggaggtcctggactcctccaatatcaaaccaatgaacctgatcggcgtggcaagaggcgaaaacatccccgccgtgatcgccctgaccgaccccgagggctgcccactgagccggtttaaggatagcctgggaaacccaacccacatcctgagaatcggcgagagctataaggagaagcagcggaccatccaggccaagaaggaggtggagcagcggagagccggcggctacagccggaagtacgccagcaaagccaagaatctggcagacgatatggtgagaaacaccgctagagatctgctgtactacgccgtgacccaggatgccatgctgatcttcgccaacctgagccggggcttcggccggcagggcaagcggaccttcatggccgagagacagtacacacggatggaggactggctgaccgccaagctggcctacgagggcctgagcaagacctacctgtccaagacactggcccagtacacctccaagacatgcagcaactgtgggtttaccatcaccagcgccgactacgacagggtgctggagaagctgaagaagacagcaacaggctggatgaccacaattaacggcaaggagctgaaggtggagggccagattacctactacaacagatacaagagacagaacgtagtcaaggacctgtccgtcgagctggatagactgagcgaagaatctgtgaacaacgacatctcctcctggacaaagggcagaagcggagaagctctgagcctcctgaagaaaagattctcccatagacccgtgcaggagaagttcgtgtgcctgaactgcggcttcgagacacacgcagccgagcaagccgccctgaacatcgccagatcctggctgttcctgcggagccaggagtacaagaaataccagacaaacaagacaaccggcaacaccgataagagagccttcgtcgagacctggcagtccttttaccggaagaagcttaaggaggtgtggaaacctgccgtgcggtctggcggatctggcggaggctccaccagccccaagaaaaagagaaaagtctaagctgccttctgcggggcttgccttctggccatgcccttcttctctcccttgcacctgtacctcttggtctttgaataaagcctgagtaggaaggctagcaaaaaaaaaaaaaaaaaaaaaaaaaaaaaaaaaaaaaaaaaaaaaaaaaaaaaaaaaaaaaaaaaaaaaaaaaaaaaaaagcccagccggctccccaacctctaccgaggagggcacctctgagtccgccacccccgagagcggccctggcacctccaccgagcccagcgagggcagcgcacccggcagccctgccggcagccccacctccacagaggagggaaccagcaccgagcccagcgaaggcagcgccccaggcaccagcaccgagcctagtgagcaggagattaaacggatcaacaagatcagaagaagacttgtgaaagacagcaacaccaagaaggccggcaagacaggccccatgaaaaccctgctggttagagtgatgacacccgatctgagagagcggctggaaaacctgagaaagaagcctgaaaatatcccccagcccatcagcaatacatctagagccaacctgaataagctgctgaccgattacaccgaaatgaagaaggcgatcctgcatgtgtactgggaagagttccagaaggaccctgtgggcctgatgagccgggtggcccagcctgccagcaagaagatcgatcagaacaagctgaaacctgagatggacgagaagggcaacctgaccaccgccggctttgcctgctctcagtgtggccagcccctgttcgtgtacaagctggagcaggtgtctgagaagggcaaggcttacaccaactacttcggacggtgcaatgtggccgagcacgaaaagctgatcctgctggcccagctgaagcccgagaaggatagcgacgaagccgtgacatatagcctgggaaagtttgggcagagggccctggatttctacagcattcatgtgaccaaggagtccacccaccccgtgaagcccctggcccagatcgccggaaacagatacgcctccggacctgtgggaaaggccctgagcgacgcatgtatgggcacaatcgcctccttcctgtctaagtaccaggacatcatcatcgaacaccagaaggtggtgaagggcaaccagaagagactggagagcctgcgggagctggccggcaaggaaaacctggaataccctagcgtgaccctgccacctcagcctcacaccaaggagggcgttgatgcctacaacgaagtgatcgcccgggtgcgaatgtgggtgaacctgaacctgtggcagaagctgaagctaagcagagatgatgccaagcctctgctgagactgaagggattcccttcctttcctctggtcgagagacaggccaacgaagtggactggtgggacatggtgtgtaacgtgaagaagctgatcaacgagaaaaaggaggatggcaaggtgttttggcagaatctggctggctacaagagacaggaagccctgagaccatacctgagcagcgaggaagatcggaagaagggaaagaaattcgctcggtaccagctgggcgacctgctgctgcacctggaaaagaagcacggcgaggactggggaaaggtgtacgacgaggcctgggagcggattgacaagaaagtggaaggcctgagcaagcacatcaagctggaagaggaacggagaagcgaggacgcccagagcaaggccgccctgaccgactggctgcgggctaaggccagcttcgtgatcgagggcctgaaggaggccgacaaggacgagttctgcagatgcgagctgaagctgcagaagtggtacggggacctgcggggaaagcccttcgccatcgaagccgagaacagcatcctggacatcagcggcttcagcaagcagtacaactgtgccttcatctggcagaaggacggcgtgaagaagctgaacctgtacctgatcatcaactacttcaagggcggcaagctgcggttcaagaagatcaaacctgaagccttcgaagccaacagattctacaccgtgatcaacaaaaagagcggcgagatcgtgcccatggaggtgaacttcaacttcgacgaccccaacctgatcatcctgcctctggcctttggcaagagacagggcagagaattcatctggaacgacctgctgtccctggaaaccggcagcctgaagctggccaacggaagagtgatcgagaagacactgtacaacagaagaacccggcaggatgagcctgccctgttcgtggccctgaccttcgagcggcgggaggtcctggactcctccaatatcaaaccaatgaacctgatcggcgtggcaagaggcgaaaacatccccgccgtgatcgccctgaccgaccccgagggctgcccactgagccggtttaaggatagcctgggaaacccaacccacatcctgagaatcggcgagagctataaggagaagcagcggaccatccaggccaagaaggaggtggagcagcggagagccggcggctacagccggaagtacgccagcaaagccaagaatctggcagacgatatggtgagaaacaccgctagagatctgctgtactacgccgtgacccaggatgccatgctgatcttcgccaacctgagccggggcttcggccggcagggcaagcggaccttcatggccgagagacagtacacacggatggaggactggctgaccgccaagctggcctacgagggcctgagcaagacctacctgtccaagacactggcccagtacacctccaagacatgcagcaactgtgggtttaccatcaccagcgccgactacgacagggtgctggagaagctgaagaagacagcaacaggctggatgaccacaattaacggcaaggagctgaaggtggagggccagattacctactacaacagatacaagagacagaacgtagtcaaggacctgtccgtcgagctggatagactgagcgaagaatctgtgaacaacgacatctcctcctggacaaagggcagaagcggagaagctctgagcctcctgaagaaaagattctcccatagacccgtgcaggagaagttcgtgtgcctgaactgcggcttcgagacacacgcagccgagcaagccgccctgaacatcgccagatcctggctgttcctgcggagccaggagtacaagaaataccagacaaacaagacaaccggcaacaccgataagagagccttcgtcgagacctggcagtccttttaccggaagaagcttaaggaggtgtggaaacctgccgtgcggtctggcggatctggcggaggctccaccagccccaagaaaaagagaaaagtctaagctgccttctgcggggcttgccttctggccatgcccttcttctctcccttgcacctgtacctcttggtctttgaataaagcctgagtaggaaggctagcaaaaaaaaaaaaaaaaaaaaaaaaaaaaaaaaaaaaaaaaaaaaaaaaaaaaaaaaaaaaaaaaaaaaaaaaaaaaaaaa

SEQ ID NO: 9641 - RNA, 8823 nt, synthetic construct
  source 1..8823: mol_type = other RNA
aggaaataagagagaaaagaagagtaagaagaaatataagagccaccatggcccctaagaagaagcgtaaagtgagccggatgaaccacgaccaggagttcgacccccctaaggtgtaccctcccgtccccgccgagaagagaaagcccatccgggtcctgagcctgttcgatggcatcgccaccggtctgctggtgctgaaggacctgggcatccaggtggataggtacattgcctccgaggtgtgcgaggactccatcaccgtgggaatggtgcgtcatcagggcaagatcatgtacgtgggcgacgtgcggagcgtgacacagaagcatatccaggagtggggccctttcgacctggtgatcggcggcagcccttgcaatgacctgagcatcgtgaacccagcccggaagggcctgtacgagggaaccggcagactgttcttcgagttttacagactgctgcacgacgcccggcctaaggaaggcgacgaccggcccttcttttggctgttcgagaatgtggtggccatgggagtcagcgacaagcgggatattagccggttcctggagagcaaccccgtgatgatcgatgccaaggaagtgagcgccgcccaccgggccagatacttctggggcaatctgcctggcatgaacagacccctggccagcaccgtgaacgacaagctggagctgcaggagtgcctggagcacggccggatcgccaagttcagcaaggtgagaaccatcaccacccgaagcaacagcatcaaacaaggcaaggaccagcactttcctgtgttcatgaacgagaaggaggacatcctgtggtgtaccgagatggagagagtgttcgggttcccagtccactacacagatgtcagcaacatgtctagactggccagacagagactgctgggaagaagctggtccgtccctgtgatcagacacctgttcgcccctctgaaggagtacttcgcctgcgtgagcagcggcaacagcaacgccaacagccggggccccagcttctctagcggcctggtgccactgtccctgagagggagccacatgggccccatggagatctacaaaaccgtgagcgcctggaagcggcagcctgtgcgcgtgctgagcctgtttcggaatatcgataaagtcctgaaaagcctgggattcctggagagcggctctggctccggcggtggcaccctgaagtacgtggaggatgtgacaaacgtggtcagacgggatgtggagaagtggggccccttcgatctggtgtacggcagcacccaacccctgggcagctcttgtgaccggtgccctggctggtacatgtttcagttccaccggatcctgcagtacgccctgccgagacaggagtcccagcggccattcttttggattttcatggacaacttgctgctgaccgaggatgaccaggaaactaccactcggttcctgcagaccgaagccgtgaccctgcaggacgtgagaggccgggactaccagaacgccatgcgggtgtggtccaacatccctggactgaaaagcaagcacgcacctctgacccctaaagaagaggagtacctgcaggcccaggtgcggagcagaagcaagctggacgcccctaaggtggatctgctggtgaagaattgcctcctgcccctgagagagtacttcaagtatttcagccagaatagtctgcccctgggaggcagcggcggcggcttcagggaggtgagcgtgtacttcagcgaggaggagtggagctggctggaccccgaccagaaggccctgtactgggaggtgatgctggagaaccacaggaacatggccagcctgggcgacgacggccaggagaacaaggacagctacgagctgctgcagggcatcaccgccagggacaccatggagaccagcgccatcgagatggaggtggagaggtacaaggagaagcagagcgacgactggaaccaggagagcagcagctgcaccgacgacagcgtgggcggcccaagcagcggcgcccctcctcccagcggcggcaggcggcccaagcagcggcgcccctcctcccagcggcggcagcccagccggctccccaacctctaccgaggagggcacctctgagtccgccacccccgagagcggccctggcacctccaccgagcccagcgagggcagcgcacccggcagccctgccggcagccccacctccacagaggagggaaccagcaccgagcccagcgaaggcagcgccccaggcaccagcaccgagcctagtgagcaggagattaaacggatcaacaagatcagaagaagacttgtgaaagacagcaacaccaagaaggccggcaagacaggccccatgaaaaccctgctggttagagtgatgacacccgatctgagagagcggctggaaaacctgagaaagaagcctgaaaatatcccccagcccatcagcaatacatctagagccaacctgaataagctgctgaccgattacaccgaaatgaagaaggcgatcctgcatgtgtactgggaagagttccagaaggaccctgtgggcctgatgagccgggtggcccagcctgccagcaagaagatcgatcagaacaagctgaaacctgagatggacgagaagggcaacctgaccaccgccggctttgcctgctctcagtgtggccagcccctgttcgtgtacaagctggagcaggtgtctgagaagggcaaggcttacaccaactacttcggacggtgcaatgtggccgagcacgaaaagctgatcctgctggcccagctgaagcccgagaaggatagcgacgaagccgtgacatatagcctgggaaagtttgggcagagggccctggatttctacagcattcatgtgaccaaggagtccacccaccccgtgaagcccctggcccagatcgccggaaacagatacgcctccggacctgtgggaaaggccctgagcgacgcatgtatgggcacaatcgcctccttcctgtctaagtaccaggacatcatcatcgaacaccagaaggtggtgaagggcaaccagaagagactggagagcctgcgggagctggccggcaaggaaaacctggaataccctagcgtgaccctgccacctcagcctcacaccaaggagggcgttgatgcctacaacgaagtgatcgcccgggtgcgaatgtgggtgaacctgaacctgtggcagaagctgaagctaagcagagatgatgccaagcctctgctgagactgaagggattcccttcctttcctctggtcgagagacaggccaacgaagtggactggtgggacatggtgtgtaacgtgaagaagctgatcaacgagaaaaaggaggatggcaaggtgttttggcagaatctggctggctacaagagacaggaagccctgagaccatacctgagcagcgaggaagatcggaagaagggaaagaaattcgctcggtaccagctgggcgacctgctgctgcacctggaaaagaagcacggcgaggactggggaaaggtgtacgacgaggcctgggagcggattgacaagaaagtggaaggcctgagcaagcacatcaagctggaagaggaacggagaagcgaggacgcccagagcaaggccgccctgaccgactggctgcgggctaaggccagcttcgtgatcgagggcctgaaggaggccgacaaggacgagttctgcagatgcgagctgaagctgcagaagtggtacggggacctgcggggaaagcccttcgccatcgaagccgagaacagcatcctggacatcagcggcttcagcaagcagtacaactgtgccttcatctggcagaaggacggcgtgaagaagctgaacctgtacctgatcatcaactacttcaagggcggcaagctgcggttcaagaagatcaaacctgaagccttcgaagccaacagattctacaccgtgatcaacaaaaagagcggcgagatcgtgcccatggaggtgaacttcaacttcgacgaccccaacctgatcatcctgcctctggcctttggcaagagacagggcagagaattcatctggaacgacctgctgtccctggaaaccggcagcctgaagctggccaacggaagagtgatcgagaagacactgtacaacagaagaacccggcaggatgagcctgccctgttcgtggccctgaccttcgagcggcgggaggtcctggactcctccaatatcaaaccaatgaacctgatcggcgtggcaagaggcgaaaacatccccgccgtgatcgccctgaccgaccccgagggctgcccactgagccggtttaaggatagcctgggaaacccaacccacatcctgagaatcggcgagagctataaggagaagcagcggaccatccaggccaagaaggaggtggagcagcggagagccggcggctacagccggaagtacgccagcaaagccaagaatctggcagacgatatggtgagaaacaccgctagagatctgctgtactacgccgtgacccaggatgccatgctgatcttcgccaacctgagccggggcttcggccggcagggcaagcggaccttcatggccgagagacagtacacacggatggaggactggctgaccgccaagctggcctacgagggcctgagcaagacctacctgtccaagacactggcccagtacacctccaagacatgcagcaactgtgggtttaccatcaccagcgccgactacgacagggtgctggagaagctgaagaagacagcaacaggctggatgaccacaattaacggcaaggagctgaaggtggagggccagattacctactacaacagatacaagagacagaacgtagtcaaggacctgtccgtcgagctggatagactgagcgaagaatctgtgaacaacgacatctcctcctggacaaagggcagaagcggagaagctctgagcctcctgaagaaaagattctcccatagacccgtgcaggagaagttcgtgtgcctgaactgcggcttcgagacacacgcagccgagcaagccgccctgaacatcgccagatcctggctgttcctgcggagccaggagtacaagaaataccagacaaacaagacaaccggcaacaccgataagagagccttcgtcgagacctggcagtccttttaccggaagaagcttaaggaggtgtggaaacctgccgtgcggtctggcggatctggcggaggctccaccagccccaagaaaaagagaaaagtctaagctgccttctgcggggcttgccttctggccatgcccttcttctctcccttgcacctgtacctcttggtctttgaataaagcctgagtaggaaggctagcaaaaaaaaaaaaaaaaaaaaaaaaaaaaaaaaaaaaaaaaaaaaaaaaaaaaaaaaaaaaaaaaaaaaaaaaaaaaaaaagcccagccggctccccaacctctaccgaggagggcacctctgagtccgccacccccgagagcggccctggcacctccaccgagcccagcgagggcagcgcacccggcagccctgccggcagccccacctccacagaggagggaaccagcaccgagcccagcgaaggcagcgccccaggcaccagcaccgagcctagtgagcaggagattaaacggatcaacaagatcagaagaagacttgtgaaagacagcaacaccaagaaggccggcaagacaggccccatgaaaaccctgctggttagagtgatgacacccgatctgagagagcggctggaaaacctgagaaagaagcctgaaaatatcccccagcccatcagcaatacatctagagccaacctgaataagctgctgaccgattacaccgaaatgaagaaggcgatcctgcatgtgtactgggaagagttccagaaggaccctgtgggcctgatgagccgggtggcccagcctgccagcaagaagatcgatcagaacaagctgaaacctgagatggacgagaagggcaacctgaccaccgccggctttgcctgctctcagtgtggccagcccctgttcgtgtacaagctggagcaggtgtctgagaagggcaaggcttacaccaactacttcggacggtgcaatgtggccgagcacgaaaagctgatcctgctggcccagctgaagcccgagaaggatagcgacgaagccgtgacatatagcctgggaaagtttgggcagagggccctggatttctacagcattcatgtgaccaaggagtccacccaccccgtgaagcccctggcccagatcgccggaaacagatacgcctccggacctgtgggaaaggccctgagcgacgcatgtatgggcacaatcgcctccttcctgtctaagtaccaggacatcatcatcgaacaccagaaggtggtgaagggcaaccagaagagactggagagcctgcgggagctggccggcaaggaaaacctggaataccctagcgtgaccctgccacctcagcctcacaccaaggagggcgttgatgcctacaacgaagtgatcgcccgggtgcgaatgtgggtgaacctgaacctgtggcagaagctgaagctaagcagagatgatgccaagcctctgctgagactgaagggattcccttcctttcctctggtcgagagacaggccaacgaagtggactggtgggacatggtgtgtaacgtgaagaagctgatcaacgagaaaaaggaggatggcaaggtgttttggcagaatctggctggctacaagagacaggaagccctgagaccatacctgagcagcgaggaagatcggaagaagggaaagaaattcgctcggtaccagctgggcgacctgctgctgcacctggaaaagaagcacggcgaggactggggaaaggtgtacgacgaggcctgggagcggattgacaagaaagtggaaggcctgagcaagcacatcaagctggaagaggaacggagaagcgaggacgcccagagcaaggccgccctgaccgactggctgcgggctaaggccagcttcgtgatcgagggcctgaaggaggccgacaaggacgagttctgcagatgcgagctgaagctgcagaagtggtacggggacctgcggggaaagcccttcgccatcgaagccgagaacagcatcctggacatcagcggcttcagcaagcagtacaactgtgccttcatctggcagaaggacggcgtgaagaagctgaacctgtacctgatcatcaactacttcaagggcggcaagctgcggttcaagaagatcaaacctgaagccttcgaagccaacagattctacaccgtgatcaacaaaaagagcggcgagatcgtgcccatggaggtgaacttcaacttcgacgaccccaacctgatcatcctgcctctggcctttggcaagagacagggcagagaattcatctggaacgacctgctgtccctggaaaccggcagcctgaagctggccaacggaagagtgatcgagaagacactgtacaacagaagaacccggcaggatgagcctgccctgttcgtggccctgaccttcgagcggcgggaggtcctggactcctccaatatcaaaccaatgaacctgatcggcgtggcaagaggcgaaaacatccccgccgtgatcgccctgaccgaccccgagggctgcccactgagccggtttaaggatagcctgggaaacccaacccacatcctgagaatcggcgagagctataaggagaagcagcggaccatccaggccaagaaggaggtggagcagcggagagccggcggctacagccggaagtacgccagcaaagccaagaatctggcagacgatatggtgagaaacaccgctagagatctgctgtactacgccgtgacccaggatgccatgctgatcttcgccaacctgagccggggcttcggccggcagggcaagcggaccttcatggccgagagacagtacacacggatggaggactggctgaccgccaagctggcctacgagggcctgagcaagacctacctgtccaagacactggcccagtacacctccaagacatgcagcaactgtgggtttaccatcaccagcgccgactacgacagggtgctggagaagctgaagaagacagcaacaggctggatgaccacaattaacggcaaggagctgaaggtggagggccagattacctactacaacagatacaagagacagaacgtagtcaaggacctgtccgtcgagctggatagactgagcgaagaatctgtgaacaacgacatctcctcctggacaaagggcagaagcggagaagctctgagcctcctgaagaaaagattctcccatagacccgtgcaggagaagttcgtgtgcctgaactgcggcttcgagacacacgcagccgagcaagccgccctgaacatcgccagatcctggctgttcctgcggagccaggagtacaagaaataccagacaaacaagacaaccggcaacaccgataagagagccttcgtcgagacctggcagtccttttaccggaagaagcttaaggaggtgtggaaacctgccgtgcggtctggcggatctggcggaggctccaccagccccaagaaaaagagaaaagtctaagctgccttctgcggggcttgccttctggccatgcccttcttctctcccttgcacctgtacctcttggtctttgaataaagcctgagtaggaaggctagcaaaaaaaaaaaaaaaaaaaaaaaaaaaaaaaaaaaaaaaaaaaaaaaaaaaaaaaaaaaaaaaaaaaaaaaaaaaaaaaa

SEQ ID NO: 9642 - RNA, 8787 nt, synthetic construct
  source 1..8787: mol_type = other RNA
aggaaataagagagaaaagaagagtaagaagaaatataagagccaccatggcccctaagaagaagcgtaaagtgagccggatgaaccacgaccaggagttcgacccccctaaggtgtaccctcccgtccccgccgagaagagaaagcccatccgggtcctgagcctgttcgatggcatcgccaccggtctgctggtgctgaaggacctgggcatccaggtggataggtacattgcctccgaggtgtgcgaggactccatcaccgtgggaatggtgcgtcatcagggcaagatcatgtacgtgggcgacgtgcggagcgtgacacagaagcatatccaggagtggggccctttcgacctggtgatcggcggcagcccttgcaatgacctgagcatcgtgaacccagcccggaagggcctgtacgagggaaccggcagactgttcttcgagttttacagactgctgcacgacgcccggcctaaggaaggcgacgaccggcccttcttttggctgttcgagaatgtggtggccatgggagtcagcgacaagcgggatattagccggttcctggagagcaaccccgtgatgatcgatgccaaggaagtgagcgccgcccaccgggccagatacttctggggcaatctgcctggcatgaacagacccctggccagcaccgtgaacgacaagctggagctgcaggagtgcctggagcacggccggatcgccaagttcagcaaggtgagaaccatcaccacccgaagcaacagcatcaaacaaggcaaggaccagcactttcctgtgttcatgaacgagaaggaggacatcctgtggtgtaccgagatggagagagtgttcgggttcccagtccactacacagatgtcagcaacatgtctagactggccagacagagactgctgggaagaagctggtccgtccctgtgatcagacacctgttcgcccctctgaaggagtacttcgcctgcgtgagcagcggcaacagcaacgccaacagccggggccccagcttctctagcggcctggtgccactgtccctgagagggagccacatgggccccatggagatctacaaaaccgtgagcgcctggaagcggcagcctgtgcgcgtgctgagcctgtttcggaatatcgataaagtcctgaaaagcctgggattcctggagagcggctctggctccggcggtggcaccctgaagtacgtggaggatgtgacaaacgtggtcagacgggatgtggagaagtggggccccttcgatctggtgtacggcagcacccaacccctgggcagctcttgtgaccggtgccctggctggtacatgtttcagttccaccggatcctgcagtacgccctgccgagacaggagtcccagcggccattcttttggattttcatggacaacttgctgctgaccgaggatgaccaggaaactaccactcggttcctgcagaccgaagccgtgaccctgcaggacgtgagaggccgggactaccagaacgccatgcgggtgtggtccaacatccctggactgaaaagcaagcacgcacctctgacccctaaagaagaggagtacctgcaggcccaggtgcggagcagaagcaagctggacgcccctaaggtggatctgctggtgaagaattgcctcctgcccctgagagagtacttcaagtatttcagccagaatagtctgcccctgggaggcagcggcggcggcgacaccgtggtgttcgaggacgtggtggtgggcttcaccctggaggagtgggccctgctgaaccccgcccagaggaacctgtacagggaggtgatgctggagaccttcaagcacctggccagcgtggacaacgaggcccagcccaagaccaacggcagcatcagccagcaggacaccagcggcgagaagctgagcctgaagcagaagatcgagaagttcaccaggaagcacacctgggccagcggcggcccaagcagcggcgcccctcctcccagcggcggcaggcggcccaagcagcggcgcccctcctcccagcggcggcagcccagccggctccccaacctctaccgaggagggcacctctgagtccgccacccccgagagcggccctggcacctccaccgagcccagcgagggcagcgcacccggcagccctgccggcagccccacctccacagaggagggaaccagcaccgagcccagcgaaggcagcgccccaggcaccagcaccgagcctagtgagcaggagattaaacggatcaacaagatcagaagaagacttgtgaaagacagcaacaccaagaaggccggcaagacaggccccatgaaaaccctgctggttagagtgatgacacccgatctgagagagcggctggaaaacctgagaaagaagcctgaaaatatcccccagcccatcagcaatacatctagagccaacctgaataagctgctgaccgattacaccgaaatgaagaaggcgatcctgcatgtgtactgggaagagttccagaaggaccctgtgggcctgatgagccgggtggcccagcctgccagcaagaagatcgatcagaacaagctgaaacctgagatggacgagaagggcaacctgaccaccgccggctttgcctgctctcagtgtggccagcccctgttcgtgtacaagctggagcaggtgtctgagaagggcaaggcttacaccaactacttcggacggtgcaatgtggccgagcacgaaaagctgatcctgctggcccagctgaagcccgagaaggatagcgacgaagccgtgacatatagcctgggaaagtttgggcagagggccctggatttctacagcattcatgtgaccaaggagtccacccaccccgtgaagcccctggcccagatcgccggaaacagatacgcctccggacctgtgggaaaggccctgagcgacgcatgtatgggcacaatcgcctccttcctgtctaagtaccaggacatcatcatcgaacaccagaaggtggtgaagggcaaccagaagagactggagagcctgcgggagctggccggcaaggaaaacctggaataccctagcgtgaccctgccacctcagcctcacaccaaggagggcgttgatgcctacaacgaagtgatcgcccgggtgcgaatgtgggtgaacctgaacctgtggcagaagctgaagctaagcagagatgatgccaagcctctgctgagactgaagggattcccttcctttcctctggtcgagagacaggccaacgaagtggactggtgggacatggtgtgtaacgtgaagaagctgatcaacgagaaaaaggaggatggcaaggtgttttggcagaatctggctggctacaagagacaggaagccctgagaccatacctgagcagcgaggaagatcggaagaagggaaagaaattcgctcggtaccagctgggcgacctgctgctgcacctggaaaagaagcacggcgaggactggggaaaggtgtacgacgaggcctgggagcggattgacaagaaagtggaaggcctgagcaagcacatcaagctggaagaggaacggagaagcgaggacgcccagagcaaggccgccctgaccgactggctgcgggctaaggccagcttcgtgatcgagggcctgaaggaggccgacaaggacgagttctgcagatgcgagctgaagctgcagaagtggtacggggacctgcggggaaagcccttcgccatcgaagccgagaacagcatcctggacatcagcggcttcagcaagcagtacaactgtgccttcatctggcagaaggacggcgtgaagaagctgaacctgtacctgatcatcaactacttcaagggcggcaagctgcggttcaagaagatcaaacctgaagccttcgaagccaacagattctacaccgtgatcaacaaaaagagcggcgagatcgtgcccatggaggtgaacttcaacttcgacgaccccaacctgatcatcctgcctctggcctttggcaagagacagggcagagaattcatctggaacgacctgctgtccctggaaaccggcagcctgaagctggccaacggaagagtgatcgagaagacactgtacaacagaagaacccggcaggatgagcctgccctgttcgtggccctgaccttcgagcggcgggaggtcctggactcctccaatatcaaaccaatgaacctgatcggcgtggcaagaggcgaaaacatccccgccgtgatcgccctgaccgaccccgagggctgcccactgagccggtttaaggatagcctgggaaacccaacccacatcctgagaatcggcgagagctataaggagaagcagcggaccatccaggccaagaaggaggtggagcagcggagagccggcggctacagccggaagtacgccagcaaagccaagaatctggcagacgatatggtgagaaacaccgctagagatctgctgtactacgccgtgacccaggatgccatgctgatcttcgccaacctgagccggggcttcggccggcagggcaagcggaccttcatggccgagagacagtacacacggatggaggactggctgaccgccaagctggcctacgagggcctgagcaagacctacctgtccaagacactggcccagtacacctccaagacatgcagcaactgtgggtttaccatcaccagcgccgactacgacagggtgctggagaagctgaagaagacagcaacaggctggatgaccacaattaacggcaaggagctgaaggtggagggccagattacctactacaacagatacaagagacagaacgtagtcaaggacctgtccgtcgagctggatagactgagcgaagaatctgtgaacaacgacatctcctcctggacaaagggcagaagcggagaagctctgagcctcctgaagaaaagattctcccatagacccgtgcaggagaagttcgtgtgcctgaactgcggcttcgagacacacgcagccgagcaagccgccctgaacatcgccagatcctggctgttcctgcggagccaggagtacaagaaataccagacaaacaagacaaccggcaacaccgataagagagccttcgtcgagacctggcagtccttttaccggaagaagcttaaggaggtgtggaaacctgccgtgcggtctggcggatctggcggaggctccaccagccccaagaaaaagagaaaagtctaagctgccttctgcggggcttgccttctggccatgcccttcttctctcccttgcacctgtacctcttggtctttgaataaagcctgagtaggaaggctagcaaaaaaaaaaaaaaaaaaaaaaaaaaaaaaaaaaaaaaaaaaaaaaaaaaaaaaaaaaaaaaaaaaaaaaaaaaaaaaaagcccagccggctccccaacctctaccgaggagggcacctctgagtccgccacccccgagagcggccctggcacctccaccgagcccagcgagggcagcgcacccggcagccctgccggcagccccacctccacagaggagggaaccagcaccgagcccagcgaaggcagcgccccaggcaccagcaccgagcctagtgagcaggagattaaacggatcaacaagatcagaagaagacttgtgaaagacagcaacaccaagaaggccggcaagacaggccccatgaaaaccctgctggttagagtgatgacacccgatctgagagagcggctggaaaacctgagaaagaagcctgaaaatatcccccagcccatcagcaatacatctagagccaacctgaataagctgctgaccgattacaccgaaatgaagaaggcgatcctgcatgtgtactgggaagagttccagaaggaccctgtgggcctgatgagccgggtggcccagcctgccagcaagaagatcgatcagaacaagctgaaacctgagatggacgagaagggcaacctgaccaccgccggctttgcctgctctcagtgtggccagcccctgttcgtgtacaagctggagcaggtgtctgagaagggcaaggcttacaccaactacttcggacggtgcaatgtggccgagcacgaaaagctgatcctgctggcccagctgaagcccgagaaggatagcgacgaagccgtgacatatagcctgggaaagtttgggcagagggccctggatttctacagcattcatgtgaccaaggagtccacccaccccgtgaagcccctggcccagatcgccggaaacagatacgcctccggacctgtgggaaaggccctgagcgacgcatgtatgggcacaatcgcctccttcctgtctaagtaccaggacatcatcatcgaacaccagaaggtggtgaagggcaaccagaagagactggagagcctgcgggagctggccggcaaggaaaacctggaataccctagcgtgaccctgccacctcagcctcacaccaaggagggcgttgatgcctacaacgaagtgatcgcccgggtgcgaatgtgggtgaacctgaacctgtggcagaagctgaagctaagcagagatgatgccaagcctctgctgagactgaagggattcccttcctttcctctggtcgagagacaggccaacgaagtggactggtgggacatggtgtgtaacgtgaagaagctgatcaacgagaaaaaggaggatggcaaggtgttttggcagaatctggctggctacaagagacaggaagccctgagaccatacctgagcagcgaggaagatcggaagaagggaaagaaattcgctcggtaccagctgggcgacctgctgctgcacctggaaaagaagcacggcgaggactggggaaaggtgtacgacgaggcctgggagcggattgacaagaaagtggaaggcctgagcaagcacatcaagctggaagaggaacggagaagcgaggacgcccagagcaaggccgccctgaccgactggctgcgggctaaggccagcttcgtgatcgagggcctgaaggaggccgacaaggacgagttctgcagatgcgagctgaagctgcagaagtggtacggggacctgcggggaaagcccttcgccatcgaagccgagaacagcatcctggacatcagcggcttcagcaagcagtacaactgtgccttcatctggcagaaggacggcgtgaagaagctgaacctgtacctgatcatcaactacttcaagggcggcaagctgcggttcaagaagatcaaacctgaagccttcgaagccaacagattctacaccgtgatcaacaaaaagagcggcgagatcgtgcccatggaggtgaacttcaacttcgacgaccccaacctgatcatcctgcctctggcctttggcaagagacagggcagagaattcatctggaacgacctgctgtccctggaaaccggcagcctgaagctggccaacggaagagtgatcgagaagacactgtacaacagaagaacccggcaggatgagcctgccctgttcgtggccctgaccttcgagcggcgggaggtcctggactcctccaatatcaaaccaatgaacctgatcggcgtggcaagaggcgaaaacatccccgccgtgatcgccctgaccgaccccgagggctgcccactgagccggtttaaggatagcctgggaaacccaacccacatcctgagaatcggcgagagctataaggagaagcagcggaccatccaggccaagaaggaggtggagcagcggagagccggcggctacagccggaagtacgccagcaaagccaagaatctggcagacgatatggtgagaaacaccgctagagatctgctgtactacgccgtgacccaggatgccatgctgatcttcgccaacctgagccggggcttcggccggcagggcaagcggaccttcatggccgagagacagtacacacggatggaggactggctgaccgccaagctggcctacgagggcctgagcaagacctacctgtccaagacactggcccagtacacctccaagacatgcagcaactgtgggtttaccatcaccagcgccgactacgacagggtgctggagaagctgaagaagacagcaacaggctggatgaccacaattaacggcaaggagctgaaggtggagggccagattacctactacaacagatacaagagacagaacgtagtcaaggacctgtccgtcgagctggatagactgagcgaagaatctgtgaacaacgacatctcctcctggacaaagggcagaagcggagaagctctgagcctcctgaagaaaagattctcccatagacccgtgcaggagaagttcgtgtgcctgaactgcggcttcgagacacacgcagccgagcaagccgccctgaacatcgccagatcctggctgttcctgcggagccaggagtacaagaaataccagacaaacaagacaaccggcaacaccgataagagagccttcgtcgagacctggcagtccttttaccggaagaagcttaaggaggtgtggaaacctgccgtgcggtctggcggatctggcggaggctccaccagccccaagaaaaagagaaaagtctaagctgccttctgcggggcttgccttctggccatgcccttcttctctcccttgcacctgtacctcttggtctttgaataaagcctgagtaggaaggctagcaaaaaaaaaaaaaaaaaaaaaaaaaaaaaaaaaaaaaaaaaaaaaaaaaaaaaaaaaaaaaaaaaaaaaaaaaaaaaaaa

SEQ ID NO: 9643 - RNA, 8787 nt, synthetic construct
  source 1..8787: mol_type = other RNA
aggaaataagagagaaaagaagagtaagaagaaatataagagccaccatggcccctaagaagaagcgtaaagtgagccggatgaaccacgaccaggagttcgacccccctaaggtgtaccctcccgtccccgccgagaagagaaagcccatccgggtcctgagcctgttcgatggcatcgccaccggtctgctggtgctgaaggacctgggcatccaggtggataggtacattgcctccgaggtgtgcgaggactccatcaccgtgggaatggtgcgtcatcagggcaagatcatgtacgtgggcgacgtgcggagcgtgacacagaagcatatccaggagtggggccctttcgacctggtgatcggcggcagcccttgcaatgacctgagcatcgtgaacccagcccggaagggcctgtacgagggaaccggcagactgttcttcgagttttacagactgctgcacgacgcccggcctaaggaaggcgacgaccggcccttcttttggctgttcgagaatgtggtggccatgggagtcagcgacaagcgggatattagccggttcctggagagcaaccccgtgatgatcgatgccaaggaagtgagcgccgcccaccgggccagatacttctggggcaatctgcctggcatgaacagacccctggccagcaccgtgaacgacaagctggagctgcaggagtgcctggagcacggccggatcgccaagttcagcaaggtgagaaccatcaccacccgaagcaacagcatcaaacaaggcaaggaccagcactttcctgtgttcatgaacgagaaggaggacatcctgtggtgtaccgagatggagagagtgttcgggttcccagtccactacacagatgtcagcaacatgtctagactggccagacagagactgctgggaagaagctggtccgtccctgtgatcagacacctgttcgcccctctgaaggagtacttcgcctgcgtgagcagcggcaacagcaacgccaacagccggggccccagcttctctagcggcctggtgccactgtccctgagagggagccacatgggccccatggagatctacaaaaccgtgagcgcctggaagcggcagcctgtgcgcgtgctgagcctgtttcggaatatcgataaagtcctgaaaagcctgggattcctggagagcggctctggctccggcggtggcaccctgaagtacgtggaggatgtgacaaacgtggtcagacgggatgtggagaagtggggccccttcgatctggtgtacggcagcacccaacccctgggcagctcttgtgaccggtgccctggctggtacatgtttcagttccaccggatcctgcagtacgccctgccgagacaggagtcccagcggccattcttttggattttcatggacaacttgctgctgaccgaggatgaccaggaaactaccactcggttcctgcagaccgaagccgtgaccctgcaggacgtgagaggccgggactaccagaacgccatgcgggtgtggtccaacatccctggactgaaaagcaagcacgcacctctgacccctaaagaagaggagtacctgcaggcccaggtgcggagcagaagcaagctggacgcccctaaggtggatctgctggtgaagaattgcctcctgcccctgagagagtacttcaagtatttcagccagaatagtctgcccctgggaggcagcggcggcggcgcccacgccctggtgaccttcagggacgtggccatcgacttcagccagaaggagtgggagtgcctggacaccacccagaggaagctgtacagggacgtgatgctggagaactacaacaacctggtgagcctggccggctacagcggcagcaagcccgacgtgatcaccctgctggagcagggcaaggagccctgcgtggtggccagggacgtgaccggcaggcagtgccccggcctgctgagcggcggcccaagcagcggcgcccctcctcccagcggcggcaggcggcccaagcagcggcgcccctcctcccagcggcggcagcccagccggctccccaacctctaccgaggagggcacctctgagtccgccacccccgagagcggccctggcacctccaccgagcccagcgagggcagcgcacccggcagccctgccggcagccccacctccacagaggagggaaccagcaccgagcccagcgaaggcagcgccccaggcaccagcaccgagcctagtgagcaggagattaaacggatcaacaagatcagaagaagacttgtgaaagacagcaacaccaagaaggccggcaagacaggccccatgaaaaccctgctggttagagtgatgacacccgatctgagagagcggctggaaaacctgagaaagaagcctgaaaatatcccccagcccatcagcaatacatctagagccaacctgaataagctgctgaccgattacaccgaaatgaagaaggcgatcctgcatgtgtactgggaagagttccagaaggaccctgtgggcctgatgagccgggtggcccagcctgccagcaagaagatcgatcagaacaagctgaaacctgagatggacgagaagggcaacctgaccaccgccggctttgcctgctctcagtgtggccagcccctgttcgtgtacaagctggagcaggtgtctgagaagggcaaggcttacaccaactacttcggacggtgcaatgtggccgagcacgaaaagctgatcctgctggcccagctgaagcccgagaaggatagcgacgaagccgtgacatatagcctgggaaagtttgggcagagggccctggatttctacagcattcatgtgaccaaggagtccacccaccccgtgaagcccctggcccagatcgccggaaacagatacgcctccggacctgtgggaaaggccctgagcgacgcatgtatgggcacaatcgcctccttcctgtctaagtaccaggacatcatcatcgaacaccagaaggtggtgaagggcaaccagaagagactggagagcctgcgggagctggccggcaaggaaaacctggaataccctagcgtgaccctgccacctcagcctcacaccaaggagggcgttgatgcctacaacgaagtgatcgcccgggtgcgaatgtgggtgaacctgaacctgtggcagaagctgaagctaagcagagatgatgccaagcctctgctgagactgaagggattcccttcctttcctctggtcgagagacaggccaacgaagtggactggtgggacatggtgtgtaacgtgaagaagctgatcaacgagaaaaaggaggatggcaaggtgttttggcagaatctggctggctacaagagacaggaagccctgagaccatacctgagcagcgaggaagatcggaagaagggaaagaaattcgctcggtaccagctgggcgacctgctgctgcacctggaaaagaagcacggcgaggactggggaaaggtgtacgacgaggcctgggagcggattgacaagaaagtggaaggcctgagcaagcacatcaagctggaagaggaacggagaagcgaggacgcccagagcaaggccgccctgaccgactggctgcgggctaaggccagcttcgtgatcgagggcctgaaggaggccgacaaggacgagttctgcagatgcgagctgaagctgcagaagtggtacggggacctgcggggaaagcccttcgccatcgaagccgagaacagcatcctggacatcagcggcttcagcaagcagtacaactgtgccttcatctggcagaaggacggcgtgaagaagctgaacctgtacctgatcatcaactacttcaagggcggcaagctgcggttcaagaagatcaaacctgaagccttcgaagccaacagattctacaccgtgatcaacaaaaagagcggcgagatcgtgcccatggaggtgaacttcaacttcgacgaccccaacctgatcatcctgcctctggcctttggcaagagacagggcagagaattcatctggaacgacctgctgtccctggaaaccggcagcctgaagctggccaacggaagagtgatcgagaagacactgtacaacagaagaacccggcaggatgagcctgccctgttcgtggccctgaccttcgagcggcgggaggtcctggactcctccaatatcaaaccaatgaacctgatcggcgtggcaagaggcgaaaacatccccgccgtgatcgccctgaccgaccccgagggctgcccactgagccggtttaaggatagcctgggaaacccaacccacatcctgagaatcggcgagagctataaggagaagcagcggaccatccaggccaagaaggaggtggagcagcggagagccggcggctacagccggaagtacgccagcaaagccaagaatctggcagacgatatggtgagaaacaccgctagagatctgctgtactacgccgtgacccaggatgccatgctgatcttcgccaacctgagccggggcttcggccggcagggcaagcggaccttcatggccgagagacagtacacacggatggaggactggctgaccgccaagctggcctacgagggcctgagcaagacctacctgtccaagacactggcccagtacacctccaagacatgcagcaactgtgggtttaccatcaccagcgccgactacgacagggtgctggagaagctgaagaagacagcaacaggctggatgaccacaattaacggcaaggagctgaaggtggagggccagattacctactacaacagatacaagagacagaacgtagtcaaggacctgtccgtcgagctggatagactgagcgaagaatctgtgaacaacgacatctcctcctggacaaagggcagaagcggagaagctctgagcctcctgaagaaaagattctcccatagacccgtgcaggagaagttcgtgtgcctgaactgcggcttcgagacacacgcagccgagcaagccgccctgaacatcgccagatcctggctgttcctgcggagccaggagtacaagaaataccagacaaacaagacaaccggcaacaccgataagagagccttcgtcgagacctggcagtccttttaccggaagaagcttaaggaggtgtggaaacctgccgtgcggtctggcggatctggcggaggctccaccagccccaagaaaaagagaaaagtctaagctgccttctgcggggcttgccttctggccatgcccttcttctctcccttgcacctgtacctcttggtctttgaataaagcctgagtaggaaggctagcaaaaaaaaaaaaaaaaaaaaaaaaaaaaaaaaaaaaaaaaaaaaaaaaaaaaaaaaaaaaaaaaaaaaaaaaaaaaaaaagcccagccggctccccaacctctaccgaggagggcacctctgagtccgccacccccgagagcggccctggcacctccaccgagcccagcgagggcagcgcacccggcagccctgccggcagccccacctccacagaggagggaaccagcaccgagcccagcgaaggcagcgccccaggcaccagcaccgagcctagtgagcaggagattaaacggatcaacaagatcagaagaagacttgtgaaagacagcaacaccaagaaggccggcaagacaggccccatgaaaaccctgctggttagagtgatgacacccgatctgagagagcggctggaaaacctgagaaagaagcctgaaaatatcccccagcccatcagcaatacatctagagccaacctgaataagctgctgaccgattacaccgaaatgaagaaggcgatcctgcatgtgtactgggaagagttccagaaggaccctgtgggcctgatgagccgggtggcccagcctgccagcaagaagatcgatcagaacaagctgaaacctgagatggacgagaagggcaacctgaccaccgccggctttgcctgctctcagtgtggccagcccctgttcgtgtacaagctggagcaggtgtctgagaagggcaaggcttacaccaactacttcggacggtgcaatgtggccgagcacgaaaagctgatcctgctggcccagctgaagcccgagaaggatagcgacgaagccgtgacatatagcctgggaaagtttgggcagagggccctggatttctacagcattcatgtgaccaaggagtccacccaccccgtgaagcccctggcccagatcgccggaaacagatacgcctccggacctgtgggaaaggccctgagcgacgcatgtatgggcacaatcgcctccttcctgtctaagtaccaggacatcatcatcgaacaccagaaggtggtgaagggcaaccagaagagactggagagcctgcgggagctggccggcaaggaaaacctggaataccctagcgtgaccctgccacctcagcctcacaccaaggagggcgttgatgcctacaacgaagtgatcgcccgggtgcgaatgtgggtgaacctgaacctgtggcagaagctgaagctaagcagagatgatgccaagcctctgctgagactgaagggattcccttcctttcctctggtcgagagacaggccaacgaagtggactggtgggacatggtgtgtaacgtgaagaagctgatcaacgagaaaaaggaggatggcaaggtgttttggcagaatctggctggctacaagagacaggaagccctgagaccatacctgagcagcgaggaagatcggaagaagggaaagaaattcgctcggtaccagctgggcgacctgctgctgcacctggaaaagaagcacggcgaggactggggaaaggtgtacgacgaggcctgggagcggattgacaagaaagtggaaggcctgagcaagcacatcaagctggaagaggaacggagaagcgaggacgcccagagcaaggccgccctgaccgactggctgcgggctaaggccagcttcgtgatcgagggcctgaaggaggccgacaaggacgagttctgcagatgcgagctgaagctgcagaagtggtacggggacctgcggggaaagcccttcgccatcgaagccgagaacagcatcctggacatcagcggcttcagcaagcagtacaactgtgccttcatctggcagaaggacggcgtgaagaagctgaacctgtacctgatcatcaactacttcaagggcggcaagctgcggttcaagaagatcaaacctgaagccttcgaagccaacagattctacaccgtgatcaacaaaaagagcggcgagatcgtgcccatggaggtgaacttcaacttcgacgaccccaacctgatcatcctgcctctggcctttggcaagagacagggcagagaattcatctggaacgacctgctgtccctggaaaccggcagcctgaagctggccaacggaagagtgatcgagaagacactgtacaacagaagaacccggcaggatgagcctgccctgttcgtggccctgaccttcgagcggcgggaggtcctggactcctccaatatcaaaccaatgaacctgatcggcgtggcaagaggcgaaaacatccccgccgtgatcgccctgaccgaccccgagggctgcccactgagccggtttaaggatagcctgggaaacccaacccacatcctgagaatcggcgagagctataaggagaagcagcggaccatccaggccaagaaggaggtggagcagcggagagccggcggctacagccggaagtacgccagcaaagccaagaatctggcagacgatatggtgagaaacaccgctagagatctgctgtactacgccgtgacccaggatgccatgctgatcttcgccaacctgagccggggcttcggccggcagggcaagcggaccttcatggccgagagacagtacacacggatggaggactggctgaccgccaagctggcctacgagggcctgagcaagacctacctgtccaagacactggcccagtacacctccaagacatgcagcaactgtgggtttaccatcaccagcgccgactacgacagggtgctggagaagctgaagaagacagcaacaggctggatgaccacaattaacggcaaggagctgaaggtggagggccagattacctactacaacagatacaagagacagaacgtagtcaaggacctgtccgtcgagctggatagactgagcgaagaatctgtgaacaacgacatctcctcctggacaaagggcagaagcggagaagctctgagcctcctgaagaaaagattctcccatagacccgtgcaggagaagttcgtgtgcctgaactgcggcttcgagacacacgcagccgagcaagccgccctgaacatcgccagatcctggctgttcctgcggagccaggagtacaagaaataccagacaaacaagacaaccggcaacaccgataagagagccttcgtcgagacctggcagtccttttaccggaagaagcttaaggaggtgtggaaacctgccgtgcggtctggcggatctggcggaggctccaccagccccaagaaaaagagaaaagtctaagctgccttctgcggggcttgccttctggccatgcccttcttctctcccttgcacctgtacctcttggtctttgaataaagcctgagtaggaaggctagcaaaaaaaaaaaaaaaaaaaaaaaaaaaaaaaaaaaaaaaaaaaaaaaaaaaaaaaaaaaaaaaaaaaaaaaaaaaaaaaa

SEQ ID NO: 9644 - RNA, 8787 nt, synthetic construct
  source 1..8787: mol_type = other RNA
aggaaataagagagaaaagaagagtaagaagaaatataagagccaccatggcccctaagaagaagcgtaaagtgagccggatgaaccacgaccaggagttcgacccccctaaggtgtaccctcccgtccccgccgagaagagaaagcccatccgggtcctgagcctgttcgatggcatcgccaccggtctgctggtgctgaaggacctgggcatccaggtggataggtacattgcctccgaggtgtgcgaggactccatcaccgtgggaatggtgcgtcatcagggcaagatcatgtacgtgggcgacgtgcggagcgtgacacagaagcatatccaggagtggggccctttcgacctggtgatcggcggcagcccttgcaatgacctgagcatcgtgaacccagcccggaagggcctgtacgagggaaccggcagactgttcttcgagttttacagactgctgcacgacgcccggcctaaggaaggcgacgaccggcccttcttttggctgttcgagaatgtggtggccatgggagtcagcgacaagcgggatattagccggttcctggagagcaaccccgtgatgatcgatgccaaggaagtgagcgccgcccaccgggccagatacttctggggcaatctgcctggcatgaacagacccctggccagcaccgtgaacgacaagctggagctgcaggagtgcctggagcacggccggatcgccaagttcagcaaggtgagaaccatcaccacccgaagcaacagcatcaaacaaggcaaggaccagcactttcctgtgttcatgaacgagaaggaggacatcctgtggtgtaccgagatggagagagtgttcgggttcccagtccactacacagatgtcagcaacatgtctagactggccagacagagactgctgggaagaagctggtccgtccctgtgatcagacacctgttcgcccctctgaaggagtacttcgcctgcgtgagcagcggcaacagcaacgccaacagccggggccccagcttctctagcggcctggtgccactgtccctgagagggagccacatgggccccatggagatctacaaaaccgtgagcgcctggaagcggcagcctgtgcgcgtgctgagcctgtttcggaatatcgataaagtcctgaaaagcctgggattcctggagagcggctctggctccggcggtggcaccctgaagtacgtggaggatgtgacaaacgtggtcagacgggatgtggagaagtggggccccttcgatctggtgtacggcagcacccaacccctgggcagctcttgtgaccggtgccctggctggtacatgtttcagttccaccggatcctgcagtacgccctgccgagacaggagtcccagcggccattcttttggattttcatggacaacttgctgctgaccgaggatgaccaggaaactaccactcggttcctgcagaccgaagccgtgaccctgcaggacgtgagaggccgggactaccagaacgccatgcgggtgtggtccaacatccctggactgaaaagcaagcacgcacctctgacccctaaagaagaggagtacctgcaggcccaggtgcggagcagaagcaagctggacgcccctaaggtggatctgctggtgaagaattgcctcctgcccctgagagagtacttcaagtatttcagccagaatagtctgcccctgggaggcagcggcggcggcctgcaggtgagcgtgagcttcgaggacgtggccgtggacttcagcagggaggagtggcagcagctggacagcacccagaggaggctgtaccaggacgtgatgctggagaactacagccacctgctgagcctgggctgcgagatccccaagcccgaggtgatcttcaagctggagcagggcgaggagccctggaccctggaggaggagaccccccaccagagctgcagcgacgagaagttcggcggcggcccaagcagcggcgcccctcctcccagcggcggcaggcggcccaagcagcggcgcccctcctcccagcggcggcagcccagccggctccccaacctctaccgaggagggcacctctgagtccgccacccccgagagcggccctggcacctccaccgagcccagcgagggcagcgcacccggcagccctgccggcagccccacctccacagaggagggaaccagcaccgagcccagcgaaggcagcgccccaggcaccagcaccgagcctagtgagcaggagattaaacggatcaacaagatcagaagaagacttgtgaaagacagcaacaccaagaaggccggcaagacaggccccatgaaaaccctgctggttagagtgatgacacccgatctgagagagcggctggaaaacctgagaaagaagcctgaaaatatcccccagcccatcagcaatacatctagagccaacctgaataagctgctgaccgattacaccgaaatgaagaaggcgatcctgcatgtgtactgggaagagttccagaaggaccctgtgggcctgatgagccgggtggcccagcctgccagcaagaagatcgatcagaacaagctgaaacctgagatggacgagaagggcaacctgaccaccgccggctttgcctgctctcagtgtggccagcccctgttcgtgtacaagctggagcaggtgtctgagaagggcaaggcttacaccaactacttcggacggtgcaatgtggccgagcacgaaaagctgatcctgctggcccagctgaagcccgagaaggatagcgacgaagccgtgacatatagcctgggaaagtttgggcagagggccctggatttctacagcattcatgtgaccaaggagtccacccaccccgtgaagcccctggcccagatcgccggaaacagatacgcctccggacctgtgggaaaggccctgagcgacgcatgtatgggcacaatcgcctccttcctgtctaagtaccaggacatcatcatcgaacaccagaaggtggtgaagggcaaccagaagagactggagagcctgcgggagctggccggcaaggaaaacctggaataccctagcgtgaccctgccacctcagcctcacaccaaggagggcgttgatgcctacaacgaagtgatcgcccgggtgcgaatgtgggtgaacctgaacctgtggcagaagctgaagctaagcagagatgatgccaagcctctgctgagactgaagggattcccttcctttcctctggtcgagagacaggccaacgaagtggactggtgggacatggtgtgtaacgtgaagaagctgatcaacgagaaaaaggaggatggcaaggtgttttggcagaatctggctggctacaagagacaggaagccctgagaccatacctgagcagcgaggaagatcggaagaagggaaagaaattcgctcggtaccagctgggcgacctgctgctgcacctggaaaagaagcacggcgaggactggggaaaggtgtacgacgaggcctgggagcggattgacaagaaagtggaaggcctgagcaagcacatcaagctggaagaggaacggagaagcgaggacgcccagagcaaggccgccctgaccgactggctgcgggctaaggccagcttcgtgatcgagggcctgaaggaggccgacaaggacgagttctgcagatgcgagctgaagctgcagaagtggtacggggacctgcggggaaagcccttcgccatcgaagccgagaacagcatcctggacatcagcggcttcagcaagcagtacaactgtgccttcatctggcagaaggacggcgtgaagaagctgaacctgtacctgatcatcaactacttcaagggcggcaagctgcggttcaagaagatcaaacctgaagccttcgaagccaacagattctacaccgtgatcaacaaaaagagcggcgagatcgtgcccatggaggtgaacttcaacttcgacgaccccaacctgatcatcctgcctctggcctttggcaagagacagggcagagaattcatctggaacgacctgctgtccctggaaaccggcagcctgaagctggccaacggaagagtgatcgagaagacactgtacaacagaagaacccggcaggatgagcctgccctgttcgtggccctgaccttcgagcggcgggaggtcctggactcctccaatatcaaaccaatgaacctgatcggcgtggcaagaggcgaaaacatccccgccgtgatcgccctgaccgaccccgagggctgcccactgagccggtttaaggatagcctgggaaacccaacccacatcctgagaatcggcgagagctataaggagaagcagcggaccatccaggccaagaaggaggtggagcagcggagagccggcggctacagccggaagtacgccagcaaagccaagaatctggcagacgatatggtgagaaacaccgctagagatctgctgtactacgccgtgacccaggatgccatgctgatcttcgccaacctgagccggggcttcggccggcagggcaagcggaccttcatggccgagagacagtacacacggatggaggactggctgaccgccaagctggcctacgagggcctgagcaagacctacctgtccaagacactggcccagtacacctccaagacatgcagcaactgtgggtttaccatcaccagcgccgactacgacagggtgctggagaagctgaagaagacagcaacaggctggatgaccacaattaacggcaaggagctgaaggtggagggccagattacctactacaacagatacaagagacagaacgtagtcaaggacctgtccgtcgagctggatagactgagcgaagaatctgtgaacaacgacatctcctcctggacaaagggcagaagcggagaagctctgagcctcctgaagaaaagattctcccatagacccgtgcaggagaagttcgtgtgcctgaactgcggcttcgagacacacgcagccgagcaagccgccctgaacatcgccagatcctggctgttcctgcggagccaggagtacaagaaataccagacaaacaagacaaccggcaacaccgataagagagccttcgtcgagacctggcagtccttttaccggaagaagcttaaggaggtgtggaaacctgccgtgcggtctggcggatctggcggaggctccaccagccccaagaaaaagagaaaagtctaagctgccttctgcggggcttgccttctggccatgcccttcttctctcccttgcacctgtacctcttggtctttgaataaagcctgagtaggaaggctagcaaaaaaaaaaaaaaaaaaaaaaaaaaaaaaaaaaaaaaaaaaaaaaaaaaaaaaaaaaaaaaaaaaaaaaaaaaaaaaaagcccagccggctccccaacctctaccgaggagggcacctctgagtccgccacccccgagagcggccctggcacctccaccgagcccagcgagggcagcgcacccggcagccctgccggcagccccacctccacagaggagggaaccagcaccgagcccagcgaaggcagcgccccaggcaccagcaccgagcctagtgagcaggagattaaacggatcaacaagatcagaagaagacttgtgaaagacagcaacaccaagaaggccggcaagacaggccccatgaaaaccctgctggttagagtgatgacacccgatctgagagagcggctggaaaacctgagaaagaagcctgaaaatatcccccagcccatcagcaatacatctagagccaacctgaataagctgctgaccgattacaccgaaatgaagaaggcgatcctgcatgtgtactgggaagagttccagaaggaccctgtgggcctgatgagccgggtggcccagcctgccagcaagaagatcgatcagaacaagctgaaacctgagatggacgagaagggcaacctgaccaccgccggctttgcctgctctcagtgtggccagcccctgttcgtgtacaagctggagcaggtgtctgagaagggcaaggcttacaccaactacttcggacggtgcaatgtggccgagcacgaaaagctgatcctgctggcccagctgaagcccgagaaggatagcgacgaagccgtgacatatagcctgggaaagtttgggcagagggccctggatttctacagcattcatgtgaccaaggagtccacccaccccgtgaagcccctggcccagatcgccggaaacagatacgcctccggacctgtgggaaaggccctgagcgacgcatgtatgggcacaatcgcctccttcctgtctaagtaccaggacatcatcatcgaacaccagaaggtggtgaagggcaaccagaagagactggagagcctgcgggagctggccggcaaggaaaacctggaataccctagcgtgaccctgccacctcagcctcacaccaaggagggcgttgatgcctacaacgaagtgatcgcccgggtgcgaatgtgggtgaacctgaacctgtggcagaagctgaagctaagcagagatgatgccaagcctctgctgagactgaagggattcccttcctttcctctggtcgagagacaggccaacgaagtggactggtgggacatggtgtgtaacgtgaagaagctgatcaacgagaaaaaggaggatggcaaggtgttttggcagaatctggctggctacaagagacaggaagccctgagaccatacctgagcagcgaggaagatcggaagaagggaaagaaattcgctcggtaccagctgggcgacctgctgctgcacctggaaaagaagcacggcgaggactggggaaaggtgtacgacgaggcctgggagcggattgacaagaaagtggaaggcctgagcaagcacatcaagctggaagaggaacggagaagcgaggacgcccagagcaaggccgccctgaccgactggctgcgggctaaggccagcttcgtgatcgagggcctgaaggaggccgacaaggacgagttctgcagatgcgagctgaagctgcagaagtggtacggggacctgcggggaaagcccttcgccatcgaagccgagaacagcatcctggacatcagcggcttcagcaagcagtacaactgtgccttcatctggcagaaggacggcgtgaagaagctgaacctgtacctgatcatcaactacttcaagggcggcaagctgcggttcaagaagatcaaacctgaagccttcgaagccaacagattctacaccgtgatcaacaaaaagagcggcgagatcgtgcccatggaggtgaacttcaacttcgacgaccccaacctgatcatcctgcctctggcctttggcaagagacagggcagagaattcatctggaacgacctgctgtccctggaaaccggcagcctgaagctggccaacggaagagtgatcgagaagacactgtacaacagaagaacccggcaggatgagcctgccctgttcgtggccctgaccttcgagcggcgggaggtcctggactcctccaatatcaaaccaatgaacctgatcggcgtggcaagaggcgaaaacatccccgccgtgatcgccctgaccgaccccgagggctgcccactgagccggtttaaggatagcctgggaaacccaacccacatcctgagaatcggcgagagctataaggagaagcagcggaccatccaggccaagaaggaggtggagcagcggagagccggcggctacagccggaagtacgccagcaaagccaagaatctggcagacgatatggtgagaaacaccgctagagatctgctgtactacgccgtgacccaggatgccatgctgatcttcgccaacctgagccggggcttcggccggcagggcaagcggaccttcatggccgagagacagtacacacggatggaggactggctgaccgccaagctggcctacgagggcctgagcaagacctacctgtccaagacactggcccagtacacctccaagacatgcagcaactgtgggtttaccatcaccagcgccgactacgacagggtgctggagaagctgaagaagacagcaacaggctggatgaccacaattaacggcaaggagctgaaggtggagggccagattacctactacaacagatacaagagacagaacgtagtcaaggacctgtccgtcgagctggatagactgagcgaagaatctgtgaacaacgacatctcctcctggacaaagggcagaagcggagaagctctgagcctcctgaagaaaagattctcccatagacccgtgcaggagaagttcgtgtgcctgaactgcggcttcgagacacacgcagccgagcaagccgccctgaacatcgccagatcctggctgttcctgcggagccaggagtacaagaaataccagacaaacaagacaaccggcaacaccgataagagagccttcgtcgagacctggcagtccttttaccggaagaagcttaaggaggtgtggaaacctgccgtgcggtctggcggatctggcggaggctccaccagccccaagaaaaagagaaaagtctaagctgccttctgcggggcttgccttctggccatgcccttcttctctcccttgcacctgtacctcttggtctttgaataaagcctgagtaggaaggctagcaaaaaaaaaaaaaaaaaaaaaaaaaaaaaaaaaaaaaaaaaaaaaaaaaaaaaaaaaaaaaaaaaaaaaaaaaaaaaaaa

SEQ ID NO: 9645 - RNA, 8787 nt, synthetic construct
  source 1..8787: mol_type = other RNA
aggaaataagagagaaaagaagagtaagaagaaatataagagccaccatggcccctaagaagaagcgtaaagtgagccggatgaaccacgaccaggagttcgacccccctaaggtgtaccctcccgtccccgccgagaagagaaagcccatccgggtcctgagcctgttcgatggcatcgccaccggtctgctggtgctgaaggacctgggcatccaggtggataggtacattgcctccgaggtgtgcgaggactccatcaccgtgggaatggtgcgtcatcagggcaagatcatgtacgtgggcgacgtgcggagcgtgacacagaagcatatccaggagtggggccctttcgacctggtgatcggcggcagcccttgcaatgacctgagcatcgtgaacccagcccggaagggcctgtacgagggaaccggcagactgttcttcgagttttacagactgctgcacgacgcccggcctaaggaaggcgacgaccggcccttcttttggctgttcgagaatgtggtggccatgggagtcagcgacaagcgggatattagccggttcctggagagcaaccccgtgatgatcgatgccaaggaagtgagcgccgcccaccgggccagatacttctggggcaatctgcctggcatgaacagacccctggccagcaccgtgaacgacaagctggagctgcaggagtgcctggagcacggccggatcgccaagttcagcaaggtgagaaccatcaccacccgaagcaacagcatcaaacaaggcaaggaccagcactttcctgtgttcatgaacgagaaggaggacatcctgtggtgtaccgagatggagagagtgttcgggttcccagtccactacacagatgtcagcaacatgtctagactggccagacagagactgctgggaagaagctggtccgtccctgtgatcagacacctgttcgcccctctgaaggagtacttcgcctgcgtgagcagcggcaacagcaacgccaacagccggggccccagcttctctagcggcctggtgccactgtccctgagagggagccacatgggccccatggagatctacaaaaccgtgagcgcctggaagcggcagcctgtgcgcgtgctgagcctgtttcggaatatcgataaagtcctgaaaagcctgggattcctggagagcggctctggctccggcggtggcaccctgaagtacgtggaggatgtgacaaacgtggtcagacgggatgtggagaagtggggccccttcgatctggtgtacggcagcacccaacccctgggcagctcttgtgaccggtgccctggctggtacatgtttcagttccaccggatcctgcagtacgccctgccgagacaggagtcccagcggccattcttttggattttcatggacaacttgctgctgaccgaggatgaccaggaaactaccactcggttcctgcagaccgaagccgtgaccctgcaggacgtgagaggccgggactaccagaacgccatgcgggtgtggtccaacatccctggactgaaaagcaagcacgcacctctgacccctaaagaagaggagtacctgcaggcccaggtgcggagcagaagcaagctggacgcccctaaggtggatctgctggtgaagaattgcctcctgcccctgagagagtacttcaagtatttcagccagaatagtctgcccctgggaggcagcggcggcggcagcgagatgagggtgaccttcgaggaggtggccgtgtacttcaccaagggccagggcgccctgctggacgccaggcagaaggccctgtacagggacgtgatgctggagaactacgaggccgtgaccagcctgggcttccccgtgcccaagcccgagctgatcgccaggctggagaggggcgaggagccctgggtgcccgacctgcaggccggcgaggagagggagatcctgaggggcaccaggggcggcccaagcagcggcgcccctcctcccagcggcggcaggcggcccaagcagcggcgcccctcctcccagcggcggcagcccagccggctccccaacctctaccgaggagggcacctctgagtccgccacccccgagagcggccctggcacctccaccgagcccagcgagggcagcgcacccggcagccctgccggcagccccacctccacagaggagggaaccagcaccgagcccagcgaaggcagcgccccaggcaccagcaccgagcctagtgagcaggagattaaacggatcaacaagatcagaagaagacttgtgaaagacagcaacaccaagaaggccggcaagacaggccccatgaaaaccctgctggttagagtgatgacacccgatctgagagagcggctggaaaacctgagaaagaagcctgaaaatatcccccagcccatcagcaatacatctagagccaacctgaataagctgctgaccgattacaccgaaatgaagaaggcgatcctgcatgtgtactgggaagagttccagaaggaccctgtgggcctgatgagccgggtggcccagcctgccagcaagaagatcgatcagaacaagctgaaacctgagatggacgagaagggcaacctgaccaccgccggctttgcctgctctcagtgtggccagcccctgttcgtgtacaagctggagcaggtgtctgagaagggcaaggcttacaccaactacttcggacggtgcaatgtggccgagcacgaaaagctgatcctgctggcccagctgaagcccgagaaggatagcgacgaagccgtgacatatagcctgggaaagtttgggcagagggccctggatttctacagcattcatgtgaccaaggagtccacccaccccgtgaagcccctggcccagatcgccggaaacagatacgcctccggacctgtgggaaaggccctgagcgacgcatgtatgggcacaatcgcctccttcctgtctaagtaccaggacatcatcatcgaacaccagaaggtggtgaagggcaaccagaagagactggagagcctgcgggagctggccggcaaggaaaacctggaataccctagcgtgaccctgccacctcagcctcacaccaaggagggcgttgatgcctacaacgaagtgatcgcccgggtgcgaatgtgggtgaacctgaacctgtggcagaagctgaagctaagcagagatgatgccaagcctctgctgagactgaagggattcccttcctttcctctggtcgagagacaggccaacgaagtggactggtgggacatggtgtgtaacgtgaagaagctgatcaacgagaaaaaggaggatggcaaggtgttttggcagaatctggctggctacaagagacaggaagccctgagaccatacctgagcagcgaggaagatcggaagaagggaaagaaattcgctcggtaccagctgggcgacctgctgctgcacctggaaaagaagcacggcgaggactggggaaaggtgtacgacgaggcctgggagcggattgacaagaaagtggaaggcctgagcaagcacatcaagctggaagaggaacggagaagcgaggacgcccagagcaaggccgccctgaccgactggctgcgggctaaggccagcttcgtgatcgagggcctgaaggaggccgacaaggacgagttctgcagatgcgagctgaagctgcagaagtggtacggggacctgcggggaaagcccttcgccatcgaagccgagaacagcatcctggacatcagcggcttcagcaagcagtacaactgtgccttcatctggcagaaggacggcgtgaagaagctgaacctgtacctgatcatcaactacttcaagggcggcaagctgcggttcaagaagatcaaacctgaagccttcgaagccaacagattctacaccgtgatcaacaaaaagagcggcgagatcgtgcccatggaggtgaacttcaacttcgacgaccccaacctgatcatcctgcctctggcctttggcaagagacagggcagagaattcatctggaacgacctgctgtccctggaaaccggcagcctgaagctggccaacggaagagtgatcgagaagacactgtacaacagaagaacccggcaggatgagcctgccctgttcgtggccctgaccttcgagcggcgggaggtcctggactcctccaatatcaaaccaatgaacctgatcggcgtggcaagaggcgaaaacatccccgccgtgatcgccctgaccgaccccgagggctgcccactgagccggtttaaggatagcctgggaaacccaacccacatcctgagaatcggcgagagctataaggagaagcagcggaccatccaggccaagaaggaggtggagcagcggagagccggcggctacagccggaagtacgccagcaaagccaagaatctggcagacgatatggtgagaaacaccgctagagatctgctgtactacgccgtgacccaggatgccatgctgatcttcgccaacctgagccggggcttcggccggcagggcaagcggaccttcatggccgagagacagtacacacggatggaggactggctgaccgccaagctggcctacgagggcctgagcaagacctacctgtccaagacactggcccagtacacctccaagacatgcagcaactgtgggtttaccatcaccagcgccgactacgacagggtgctggagaagctgaagaagacagcaacaggctggatgaccacaattaacggcaaggagctgaaggtggagggccagattacctactacaacagatacaagagacagaacgtagtcaaggacctgtccgtcgagctggatagactgagcgaagaatctgtgaacaacgacatctcctcctggacaaagggcagaagcggagaagctctgagcctcctgaagaaaagattctcccatagacccgtgcaggagaagttcgtgtgcctgaactgcggcttcgagacacacgcagccgagcaagccgccctgaacatcgccagatcctggctgttcctgcggagccaggagtacaagaaataccagacaaacaagacaaccggcaacaccgataagagagccttcgtcgagacctggcagtccttttaccggaagaagcttaaggaggtgtggaaacctgccgtgcggtctggcggatctggcggaggctccaccagccccaagaaaaagagaaaagtctaagctgccttctgcggggcttgccttctggccatgcccttcttctctcccttgcacctgtacctcttggtctttgaataaagcctgagtaggaaggctagcaaaaaaaaaaaaaaaaaaaaaaaaaaaaaaaaaaaaaaaaaaaaaaaaaaaaaaaaaaaaaaaaaaaaaaaaaaaaaaaagcccagccggctccccaacctctaccgaggagggcacctctgagtccgccacccccgagagcggccctggcacctccaccgagcccagcgagggcagcgcacccggcagccctgccggcagccccacctccacagaggagggaaccagcaccgagcccagcgaaggcagcgccccaggcaccagcaccgagcctagtgagcaggagattaaacggatcaacaagatcagaagaagacttgtgaaagacagcaacaccaagaaggccggcaagacaggccccatgaaaaccctgctggttagagtgatgacacccgatctgagagagcggctggaaaacctgagaaagaagcctgaaaatatcccccagcccatcagcaatacatctagagccaacctgaataagctgctgaccgattacaccgaaatgaagaaggcgatcctgcatgtgtactgggaagagttccagaaggaccctgtgggcctgatgagccgggtggcccagcctgccagcaagaagatcgatcagaacaagctgaaacctgagatggacgagaagggcaacctgaccaccgccggctttgcctgctctcagtgtggccagcccctgttcgtgtacaagctggagcaggtgtctgagaagggcaaggcttacaccaactacttcggacggtgcaatgtggccgagcacgaaaagctgatcctgctggcccagctgaagcccgagaaggatagcgacgaagccgtgacatatagcctgggaaagtttgggcagagggccctggatttctacagcattcatgtgaccaaggagtccacccaccccgtgaagcccctggcccagatcgccggaaacagatacgcctccggacctgtgggaaaggccctgagcgacgcatgtatgggcacaatcgcctccttcctgtctaagtaccaggacatcatcatcgaacaccagaaggtggtgaagggcaaccagaagagactggagagcctgcgggagctggccggcaaggaaaacctggaataccctagcgtgaccctgccacctcagcctcacaccaaggagggcgttgatgcctacaacgaagtgatcgcccgggtgcgaatgtgggtgaacctgaacctgtggcagaagctgaagctaagcagagatgatgccaagcctctgctgagactgaagggattcccttcctttcctctggtcgagagacaggccaacgaagtggactggtgggacatggtgtgtaacgtgaagaagctgatcaacgagaaaaaggaggatggcaaggtgttttggcagaatctggctggctacaagagacaggaagccctgagaccatacctgagcagcgaggaagatcggaagaagggaaagaaattcgctcggtaccagctgggcgacctgctgctgcacctggaaaagaagcacggcgaggactggggaaaggtgtacgacgaggcctgggagcggattgacaagaaagtggaaggcctgagcaagcacatcaagctggaagaggaacggagaagcgaggacgcccagagcaaggccgccctgaccgactggctgcgggctaaggccagcttcgtgatcgagggcctgaaggaggccgacaaggacgagttctgcagatgcgagctgaagctgcagaagtggtacggggacctgcggggaaagcccttcgccatcgaagccgagaacagcatcctggacatcagcggcttcagcaagcagtacaactgtgccttcatctggcagaaggacggcgtgaagaagctgaacctgtacctgatcatcaactacttcaagggcggcaagctgcggttcaagaagatcaaacctgaagccttcgaagccaacagattctacaccgtgatcaacaaaaagagcggcgagatcgtgcccatggaggtgaacttcaacttcgacgaccccaacctgatcatcctgcctctggcctttggcaagagacagggcagagaattcatctggaacgacctgctgtccctggaaaccggcagcctgaagctggccaacggaagagtgatcgagaagacactgtacaacagaagaacccggcaggatgagcctgccctgttcgtggccctgaccttcgagcggcgggaggtcctggactcctccaatatcaaaccaatgaacctgatcggcgtggcaagaggcgaaaacatccccgccgtgatcgccctgaccgaccccgagggctgcccactgagccggtttaaggatagcctgggaaacccaacccacatcctgagaatcggcgagagctataaggagaagcagcggaccatccaggccaagaaggaggtggagcagcggagagccggcggctacagccggaagtacgccagcaaagccaagaatctggcagacgatatggtgagaaacaccgctagagatctgctgtactacgccgtgacccaggatgccatgctgatcttcgccaacctgagccggggcttcggccggcagggcaagcggaccttcatggccgagagacagtacacacggatggaggactggctgaccgccaagctggcctacgagggcctgagcaagacctacctgtccaagacactggcccagtacacctccaagacatgcagcaactgtgggtttaccatcaccagcgccgactacgacagggtgctggagaagctgaagaagacagcaacaggctggatgaccacaattaacggcaaggagctgaaggtggagggccagattacctactacaacagatacaagagacagaacgtagtcaaggacctgtccgtcgagctggatagactgagcgaagaatctgtgaacaacgacatctcctcctggacaaagggcagaagcggagaagctctgagcctcctgaagaaaagattctcccatagacccgtgcaggagaagttcgtgtgcctgaactgcggcttcgagacacacgcagccgagcaagccgccctgaacatcgccagatcctggctgttcctgcggagccaggagtacaagaaataccagacaaacaagacaaccggcaacaccgataagagagccttcgtcgagacctggcagtccttttaccggaagaagcttaaggaggtgtggaaacctgccgtgcggtctggcggatctggcggaggctccaccagccccaagaaaaagagaaaagtctaagctgccttctgcggggcttgccttctggccatgcccttcttctctcccttgcacctgtacctcttggtctttgaataaagcctgagtaggaaggctagcaaaaaaaaaaaaaaaaaaaaaaaaaaaaaaaaaaaaaaaaaaaaaaaaaaaaaaaaaaaaaaaaaaaaaaaaaaaaaaaa

SEQ ID NO: 9646 - RNA, 8787 nt, synthetic construct
  source 1..8787: mol_type = other RNA
aggaaataagagagaaaagaagagtaagaagaaatataagagccaccatggcccctaagaagaagcgtaaagtgagccggatgaaccacgaccaggagttcgacccccctaaggtgtaccctcccgtccccgccgagaagagaaagcccatccgggtcctgagcctgttcgatggcatcgccaccggtctgctggtgctgaaggacctgggcatccaggtggataggtacattgcctccgaggtgtgcgaggactccatcaccgtgggaatggtgcgtcatcagggcaagatcatgtacgtgggcgacgtgcggagcgtgacacagaagcatatccaggagtggggccctttcgacctggtgatcggcggcagcccttgcaatgacctgagcatcgtgaacccagcccggaagggcctgtacgagggaaccggcagactgttcttcgagttttacagactgctgcacgacgcccggcctaaggaaggcgacgaccggcccttcttttggctgttcgagaatgtggtggccatgggagtcagcgacaagcgggatattagccggttcctggagagcaaccccgtgatgatcgatgccaaggaagtgagcgccgcccaccgggccagatacttctggggcaatctgcctggcatgaacagacccctggccagcaccgtgaacgacaagctggagctgcaggagtgcctggagcacggccggatcgccaagttcagcaaggtgagaaccatcaccacccgaagcaacagcatcaaacaaggcaaggaccagcactttcctgtgttcatgaacgagaaggaggacatcctgtggtgtaccgagatggagagagtgttcgggttcccagtccactacacagatgtcagcaacatgtctagactggccagacagagactgctgggaagaagctggtccgtccctgtgatcagacacctgttcgcccctctgaaggagtacttcgcctgcgtgagcagcggcaacagcaacgccaacagccggggccccagcttctctagcggcctggtgccactgtccctgagagggagccacatgggccccatggagatctacaaaaccgtgagcgcctggaagcggcagcctgtgcgcgtgctgagcctgtttcggaatatcgataaagtcctgaaaagcctgggattcctggagagcggctctggctccggcggtggcaccctgaagtacgtggaggatgtgacaaacgtggtcagacgggatgtggagaagtggggccccttcgatctggtgtacggcagcacccaacccctgggcagctcttgtgaccggtgccctggctggtacatgtttcagttccaccggatcctgcagtacgccctgccgagacaggagtcccagcggccattcttttggattttcatggacaacttgctgctgaccgaggatgaccaggaaactaccactcggttcctgcagaccgaagccgtgaccctgcaggacgtgagaggccgggactaccagaacgccatgcgggtgtggtccaacatccctggactgaaaagcaagcacgcacctctgacccctaaagaagaggagtacctgcaggcccaggtgcggagcagaagcaagctggacgcccctaaggtggatctgctggtgaagaattgcctcctgcccctgagagagtacttcaagtatttcagccagaatagtctgcccctgggaggcagcggcggcggcggccacgccctgctgaccttcagggacgtggccatcgagttcagccaggaggagtggggctgcctgaaccacacccagagggagctgtacagggacgtgatgctggagaactacggccacctgctgttcctgggcctgatcgtgagcaagcccgacctggtgagcttcctggagcagaccaaggacccctgggacggcaagaggaagaagaccgtggccttccaccccggcctggccctgagcggcggcccaagcagcggcgcccctcctcccagcggcggcaggcggcccaagcagcggcgcccctcctcccagcggcggcagcccagccggctccccaacctctaccgaggagggcacctctgagtccgccacccccgagagcggccctggcacctccaccgagcccagcgagggcagcgcacccggcagccctgccggcagccccacctccacagaggagggaaccagcaccgagcccagcgaaggcagcgccccaggcaccagcaccgagcctagtgagcaggagattaaacggatcaacaagatcagaagaagacttgtgaaagacagcaacaccaagaaggccggcaagacaggccccatgaaaaccctgctggttagagtgatgacacccgatctgagagagcggctggaaaacctgagaaagaagcctgaaaatatcccccagcccatcagcaatacatctagagccaacctgaataagctgctgaccgattacaccgaaatgaagaaggcgatcctgcatgtgtactgggaagagttccagaaggaccctgtgggcctgatgagccgggtggcccagcctgccagcaagaagatcgatcagaacaagctgaaacctgagatggacgagaagggcaacctgaccaccgccggctttgcctgctctcagtgtggccagcccctgttcgtgtacaagctggagcaggtgtctgagaagggcaaggcttacaccaactacttcggacggtgcaatgtggccgagcacgaaaagctgatcctgctggcccagctgaagcccgagaaggatagcgacgaagccgtgacatatagcctgggaaagtttgggcagagggccctggatttctacagcattcatgtgaccaaggagtccacccaccccgtgaagcccctggcccagatcgccggaaacagatacgcctccggacctgtgggaaaggccctgagcgacgcatgtatgggcacaatcgcctccttcctgtctaagtaccaggacatcatcatcgaacaccagaaggtggtgaagggcaaccagaagagactggagagcctgcgggagctggccggcaaggaaaacctggaataccctagcgtgaccctgccacctcagcctcacaccaaggagggcgttgatgcctacaacgaagtgatcgcccgggtgcgaatgtgggtgaacctgaacctgtggcagaagctgaagctaagcagagatgatgccaagcctctgctgagactgaagggattcccttcctttcctctggtcgagagacaggccaacgaagtggactggtgggacatggtgtgtaacgtgaagaagctgatcaacgagaaaaaggaggatggcaaggtgttttggcagaatctggctggctacaagagacaggaagccctgagaccatacctgagcagcgaggaagatcggaagaagggaaagaaattcgctcggtaccagctgggcgacctgctgctgcacctggaaaagaagcacggcgaggactggggaaaggtgtacgacgaggcctgggagcggattgacaagaaagtggaaggcctgagcaagcacatcaagctggaagaggaacggagaagcgaggacgcccagagcaaggccgccctgaccgactggctgcgggctaaggccagcttcgtgatcgagggcctgaaggaggccgacaaggacgagttctgcagatgcgagctgaagctgcagaagtggtacggggacctgcggggaaagcccttcgccatcgaagccgagaacagcatcctggacatcagcggcttcagcaagcagtacaactgtgccttcatctggcagaaggacggcgtgaagaagctgaacctgtacctgatcatcaactacttcaagggcggcaagctgcggttcaagaagatcaaacctgaagccttcgaagccaacagattctacaccgtgatcaacaaaaagagcggcgagatcgtgcccatggaggtgaacttcaacttcgacgaccccaacctgatcatcctgcctctggcctttggcaagagacagggcagagaattcatctggaacgacctgctgtccctggaaaccggcagcctgaagctggccaacggaagagtgatcgagaagacactgtacaacagaagaacccggcaggatgagcctgccctgttcgtggccctgaccttcgagcggcgggaggtcctggactcctccaatatcaaaccaatgaacctgatcggcgtggcaagaggcgaaaacatccccgccgtgatcgccctgaccgaccccgagggctgcccactgagccggtttaaggatagcctgggaaacccaacccacatcctgagaatcggcgagagctataaggagaagcagcggaccatccaggccaagaaggaggtggagcagcggagagccggcggctacagccggaagtacgccagcaaagccaagaatctggcagacgatatggtgagaaacaccgctagagatctgctgtactacgccgtgacccaggatgccatgctgatcttcgccaacctgagccggggcttcggccggcagggcaagcggaccttcatggccgagagacagtacacacggatggaggactggctgaccgccaagctggcctacgagggcctgagcaagacctacctgtccaagacactggcccagtacacctccaagacatgcagcaactgtgggtttaccatcaccagcgccgactacgacagggtgctggagaagctgaagaagacagcaacaggctggatgaccacaattaacggcaaggagctgaaggtggagggccagattacctactacaacagatacaagagacagaacgtagtcaaggacctgtccgtcgagctggatagactgagcgaagaatctgtgaacaacgacatctcctcctggacaaagggcagaagcggagaagctctgagcctcctgaagaaaagattctcccatagacccgtgcaggagaagttcgtgtgcctgaactgcggcttcgagacacacgcagccgagcaagccgccctgaacatcgccagatcctggctgttcctgcggagccaggagtacaagaaataccagacaaacaagacaaccggcaacaccgataagagagccttcgtcgagacctggcagtccttttaccggaagaagcttaaggaggtgtggaaacctgccgtgcggtctggcggatctggcggaggctccaccagccccaagaaaaagagaaaagtctaagctgccttctgcggggcttgccttctggccatgcccttcttctctcccttgcacctgtacctcttggtctttgaataaagcctgagtaggaaggctagcaaaaaaaaaaaaaaaaaaaaaaaaaaaaaaaaaaaaaaaaaaaaaaaaaaaaaaaaaaaaaaaaaaaaaaaaaaaaaaaagcccagccggctccccaacctctaccgaggagggcacctctgagtccgccacccccgagagcggccctggcacctccaccgagcccagcgagggcagcgcacccggcagccctgccggcagccccacctccacagaggagggaaccagcaccgagcccagcgaaggcagcgccccaggcaccagcaccgagcctagtgagcaggagattaaacggatcaacaagatcagaagaagacttgtgaaagacagcaacaccaagaaggccggcaagacaggccccatgaaaaccctgctggttagagtgatgacacccgatctgagagagcggctggaaaacctgagaaagaagcctgaaaatatcccccagcccatcagcaatacatctagagccaacctgaataagctgctgaccgattacaccgaaatgaagaaggcgatcctgcatgtgtactgggaagagttccagaaggaccctgtgggcctgatgagccgggtggcccagcctgccagcaagaagatcgatcagaacaagctgaaacctgagatggacgagaagggcaacctgaccaccgccggctttgcctgctctcagtgtggccagcccctgttcgtgtacaagctggagcaggtgtctgagaagggcaaggcttacaccaactacttcggacggtgcaatgtggccgagcacgaaaagctgatcctgctggcccagctgaagcccgagaaggatagcgacgaagccgtgacatatagcctgggaaagtttgggcagagggccctggatttctacagcattcatgtgaccaaggagtccacccaccccgtgaagcccctggcccagatcgccggaaacagatacgcctccggacctgtgggaaaggccctgagcgacgcatgtatgggcacaatcgcctccttcctgtctaagtaccaggacatcatcatcgaacaccagaaggtggtgaagggcaaccagaagagactggagagcctgcgggagctggccggcaaggaaaacctggaataccctagcgtgaccctgccacctcagcctcacaccaaggagggcgttgatgcctacaacgaagtgatcgcccgggtgcgaatgtgggtgaacctgaacctgtggcagaagctgaagctaagcagagatgatgccaagcctctgctgagactgaagggattcccttcctttcctctggtcgagagacaggccaacgaagtggactggtgggacatggtgtgtaacgtgaagaagctgatcaacgagaaaaaggaggatggcaaggtgttttggcagaatctggctggctacaagagacaggaagccctgagaccatacctgagcagcgaggaagatcggaagaagggaaagaaattcgctcggtaccagctgggcgacctgctgctgcacctggaaaagaagcacggcgaggactggggaaaggtgtacgacgaggcctgggagcggattgacaagaaagtggaaggcctgagcaagcacatcaagctggaagaggaacggagaagcgaggacgcccagagcaaggccgccctgaccgactggctgcgggctaaggccagcttcgtgatcgagggcctgaaggaggccgacaaggacgagttctgcagatgcgagctgaagctgcagaagtggtacggggacctgcggggaaagcccttcgccatcgaagccgagaacagcatcctggacatcagcggcttcagcaagcagtacaactgtgccttcatctggcagaaggacggcgtgaagaagctgaacctgtacctgatcatcaactacttcaagggcggcaagctgcggttcaagaagatcaaacctgaagccttcgaagccaacagattctacaccgtgatcaacaaaaagagcggcgagatcgtgcccatggaggtgaacttcaacttcgacgaccccaacctgatcatcctgcctctggcctttggcaagagacagggcagagaattcatctggaacgacctgctgtccctggaaaccggcagcctgaagctggccaacggaagagtgatcgagaagacactgtacaacagaagaacccggcaggatgagcctgccctgttcgtggccctgaccttcgagcggcgggaggtcctggactcctccaatatcaaaccaatgaacctgatcggcgtggcaagaggcgaaaacatccccgccgtgatcgccctgaccgaccccgagggctgcccactgagccggtttaaggatagcctgggaaacccaacccacatcctgagaatcggcgagagctataaggagaagcagcggaccatccaggccaagaaggaggtggagcagcggagagccggcggctacagccggaagtacgccagcaaagccaagaatctggcagacgatatggtgagaaacaccgctagagatctgctgtactacgccgtgacccaggatgccatgctgatcttcgccaacctgagccggggcttcggccggcagggcaagcggaccttcatggccgagagacagtacacacggatggaggactggctgaccgccaagctggcctacgagggcctgagcaagacctacctgtccaagacactggcccagtacacctccaagacatgcagcaactgtgggtttaccatcaccagcgccgactacgacagggtgctggagaagctgaagaagacagcaacaggctggatgaccacaattaacggcaaggagctgaaggtggagggccagattacctactacaacagatacaagagacagaacgtagtcaaggacctgtccgtcgagctggatagactgagcgaagaatctgtgaacaacgacatctcctcctggacaaagggcagaagcggagaagctctgagcctcctgaagaaaagattctcccatagacccgtgcaggagaagttcgtgtgcctgaactgcggcttcgagacacacgcagccgagcaagccgccctgaacatcgccagatcctggctgttcctgcggagccaggagtacaagaaataccagacaaacaagacaaccggcaacaccgataagagagccttcgtcgagacctggcagtccttttaccggaagaagcttaaggaggtgtggaaacctgccgtgcggtctggcggatctggcggaggctccaccagccccaagaaaaagagaaaagtctaagctgccttctgcggggcttgccttctggccatgcccttcttctctcccttgcacctgtacctcttggtctttgaataaagcctgagtaggaaggctagcaaaaaaaaaaaaaaaaaaaaaaaaaaaaaaaaaaaaaaaaaaaaaaaaaaaaaaaaaaaaaaaaaaaaaaaaaaaaaaaa

SEQ ID NO: 9647 - RNA, 8787 nt, synthetic construct
  source 1..8787: mol_type = other RNA
aggaaataagagagaaaagaagagtaagaagaaatataagagccaccatggcccctaagaagaagcgtaaagtgagccggatgaaccacgaccaggagttcgacccccctaaggtgtaccctcccgtccccgccgagaagagaaagcccatccgggtcctgagcctgttcgatggcatcgccaccggtctgctggtgctgaaggacctgggcatccaggtggataggtacattgcctccgaggtgtgcgaggactccatcaccgtgggaatggtgcgtcatcagggcaagatcatgtacgtgggcgacgtgcggagcgtgacacagaagcatatccaggagtggggccctttcgacctggtgatcggcggcagcccttgcaatgacctgagcatcgtgaacccagcccggaagggcctgtacgagggaaccggcagactgttcttcgagttttacagactgctgcacgacgcccggcctaaggaaggcgacgaccggcccttcttttggctgttcgagaatgtggtggccatgggagtcagcgacaagcgggatattagccggttcctggagagcaaccccgtgatgatcgatgccaaggaagtgagcgccgcccaccgggccagatacttctggggcaatctgcctggcatgaacagacccctggccagcaccgtgaacgacaagctggagctgcaggagtgcctggagcacggccggatcgccaagttcagcaaggtgagaaccatcaccacccgaagcaacagcatcaaacaaggcaaggaccagcactttcctgtgttcatgaacgagaaggaggacatcctgtggtgtaccgagatggagagagtgttcgggttcccagtccactacacagatgtcagcaacatgtctagactggccagacagagactgctgggaagaagctggtccgtccctgtgatcagacacctgttcgcccctctgaaggagtacttcgcctgcgtgagcagcggcaacagcaacgccaacagccggggccccagcttctctagcggcctggtgccactgtccctgagagggagccacatgggccccatggagatctacaaaaccgtgagcgcctggaagcggcagcctgtgcgcgtgctgagcctgtttcggaatatcgataaagtcctgaaaagcctgggattcctggagagcggctctggctccggcggtggcaccctgaagtacgtggaggatgtgacaaacgtggtcagacgggatgtggagaagtggggccccttcgatctggtgtacggcagcacccaacccctgggcagctcttgtgaccggtgccctggctggtacatgtttcagttccaccggatcctgcagtacgccctgccgagacaggagtcccagcggccattcttttggattttcatggacaacttgctgctgaccgaggatgaccaggaaactaccactcggttcctgcagaccgaagccgtgaccctgcaggacgtgagaggccgggactaccagaacgccatgcgggtgtggtccaacatccctggactgaaaagcaagcacgcacctctgacccctaaagaagaggagtacctgcaggcccaggtgcggagcagaagcaagctggacgcccctaaggtggatctgctggtgaagaattgcctcctgcccctgagagagtacttcaagtatttcagccagaatagtctgcccctgggaggcagcggcggcggcttccaggagctggtgaccttcagggacgtggccatcgacttcagcggccaggagtgggagtacctggacccccaccagagggacctgtacagggacgtgatgctggagaactacaggaacctggtgagcctgggccacagcatcagcaagcccgtgctggtggacctgctggagcagggcaaggagccctggatgatcctgagggaggagacccagttccccggcaaggaggacaggggccacggcggcccaagcagcggcgcccctcctcccagcggcggcaggcggcccaagcagcggcgcccctcctcccagcggcggcagcccagccggctccccaacctctaccgaggagggcacctctgagtccgccacccccgagagcggccctggcacctccaccgagcccagcgagggcagcgcacccggcagccctgccggcagccccacctccacagaggagggaaccagcaccgagcccagcgaaggcagcgccccaggcaccagcaccgagcctagtgagcaggagattaaacggatcaacaagatcagaagaagacttgtgaaagacagcaacaccaagaaggccggcaagacaggccccatgaaaaccctgctggttagagtgatgacacccgatctgagagagcggctggaaaacctgagaaagaagcctgaaaatatcccccagcccatcagcaatacatctagagccaacctgaataagctgctgaccgattacaccgaaatgaagaaggcgatcctgcatgtgtactgggaagagttccagaaggaccctgtgggcctgatgagccgggtggcccagcctgccagcaagaagatcgatcagaacaagctgaaacctgagatggacgagaagggcaacctgaccaccgccggctttgcctgctctcagtgtggccagcccctgttcgtgtacaagctggagcaggtgtctgagaagggcaaggcttacaccaactacttcggacggtgcaatgtggccgagcacgaaaagctgatcctgctggcccagctgaagcccgagaaggatagcgacgaagccgtgacatatagcctgggaaagtttgggcagagggccctggatttctacagcattcatgtgaccaaggagtccacccaccccgtgaagcccctggcccagatcgccggaaacagatacgcctccggacctgtgggaaaggccctgagcgacgcatgtatgggcacaatcgcctccttcctgtctaagtaccaggacatcatcatcgaacaccagaaggtggtgaagggcaaccagaagagactggagagcctgcgggagctggccggcaaggaaaacctggaataccctagcgtgaccctgccacctcagcctcacaccaaggagggcgttgatgcctacaacgaagtgatcgcccgggtgcgaatgtgggtgaacctgaacctgtggcagaagctgaagctaagcagagatgatgccaagcctctgctgagactgaagggattcccttcctttcctctggtcgagagacaggccaacgaagtggactggtgggacatggtgtgtaacgtgaagaagctgatcaacgagaaaaaggaggatggcaaggtgttttggcagaatctggctggctacaagagacaggaagccctgagaccatacctgagcagcgaggaagatcggaagaagggaaagaaattcgctcggtaccagctgggcgacctgctgctgcacctggaaaagaagcacggcgaggactggggaaaggtgtacgacgaggcctgggagcggattgacaagaaagtggaaggcctgagcaagcacatcaagctggaagaggaacggagaagcgaggacgcccagagcaaggccgccctgaccgactggctgcgggctaaggccagcttcgtgatcgagggcctgaaggaggccgacaaggacgagttctgcagatgcgagctgaagctgcagaagtggtacggggacctgcggggaaagcccttcgccatcgaagccgagaacagcatcctggacatcagcggcttcagcaagcagtacaactgtgccttcatctggcagaaggacggcgtgaagaagctgaacctgtacctgatcatcaactacttcaagggcggcaagctgcggttcaagaagatcaaacctgaagccttcgaagccaacagattctacaccgtgatcaacaaaaagagcggcgagatcgtgcccatggaggtgaacttcaacttcgacgaccccaacctgatcatcctgcctctggcctttggcaagagacagggcagagaattcatctggaacgacctgctgtccctggaaaccggcagcctgaagctggccaacggaagagtgatcgagaagacactgtacaacagaagaacccggcaggatgagcctgccctgttcgtggccctgaccttcgagcggcgggaggtcctggactcctccaatatcaaaccaatgaacctgatcggcgtggcaagaggcgaaaacatccccgccgtgatcgccctgaccgaccccgagggctgcccactgagccggtttaaggatagcctgggaaacccaacccacatcctgagaatcggcgagagctataaggagaagcagcggaccatccaggccaagaaggaggtggagcagcggagagccggcggctacagccggaagtacgccagcaaagccaagaatctggcagacgatatggtgagaaacaccgctagagatctgctgtactacgccgtgacccaggatgccatgctgatcttcgccaacctgagccggggcttcggccggcagggcaagcggaccttcatggccgagagacagtacacacggatggaggactggctgaccgccaagctggcctacgagggcctgagcaagacctacctgtccaagacactggcccagtacacctccaagacatgcagcaactgtgggtttaccatcaccagcgccgactacgacagggtgctggagaagctgaagaagacagcaacaggctggatgaccacaattaacggcaaggagctgaaggtggagggccagattacctactacaacagatacaagagacagaacgtagtcaaggacctgtccgtcgagctggatagactgagcgaagaatctgtgaacaacgacatctcctcctggacaaagggcagaagcggagaagctctgagcctcctgaagaaaagattctcccatagacccgtgcaggagaagttcgtgtgcctgaactgcggcttcgagacacacgcagccgagcaagccgccctgaacatcgccagatcctggctgttcctgcggagccaggagtacaagaaataccagacaaacaagacaaccggcaacaccgataagagagccttcgtcgagacctggcagtccttttaccggaagaagcttaaggaggtgtggaaacctgccgtgcggtctggcggatctggcggaggctccaccagccccaagaaaaagagaaaagtctaagctgccttctgcggggcttgccttctggccatgcccttcttctctcccttgcacctgtacctcttggtctttgaataaagcctgagtaggaaggctagcaaaaaaaaaaaaaaaaaaaaaaaaaaaaaaaaaaaaaaaaaaaaaaaaaaaaaaaaaaaaaaaaaaaaaaaaaaaaaaaagcccagccggctccccaacctctaccgaggagggcacctctgagtccgccacccccgagagcggccctggcacctccaccgagcccagcgagggcagcgcacccggcagccctgccggcagccccacctccacagaggagggaaccagcaccgagcccagcgaaggcagcgccccaggcaccagcaccgagcctagtgagcaggagattaaacggatcaacaagatcagaagaagacttgtgaaagacagcaacaccaagaaggccggcaagacaggccccatgaaaaccctgctggttagagtgatgacacccgatctgagagagcggctggaaaacctgagaaagaagcctgaaaatatcccccagcccatcagcaatacatctagagccaacctgaataagctgctgaccgattacaccgaaatgaagaaggcgatcctgcatgtgtactgggaagagttccagaaggaccctgtgggcctgatgagccgggtggcccagcctgccagcaagaagatcgatcagaacaagctgaaacctgagatggacgagaagggcaacctgaccaccgccggctttgcctgctctcagtgtggccagcccctgttcgtgtacaagctggagcaggtgtctgagaagggcaaggcttacaccaactacttcggacggtgcaatgtggccgagcacgaaaagctgatcctgctggcccagctgaagcccgagaaggatagcgacgaagccgtgacatatagcctgggaaagtttgggcagagggccctggatttctacagcattcatgtgaccaaggagtccacccaccccgtgaagcccctggcccagatcgccggaaacagatacgcctccggacctgtgggaaaggccctgagcgacgcatgtatgggcacaatcgcctccttcctgtctaagtaccaggacatcatcatcgaacaccagaaggtggtgaagggcaaccagaagagactggagagcctgcgggagctggccggcaaggaaaacctggaataccctagcgtgaccctgccacctcagcctcacaccaaggagggcgttgatgcctacaacgaagtgatcgcccgggtgcgaatgtgggtgaacctgaacctgtggcagaagctgaagctaagcagagatgatgccaagcctctgctgagactgaagggattcccttcctttcctctggtcgagagacaggccaacgaagtggactggtgggacatggtgtgtaacgtgaagaagctgatcaacgagaaaaaggaggatggcaaggtgttttggcagaatctggctggctacaagagacaggaagccctgagaccatacctgagcagcgaggaagatcggaagaagggaaagaaattcgctcggtaccagctgggcgacctgctgctgcacctggaaaagaagcacggcgaggactggggaaaggtgtacgacgaggcctgggagcggattgacaagaaagtggaaggcctgagcaagcacatcaagctggaagaggaacggagaagcgaggacgcccagagcaaggccgccctgaccgactggctgcgggctaaggccagcttcgtgatcgagggcctgaaggaggccgacaaggacgagttctgcagatgcgagctgaagctgcagaagtggtacggggacctgcggggaaagcccttcgccatcgaagccgagaacagcatcctggacatcagcggcttcagcaagcagtacaactgtgccttcatctggcagaaggacggcgtgaagaagctgaacctgtacctgatcatcaactacttcaagggcggcaagctgcggttcaagaagatcaaacctgaagccttcgaagccaacagattctacaccgtgatcaacaaaaagagcggcgagatcgtgcccatggaggtgaacttcaacttcgacgaccccaacctgatcatcctgcctctggcctttggcaagagacagggcagagaattcatctggaacgacctgctgtccctggaaaccggcagcctgaagctggccaacggaagagtgatcgagaagacactgtacaacagaagaacccggcaggatgagcctgccctgttcgtggccctgaccttcgagcggcgggaggtcctggactcctccaatatcaaaccaatgaacctgatcggcgtggcaagaggcgaaaacatccccgccgtgatcgccctgaccgaccccgagggctgcccactgagccggtttaaggatagcctgggaaacccaacccacatcctgagaatcggcgagagctataaggagaagcagcggaccatccaggccaagaaggaggtggagcagcggagagccggcggctacagccggaagtacgccagcaaagccaagaatctggcagacgatatggtgagaaacaccgctagagatctgctgtactacgccgtgacccaggatgccatgctgatcttcgccaacctgagccggggcttcggccggcagggcaagcggaccttcatggccgagagacagtacacacggatggaggactggctgaccgccaagctggcctacgagggcctgagcaagacctacctgtccaagacactggcccagtacacctccaagacatgcagcaactgtgggtttaccatcaccagcgccgactacgacagggtgctggagaagctgaagaagacagcaacaggctggatgaccacaattaacggcaaggagctgaaggtggagggccagattacctactacaacagatacaagagacagaacgtagtcaaggacctgtccgtcgagctggatagactgagcgaagaatctgtgaacaacgacatctcctcctggacaaagggcagaagcggagaagctctgagcctcctgaagaaaagattctcccatagacccgtgcaggagaagttcgtgtgcctgaactgcggcttcgagacacacgcagccgagcaagccgccctgaacatcgccagatcctggctgttcctgcggagccaggagtacaagaaataccagacaaacaagacaaccggcaacaccgataagagagccttcgtcgagacctggcagtccttttaccggaagaagcttaaggaggtgtggaaacctgccgtgcggtctggcggatctggcggaggctccaccagccccaagaaaaagagaaaagtctaagctgccttctgcggggcttgccttctggccatgcccttcttctctcccttgcacctgtacctcttggtctttgaataaagcctgagtaggaaggctagcaaaaaaaaaaaaaaaaaaaaaaaaaaaaaaaaaaaaaaaaaaaaaaaaaaaaaaaaaaaaaaaaaaaaaaaaaaaaaaaa

SEQ ID NO: 9648 - RNA, 8787 nt, synthetic construct
  source 1..8787: mol_type = other RNA
aggaaataagagagaaaagaagagtaagaagaaatataagagccaccatggcccctaagaagaagcgtaaagtgagccggatgaaccacgaccaggagttcgacccccctaaggtgtaccctcccgtccccgccgagaagagaaagcccatccgggtcctgagcctgttcgatggcatcgccaccggtctgctggtgctgaaggacctgggcatccaggtggataggtacattgcctccgaggtgtgcgaggactccatcaccgtgggaatggtgcgtcatcagggcaagatcatgtacgtgggcgacgtgcggagcgtgacacagaagcatatccaggagtggggccctttcgacctggtgatcggcggcagcccttgcaatgacctgagcatcgtgaacccagcccggaagggcctgtacgagggaaccggcagactgttcttcgagttttacagactgctgcacgacgcccggcctaaggaaggcgacgaccggcccttcttttggctgttcgagaatgtggtggccatgggagtcagcgacaagcgggatattagccggttcctggagagcaaccccgtgatgatcgatgccaaggaagtgagcgccgcccaccgggccagatacttctggggcaatctgcctggcatgaacagacccctggccagcaccgtgaacgacaagctggagctgcaggagtgcctggagcacggccggatcgccaagttcagcaaggtgagaaccatcaccacccgaagcaacagcatcaaacaaggcaaggaccagcactttcctgtgttcatgaacgagaaggaggacatcctgtggtgtaccgagatggagagagtgttcgggttcccagtccactacacagatgtcagcaacatgtctagactggccagacagagactgctgggaagaagctggtccgtccctgtgatcagacacctgttcgcccctctgaaggagtacttcgcctgcgtgagcagcggcaacagcaacgccaacagccggggccccagcttctctagcggcctggtgccactgtccctgagagggagccacatgggccccatggagatctacaaaaccgtgagcgcctggaagcggcagcctgtgcgcgtgctgagcctgtttcggaatatcgataaagtcctgaaaagcctgggattcctggagagcggctctggctccggcggtggcaccctgaagtacgtggaggatgtgacaaacgtggtcagacgggatgtggagaagtggggccccttcgatctggtgtacggcagcacccaacccctgggcagctcttgtgaccggtgccctggctggtacatgtttcagttccaccggatcctgcagtacgccctgccgagacaggagtcccagcggccattcttttggattttcatggacaacttgctgctgaccgaggatgaccaggaaactaccactcggttcctgcagaccgaagccgtgaccctgcaggacgtgagaggccgggactaccagaacgccatgcgggtgtggtccaacatccctggactgaaaagcaagcacgcacctctgacccctaaagaagaggagtacctgcaggcccaggtgcggagcagaagcaagctggacgcccctaaggtggatctgctggtgaagaattgcctcctgcccctgagagagtacttcaagtatttcagccagaatagtctgcccctgggaggcagcggcggcggcctgctgaccttcgaggacgtggccgtgtacttcaccgaggaggagtgggccctgctggaccccaaccagaagatcctgtacaacgacgtgatgcaggagaactacgagaacgtgatctgcctgggcctgaagctgaagaacgacaccggcaacgaccagcccaccagcgtgagcaccctggagatccaggccagcggctgcaaggtgctgaggaaggccaggatcaaggtggcccagaagaccggcggcccaagcagcggcgcccctcctcccagcggcggcaggcggcccaagcagcggcgcccctcctcccagcggcggcagcccagccggctccccaacctctaccgaggagggcacctctgagtccgccacccccgagagcggccctggcacctccaccgagcccagcgagggcagcgcacccggcagccctgccggcagccccacctccacagaggagggaaccagcaccgagcccagcgaaggcagcgccccaggcaccagcaccgagcctagtgagcaggagattaaacggatcaacaagatcagaagaagacttgtgaaagacagcaacaccaagaaggccggcaagacaggccccatgaaaaccctgctggttagagtgatgacacccgatctgagagagcggctggaaaacctgagaaagaagcctgaaaatatcccccagcccatcagcaatacatctagagccaacctgaataagctgctgaccgattacaccgaaatgaagaaggcgatcctgcatgtgtactgggaagagttccagaaggaccctgtgggcctgatgagccgggtggcccagcctgccagcaagaagatcgatcagaacaagctgaaacctgagatggacgagaagggcaacctgaccaccgccggctttgcctgctctcagtgtggccagcccctgttcgtgtacaagctggagcaggtgtctgagaagggcaaggcttacaccaactacttcggacggtgcaatgtggccgagcacgaaaagctgatcctgctggcccagctgaagcccgagaaggatagcgacgaagccgtgacatatagcctgggaaagtttgggcagagggccctggatttctacagcattcatgtgaccaaggagtccacccaccccgtgaagcccctggcccagatcgccggaaacagatacgcctccggacctgtgggaaaggccctgagcgacgcatgtatgggcacaatcgcctccttcctgtctaagtaccaggacatcatcatcgaacaccagaaggtggtgaagggcaaccagaagagactggagagcctgcgggagctggccggcaaggaaaacctggaataccctagcgtgaccctgccacctcagcctcacaccaaggagggcgttgatgcctacaacgaagtgatcgcccgggtgcgaatgtgggtgaacctgaacctgtggcagaagctgaagctaagcagagatgatgccaagcctctgctgagactgaagggattcccttcctttcctctggtcgagagacaggccaacgaagtggactggtgggacatggtgtgtaacgtgaagaagctgatcaacgagaaaaaggaggatggcaaggtgttttggcagaatctggctggctacaagagacaggaagccctgagaccatacctgagcagcgaggaagatcggaagaagggaaagaaattcgctcggtaccagctgggcgacctgctgctgcacctggaaaagaagcacggcgaggactggggaaaggtgtacgacgaggcctgggagcggattgacaagaaagtggaaggcctgagcaagcacatcaagctggaagaggaacggagaagcgaggacgcccagagcaaggccgccctgaccgactggctgcgggctaaggccagcttcgtgatcgagggcctgaaggaggccgacaaggacgagttctgcagatgcgagctgaagctgcagaagtggtacggggacctgcggggaaagcccttcgccatcgaagccgagaacagcatcctggacatcagcggcttcagcaagcagtacaactgtgccttcatctggcagaaggacggcgtgaagaagctgaacctgtacctgatcatcaactacttcaagggcggcaagctgcggttcaagaagatcaaacctgaagccttcgaagccaacagattctacaccgtgatcaacaaaaagagcggcgagatcgtgcccatggaggtgaacttcaacttcgacgaccccaacctgatcatcctgcctctggcctttggcaagagacagggcagagaattcatctggaacgacctgctgtccctggaaaccggcagcctgaagctggccaacggaagagtgatcgagaagacactgtacaacagaagaacccggcaggatgagcctgccctgttcgtggccctgaccttcgagcggcgggaggtcctggactcctccaatatcaaaccaatgaacctgatcggcgtggcaagaggcgaaaacatccccgccgtgatcgccctgaccgaccccgagggctgcccactgagccggtttaaggatagcctgggaaacccaacccacatcctgagaatcggcgagagctataaggagaagcagcggaccatccaggccaagaaggaggtggagcagcggagagccggcggctacagccggaagtacgccagcaaagccaagaatctggcagacgatatggtgagaaacaccgctagagatctgctgtactacgccgtgacccaggatgccatgctgatcttcgccaacctgagccggggcttcggccggcagggcaagcggaccttcatggccgagagacagtacacacggatggaggactggctgaccgccaagctggcctacgagggcctgagcaagacctacctgtccaagacactggcccagtacacctccaagacatgcagcaactgtgggtttaccatcaccagcgccgactacgacagggtgctggagaagctgaagaagacagcaacaggctggatgaccacaattaacggcaaggagctgaaggtggagggccagattacctactacaacagatacaagagacagaacgtagtcaaggacctgtccgtcgagctggatagactgagcgaagaatctgtgaacaacgacatctcctcctggacaaagggcagaagcggagaagctctgagcctcctgaagaaaagattctcccatagacccgtgcaggagaagttcgtgtgcctgaactgcggcttcgagacacacgcagccgagcaagccgccctgaacatcgccagatcctggctgttcctgcggagccaggagtacaagaaataccagacaaacaagacaaccggcaacaccgataagagagccttcgtcgagacctggcagtccttttaccggaagaagcttaaggaggtgtggaaacctgccgtgcggtctggcggatctggcggaggctccaccagccccaagaaaaagagaaaagtctaagctgccttctgcggggcttgccttctggccatgcccttcttctctcccttgcacctgtacctcttggtctttgaataaagcctgagtaggaaggctagcaaaaaaaaaaaaaaaaaaaaaaaaaaaaaaaaaaaaaaaaaaaaaaaaaaaaaaaaaaaaaaaaaaaaaaaaaaaaaaaagcccagccggctccccaacctctaccgaggagggcacctctgagtccgccacccccgagagcggccctggcacctccaccgagcccagcgagggcagcgcacccggcagccctgccggcagccccacctccacagaggagggaaccagcaccgagcccagcgaaggcagcgccccaggcaccagcaccgagcctagtgagcaggagattaaacggatcaacaagatcagaagaagacttgtgaaagacagcaacaccaagaaggccggcaagacaggccccatgaaaaccctgctggttagagtgatgacacccgatctgagagagcggctggaaaacctgagaaagaagcctgaaaatatcccccagcccatcagcaatacatctagagccaacctgaataagctgctgaccgattacaccgaaatgaagaaggcgatcctgcatgtgtactgggaagagttccagaaggaccctgtgggcctgatgagccgggtggcccagcctgccagcaagaagatcgatcagaacaagctgaaacctgagatggacgagaagggcaacctgaccaccgccggctttgcctgctctcagtgtggccagcccctgttcgtgtacaagctggagcaggtgtctgagaagggcaaggcttacaccaactacttcggacggtgcaatgtggccgagcacgaaaagctgatcctgctggcccagctgaagcccgagaaggatagcgacgaagccgtgacatatagcctgggaaagtttgggcagagggccctggatttctacagcattcatgtgaccaaggagtccacccaccccgtgaagcccctggcccagatcgccggaaacagatacgcctccggacctgtgggaaaggccctgagcgacgcatgtatgggcacaatcgcctccttcctgtctaagtaccaggacatcatcatcgaacaccagaaggtggtgaagggcaaccagaagagactggagagcctgcgggagctggccggcaaggaaaacctggaataccctagcgtgaccctgccacctcagcctcacaccaaggagggcgttgatgcctacaacgaagtgatcgcccgggtgcgaatgtgggtgaacctgaacctgtggcagaagctgaagctaagcagagatgatgccaagcctctgctgagactgaagggattcccttcctttcctctggtcgagagacaggccaacgaagtggactggtgggacatggtgtgtaacgtgaagaagctgatcaacgagaaaaaggaggatggcaaggtgttttggcagaatctggctggctacaagagacaggaagccctgagaccatacctgagcagcgaggaagatcggaagaagggaaagaaattcgctcggtaccagctgggcgacctgctgctgcacctggaaaagaagcacggcgaggactggggaaaggtgtacgacgaggcctgggagcggattgacaagaaagtggaaggcctgagcaagcacatcaagctggaagaggaacggagaagcgaggacgcccagagcaaggccgccctgaccgactggctgcgggctaaggccagcttcgtgatcgagggcctgaaggaggccgacaaggacgagttctgcagatgcgagctgaagctgcagaagtggtacggggacctgcggggaaagcccttcgccatcgaagccgagaacagcatcctggacatcagcggcttcagcaagcagtacaactgtgccttcatctggcagaaggacggcgtgaagaagctgaacctgtacctgatcatcaactacttcaagggcggcaagctgcggttcaagaagatcaaacctgaagccttcgaagccaacagattctacaccgtgatcaacaaaaagagcggcgagatcgtgcccatggaggtgaacttcaacttcgacgaccccaacctgatcatcctgcctctggcctttggcaagagacagggcagagaattcatctggaacgacctgctgtccctggaaaccggcagcctgaagctggccaacggaagagtgatcgagaagacactgtacaacagaagaacccggcaggatgagcctgccctgttcgtggccctgaccttcgagcggcgggaggtcctggactcctccaatatcaaaccaatgaacctgatcggcgtggcaagaggcgaaaacatccccgccgtgatcgccctgaccgaccccgagggctgcccactgagccggtttaaggatagcctgggaaacccaacccacatcctgagaatcggcgagagctataaggagaagcagcggaccatccaggccaagaaggaggtggagcagcggagagccggcggctacagccggaagtacgccagcaaagccaagaatctggcagacgatatggtgagaaacaccgctagagatctgctgtactacgccgtgacccaggatgccatgctgatcttcgccaacctgagccggggcttcggccggcagggcaagcggaccttcatggccgagagacagtacacacggatggaggactggctgaccgccaagctggcctacgagggcctgagcaagacctacctgtccaagacactggcccagtacacctccaagacatgcagcaactgtgggtttaccatcaccagcgccgactacgacagggtgctggagaagctgaagaagacagcaacaggctggatgaccacaattaacggcaaggagctgaaggtggagggccagattacctactacaacagatacaagagacagaacgtagtcaaggacctgtccgtcgagctggatagactgagcgaagaatctgtgaacaacgacatctcctcctggacaaagggcagaagcggagaagctctgagcctcctgaagaaaagattctcccatagacccgtgcaggagaagttcgtgtgcctgaactgcggcttcgagacacacgcagccgagcaagccgccctgaacatcgccagatcctggctgttcctgcggagccaggagtacaagaaataccagacaaacaagacaaccggcaacaccgataagagagccttcgtcgagacctggcagtccttttaccggaagaagcttaaggaggtgtggaaacctgccgtgcggtctggcggatctggcggaggctccaccagccccaagaaaaagagaaaagtctaagctgccttctgcggggcttgccttctggccatgcccttcttctctcccttgcacctgtacctcttggtctttgaataaagcctgagtaggaaggctagcaaaaaaaaaaaaaaaaaaaaaaaaaaaaaaaaaaaaaaaaaaaaaaaaaaaaaaaaaaaaaaaaaaaaaaaaaaaaaaaa

SEQ ID NO: 9649 - RNA, 8787 nt, synthetic construct
  source 1..8787: mol_type = other RNA
aggaaataagagagaaaagaagagtaagaagaaatataagagccaccatggcccctaagaagaagcgtaaagtgagccggatgaaccacgaccaggagttcgacccccctaaggtgtaccctcccgtccccgccgagaagagaaagcccatccgggtcctgagcctgttcgatggcatcgccaccggtctgctggtgctgaaggacctgggcatccaggtggataggtacattgcctccgaggtgtgcgaggactccatcaccgtgggaatggtgcgtcatcagggcaagatcatgtacgtgggcgacgtgcggagcgtgacacagaagcatatccaggagtggggccctttcgacctggtgatcggcggcagcccttgcaatgacctgagcatcgtgaacccagcccggaagggcctgtacgagggaaccggcagactgttcttcgagttttacagactgctgcacgacgcccggcctaaggaaggcgacgaccggcccttcttttggctgttcgagaatgtggtggccatgggagtcagcgacaagcgggatattagccggttcctggagagcaaccccgtgatgatcgatgccaaggaagtgagcgccgcccaccgggccagatacttctggggcaatctgcctggcatgaacagacccctggccagcaccgtgaacgacaagctggagctgcaggagtgcctggagcacggccggatcgccaagttcagcaaggtgagaaccatcaccacccgaagcaacagcatcaaacaaggcaaggaccagcactttcctgtgttcatgaacgagaaggaggacatcctgtggtgtaccgagatggagagagtgttcgggttcccagtccactacacagatgtcagcaacatgtctagactggccagacagagactgctgggaagaagctggtccgtccctgtgatcagacacctgttcgcccctctgaaggagtacttcgcctgcgtgagcagcggcaacagcaacgccaacagccggggccccagcttctctagcggcctggtgccactgtccctgagagggagccacatgggccccatggagatctacaaaaccgtgagcgcctggaagcggcagcctgtgcgcgtgctgagcctgtttcggaatatcgataaagtcctgaaaagcctgggattcctggagagcggctctggctccggcggtggcaccctgaagtacgtggaggatgtgacaaacgtggtcagacgggatgtggagaagtggggccccttcgatctggtgtacggcagcacccaacccctgggcagctcttgtgaccggtgccctggctggtacatgtttcagttccaccggatcctgcagtacgccctgccgagacaggagtcccagcggccattcttttggattttcatggacaacttgctgctgaccgaggatgaccaggaaactaccactcggttcctgcagaccgaagccgtgaccctgcaggacgtgagaggccgggactaccagaacgccatgcgggtgtggtccaacatccctggactgaaaagcaagcacgcacctctgacccctaaagaagaggagtacctgcaggcccaggtgcggagcagaagcaagctggacgcccctaaggtggatctgctggtgaagaattgcctcctgcccctgagagagtacttcaagtatttcagccagaatagtctgcccctgggaggcagcggcggcggcagccagggcctggtgaccttcagggacgtggccctggacttcagccaggaggagtgggagtggctggaccagagccagaaggacctgtacagggacgtgatgctggagaactacaggaacctggtgtggctgggcctgagcatcagcaagcccaacatgatcagcctgctggagcagggcaaggagccctggatggtggagaaggagatgagcgacggccagtgcgccgactgggacagctggggcggcccaagcagcggcgcccctcctcccagcggcggcaggcggcccaagcagcggcgcccctcctcccagcggcggcagcccagccggctccccaacctctaccgaggagggcacctctgagtccgccacccccgagagcggccctggcacctccaccgagcccagcgagggcagcgcacccggcagccctgccggcagccccacctccacagaggagggaaccagcaccgagcccagcgaaggcagcgccccaggcaccagcaccgagcctagtgagcaggagattaaacggatcaacaagatcagaagaagacttgtgaaagacagcaacaccaagaaggccggcaagacaggccccatgaaaaccctgctggttagagtgatgacacccgatctgagagagcggctggaaaacctgagaaagaagcctgaaaatatcccccagcccatcagcaatacatctagagccaacctgaataagctgctgaccgattacaccgaaatgaagaaggcgatcctgcatgtgtactgggaagagttccagaaggaccctgtgggcctgatgagccgggtggcccagcctgccagcaagaagatcgatcagaacaagctgaaacctgagatggacgagaagggcaacctgaccaccgccggctttgcctgctctcagtgtggccagcccctgttcgtgtacaagctggagcaggtgtctgagaagggcaaggcttacaccaactacttcggacggtgcaatgtggccgagcacgaaaagctgatcctgctggcccagctgaagcccgagaaggatagcgacgaagccgtgacatatagcctgggaaagtttgggcagagggccctggatttctacagcattcatgtgaccaaggagtccacccaccccgtgaagcccctggcccagatcgccggaaacagatacgcctccggacctgtgggaaaggccctgagcgacgcatgtatgggcacaatcgcctccttcctgtctaagtaccaggacatcatcatcgaacaccagaaggtggtgaagggcaaccagaagagactggagagcctgcgggagctggccggcaaggaaaacctggaataccctagcgtgaccctgccacctcagcctcacaccaaggagggcgttgatgcctacaacgaagtgatcgcccgggtgcgaatgtgggtgaacctgaacctgtggcagaagctgaagctaagcagagatgatgccaagcctctgctgagactgaagggattcccttcctttcctctggtcgagagacaggccaacgaagtggactggtgggacatggtgtgtaacgtgaagaagctgatcaacgagaaaaaggaggatggcaaggtgttttggcagaatctggctggctacaagagacaggaagccctgagaccatacctgagcagcgaggaagatcggaagaagggaaagaaattcgctcggtaccagctgggcgacctgctgctgcacctggaaaagaagcacggcgaggactggggaaaggtgtacgacgaggcctgggagcggattgacaagaaagtggaaggcctgagcaagcacatcaagctggaagaggaacggagaagcgaggacgcccagagcaaggccgccctgaccgactggctgcgggctaaggccagcttcgtgatcgagggcctgaaggaggccgacaaggacgagttctgcagatgcgagctgaagctgcagaagtggtacggggacctgcggggaaagcccttcgccatcgaagccgagaacagcatcctggacatcagcggcttcagcaagcagtacaactgtgccttcatctggcagaaggacggcgtgaagaagctgaacctgtacctgatcatcaactacttcaagggcggcaagctgcggttcaagaagatcaaacctgaagccttcgaagccaacagattctacaccgtgatcaacaaaaagagcggcgagatcgtgcccatggaggtgaacttcaacttcgacgaccccaacctgatcatcctgcctctggcctttggcaagagacagggcagagaattcatctggaacgacctgctgtccctggaaaccggcagcctgaagctggccaacggaagagtgatcgagaagacactgtacaacagaagaacccggcaggatgagcctgccctgttcgtggccctgaccttcgagcggcgggaggtcctggactcctccaatatcaaaccaatgaacctgatcggcgtggcaagaggcgaaaacatccccgccgtgatcgccctgaccgaccccgagggctgcccactgagccggtttaaggatagcctgggaaacccaacccacatcctgagaatcggcgagagctataaggagaagcagcggaccatccaggccaagaaggaggtggagcagcggagagccggcggctacagccggaagtacgccagcaaagccaagaatctggcagacgatatggtgagaaacaccgctagagatctgctgtactacgccgtgacccaggatgccatgctgatcttcgccaacctgagccggggcttcggccggcagggcaagcggaccttcatggccgagagacagtacacacggatggaggactggctgaccgccaagctggcctacgagggcctgagcaagacctacctgtccaagacactggcccagtacacctccaagacatgcagcaactgtgggtttaccatcaccagcgccgactacgacagggtgctggagaagctgaagaagacagcaacaggctggatgaccacaattaacggcaaggagctgaaggtggagggccagattacctactacaacagatacaagagacagaacgtagtcaaggacctgtccgtcgagctggatagactgagcgaagaatctgtgaacaacgacatctcctcctggacaaagggcagaagcggagaagctctgagcctcctgaagaaaagattctcccatagacccgtgcaggagaagttcgtgtgcctgaactgcggcttcgagacacacgcagccgagcaagccgccctgaacatcgccagatcctggctgttcctgcggagccaggagtacaagaaataccagacaaacaagacaaccggcaacaccgataagagagccttcgtcgagacctggcagtccttttaccggaagaagcttaaggaggtgtggaaacctgccgtgcggtctggcggatctggcggaggctccaccagccccaagaaaaagagaaaagtctaagctgccttctgcggggcttgccttctggccatgcccttcttctctcccttgcacctgtacctcttggtctttgaataaagcctgagtaggaaggctagcaaaaaaaaaaaaaaaaaaaaaaaaaaaaaaaaaaaaaaaaaaaaaaaaaaaaaaaaaaaaaaaaaaaaaaaaaaaaaaaagcccagccggctccccaacctctaccgaggagggcacctctgagtccgccacccccgagagcggccctggcacctccaccgagcccagcgagggcagcgcacccggcagccctgccggcagccccacctccacagaggagggaaccagcaccgagcccagcgaaggcagcgccccaggcaccagcaccgagcctagtgagcaggagattaaacggatcaacaagatcagaagaagacttgtgaaagacagcaacaccaagaaggccggcaagacaggccccatgaaaaccctgctggttagagtgatgacacccgatctgagagagcggctggaaaacctgagaaagaagcctgaaaatatcccccagcccatcagcaatacatctagagccaacctgaataagctgctgaccgattacaccgaaatgaagaaggcgatcctgcatgtgtactgggaagagttccagaaggaccctgtgggcctgatgagccgggtggcccagcctgccagcaagaagatcgatcagaacaagctgaaacctgagatggacgagaagggcaacctgaccaccgccggctttgcctgctctcagtgtggccagcccctgttcgtgtacaagctggagcaggtgtctgagaagggcaaggcttacaccaactacttcggacggtgcaatgtggccgagcacgaaaagctgatcctgctggcccagctgaagcccgagaaggatagcgacgaagccgtgacatatagcctgggaaagtttgggcagagggccctggatttctacagcattcatgtgaccaaggagtccacccaccccgtgaagcccctggcccagatcgccggaaacagatacgcctccggacctgtgggaaaggccctgagcgacgcatgtatgggcacaatcgcctccttcctgtctaagtaccaggacatcatcatcgaacaccagaaggtggtgaagggcaaccagaagagactggagagcctgcgggagctggccggcaaggaaaacctggaataccctagcgtgaccctgccacctcagcctcacaccaaggagggcgttgatgcctacaacgaagtgatcgcccgggtgcgaatgtgggtgaacctgaacctgtggcagaagctgaagctaagcagagatgatgccaagcctctgctgagactgaagggattcccttcctttcctctggtcgagagacaggccaacgaagtggactggtgggacatggtgtgtaacgtgaagaagctgatcaacgagaaaaaggaggatggcaaggtgttttggcagaatctggctggctacaagagacaggaagccctgagaccatacctgagcagcgaggaagatcggaagaagggaaagaaattcgctcggtaccagctgggcgacctgctgctgcacctggaaaagaagcacggcgaggactggggaaaggtgtacgacgaggcctgggagcggattgacaagaaagtggaaggcctgagcaagcacatcaagctggaagaggaacggagaagcgaggacgcccagagcaaggccgccctgaccgactggctgcgggctaaggccagcttcgtgatcgagggcctgaaggaggccgacaaggacgagttctgcagatgcgagctgaagctgcagaagtggtacggggacctgcggggaaagcccttcgccatcgaagccgagaacagcatcctggacatcagcggcttcagcaagcagtacaactgtgccttcatctggcagaaggacggcgtgaagaagctgaacctgtacctgatcatcaactacttcaagggcggcaagctgcggttcaagaagatcaaacctgaagccttcgaagccaacagattctacaccgtgatcaacaaaaagagcggcgagatcgtgcccatggaggtgaacttcaacttcgacgaccccaacctgatcatcctgcctctggcctttggcaagagacagggcagagaattcatctggaacgacctgctgtccctggaaaccggcagcctgaagctggccaacggaagagtgatcgagaagacactgtacaacagaagaacccggcaggatgagcctgccctgttcgtggccctgaccttcgagcggcgggaggtcctggactcctccaatatcaaaccaatgaacctgatcggcgtggcaagaggcgaaaacatccccgccgtgatcgccctgaccgaccccgagggctgcccactgagccggtttaaggatagcctgggaaacccaacccacatcctgagaatcggcgagagctataaggagaagcagcggaccatccaggccaagaaggaggtggagcagcggagagccggcggctacagccggaagtacgccagcaaagccaagaatctggcagacgatatggtgagaaacaccgctagagatctgctgtactacgccgtgacccaggatgccatgctgatcttcgccaacctgagccggggcttcggccggcagggcaagcggaccttcatggccgagagacagtacacacggatggaggactggctgaccgccaagctggcctacgagggcctgagcaagacctacctgtccaagacactggcccagtacacctccaagacatgcagcaactgtgggtttaccatcaccagcgccgactacgacagggtgctggagaagctgaagaagacagcaacaggctggatgaccacaattaacggcaaggagctgaaggtggagggccagattacctactacaacagatacaagagacagaacgtagtcaaggacctgtccgtcgagctggatagactgagcgaagaatctgtgaacaacgacatctcctcctggacaaagggcagaagcggagaagctctgagcctcctgaagaaaagattctcccatagacccgtgcaggagaagttcgtgtgcctgaactgcggcttcgagacacacgcagccgagcaagccgccctgaacatcgccagatcctggctgttcctgcggagccaggagtacaagaaataccagacaaacaagacaaccggcaacaccgataagagagccttcgtcgagacctggcagtccttttaccggaagaagcttaaggaggtgtggaaacctgccgtgcggtctggcggatctggcggaggctccaccagccccaagaaaaagagaaaagtctaagctgccttctgcggggcttgccttctggccatgcccttcttctctcccttgcacctgtacctcttggtctttgaataaagcctgagtaggaaggctagcaaaaaaaaaaaaaaaaaaaaaaaaaaaaaaaaaaaaaaaaaaaaaaaaaaaaaaaaaaaaaaaaaaaaaaaaaaaaaaaa

SEQ ID NO: 9650 - RNA, 8787 nt, synthetic construct
  source 1..8787: mol_type = other RNA
aggaaataagagagaaaagaagagtaagaagaaatataagagccaccatggcccctaagaagaagcgtaaagtgagccggatgaaccacgaccaggagttcgacccccctaaggtgtaccctcccgtccccgccgagaagagaaagcccatccgggtcctgagcctgttcgatggcatcgccaccggtctgctggtgctgaaggacctgggcatccaggtggataggtacattgcctccgaggtgtgcgaggactccatcaccgtgggaatggtgcgtcatcagggcaagatcatgtacgtgggcgacgtgcggagcgtgacacagaagcatatccaggagtggggccctttcgacctggtgatcggcggcagcccttgcaatgacctgagcatcgtgaacccagcccggaagggcctgtacgagggaaccggcagactgttcttcgagttttacagactgctgcacgacgcccggcctaaggaaggcgacgaccggcccttcttttggctgttcgagaatgtggtggccatgggagtcagcgacaagcgggatattagccggttcctggagagcaaccccgtgatgatcgatgccaaggaagtgagcgccgcccaccgggccagatacttctggggcaatctgcctggcatgaacagacccctggccagcaccgtgaacgacaagctggagctgcaggagtgcctggagcacggccggatcgccaagttcagcaaggtgagaaccatcaccacccgaagcaacagcatcaaacaaggcaaggaccagcactttcctgtgttcatgaacgagaaggaggacatcctgtggtgtaccgagatggagagagtgttcgggttcccagtccactacacagatgtcagcaacatgtctagactggccagacagagactgctgggaagaagctggtccgtccctgtgatcagacacctgttcgcccctctgaaggagtacttcgcctgcgtgagcagcggcaacagcaacgccaacagccggggccccagcttctctagcggcctggtgccactgtccctgagagggagccacatgggccccatggagatctacaaaaccgtgagcgcctggaagcggcagcctgtgcgcgtgctgagcctgtttcggaatatcgataaagtcctgaaaagcctgggattcctggagagcggctctggctccggcggtggcaccctgaagtacgtggaggatgtgacaaacgtggtcagacgggatgtggagaagtggggccccttcgatctggtgtacggcagcacccaacccctgggcagctcttgtgaccggtgccctggctggtacatgtttcagttccaccggatcctgcagtacgccctgccgagacaggagtcccagcggccattcttttggattttcatggacaacttgctgctgaccgaggatgaccaggaaactaccactcggttcctgcagaccgaagccgtgaccctgcaggacgtgagaggccgggactaccagaacgccatgcgggtgtggtccaacatccctggactgaaaagcaagcacgcacctctgacccctaaagaagaggagtacctgcaggcccaggtgcggagcagaagcaagctggacgcccctaaggtggatctgctggtgaagaattgcctcctgcccctgagagagtacttcaagtatttcagccagaatagtctgcccctgggaggcagcggcggcggccaggccgaggtgaccttcgaggacgtggccgtgttcctgagccaggaggagtggggcctgctgggccccgcccagaagggcctgtacagggaggtgatgctggagacctacaggaacctggtgagcctgggcgccggcctggccggccccaagcccgaggtgatcgtgcacctggagaggggcgacgagctgtgggtgctggacatgaggggcgccgagcagcccagcgtggacggcagcgccggcggcccaagcagcggcgcccctcctcccagcggcggcaggcggcccaagcagcggcgcccctcctcccagcggcggcagcccagccggctccccaacctctaccgaggagggcacctctgagtccgccacccccgagagcggccctggcacctccaccgagcccagcgagggcagcgcacccggcagccctgccggcagccccacctccacagaggagggaaccagcaccgagcccagcgaaggcagcgccccaggcaccagcaccgagcctagtgagcaggagattaaacggatcaacaagatcagaagaagacttgtgaaagacagcaacaccaagaaggccggcaagacaggccccatgaaaaccctgctggttagagtgatgacacccgatctgagagagcggctggaaaacctgagaaagaagcctgaaaatatcccccagcccatcagcaatacatctagagccaacctgaataagctgctgaccgattacaccgaaatgaagaaggcgatcctgcatgtgtactgggaagagttccagaaggaccctgtgggcctgatgagccgggtggcccagcctgccagcaagaagatcgatcagaacaagctgaaacctgagatggacgagaagggcaacctgaccaccgccggctttgcctgctctcagtgtggccagcccctgttcgtgtacaagctggagcaggtgtctgagaagggcaaggcttacaccaactacttcggacggtgcaatgtggccgagcacgaaaagctgatcctgctggcccagctgaagcccgagaaggatagcgacgaagccgtgacatatagcctgggaaagtttgggcagagggccctggatttctacagcattcatgtgaccaaggagtccacccaccccgtgaagcccctggcccagatcgccggaaacagatacgcctccggacctgtgggaaaggccctgagcgacgcatgtatgggcacaatcgcctccttcctgtctaagtaccaggacatcatcatcgaacaccagaaggtggtgaagggcaaccagaagagactggagagcctgcgggagctggccggcaaggaaaacctggaataccctagcgtgaccctgccacctcagcctcacaccaaggagggcgttgatgcctacaacgaagtgatcgcccgggtgcgaatgtgggtgaacctgaacctgtggcagaagctgaagctaagcagagatgatgccaagcctctgctgagactgaagggattcccttcctttcctctggtcgagagacaggccaacgaagtggactggtgggacatggtgtgtaacgtgaagaagctgatcaacgagaaaaaggaggatggcaaggtgttttggcagaatctggctggctacaagagacaggaagccctgagaccatacctgagcagcgaggaagatcggaagaagggaaagaaattcgctcggtaccagctgggcgacctgctgctgcacctggaaaagaagcacggcgaggactggggaaaggtgtacgacgaggcctgggagcggattgacaagaaagtggaaggcctgagcaagcacatcaagctggaagaggaacggagaagcgaggacgcccagagcaaggccgccctgaccgactggctgcgggctaaggccagcttcgtgatcgagggcctgaaggaggccgacaaggacgagttctgcagatgcgagctgaagctgcagaagtggtacggggacctgcggggaaagcccttcgccatcgaagccgagaacagcatcctggacatcagcggcttcagcaagcagtacaactgtgccttcatctggcagaaggacggcgtgaagaagctgaacctgtacctgatcatcaactacttcaagggcggcaagctgcggttcaagaagatcaaacctgaagccttcgaagccaacagattctacaccgtgatcaacaaaaagagcggcgagatcgtgcccatggaggtgaacttcaacttcgacgaccccaacctgatcatcctgcctctggcctttggcaagagacagggcagagaattcatctggaacgacctgctgtccctggaaaccggcagcctgaagctggccaacggaagagtgatcgagaagacactgtacaacagaagaacccggcaggatgagcctgccctgttcgtggccctgaccttcgagcggcgggaggtcctggactcctccaatatcaaaccaatgaacctgatcggcgtggcaagaggcgaaaacatccccgccgtgatcgccctgaccgaccccgagggctgcccactgagccggtttaaggatagcctgggaaacccaacccacatcctgagaatcggcgagagctataaggagaagcagcggaccatccaggccaagaaggaggtggagcagcggagagccggcggctacagccggaagtacgccagcaaagccaagaatctggcagacgatatggtgagaaacaccgctagagatctgctgtactacgccgtgacccaggatgccatgctgatcttcgccaacctgagccggggcttcggccggcagggcaagcggaccttcatggccgagagacagtacacacggatggaggactggctgaccgccaagctggcctacgagggcctgagcaagacctacctgtccaagacactggcccagtacacctccaagacatgcagcaactgtgggtttaccatcaccagcgccgactacgacagggtgctggagaagctgaagaagacagcaacaggctggatgaccacaattaacggcaaggagctgaaggtggagggccagattacctactacaacagatacaagagacagaacgtagtcaaggacctgtccgtcgagctggatagactgagcgaagaatctgtgaacaacgacatctcctcctggacaaagggcagaagcggagaagctctgagcctcctgaagaaaagattctcccatagacccgtgcaggagaagttcgtgtgcctgaactgcggcttcgagacacacgcagccgagcaagccgccctgaacatcgccagatcctggctgttcctgcggagccaggagtacaagaaataccagacaaacaagacaaccggcaacaccgataagagagccttcgtcgagacctggcagtccttttaccggaagaagcttaaggaggtgtggaaacctgccgtgcggtctggcggatctggcggaggctccaccagccccaagaaaaagagaaaagtctaagctgccttctgcggggcttgccttctggccatgcccttcttctctcccttgcacctgtacctcttggtctttgaataaagcctgagtaggaaggctagcaaaaaaaaaaaaaaaaaaaaaaaaaaaaaaaaaaaaaaaaaaaaaaaaaaaaaaaaaaaaaaaaaaaaaaaaaaaaaaaagcccagccggctccccaacctctaccgaggagggcacctctgagtccgccacccccgagagcggccctggcacctccaccgagcccagcgagggcagcgcacccggcagccctgccggcagccccacctccacagaggagggaaccagcaccgagcccagcgaaggcagcgccccaggcaccagcaccgagcctagtgagcaggagattaaacggatcaacaagatcagaagaagacttgtgaaagacagcaacaccaagaaggccggcaagacaggccccatgaaaaccctgctggttagagtgatgacacccgatctgagagagcggctggaaaacctgagaaagaagcctgaaaatatcccccagcccatcagcaatacatctagagccaacctgaataagctgctgaccgattacaccgaaatgaagaaggcgatcctgcatgtgtactgggaagagttccagaaggaccctgtgggcctgatgagccgggtggcccagcctgccagcaagaagatcgatcagaacaagctgaaacctgagatggacgagaagggcaacctgaccaccgccggctttgcctgctctcagtgtggccagcccctgttcgtgtacaagctggagcaggtgtctgagaagggcaaggcttacaccaactacttcggacggtgcaatgtggccgagcacgaaaagctgatcctgctggcccagctgaagcccgagaaggatagcgacgaagccgtgacatatagcctgggaaagtttgggcagagggccctggatttctacagcattcatgtgaccaaggagtccacccaccccgtgaagcccctggcccagatcgccggaaacagatacgcctccggacctgtgggaaaggccctgagcgacgcatgtatgggcacaatcgcctccttcctgtctaagtaccaggacatcatcatcgaacaccagaaggtggtgaagggcaaccagaagagactggagagcctgcgggagctggccggcaaggaaaacctggaataccctagcgtgaccctgccacctcagcctcacaccaaggagggcgttgatgcctacaacgaagtgatcgcccgggtgcgaatgtgggtgaacctgaacctgtggcagaagctgaagctaagcagagatgatgccaagcctctgctgagactgaagggattcccttcctttcctctggtcgagagacaggccaacgaagtggactggtgggacatggtgtgtaacgtgaagaagctgatcaacgagaaaaaggaggatggcaaggtgttttggcagaatctggctggctacaagagacaggaagccctgagaccatacctgagcagcgaggaagatcggaagaagggaaagaaattcgctcggtaccagctgggcgacctgctgctgcacctggaaaagaagcacggcgaggactggggaaaggtgtacgacgaggcctgggagcggattgacaagaaagtggaaggcctgagcaagcacatcaagctggaagaggaacggagaagcgaggacgcccagagcaaggccgccctgaccgactggctgcgggctaaggccagcttcgtgatcgagggcctgaaggaggccgacaaggacgagttctgcagatgcgagctgaagctgcagaagtggtacggggacctgcggggaaagcccttcgccatcgaagccgagaacagcatcctggacatcagcggcttcagcaagcagtacaactgtgccttcatctggcagaaggacggcgtgaagaagctgaacctgtacctgatcatcaactacttcaagggcggcaagctgcggttcaagaagatcaaacctgaagccttcgaagccaacagattctacaccgtgatcaacaaaaagagcggcgagatcgtgcccatggaggtgaacttcaacttcgacgaccccaacctgatcatcctgcctctggcctttggcaagagacagggcagagaattcatctggaacgacctgctgtccctggaaaccggcagcctgaagctggccaacggaagagtgatcgagaagacactgtacaacagaagaacccggcaggatgagcctgccctgttcgtggccctgaccttcgagcggcgggaggtcctggactcctccaatatcaaaccaatgaacctgatcggcgtggcaagaggcgaaaacatccccgccgtgatcgccctgaccgaccccgagggctgcccactgagccggtttaaggatagcctgggaaacccaacccacatcctgagaatcggcgagagctataaggagaagcagcggaccatccaggccaagaaggaggtggagcagcggagagccggcggctacagccggaagtacgccagcaaagccaagaatctggcagacgatatggtgagaaacaccgctagagatctgctgtactacgccgtgacccaggatgccatgctgatcttcgccaacctgagccggggcttcggccggcagggcaagcggaccttcatggccgagagacagtacacacggatggaggactggctgaccgccaagctggcctacgagggcctgagcaagacctacctgtccaagacactggcccagtacacctccaagacatgcagcaactgtgggtttaccatcaccagcgccgactacgacagggtgctggagaagctgaagaagacagcaacaggctggatgaccacaattaacggcaaggagctgaaggtggagggccagattacctactacaacagatacaagagacagaacgtagtcaaggacctgtccgtcgagctggatagactgagcgaagaatctgtgaacaacgacatctcctcctggacaaagggcagaagcggagaagctctgagcctcctgaagaaaagattctcccatagacccgtgcaggagaagttcgtgtgcctgaactgcggcttcgagacacacgcagccgagcaagccgccctgaacatcgccagatcctggctgttcctgcggagccaggagtacaagaaataccagacaaacaagacaaccggcaacaccgataagagagccttcgtcgagacctggcagtccttttaccggaagaagcttaaggaggtgtggaaacctgccgtgcggtctggcggatctggcggaggctccaccagccccaagaaaaagagaaaagtctaagctgccttctgcggggcttgccttctggccatgcccttcttctctcccttgcacctgtacctcttggtctttgaataaagcctgagtaggaaggctagcaaaaaaaaaaaaaaaaaaaaaaaaaaaaaaaaaaaaaaaaaaaaaaaaaaaaaaaaaaaaaaaaaaaaaaaaaaaaaaaa

SEQ ID NO: 9651 - RNA, 8787 nt, synthetic construct
  source 1..8787: mol_type = other RNA
aggaaataagagagaaaagaagagtaagaagaaatataagagccaccatggcccctaagaagaagcgtaaagtgagccggatgaaccacgaccaggagttcgacccccctaaggtgtaccctcccgtccccgccgagaagagaaagcccatccgggtcctgagcctgttcgatggcatcgccaccggtctgctggtgctgaaggacctgggcatccaggtggataggtacattgcctccgaggtgtgcgaggactccatcaccgtgggaatggtgcgtcatcagggcaagatcatgtacgtgggcgacgtgcggagcgtgacacagaagcatatccaggagtggggccctttcgacctggtgatcggcggcagcccttgcaatgacctgagcatcgtgaacccagcccggaagggcctgtacgagggaaccggcagactgttcttcgagttttacagactgctgcacgacgcccggcctaaggaaggcgacgaccggcccttcttttggctgttcgagaatgtggtggccatgggagtcagcgacaagcgggatattagccggttcctggagagcaaccccgtgatgatcgatgccaaggaagtgagcgccgcccaccgggccagatacttctggggcaatctgcctggcatgaacagacccctggccagcaccgtgaacgacaagctggagctgcaggagtgcctggagcacggccggatcgccaagttcagcaaggtgagaaccatcaccacccgaagcaacagcatcaaacaaggcaaggaccagcactttcctgtgttcatgaacgagaaggaggacatcctgtggtgtaccgagatggagagagtgttcgggttcccagtccactacacagatgtcagcaacatgtctagactggccagacagagactgctgggaagaagctggtccgtccctgtgatcagacacctgttcgcccctctgaaggagtacttcgcctgcgtgagcagcggcaacagcaacgccaacagccggggccccagcttctctagcggcctggtgccactgtccctgagagggagccacatgggccccatggagatctacaaaaccgtgagcgcctggaagcggcagcctgtgcgcgtgctgagcctgtttcggaatatcgataaagtcctgaaaagcctgggattcctggagagcggctctggctccggcggtggcaccctgaagtacgtggaggatgtgacaaacgtggtcagacgggatgtggagaagtggggccccttcgatctggtgtacggcagcacccaacccctgggcagctcttgtgaccggtgccctggctggtacatgtttcagttccaccggatcctgcagtacgccctgccgagacaggagtcccagcggccattcttttggattttcatggacaacttgctgctgaccgaggatgaccaggaaactaccactcggttcctgcagaccgaagccgtgaccctgcaggacgtgagaggccgggactaccagaacgccatgcgggtgtggtccaacatccctggactgaaaagcaagcacgcacctctgacccctaaagaagaggagtacctgcaggcccaggtgcggagcagaagcaagctggacgcccctaaggtggatctgctggtgaagaattgcctcctgcccctgagagagtacttcaagtatttcagccagaatagtctgcccctgggaggcagcggcggcggcatgacccccggcccccccggcagcctggagatggagcccctgaccttcaaggacgtggccatcgagttctgcctggaggagtggcagtgcctggacaccgcccagcaggacctgtacaggaacgtgatgctggagaactacaggaacctggtgttcctgggcatcgccgtgagcaagcccgacctgatcacctgcctggagcagggcaaggtgccctggaacaggaagaggcacgagatggtgggcggcccaagcagcggcgcccctcctcccagcggcggcaggcggcccaagcagcggcgcccctcctcccagcggcggcagcccagccggctccccaacctctaccgaggagggcacctctgagtccgccacccccgagagcggccctggcacctccaccgagcccagcgagggcagcgcacccggcagccctgccggcagccccacctccacagaggagggaaccagcaccgagcccagcgaaggcagcgccccaggcaccagcaccgagcctagtgagcaggagattaaacggatcaacaagatcagaagaagacttgtgaaagacagcaacaccaagaaggccggcaagacaggccccatgaaaaccctgctggttagagtgatgacacccgatctgagagagcggctggaaaacctgagaaagaagcctgaaaatatcccccagcccatcagcaatacatctagagccaacctgaataagctgctgaccgattacaccgaaatgaagaaggcgatcctgcatgtgtactgggaagagttccagaaggaccctgtgggcctgatgagccgggtggcccagcctgccagcaagaagatcgatcagaacaagctgaaacctgagatggacgagaagggcaacctgaccaccgccggctttgcctgctctcagtgtggccagcccctgttcgtgtacaagctggagcaggtgtctgagaagggcaaggcttacaccaactacttcggacggtgcaatgtggccgagcacgaaaagctgatcctgctggcccagctgaagcccgagaaggatagcgacgaagccgtgacatatagcctgggaaagtttgggcagagggccctggatttctacagcattcatgtgaccaaggagtccacccaccccgtgaagcccctggcccagatcgccggaaacagatacgcctccggacctgtgggaaaggccctgagcgacgcatgtatgggcacaatcgcctccttcctgtctaagtaccaggacatcatcatcgaacaccagaaggtggtgaagggcaaccagaagagactggagagcctgcgggagctggccggcaaggaaaacctggaataccctagcgtgaccctgccacctcagcctcacaccaaggagggcgttgatgcctacaacgaagtgatcgcccgggtgcgaatgtgggtgaacctgaacctgtggcagaagctgaagctaagcagagatgatgccaagcctctgctgagactgaagggattcccttcctttcctctggtcgagagacaggccaacgaagtggactggtgggacatggtgtgtaacgtgaagaagctgatcaacgagaaaaaggaggatggcaaggtgttttggcagaatctggctggctacaagagacaggaagccctgagaccatacctgagcagcgaggaagatcggaagaagggaaagaaattcgctcggtaccagctgggcgacctgctgctgcacctggaaaagaagcacggcgaggactggggaaaggtgtacgacgaggcctgggagcggattgacaagaaagtggaaggcctgagcaagcacatcaagctggaagaggaacggagaagcgaggacgcccagagcaaggccgccctgaccgactggctgcgggctaaggccagcttcgtgatcgagggcctgaaggaggccgacaaggacgagttctgcagatgcgagctgaagctgcagaagtggtacggggacctgcggggaaagcccttcgccatcgaagccgagaacagcatcctggacatcagcggcttcagcaagcagtacaactgtgccttcatctggcagaaggacggcgtgaagaagctgaacctgtacctgatcatcaactacttcaagggcggcaagctgcggttcaagaagatcaaacctgaagccttcgaagccaacagattctacaccgtgatcaacaaaaagagcggcgagatcgtgcccatggaggtgaacttcaacttcgacgaccccaacctgatcatcctgcctctggcctttggcaagagacagggcagagaattcatctggaacgacctgctgtccctggaaaccggcagcctgaagctggccaacggaagagtgatcgagaagacactgtacaacagaagaacccggcaggatgagcctgccctgttcgtggccctgaccttcgagcggcgggaggtcctggactcctccaatatcaaaccaatgaacctgatcggcgtggcaagaggcgaaaacatccccgccgtgatcgccctgaccgaccccgagggctgcccactgagccggtttaaggatagcctgggaaacccaacccacatcctgagaatcggcgagagctataaggagaagcagcggaccatccaggccaagaaggaggtggagcagcggagagccggcggctacagccggaagtacgccagcaaagccaagaatctggcagacgatatggtgagaaacaccgctagagatctgctgtactacgccgtgacccaggatgccatgctgatcttcgccaacctgagccggggcttcggccggcagggcaagcggaccttcatggccgagagacagtacacacggatggaggactggctgaccgccaagctggcctacgagggcctgagcaagacctacctgtccaagacactggcccagtacacctccaagacatgcagcaactgtgggtttaccatcaccagcgccgactacgacagggtgctggagaagctgaagaagacagcaacaggctggatgaccacaattaacggcaaggagctgaaggtggagggccagattacctactacaacagatacaagagacagaacgtagtcaaggacctgtccgtcgagctggatagactgagcgaagaatctgtgaacaacgacatctcctcctggacaaagggcagaagcggagaagctctgagcctcctgaagaaaagattctcccatagacccgtgcaggagaagttcgtgtgcctgaactgcggcttcgagacacacgcagccgagcaagccgccctgaacatcgccagatcctggctgttcctgcggagccaggagtacaagaaataccagacaaacaagacaaccggcaacaccgataagagagccttcgtcgagacctggcagtccttttaccggaagaagcttaaggaggtgtggaaacctgccgtgcggtctggcggatctggcggaggctccaccagccccaagaaaaagagaaaagtctaagctgccttctgcggggcttgccttctggccatgcccttcttctctcccttgcacctgtacctcttggtctttgaataaagcctgagtaggaaggctagcaaaaaaaaaaaaaaaaaaaaaaaaaaaaaaaaaaaaaaaaaaaaaaaaaaaaaaaaaaaaaaaaaaaaaaaaaaaaaaaagcccagccggctccccaacctctaccgaggagggcacctctgagtccgccacccccgagagcggccctggcacctccaccgagcccagcgagggcagcgcacccggcagccctgccggcagccccacctccacagaggagggaaccagcaccgagcccagcgaaggcagcgccccaggcaccagcaccgagcctagtgagcaggagattaaacggatcaacaagatcagaagaagacttgtgaaagacagcaacaccaagaaggccggcaagacaggccccatgaaaaccctgctggttagagtgatgacacccgatctgagagagcggctggaaaacctgagaaagaagcctgaaaatatcccccagcccatcagcaatacatctagagccaacctgaataagctgctgaccgattacaccgaaatgaagaaggcgatcctgcatgtgtactgggaagagttccagaaggaccctgtgggcctgatgagccgggtggcccagcctgccagcaagaagatcgatcagaacaagctgaaacctgagatggacgagaagggcaacctgaccaccgccggctttgcctgctctcagtgtggccagcccctgttcgtgtacaagctggagcaggtgtctgagaagggcaaggcttacaccaactacttcggacggtgcaatgtggccgagcacgaaaagctgatcctgctggcccagctgaagcccgagaaggatagcgacgaagccgtgacatatagcctgggaaagtttgggcagagggccctggatttctacagcattcatgtgaccaaggagtccacccaccccgtgaagcccctggcccagatcgccggaaacagatacgcctccggacctgtgggaaaggccctgagcgacgcatgtatgggcacaatcgcctccttcctgtctaagtaccaggacatcatcatcgaacaccagaaggtggtgaagggcaaccagaagagactggagagcctgcgggagctggccggcaaggaaaacctggaataccctagcgtgaccctgccacctcagcctcacaccaaggagggcgttgatgcctacaacgaagtgatcgcccgggtgcgaatgtgggtgaacctgaacctgtggcagaagctgaagctaagcagagatgatgccaagcctctgctgagactgaagggattcccttcctttcctctggtcgagagacaggccaacgaagtggactggtgggacatggtgtgtaacgtgaagaagctgatcaacgagaaaaaggaggatggcaaggtgttttggcagaatctggctggctacaagagacaggaagccctgagaccatacctgagcagcgaggaagatcggaagaagggaaagaaattcgctcggtaccagctgggcgacctgctgctgcacctggaaaagaagcacggcgaggactggggaaaggtgtacgacgaggcctgggagcggattgacaagaaagtggaaggcctgagcaagcacatcaagctggaagaggaacggagaagcgaggacgcccagagcaaggccgccctgaccgactggctgcgggctaaggccagcttcgtgatcgagggcctgaaggaggccgacaaggacgagttctgcagatgcgagctgaagctgcagaagtggtacggggacctgcggggaaagcccttcgccatcgaagccgagaacagcatcctggacatcagcggcttcagcaagcagtacaactgtgccttcatctggcagaaggacggcgtgaagaagctgaacctgtacctgatcatcaactacttcaagggcggcaagctgcggttcaagaagatcaaacctgaagccttcgaagccaacagattctacaccgtgatcaacaaaaagagcggcgagatcgtgcccatggaggtgaacttcaacttcgacgaccccaacctgatcatcctgcctctggcctttggcaagagacagggcagagaattcatctggaacgacctgctgtccctggaaaccggcagcctgaagctggccaacggaagagtgatcgagaagacactgtacaacagaagaacccggcaggatgagcctgccctgttcgtggccctgaccttcgagcggcgggaggtcctggactcctccaatatcaaaccaatgaacctgatcggcgtggcaagaggcgaaaacatccccgccgtgatcgccctgaccgaccccgagggctgcccactgagccggtttaaggatagcctgggaaacccaacccacatcctgagaatcggcgagagctataaggagaagcagcggaccatccaggccaagaaggaggtggagcagcggagagccggcggctacagccggaagtacgccagcaaagccaagaatctggcagacgatatggtgagaaacaccgctagagatctgctgtactacgccgtgacccaggatgccatgctgatcttcgccaacctgagccggggcttcggccggcagggcaagcggaccttcatggccgagagacagtacacacggatggaggactggctgaccgccaagctggcctacgagggcctgagcaagacctacctgtccaagacactggcccagtacacctccaagacatgcagcaactgtgggtttaccatcaccagcgccgactacgacagggtgctggagaagctgaagaagacagcaacaggctggatgaccacaattaacggcaaggagctgaaggtggagggccagattacctactacaacagatacaagagacagaacgtagtcaaggacctgtccgtcgagctggatagactgagcgaagaatctgtgaacaacgacatctcctcctggacaaagggcagaagcggagaagctctgagcctcctgaagaaaagattctcccatagacccgtgcaggagaagttcgtgtgcctgaactgcggcttcgagacacacgcagccgagcaagccgccctgaacatcgccagatcctggctgttcctgcggagccaggagtacaagaaataccagacaaacaagacaaccggcaacaccgataagagagccttcgtcgagacctggcagtccttttaccggaagaagcttaaggaggtgtggaaacctgccgtgcggtctggcggatctggcggaggctccaccagccccaagaaaaagagaaaagtctaagctgccttctgcggggcttgccttctggccatgcccttcttctctcccttgcacctgtacctcttggtctttgaataaagcctgagtaggaaggctagcaaaaaaaaaaaaaaaaaaaaaaaaaaaaaaaaaaaaaaaaaaaaaaaaaaaaaaaaaaaaaaaaaaaaaaaaaaaaaaaa

SEQ ID NO: 9652 - RNA, 8787 nt, synthetic construct
  source 1..8787: mol_type = other RNA
aggaaataagagagaaaagaagagtaagaagaaatataagagccaccatggcccctaagaagaagcgtaaagtgagccggatgaaccacgaccaggagttcgacccccctaaggtgtaccctcccgtccccgccgagaagagaaagcccatccgggtcctgagcctgttcgatggcatcgccaccggtctgctggtgctgaaggacctgggcatccaggtggataggtacattgcctccgaggtgtgcgaggactccatcaccgtgggaatggtgcgtcatcagggcaagatcatgtacgtgggcgacgtgcggagcgtgacacagaagcatatccaggagtggggccctttcgacctggtgatcggcggcagcccttgcaatgacctgagcatcgtgaacccagcccggaagggcctgtacgagggaaccggcagactgttcttcgagttttacagactgctgcacgacgcccggcctaaggaaggcgacgaccggcccttcttttggctgttcgagaatgtggtggccatgggagtcagcgacaagcgggatattagccggttcctggagagcaaccccgtgatgatcgatgccaaggaagtgagcgccgcccaccgggccagatacttctggggcaatctgcctggcatgaacagacccctggccagcaccgtgaacgacaagctggagctgcaggagtgcctggagcacggccggatcgccaagttcagcaaggtgagaaccatcaccacccgaagcaacagcatcaaacaaggcaaggaccagcactttcctgtgttcatgaacgagaaggaggacatcctgtggtgtaccgagatggagagagtgttcgggttcccagtccactacacagatgtcagcaacatgtctagactggccagacagagactgctgggaagaagctggtccgtccctgtgatcagacacctgttcgcccctctgaaggagtacttcgcctgcgtgagcagcggcaacagcaacgccaacagccggggccccagcttctctagcggcctggtgccactgtccctgagagggagccacatgggccccatggagatctacaaaaccgtgagcgcctggaagcggcagcctgtgcgcgtgctgagcctgtttcggaatatcgataaagtcctgaaaagcctgggattcctggagagcggctctggctccggcggtggcaccctgaagtacgtggaggatgtgacaaacgtggtcagacgggatgtggagaagtggggccccttcgatctggtgtacggcagcacccaacccctgggcagctcttgtgaccggtgccctggctggtacatgtttcagttccaccggatcctgcagtacgccctgccgagacaggagtcccagcggccattcttttggattttcatggacaacttgctgctgaccgaggatgaccaggaaactaccactcggttcctgcagaccgaagccgtgaccctgcaggacgtgagaggccgggactaccagaacgccatgcgggtgtggtccaacatccctggactgaaaagcaagcacgcacctctgacccctaaagaagaggagtacctgcaggcccaggtgcggagcagaagcaagctggacgcccctaaggtggatctgctggtgaagaattgcctcctgcccctgagagagtacttcaagtatttcagccagaatagtctgcccctgggaggcagcggcggcggcatggagctgctgaccttcagggacgtggccatcgagttcagccccgaggagtggaagtgcctggaccccgaccagcagaacctgtacagggacgtgatgctggagaactacaggaacctggtgagcctgggcgtggccatcagcaaccccgacctggtgacctgcctggagcagaggaaggagccctacaacgtgaagatccacaagatcgtggccaggccccccgccgtgtgcagccacagcggcggcccaagcagcggcgcccctcctcccagcggcggcaggcggcccaagcagcggcgcccctcctcccagcggcggcagcccagccggctccccaacctctaccgaggagggcacctctgagtccgccacccccgagagcggccctggcacctccaccgagcccagcgagggcagcgcacccggcagccctgccggcagccccacctccacagaggagggaaccagcaccgagcccagcgaaggcagcgccccaggcaccagcaccgagcctagtgagcaggagattaaacggatcaacaagatcagaagaagacttgtgaaagacagcaacaccaagaaggccggcaagacaggccccatgaaaaccctgctggttagagtgatgacacccgatctgagagagcggctggaaaacctgagaaagaagcctgaaaatatcccccagcccatcagcaatacatctagagccaacctgaataagctgctgaccgattacaccgaaatgaagaaggcgatcctgcatgtgtactgggaagagttccagaaggaccctgtgggcctgatgagccgggtggcccagcctgccagcaagaagatcgatcagaacaagctgaaacctgagatggacgagaagggcaacctgaccaccgccggctttgcctgctctcagtgtggccagcccctgttcgtgtacaagctggagcaggtgtctgagaagggcaaggcttacaccaactacttcggacggtgcaatgtggccgagcacgaaaagctgatcctgctggcccagctgaagcccgagaaggatagcgacgaagccgtgacatatagcctgggaaagtttgggcagagggccctggatttctacagcattcatgtgaccaaggagtccacccaccccgtgaagcccctggcccagatcgccggaaacagatacgcctccggacctgtgggaaaggccctgagcgacgcatgtatgggcacaatcgcctccttcctgtctaagtaccaggacatcatcatcgaacaccagaaggtggtgaagggcaaccagaagagactggagagcctgcgggagctggccggcaaggaaaacctggaataccctagcgtgaccctgccacctcagcctcacaccaaggagggcgttgatgcctacaacgaagtgatcgcccgggtgcgaatgtgggtgaacctgaacctgtggcagaagctgaagctaagcagagatgatgccaagcctctgctgagactgaagggattcccttcctttcctctggtcgagagacaggccaacgaagtggactggtgggacatggtgtgtaacgtgaagaagctgatcaacgagaaaaaggaggatggcaaggtgttttggcagaatctggctggctacaagagacaggaagccctgagaccatacctgagcagcgaggaagatcggaagaagggaaagaaattcgctcggtaccagctgggcgacctgctgctgcacctggaaaagaagcacggcgaggactggggaaaggtgtacgacgaggcctgggagcggattgacaagaaagtggaaggcctgagcaagcacatcaagctggaagaggaacggagaagcgaggacgcccagagcaaggccgccctgaccgactggctgcgggctaaggccagcttcgtgatcgagggcctgaaggaggccgacaaggacgagttctgcagatgcgagctgaagctgcagaagtggtacggggacctgcggggaaagcccttcgccatcgaagccgagaacagcatcctggacatcagcggcttcagcaagcagtacaactgtgccttcatctggcagaaggacggcgtgaagaagctgaacctgtacctgatcatcaactacttcaagggcggcaagctgcggttcaagaagatcaaacctgaagccttcgaagccaacagattctacaccgtgatcaacaaaaagagcggcgagatcgtgcccatggaggtgaacttcaacttcgacgaccccaacctgatcatcctgcctctggcctttggcaagagacagggcagagaattcatctggaacgacctgctgtccctggaaaccggcagcctgaagctggccaacggaagagtgatcgagaagacactgtacaacagaagaacccggcaggatgagcctgccctgttcgtggccctgaccttcgagcggcgggaggtcctggactcctccaatatcaaaccaatgaacctgatcggcgtggcaagaggcgaaaacatccccgccgtgatcgccctgaccgaccccgagggctgcccactgagccggtttaaggatagcctgggaaacccaacccacatcctgagaatcggcgagagctataaggagaagcagcggaccatccaggccaagaaggaggtggagcagcggagagccggcggctacagccggaagtacgccagcaaagccaagaatctggcagacgatatggtgagaaacaccgctagagatctgctgtactacgccgtgacccaggatgccatgctgatcttcgccaacctgagccggggcttcggccggcagggcaagcggaccttcatggccgagagacagtacacacggatggaggactggctgaccgccaagctggcctacgagggcctgagcaagacctacctgtccaagacactggcccagtacacctccaagacatgcagcaactgtgggtttaccatcaccagcgccgactacgacagggtgctggagaagctgaagaagacagcaacaggctggatgaccacaattaacggcaaggagctgaaggtggagggccagattacctactacaacagatacaagagacagaacgtagtcaaggacctgtccgtcgagctggatagactgagcgaagaatctgtgaacaacgacatctcctcctggacaaagggcagaagcggagaagctctgagcctcctgaagaaaagattctcccatagacccgtgcaggagaagttcgtgtgcctgaactgcggcttcgagacacacgcagccgagcaagccgccctgaacatcgccagatcctggctgttcctgcggagccaggagtacaagaaataccagacaaacaagacaaccggcaacaccgataagagagccttcgtcgagacctggcagtccttttaccggaagaagcttaaggaggtgtggaaacctgccgtgcggtctggcggatctggcggaggctccaccagccccaagaaaaagagaaaagtctaagctgccttctgcggggcttgccttctggccatgcccttcttctctcccttgcacctgtacctcttggtctttgaataaagcctgagtaggaaggctagcaaaaaaaaaaaaaaaaaaaaaaaaaaaaaaaaaaaaaaaaaaaaaaaaaaaaaaaaaaaaaaaaaaaaaaaaaaaaaaaagcccagccggctccccaacctctaccgaggagggcacctctgagtccgccacccccgagagcggccctggcacctccaccgagcccagcgagggcagcgcacccggcagccctgccggcagccccacctccacagaggagggaaccagcaccgagcccagcgaaggcagcgccccaggcaccagcaccgagcctagtgagcaggagattaaacggatcaacaagatcagaagaagacttgtgaaagacagcaacaccaagaaggccggcaagacaggccccatgaaaaccctgctggttagagtgatgacacccgatctgagagagcggctggaaaacctgagaaagaagcctgaaaatatcccccagcccatcagcaatacatctagagccaacctgaataagctgctgaccgattacaccgaaatgaagaaggcgatcctgcatgtgtactgggaagagttccagaaggaccctgtgggcctgatgagccgggtggcccagcctgccagcaagaagatcgatcagaacaagctgaaacctgagatggacgagaagggcaacctgaccaccgccggctttgcctgctctcagtgtggccagcccctgttcgtgtacaagctggagcaggtgtctgagaagggcaaggcttacaccaactacttcggacggtgcaatgtggccgagcacgaaaagctgatcctgctggcccagctgaagcccgagaaggatagcgacgaagccgtgacatatagcctgggaaagtttgggcagagggccctggatttctacagcattcatgtgaccaaggagtccacccaccccgtgaagcccctggcccagatcgccggaaacagatacgcctccggacctgtgggaaaggccctgagcgacgcatgtatgggcacaatcgcctccttcctgtctaagtaccaggacatcatcatcgaacaccagaaggtggtgaagggcaaccagaagagactggagagcctgcgggagctggccggcaaggaaaacctggaataccctagcgtgaccctgccacctcagcctcacaccaaggagggcgttgatgcctacaacgaagtgatcgcccgggtgcgaatgtgggtgaacctgaacctgtggcagaagctgaagctaagcagagatgatgccaagcctctgctgagactgaagggattcccttcctttcctctggtcgagagacaggccaacgaagtggactggtgggacatggtgtgtaacgtgaagaagctgatcaacgagaaaaaggaggatggcaaggtgttttggcagaatctggctggctacaagagacaggaagccctgagaccatacctgagcagcgaggaagatcggaagaagggaaagaaattcgctcggtaccagctgggcgacctgctgctgcacctggaaaagaagcacggcgaggactggggaaaggtgtacgacgaggcctgggagcggattgacaagaaagtggaaggcctgagcaagcacatcaagctggaagaggaacggagaagcgaggacgcccagagcaaggccgccctgaccgactggctgcgggctaaggccagcttcgtgatcgagggcctgaaggaggccgacaaggacgagttctgcagatgcgagctgaagctgcagaagtggtacggggacctgcggggaaagcccttcgccatcgaagccgagaacagcatcctggacatcagcggcttcagcaagcagtacaactgtgccttcatctggcagaaggacggcgtgaagaagctgaacctgtacctgatcatcaactacttcaagggcggcaagctgcggttcaagaagatcaaacctgaagccttcgaagccaacagattctacaccgtgatcaacaaaaagagcggcgagatcgtgcccatggaggtgaacttcaacttcgacgaccccaacctgatcatcctgcctctggcctttggcaagagacagggcagagaattcatctggaacgacctgctgtccctggaaaccggcagcctgaagctggccaacggaagagtgatcgagaagacactgtacaacagaagaacccggcaggatgagcctgccctgttcgtggccctgaccttcgagcggcgggaggtcctggactcctccaatatcaaaccaatgaacctgatcggcgtggcaagaggcgaaaacatccccgccgtgatcgccctgaccgaccccgagggctgcccactgagccggtttaaggatagcctgggaaacccaacccacatcctgagaatcggcgagagctataaggagaagcagcggaccatccaggccaagaaggaggtggagcagcggagagccggcggctacagccggaagtacgccagcaaagccaagaatctggcagacgatatggtgagaaacaccgctagagatctgctgtactacgccgtgacccaggatgccatgctgatcttcgccaacctgagccggggcttcggccggcagggcaagcggaccttcatggccgagagacagtacacacggatggaggactggctgaccgccaagctggcctacgagggcctgagcaagacctacctgtccaagacactggcccagtacacctccaagacatgcagcaactgtgggtttaccatcaccagcgccgactacgacagggtgctggagaagctgaagaagacagcaacaggctggatgaccacaattaacggcaaggagctgaaggtggagggccagattacctactacaacagatacaagagacagaacgtagtcaaggacctgtccgtcgagctggatagactgagcgaagaatctgtgaacaacgacatctcctcctggacaaagggcagaagcggagaagctctgagcctcctgaagaaaagattctcccatagacccgtgcaggagaagttcgtgtgcctgaactgcggcttcgagacacacgcagccgagcaagccgccctgaacatcgccagatcctggctgttcctgcggagccaggagtacaagaaataccagacaaacaagacaaccggcaacaccgataagagagccttcgtcgagacctggcagtccttttaccggaagaagcttaaggaggtgtggaaacctgccgtgcggtctggcggatctggcggaggctccaccagccccaagaaaaagagaaaagtctaagctgccttctgcggggcttgccttctggccatgcccttcttctctcccttgcacctgtacctcttggtctttgaataaagcctgagtaggaaggctagcaaaaaaaaaaaaaaaaaaaaaaaaaaaaaaaaaaaaaaaaaaaaaaaaaaaaaaaaaaaaaaaaaaaaaaaaaaaaaaaa

SEQ ID NO: 9653 - RNA, 8787 nt, synthetic construct
  source 1..8787: mol_type = other RNA
aggaaataagagagaaaagaagagtaagaagaaatataagagccaccatggcccctaagaagaagcgtaaagtgagccggatgaaccacgaccaggagttcgacccccctaaggtgtaccctcccgtccccgccgagaagagaaagcccatccgggtcctgagcctgttcgatggcatcgccaccggtctgctggtgctgaaggacctgggcatccaggtggataggtacattgcctccgaggtgtgcgaggactccatcaccgtgggaatggtgcgtcatcagggcaagatcatgtacgtgggcgacgtgcggagcgtgacacagaagcatatccaggagtggggccctttcgacctggtgatcggcggcagcccttgcaatgacctgagcatcgtgaacccagcccggaagggcctgtacgagggaaccggcagactgttcttcgagttttacagactgctgcacgacgcccggcctaaggaaggcgacgaccggcccttcttttggctgttcgagaatgtggtggccatgggagtcagcgacaagcgggatattagccggttcctggagagcaaccccgtgatgatcgatgccaaggaagtgagcgccgcccaccgggccagatacttctggggcaatctgcctggcatgaacagacccctggccagcaccgtgaacgacaagctggagctgcaggagtgcctggagcacggccggatcgccaagttcagcaaggtgagaaccatcaccacccgaagcaacagcatcaaacaaggcaaggaccagcactttcctgtgttcatgaacgagaaggaggacatcctgtggtgtaccgagatggagagagtgttcgggttcccagtccactacacagatgtcagcaacatgtctagactggccagacagagactgctgggaagaagctggtccgtccctgtgatcagacacctgttcgcccctctgaaggagtacttcgcctgcgtgagcagcggcaacagcaacgccaacagccggggccccagcttctctagcggcctggtgccactgtccctgagagggagccacatgggccccatggagatctacaaaaccgtgagcgcctggaagcggcagcctgtgcgcgtgctgagcctgtttcggaatatcgataaagtcctgaaaagcctgggattcctggagagcggctctggctccggcggtggcaccctgaagtacgtggaggatgtgacaaacgtggtcagacgggatgtggagaagtggggccccttcgatctggtgtacggcagcacccaacccctgggcagctcttgtgaccggtgccctggctggtacatgtttcagttccaccggatcctgcagtacgccctgccgagacaggagtcccagcggccattcttttggattttcatggacaacttgctgctgaccgaggatgaccaggaaactaccactcggttcctgcagaccgaagccgtgaccctgcaggacgtgagaggccgggactaccagaacgccatgcgggtgtggtccaacatccctggactgaaaagcaagcacgcacctctgacccctaaagaagaggagtacctgcaggcccaggtgcggagcagaagcaagctggacgcccctaaggtggatctgctggtgaagaattgcctcctgcccctgagagagtacttcaagtatttcagccagaatagtctgcccctgggaggcagcggcggcggctggaaggagagcctgagcttcgaggacgtggccctgtacttcaccagggaggagtggagcaggctggactgggcccagaaggacctgtacagggacgtgatgctggagaactacaggaacatgatcgtgctgggcttccagttccccaagcccgaggtgatctgccagctggagcagtgggaggagccctggatcctggacctgcccagggccggcaccaggaaggccagcggcagcgcctgcggcggcccaagcagcggcgcccctcctcccagcggcggcaggcggcccaagcagcggcgcccctcctcccagcggcggcagcccagccggctccccaacctctaccgaggagggcacctctgagtccgccacccccgagagcggccctggcacctccaccgagcccagcgagggcagcgcacccggcagccctgccggcagccccacctccacagaggagggaaccagcaccgagcccagcgaaggcagcgccccaggcaccagcaccgagcctagtgagcaggagattaaacggatcaacaagatcagaagaagacttgtgaaagacagcaacaccaagaaggccggcaagacaggccccatgaaaaccctgctggttagagtgatgacacccgatctgagagagcggctggaaaacctgagaaagaagcctgaaaatatcccccagcccatcagcaatacatctagagccaacctgaataagctgctgaccgattacaccgaaatgaagaaggcgatcctgcatgtgtactgggaagagttccagaaggaccctgtgggcctgatgagccgggtggcccagcctgccagcaagaagatcgatcagaacaagctgaaacctgagatggacgagaagggcaacctgaccaccgccggctttgcctgctctcagtgtggccagcccctgttcgtgtacaagctggagcaggtgtctgagaagggcaaggcttacaccaactacttcggacggtgcaatgtggccgagcacgaaaagctgatcctgctggcccagctgaagcccgagaaggatagcgacgaagccgtgacatatagcctgggaaagtttgggcagagggccctggatttctacagcattcatgtgaccaaggagtccacccaccccgtgaagcccctggcccagatcgccggaaacagatacgcctccggacctgtgggaaaggccctgagcgacgcatgtatgggcacaatcgcctccttcctgtctaagtaccaggacatcatcatcgaacaccagaaggtggtgaagggcaaccagaagagactggagagcctgcgggagctggccggcaaggaaaacctggaataccctagcgtgaccctgccacctcagcctcacaccaaggagggcgttgatgcctacaacgaagtgatcgcccgggtgcgaatgtgggtgaacctgaacctgtggcagaagctgaagctaagcagagatgatgccaagcctctgctgagactgaagggattcccttcctttcctctggtcgagagacaggccaacgaagtggactggtgggacatggtgtgtaacgtgaagaagctgatcaacgagaaaaaggaggatggcaaggtgttttggcagaatctggctggctacaagagacaggaagccctgagaccatacctgagcagcgaggaagatcggaagaagggaaagaaattcgctcggtaccagctgggcgacctgctgctgcacctggaaaagaagcacggcgaggactggggaaaggtgtacgacgaggcctgggagcggattgacaagaaagtggaaggcctgagcaagcacatcaagctggaagaggaacggagaagcgaggacgcccagagcaaggccgccctgaccgactggctgcgggctaaggccagcttcgtgatcgagggcctgaaggaggccgacaaggacgagttctgcagatgcgagctgaagctgcagaagtggtacggggacctgcggggaaagcccttcgccatcgaagccgagaacagcatcctggacatcagcggcttcagcaagcagtacaactgtgccttcatctggcagaaggacggcgtgaagaagctgaacctgtacctgatcatcaactacttcaagggcggcaagctgcggttcaagaagatcaaacctgaagccttcgaagccaacagattctacaccgtgatcaacaaaaagagcggcgagatcgtgcccatggaggtgaacttcaacttcgacgaccccaacctgatcatcctgcctctggcctttggcaagagacagggcagagaattcatctggaacgacctgctgtccctggaaaccggcagcctgaagctggccaacggaagagtgatcgagaagacactgtacaacagaagaacccggcaggatgagcctgccctgttcgtggccctgaccttcgagcggcgggaggtcctggactcctccaatatcaaaccaatgaacctgatcggcgtggcaagaggcgaaaacatccccgccgtgatcgccctgaccgaccccgagggctgcccactgagccggtttaaggatagcctgggaaacccaacccacatcctgagaatcggcgagagctataaggagaagcagcggaccatccaggccaagaaggaggtggagcagcggagagccggcggctacagccggaagtacgccagcaaagccaagaatctggcagacgatatggtgagaaacaccgctagagatctgctgtactacgccgtgacccaggatgccatgctgatcttcgccaacctgagccggggcttcggccggcagggcaagcggaccttcatggccgagagacagtacacacggatggaggactggctgaccgccaagctggcctacgagggcctgagcaagacctacctgtccaagacactggcccagtacacctccaagacatgcagcaactgtgggtttaccatcaccagcgccgactacgacagggtgctggagaagctgaagaagacagcaacaggctggatgaccacaattaacggcaaggagctgaaggtggagggccagattacctactacaacagatacaagagacagaacgtagtcaaggacctgtccgtcgagctggatagactgagcgaagaatctgtgaacaacgacatctcctcctggacaaagggcagaagcggagaagctctgagcctcctgaagaaaagattctcccatagacccgtgcaggagaagttcgtgtgcctgaactgcggcttcgagacacacgcagccgagcaagccgccctgaacatcgccagatcctggctgttcctgcggagccaggagtacaagaaataccagacaaacaagacaaccggcaacaccgataagagagccttcgtcgagacctggcagtccttttaccggaagaagcttaaggaggtgtggaaacctgccgtgcggtctggcggatctggcggaggctccaccagccccaagaaaaagagaaaagtctaagctgccttctgcggggcttgccttctggccatgcccttcttctctcccttgcacctgtacctcttggtctttgaataaagcctgagtaggaaggctagcaaaaaaaaaaaaaaaaaaaaaaaaaaaaaaaaaaaaaaaaaaaaaaaaaaaaaaaaaaaaaaaaaaaaaaaaaaaaaaaagcccagccggctccccaacctctaccgaggagggcacctctgagtccgccacccccgagagcggccctggcacctccaccgagcccagcgagggcagcgcacccggcagccctgccggcagccccacctccacagaggagggaaccagcaccgagcccagcgaaggcagcgccccaggcaccagcaccgagcctagtgagcaggagattaaacggatcaacaagatcagaagaagacttgtgaaagacagcaacaccaagaaggccggcaagacaggccccatgaaaaccctgctggttagagtgatgacacccgatctgagagagcggctggaaaacctgagaaagaagcctgaaaatatcccccagcccatcagcaatacatctagagccaacctgaataagctgctgaccgattacaccgaaatgaagaaggcgatcctgcatgtgtactgggaagagttccagaaggaccctgtgggcctgatgagccgggtggcccagcctgccagcaagaagatcgatcagaacaagctgaaacctgagatggacgagaagggcaacctgaccaccgccggctttgcctgctctcagtgtggccagcccctgttcgtgtacaagctggagcaggtgtctgagaagggcaaggcttacaccaactacttcggacggtgcaatgtggccgagcacgaaaagctgatcctgctggcccagctgaagcccgagaaggatagcgacgaagccgtgacatatagcctgggaaagtttgggcagagggccctggatttctacagcattcatgtgaccaaggagtccacccaccccgtgaagcccctggcccagatcgccggaaacagatacgcctccggacctgtgggaaaggccctgagcgacgcatgtatgggcacaatcgcctccttcctgtctaagtaccaggacatcatcatcgaacaccagaaggtggtgaagggcaaccagaagagactggagagcctgcgggagctggccggcaaggaaaacctggaataccctagcgtgaccctgccacctcagcctcacaccaaggagggcgttgatgcctacaacgaagtgatcgcccgggtgcgaatgtgggtgaacctgaacctgtggcagaagctgaagctaagcagagatgatgccaagcctctgctgagactgaagggattcccttcctttcctctggtcgagagacaggccaacgaagtggactggtgggacatggtgtgtaacgtgaagaagctgatcaacgagaaaaaggaggatggcaaggtgttttggcagaatctggctggctacaagagacaggaagccctgagaccatacctgagcagcgaggaagatcggaagaagggaaagaaattcgctcggtaccagctgggcgacctgctgctgcacctggaaaagaagcacggcgaggactggggaaaggtgtacgacgaggcctgggagcggattgacaagaaagtggaaggcctgagcaagcacatcaagctggaagaggaacggagaagcgaggacgcccagagcaaggccgccctgaccgactggctgcgggctaaggccagcttcgtgatcgagggcctgaaggaggccgacaaggacgagttctgcagatgcgagctgaagctgcagaagtggtacggggacctgcggggaaagcccttcgccatcgaagccgagaacagcatcctggacatcagcggcttcagcaagcagtacaactgtgccttcatctggcagaaggacggcgtgaagaagctgaacctgtacctgatcatcaactacttcaagggcggcaagctgcggttcaagaagatcaaacctgaagccttcgaagccaacagattctacaccgtgatcaacaaaaagagcggcgagatcgtgcccatggaggtgaacttcaacttcgacgaccccaacctgatcatcctgcctctggcctttggcaagagacagggcagagaattcatctggaacgacctgctgtccctggaaaccggcagcctgaagctggccaacggaagagtgatcgagaagacactgtacaacagaagaacccggcaggatgagcctgccctgttcgtggccctgaccttcgagcggcgggaggtcctggactcctccaatatcaaaccaatgaacctgatcggcgtggcaagaggcgaaaacatccccgccgtgatcgccctgaccgaccccgagggctgcccactgagccggtttaaggatagcctgggaaacccaacccacatcctgagaatcggcgagagctataaggagaagcagcggaccatccaggccaagaaggaggtggagcagcggagagccggcggctacagccggaagtacgccagcaaagccaagaatctggcagacgatatggtgagaaacaccgctagagatctgctgtactacgccgtgacccaggatgccatgctgatcttcgccaacctgagccggggcttcggccggcagggcaagcggaccttcatggccgagagacagtacacacggatggaggactggctgaccgccaagctggcctacgagggcctgagcaagacctacctgtccaagacactggcccagtacacctccaagacatgcagcaactgtgggtttaccatcaccagcgccgactacgacagggtgctggagaagctgaagaagacagcaacaggctggatgaccacaattaacggcaaggagctgaaggtggagggccagattacctactacaacagatacaagagacagaacgtagtcaaggacctgtccgtcgagctggatagactgagcgaagaatctgtgaacaacgacatctcctcctggacaaagggcagaagcggagaagctctgagcctcctgaagaaaagattctcccatagacccgtgcaggagaagttcgtgtgcctgaactgcggcttcgagacacacgcagccgagcaagccgccctgaacatcgccagatcctggctgttcctgcggagccaggagtacaagaaataccagacaaacaagacaaccggcaacaccgataagagagccttcgtcgagacctggcagtccttttaccggaagaagcttaaggaggtgtggaaacctgccgtgcggtctggcggatctggcggaggctccaccagccccaagaaaaagagaaaagtctaagctgccttctgcggggcttgccttctggccatgcccttcttctctcccttgcacctgtacctcttggtctttgaataaagcctgagtaggaaggctagcaaaaaaaaaaaaaaaaaaaaaaaaaaaaaaaaaaaaaaaaaaaaaaaaaaaaaaaaaaaaaaaaaaaaaaaaaaaaaaaa

SEQ ID NO: 9654 - RNA, 8787 nt, synthetic construct
  source 1..8787: mol_type = other RNA
aggaaataagagagaaaagaagagtaagaagaaatataagagccaccatggcccctaagaagaagcgtaaagtgagccggatgaaccacgaccaggagttcgacccccctaaggtgtaccctcccgtccccgccgagaagagaaagcccatccgggtcctgagcctgttcgatggcatcgccaccggtctgctggtgctgaaggacctgggcatccaggtggataggtacattgcctccgaggtgtgcgaggactccatcaccgtgggaatggtgcgtcatcagggcaagatcatgtacgtgggcgacgtgcggagcgtgacacagaagcatatccaggagtggggccctttcgacctggtgatcggcggcagcccttgcaatgacctgagcatcgtgaacccagcccggaagggcctgtacgagggaaccggcagactgttcttcgagttttacagactgctgcacgacgcccggcctaaggaaggcgacgaccggcccttcttttggctgttcgagaatgtggtggccatgggagtcagcgacaagcgggatattagccggttcctggagagcaaccccgtgatgatcgatgccaaggaagtgagcgccgcccaccgggccagatacttctggggcaatctgcctggcatgaacagacccctggccagcaccgtgaacgacaagctggagctgcaggagtgcctggagcacggccggatcgccaagttcagcaaggtgagaaccatcaccacccgaagcaacagcatcaaacaaggcaaggaccagcactttcctgtgttcatgaacgagaaggaggacatcctgtggtgtaccgagatggagagagtgttcgggttcccagtccactacacagatgtcagcaacatgtctagactggccagacagagactgctgggaagaagctggtccgtccctgtgatcagacacctgttcgcccctctgaaggagtacttcgcctgcgtgagcagcggcaacagcaacgccaacagccggggccccagcttctctagcggcctggtgccactgtccctgagagggagccacatgggccccatggagatctacaaaaccgtgagcgcctggaagcggcagcctgtgcgcgtgctgagcctgtttcggaatatcgataaagtcctgaaaagcctgggattcctggagagcggctctggctccggcggtggcaccctgaagtacgtggaggatgtgacaaacgtggtcagacgggatgtggagaagtggggccccttcgatctggtgtacggcagcacccaacccctgggcagctcttgtgaccggtgccctggctggtacatgtttcagttccaccggatcctgcagtacgccctgccgagacaggagtcccagcggccattcttttggattttcatggacaacttgctgctgaccgaggatgaccaggaaactaccactcggttcctgcagaccgaagccgtgaccctgcaggacgtgagaggccgggactaccagaacgccatgcgggtgtggtccaacatccctggactgaaaagcaagcacgcacctctgacccctaaagaagaggagtacctgcaggcccaggtgcggagcagaagcaagctggacgcccctaaggtggatctgctggtgaagaattgcctcctgcccctgagagagtacttcaagtatttcagccagaatagtctgcccctgggaggcagcggcggcggcgcccccctgcccctgaccttcgaggacgtggccatctacttcagcgagcaggagtggcagcacctggagacctggcagaaggagctgtacaagcaggtgatgaggaccaactacgagaccctgatcagcctggacaacggcctgcccaagcccgagctgatcagctggatggagctgggcagggagaacttcggcagctggggcgagggccagaaggtggacaggggcatcaggtgcagcgtgggcggcccaagcagcggcgcccctcctcccagcggcggcaggcggcccaagcagcggcgcccctcctcccagcggcggcagcccagccggctccccaacctctaccgaggagggcacctctgagtccgccacccccgagagcggccctggcacctccaccgagcccagcgagggcagcgcacccggcagccctgccggcagccccacctccacagaggagggaaccagcaccgagcccagcgaaggcagcgccccaggcaccagcaccgagcctagtgagcaggagattaaacggatcaacaagatcagaagaagacttgtgaaagacagcaacaccaagaaggccggcaagacaggccccatgaaaaccctgctggttagagtgatgacacccgatctgagagagcggctggaaaacctgagaaagaagcctgaaaatatcccccagcccatcagcaatacatctagagccaacctgaataagctgctgaccgattacaccgaaatgaagaaggcgatcctgcatgtgtactgggaagagttccagaaggaccctgtgggcctgatgagccgggtggcccagcctgccagcaagaagatcgatcagaacaagctgaaacctgagatggacgagaagggcaacctgaccaccgccggctttgcctgctctcagtgtggccagcccctgttcgtgtacaagctggagcaggtgtctgagaagggcaaggcttacaccaactacttcggacggtgcaatgtggccgagcacgaaaagctgatcctgctggcccagctgaagcccgagaaggatagcgacgaagccgtgacatatagcctgggaaagtttgggcagagggccctggatttctacagcattcatgtgaccaaggagtccacccaccccgtgaagcccctggcccagatcgccggaaacagatacgcctccggacctgtgggaaaggccctgagcgacgcatgtatgggcacaatcgcctccttcctgtctaagtaccaggacatcatcatcgaacaccagaaggtggtgaagggcaaccagaagagactggagagcctgcgggagctggccggcaaggaaaacctggaataccctagcgtgaccctgccacctcagcctcacaccaaggagggcgttgatgcctacaacgaagtgatcgcccgggtgcgaatgtgggtgaacctgaacctgtggcagaagctgaagctaagcagagatgatgccaagcctctgctgagactgaagggattcccttcctttcctctggtcgagagacaggccaacgaagtggactggtgggacatggtgtgtaacgtgaagaagctgatcaacgagaaaaaggaggatggcaaggtgttttggcagaatctggctggctacaagagacaggaagccctgagaccatacctgagcagcgaggaagatcggaagaagggaaagaaattcgctcggtaccagctgggcgacctgctgctgcacctggaaaagaagcacggcgaggactggggaaaggtgtacgacgaggcctgggagcggattgacaagaaagtggaaggcctgagcaagcacatcaagctggaagaggaacggagaagcgaggacgcccagagcaaggccgccctgaccgactggctgcgggctaaggccagcttcgtgatcgagggcctgaaggaggccgacaaggacgagttctgcagatgcgagctgaagctgcagaagtggtacggggacctgcggggaaagcccttcgccatcgaagccgagaacagcatcctggacatcagcggcttcagcaagcagtacaactgtgccttcatctggcagaaggacggcgtgaagaagctgaacctgtacctgatcatcaactacttcaagggcggcaagctgcggttcaagaagatcaaacctgaagccttcgaagccaacagattctacaccgtgatcaacaaaaagagcggcgagatcgtgcccatggaggtgaacttcaacttcgacgaccccaacctgatcatcctgcctctggcctttggcaagagacagggcagagaattcatctggaacgacctgctgtccctggaaaccggcagcctgaagctggccaacggaagagtgatcgagaagacactgtacaacagaagaacccggcaggatgagcctgccctgttcgtggccctgaccttcgagcggcgggaggtcctggactcctccaatatcaaaccaatgaacctgatcggcgtggcaagaggcgaaaacatccccgccgtgatcgccctgaccgaccccgagggctgcccactgagccggtttaaggatagcctgggaaacccaacccacatcctgagaatcggcgagagctataaggagaagcagcggaccatccaggccaagaaggaggtggagcagcggagagccggcggctacagccggaagtacgccagcaaagccaagaatctggcagacgatatggtgagaaacaccgctagagatctgctgtactacgccgtgacccaggatgccatgctgatcttcgccaacctgagccggggcttcggccggcagggcaagcggaccttcatggccgagagacagtacacacggatggaggactggctgaccgccaagctggcctacgagggcctgagcaagacctacctgtccaagacactggcccagtacacctccaagacatgcagcaactgtgggtttaccatcaccagcgccgactacgacagggtgctggagaagctgaagaagacagcaacaggctggatgaccacaattaacggcaaggagctgaaggtggagggccagattacctactacaacagatacaagagacagaacgtagtcaaggacctgtccgtcgagctggatagactgagcgaagaatctgtgaacaacgacatctcctcctggacaaagggcagaagcggagaagctctgagcctcctgaagaaaagattctcccatagacccgtgcaggagaagttcgtgtgcctgaactgcggcttcgagacacacgcagccgagcaagccgccctgaacatcgccagatcctggctgttcctgcggagccaggagtacaagaaataccagacaaacaagacaaccggcaacaccgataagagagccttcgtcgagacctggcagtccttttaccggaagaagcttaaggaggtgtggaaacctgccgtgcggtctggcggatctggcggaggctccaccagccccaagaaaaagagaaaagtctaagctgccttctgcggggcttgccttctggccatgcccttcttctctcccttgcacctgtacctcttggtctttgaataaagcctgagtaggaaggctagcaaaaaaaaaaaaaaaaaaaaaaaaaaaaaaaaaaaaaaaaaaaaaaaaaaaaaaaaaaaaaaaaaaaaaaaaaaaaaaaagcccagccggctccccaacctctaccgaggagggcacctctgagtccgccacccccgagagcggccctggcacctccaccgagcccagcgagggcagcgcacccggcagccctgccggcagccccacctccacagaggagggaaccagcaccgagcccagcgaaggcagcgccccaggcaccagcaccgagcctagtgagcaggagattaaacggatcaacaagatcagaagaagacttgtgaaagacagcaacaccaagaaggccggcaagacaggccccatgaaaaccctgctggttagagtgatgacacccgatctgagagagcggctggaaaacctgagaaagaagcctgaaaatatcccccagcccatcagcaatacatctagagccaacctgaataagctgctgaccgattacaccgaaatgaagaaggcgatcctgcatgtgtactgggaagagttccagaaggaccctgtgggcctgatgagccgggtggcccagcctgccagcaagaagatcgatcagaacaagctgaaacctgagatggacgagaagggcaacctgaccaccgccggctttgcctgctctcagtgtggccagcccctgttcgtgtacaagctggagcaggtgtctgagaagggcaaggcttacaccaactacttcggacggtgcaatgtggccgagcacgaaaagctgatcctgctggcccagctgaagcccgagaaggatagcgacgaagccgtgacatatagcctgggaaagtttgggcagagggccctggatttctacagcattcatgtgaccaaggagtccacccaccccgtgaagcccctggcccagatcgccggaaacagatacgcctccggacctgtgggaaaggccctgagcgacgcatgtatgggcacaatcgcctccttcctgtctaagtaccaggacatcatcatcgaacaccagaaggtggtgaagggcaaccagaagagactggagagcctgcgggagctggccggcaaggaaaacctggaataccctagcgtgaccctgccacctcagcctcacaccaaggagggcgttgatgcctacaacgaagtgatcgcccgggtgcgaatgtgggtgaacctgaacctgtggcagaagctgaagctaagcagagatgatgccaagcctctgctgagactgaagggattcccttcctttcctctggtcgagagacaggccaacgaagtggactggtgggacatggtgtgtaacgtgaagaagctgatcaacgagaaaaaggaggatggcaaggtgttttggcagaatctggctggctacaagagacaggaagccctgagaccatacctgagcagcgaggaagatcggaagaagggaaagaaattcgctcggtaccagctgggcgacctgctgctgcacctggaaaagaagcacggcgaggactggggaaaggtgtacgacgaggcctgggagcggattgacaagaaagtggaaggcctgagcaagcacatcaagctggaagaggaacggagaagcgaggacgcccagagcaaggccgccctgaccgactggctgcgggctaaggccagcttcgtgatcgagggcctgaaggaggccgacaaggacgagttctgcagatgcgagctgaagctgcagaagtggtacggggacctgcggggaaagcccttcgccatcgaagccgagaacagcatcctggacatcagcggcttcagcaagcagtacaactgtgccttcatctggcagaaggacggcgtgaagaagctgaacctgtacctgatcatcaactacttcaagggcggcaagctgcggttcaagaagatcaaacctgaagccttcgaagccaacagattctacaccgtgatcaacaaaaagagcggcgagatcgtgcccatggaggtgaacttcaacttcgacgaccccaacctgatcatcctgcctctggcctttggcaagagacagggcagagaattcatctggaacgacctgctgtccctggaaaccggcagcctgaagctggccaacggaagagtgatcgagaagacactgtacaacagaagaacccggcaggatgagcctgccctgttcgtggccctgaccttcgagcggcgggaggtcctggactcctccaatatcaaaccaatgaacctgatcggcgtggcaagaggcgaaaacatccccgccgtgatcgccctgaccgaccccgagggctgcccactgagccggtttaaggatagcctgggaaacccaacccacatcctgagaatcggcgagagctataaggagaagcagcggaccatccaggccaagaaggaggtggagcagcggagagccggcggctacagccggaagtacgccagcaaagccaagaatctggcagacgatatggtgagaaacaccgctagagatctgctgtactacgccgtgacccaggatgccatgctgatcttcgccaacctgagccggggcttcggccggcagggcaagcggaccttcatggccgagagacagtacacacggatggaggactggctgaccgccaagctggcctacgagggcctgagcaagacctacctgtccaagacactggcccagtacacctccaagacatgcagcaactgtgggtttaccatcaccagcgccgactacgacagggtgctggagaagctgaagaagacagcaacaggctggatgaccacaattaacggcaaggagctgaaggtggagggccagattacctactacaacagatacaagagacagaacgtagtcaaggacctgtccgtcgagctggatagactgagcgaagaatctgtgaacaacgacatctcctcctggacaaagggcagaagcggagaagctctgagcctcctgaagaaaagattctcccatagacccgtgcaggagaagttcgtgtgcctgaactgcggcttcgagacacacgcagccgagcaagccgccctgaacatcgccagatcctggctgttcctgcggagccaggagtacaagaaataccagacaaacaagacaaccggcaacaccgataagagagccttcgtcgagacctggcagtccttttaccggaagaagcttaaggaggtgtggaaacctgccgtgcggtctggcggatctggcggaggctccaccagccccaagaaaaagagaaaagtctaagctgccttctgcggggcttgccttctggccatgcccttcttctctcccttgcacctgtacctcttggtctttgaataaagcctgagtaggaaggctagcaaaaaaaaaaaaaaaaaaaaaaaaaaaaaaaaaaaaaaaaaaaaaaaaaaaaaaaaaaaaaaaaaaaaaaaaaaaaaaaa

SEQ ID NO: 9655 - RNA, 8787 nt, synthetic construct
  source 1..8787: mol_type = other RNA
aggaaataagagagaaaagaagagtaagaagaaatataagagccaccatggcccctaagaagaagcgtaaagtgagccggatgaaccacgaccaggagttcgacccccctaaggtgtaccctcccgtccccgccgagaagagaaagcccatccgggtcctgagcctgttcgatggcatcgccaccggtctgctggtgctgaaggacctgggcatccaggtggataggtacattgcctccgaggtgtgcgaggactccatcaccgtgggaatggtgcgtcatcagggcaagatcatgtacgtgggcgacgtgcggagcgtgacacagaagcatatccaggagtggggccctttcgacctggtgatcggcggcagcccttgcaatgacctgagcatcgtgaacccagcccggaagggcctgtacgagggaaccggcagactgttcttcgagttttacagactgctgcacgacgcccggcctaaggaaggcgacgaccggcccttcttttggctgttcgagaatgtggtggccatgggagtcagcgacaagcgggatattagccggttcctggagagcaaccccgtgatgatcgatgccaaggaagtgagcgccgcccaccgggccagatacttctggggcaatctgcctggcatgaacagacccctggccagcaccgtgaacgacaagctggagctgcaggagtgcctggagcacggccggatcgccaagttcagcaaggtgagaaccatcaccacccgaagcaacagcatcaaacaaggcaaggaccagcactttcctgtgttcatgaacgagaaggaggacatcctgtggtgtaccgagatggagagagtgttcgggttcccagtccactacacagatgtcagcaacatgtctagactggccagacagagactgctgggaagaagctggtccgtccctgtgatcagacacctgttcgcccctctgaaggagtacttcgcctgcgtgagcagcggcaacagcaacgccaacagccggggccccagcttctctagcggcctggtgccactgtccctgagagggagccacatgggccccatggagatctacaaaaccgtgagcgcctggaagcggcagcctgtgcgcgtgctgagcctgtttcggaatatcgataaagtcctgaaaagcctgggattcctggagagcggctctggctccggcggtggcaccctgaagtacgtggaggatgtgacaaacgtggtcagacgggatgtggagaagtggggccccttcgatctggtgtacggcagcacccaacccctgggcagctcttgtgaccggtgccctggctggtacatgtttcagttccaccggatcctgcagtacgccctgccgagacaggagtcccagcggccattcttttggattttcatggacaacttgctgctgaccgaggatgaccaggaaactaccactcggttcctgcagaccgaagccgtgaccctgcaggacgtgagaggccgggactaccagaacgccatgcgggtgtggtccaacatccctggactgaaaagcaagcacgcacctctgacccctaaagaagaggagtacctgcaggcccaggtgcggagcagaagcaagctggacgcccctaaggtggatctgctggtgaagaattgcctcctgcccctgagagagtacttcaagtatttcagccagaatagtctgcccctgggaggcagcggcggcggctaccagacccccgtgagcttcaaggacgtggtggtgggcttcacccaggaggagtggcacaggctgagccccgcccagagggccctgtacagggacgtgatgctggagacctacagcaacctgctgagcgtgggctacgagggcaccaagcccgacgtgatcctgaggctggagcaggaggaggccccctggatcggcgaggccgcctgccccggctgccactgctgggaggacatctggcagggcggcccaagcagcggcgcccctcctcccagcggcggcaggcggcccaagcagcggcgcccctcctcccagcggcggcagcccagccggctccccaacctctaccgaggagggcacctctgagtccgccacccccgagagcggccctggcacctccaccgagcccagcgagggcagcgcacccggcagccctgccggcagccccacctccacagaggagggaaccagcaccgagcccagcgaaggcagcgccccaggcaccagcaccgagcctagtgagcaggagattaaacggatcaacaagatcagaagaagacttgtgaaagacagcaacaccaagaaggccggcaagacaggccccatgaaaaccctgctggttagagtgatgacacccgatctgagagagcggctggaaaacctgagaaagaagcctgaaaatatcccccagcccatcagcaatacatctagagccaacctgaataagctgctgaccgattacaccgaaatgaagaaggcgatcctgcatgtgtactgggaagagttccagaaggaccctgtgggcctgatgagccgggtggcccagcctgccagcaagaagatcgatcagaacaagctgaaacctgagatggacgagaagggcaacctgaccaccgccggctttgcctgctctcagtgtggccagcccctgttcgtgtacaagctggagcaggtgtctgagaagggcaaggcttacaccaactacttcggacggtgcaatgtggccgagcacgaaaagctgatcctgctggcccagctgaagcccgagaaggatagcgacgaagccgtgacatatagcctgggaaagtttgggcagagggccctggatttctacagcattcatgtgaccaaggagtccacccaccccgtgaagcccctggcccagatcgccggaaacagatacgcctccggacctgtgggaaaggccctgagcgacgcatgtatgggcacaatcgcctccttcctgtctaagtaccaggacatcatcatcgaacaccagaaggtggtgaagggcaaccagaagagactggagagcctgcgggagctggccggcaaggaaaacctggaataccctagcgtgaccctgccacctcagcctcacaccaaggagggcgttgatgcctacaacgaagtgatcgcccgggtgcgaatgtgggtgaacctgaacctgtggcagaagctgaagctaagcagagatgatgccaagcctctgctgagactgaagggattcccttcctttcctctggtcgagagacaggccaacgaagtggactggtgggacatggtgtgtaacgtgaagaagctgatcaacgagaaaaaggaggatggcaaggtgttttggcagaatctggctggctacaagagacaggaagccctgagaccatacctgagcagcgaggaagatcggaagaagggaaagaaattcgctcggtaccagctgggcgacctgctgctgcacctggaaaagaagcacggcgaggactggggaaaggtgtacgacgaggcctgggagcggattgacaagaaagtggaaggcctgagcaagcacatcaagctggaagaggaacggagaagcgaggacgcccagagcaaggccgccctgaccgactggctgcgggctaaggccagcttcgtgatcgagggcctgaaggaggccgacaaggacgagttctgcagatgcgagctgaagctgcagaagtggtacggggacctgcggggaaagcccttcgccatcgaagccgagaacagcatcctggacatcagcggcttcagcaagcagtacaactgtgccttcatctggcagaaggacggcgtgaagaagctgaacctgtacctgatcatcaactacttcaagggcggcaagctgcggttcaagaagatcaaacctgaagccttcgaagccaacagattctacaccgtgatcaacaaaaagagcggcgagatcgtgcccatggaggtgaacttcaacttcgacgaccccaacctgatcatcctgcctctggcctttggcaagagacagggcagagaattcatctggaacgacctgctgtccctggaaaccggcagcctgaagctggccaacggaagagtgatcgagaagacactgtacaacagaagaacccggcaggatgagcctgccctgttcgtggccctgaccttcgagcggcgggaggtcctggactcctccaatatcaaaccaatgaacctgatcggcgtggcaagaggcgaaaacatccccgccgtgatcgccctgaccgaccccgagggctgcccactgagccggtttaaggatagcctgggaaacccaacccacatcctgagaatcggcgagagctataaggagaagcagcggaccatccaggccaagaaggaggtggagcagcggagagccggcggctacagccggaagtacgccagcaaagccaagaatctggcagacgatatggtgagaaacaccgctagagatctgctgtactacgccgtgacccaggatgccatgctgatcttcgccaacctgagccggggcttcggccggcagggcaagcggaccttcatggccgagagacagtacacacggatggaggactggctgaccgccaagctggcctacgagggcctgagcaagacctacctgtccaagacactggcccagtacacctccaagacatgcagcaactgtgggtttaccatcaccagcgccgactacgacagggtgctggagaagctgaagaagacagcaacaggctggatgaccacaattaacggcaaggagctgaaggtggagggccagattacctactacaacagatacaagagacagaacgtagtcaaggacctgtccgtcgagctggatagactgagcgaagaatctgtgaacaacgacatctcctcctggacaaagggcagaagcggagaagctctgagcctcctgaagaaaagattctcccatagacccgtgcaggagaagttcgtgtgcctgaactgcggcttcgagacacacgcagccgagcaagccgccctgaacatcgccagatcctggctgttcctgcggagccaggagtacaagaaataccagacaaacaagacaaccggcaacaccgataagagagccttcgtcgagacctggcagtccttttaccggaagaagcttaaggaggtgtggaaacctgccgtgcggtctggcggatctggcggaggctccaccagccccaagaaaaagagaaaagtctaagctgccttctgcggggcttgccttctggccatgcccttcttctctcccttgcacctgtacctcttggtctttgaataaagcctgagtaggaaggctagcaaaaaaaaaaaaaaaaaaaaaaaaaaaaaaaaaaaaaaaaaaaaaaaaaaaaaaaaaaaaaaaaaaaaaaaaaaaaaaaagcccagccggctccccaacctctaccgaggagggcacctctgagtccgccacccccgagagcggccctggcacctccaccgagcccagcgagggcagcgcacccggcagccctgccggcagccccacctccacagaggagggaaccagcaccgagcccagcgaaggcagcgccccaggcaccagcaccgagcctagtgagcaggagattaaacggatcaacaagatcagaagaagacttgtgaaagacagcaacaccaagaaggccggcaagacaggccccatgaaaaccctgctggttagagtgatgacacccgatctgagagagcggctggaaaacctgagaaagaagcctgaaaatatcccccagcccatcagcaatacatctagagccaacctgaataagctgctgaccgattacaccgaaatgaagaaggcgatcctgcatgtgtactgggaagagttccagaaggaccctgtgggcctgatgagccgggtggcccagcctgccagcaagaagatcgatcagaacaagctgaaacctgagatggacgagaagggcaacctgaccaccgccggctttgcctgctctcagtgtggccagcccctgttcgtgtacaagctggagcaggtgtctgagaagggcaaggcttacaccaactacttcggacggtgcaatgtggccgagcacgaaaagctgatcctgctggcccagctgaagcccgagaaggatagcgacgaagccgtgacatatagcctgggaaagtttgggcagagggccctggatttctacagcattcatgtgaccaaggagtccacccaccccgtgaagcccctggcccagatcgccggaaacagatacgcctccggacctgtgggaaaggccctgagcgacgcatgtatgggcacaatcgcctccttcctgtctaagtaccaggacatcatcatcgaacaccagaaggtggtgaagggcaaccagaagagactggagagcctgcgggagctggccggcaaggaaaacctggaataccctagcgtgaccctgccacctcagcctcacaccaaggagggcgttgatgcctacaacgaagtgatcgcccgggtgcgaatgtgggtgaacctgaacctgtggcagaagctgaagctaagcagagatgatgccaagcctctgctgagactgaagggattcccttcctttcctctggtcgagagacaggccaacgaagtggactggtgggacatggtgtgtaacgtgaagaagctgatcaacgagaaaaaggaggatggcaaggtgttttggcagaatctggctggctacaagagacaggaagccctgagaccatacctgagcagcgaggaagatcggaagaagggaaagaaattcgctcggtaccagctgggcgacctgctgctgcacctggaaaagaagcacggcgaggactggggaaaggtgtacgacgaggcctgggagcggattgacaagaaagtggaaggcctgagcaagcacatcaagctggaagaggaacggagaagcgaggacgcccagagcaaggccgccctgaccgactggctgcgggctaaggccagcttcgtgatcgagggcctgaaggaggccgacaaggacgagttctgcagatgcgagctgaagctgcagaagtggtacggggacctgcggggaaagcccttcgccatcgaagccgagaacagcatcctggacatcagcggcttcagcaagcagtacaactgtgccttcatctggcagaaggacggcgtgaagaagctgaacctgtacctgatcatcaactacttcaagggcggcaagctgcggttcaagaagatcaaacctgaagccttcgaagccaacagattctacaccgtgatcaacaaaaagagcggcgagatcgtgcccatggaggtgaacttcaacttcgacgaccccaacctgatcatcctgcctctggcctttggcaagagacagggcagagaattcatctggaacgacctgctgtccctggaaaccggcagcctgaagctggccaacggaagagtgatcgagaagacactgtacaacagaagaacccggcaggatgagcctgccctgttcgtggccctgaccttcgagcggcgggaggtcctggactcctccaatatcaaaccaatgaacctgatcggcgtggcaagaggcgaaaacatccccgccgtgatcgccctgaccgaccccgagggctgcccactgagccggtttaaggatagcctgggaaacccaacccacatcctgagaatcggcgagagctataaggagaagcagcggaccatccaggccaagaaggaggtggagcagcggagagccggcggctacagccggaagtacgccagcaaagccaagaatctggcagacgatatggtgagaaacaccgctagagatctgctgtactacgccgtgacccaggatgccatgctgatcttcgccaacctgagccggggcttcggccggcagggcaagcggaccttcatggccgagagacagtacacacggatggaggactggctgaccgccaagctggcctacgagggcctgagcaagacctacctgtccaagacactggcccagtacacctccaagacatgcagcaactgtgggtttaccatcaccagcgccgactacgacagggtgctggagaagctgaagaagacagcaacaggctggatgaccacaattaacggcaaggagctgaaggtggagggccagattacctactacaacagatacaagagacagaacgtagtcaaggacctgtccgtcgagctggatagactgagcgaagaatctgtgaacaacgacatctcctcctggacaaagggcagaagcggagaagctctgagcctcctgaagaaaagattctcccatagacccgtgcaggagaagttcgtgtgcctgaactgcggcttcgagacacacgcagccgagcaagccgccctgaacatcgccagatcctggctgttcctgcggagccaggagtacaagaaataccagacaaacaagacaaccggcaacaccgataagagagccttcgtcgagacctggcagtccttttaccggaagaagcttaaggaggtgtggaaacctgccgtgcggtctggcggatctggcggaggctccaccagccccaagaaaaagagaaaagtctaagctgccttctgcggggcttgccttctggccatgcccttcttctctcccttgcacctgtacctcttggtctttgaataaagcctgagtaggaaggctagcaaaaaaaaaaaaaaaaaaaaaaaaaaaaaaaaaaaaaaaaaaaaaaaaaaaaaaaaaaaaaaaaaaaaaaaaaaaaaaaa

SEQ ID NO: 9656 - RNA, 8787 nt, synthetic construct
  source 1..8787: mol_type = other RNA
aggaaataagagagaaaagaagagtaagaagaaatataagagccaccatggcccctaagaagaagcgtaaagtgagccggatgaaccacgaccaggagttcgacccccctaaggtgtaccctcccgtccccgccgagaagagaaagcccatccgggtcctgagcctgttcgatggcatcgccaccggtctgctggtgctgaaggacctgggcatccaggtggataggtacattgcctccgaggtgtgcgaggactccatcaccgtgggaatggtgcgtcatcagggcaagatcatgtacgtgggcgacgtgcggagcgtgacacagaagcatatccaggagtggggccctttcgacctggtgatcggcggcagcccttgcaatgacctgagcatcgtgaacccagcccggaagggcctgtacgagggaaccggcagactgttcttcgagttttacagactgctgcacgacgcccggcctaaggaaggcgacgaccggcccttcttttggctgttcgagaatgtggtggccatgggagtcagcgacaagcgggatattagccggttcctggagagcaaccccgtgatgatcgatgccaaggaagtgagcgccgcccaccgggccagatacttctggggcaatctgcctggcatgaacagacccctggccagcaccgtgaacgacaagctggagctgcaggagtgcctggagcacggccggatcgccaagttcagcaaggtgagaaccatcaccacccgaagcaacagcatcaaacaaggcaaggaccagcactttcctgtgttcatgaacgagaaggaggacatcctgtggtgtaccgagatggagagagtgttcgggttcccagtccactacacagatgtcagcaacatgtctagactggccagacagagactgctgggaagaagctggtccgtccctgtgatcagacacctgttcgcccctctgaaggagtacttcgcctgcgtgagcagcggcaacagcaacgccaacagccggggccccagcttctctagcggcctggtgccactgtccctgagagggagccacatgggccccatggagatctacaaaaccgtgagcgcctggaagcggcagcctgtgcgcgtgctgagcctgtttcggaatatcgataaagtcctgaaaagcctgggattcctggagagcggctctggctccggcggtggcaccctgaagtacgtggaggatgtgacaaacgtggtcagacgggatgtggagaagtggggccccttcgatctggtgtacggcagcacccaacccctgggcagctcttgtgaccggtgccctggctggtacatgtttcagttccaccggatcctgcagtacgccctgccgagacaggagtcccagcggccattcttttggattttcatggacaacttgctgctgaccgaggatgaccaggaaactaccactcggttcctgcagaccgaagccgtgaccctgcaggacgtgagaggccgggactaccagaacgccatgcgggtgtggtccaacatccctggactgaaaagcaagcacgcacctctgacccctaaagaagaggagtacctgcaggcccaggtgcggagcagaagcaagctggacgcccctaaggtggatctgctggtgaagaattgcctcctgcccctgagagagtacttcaagtatttcagccagaatagtctgcccctgggaggcagcggcggcggcaaggaggccagcgtggccttcagggacgtggccgtggacttcacccaggaggagtggaggctgctgagccccgcccagaggaccctgcacagggaggtgatgctggagacctacaaccacctggtgagcctggagatccccagcagcaagcccaagctgatcgcccagctggagaggggcgaggagccctggagggaggagaggaagtgcagcctggacctgtgccccgagagcaagcccgagggcggcccaagcagcggcgcccctcctcccagcggcggcaggcggcccaagcagcggcgcccctcctcccagcggcggcagcccagccggctccccaacctctaccgaggagggcacctctgagtccgccacccccgagagcggccctggcacctccaccgagcccagcgagggcagcgcacccggcagccctgccggcagccccacctccacagaggagggaaccagcaccgagcccagcgaaggcagcgccccaggcaccagcaccgagcctagtgagcaggagattaaacggatcaacaagatcagaagaagacttgtgaaagacagcaacaccaagaaggccggcaagacaggccccatgaaaaccctgctggttagagtgatgacacccgatctgagagagcggctggaaaacctgagaaagaagcctgaaaatatcccccagcccatcagcaatacatctagagccaacctgaataagctgctgaccgattacaccgaaatgaagaaggcgatcctgcatgtgtactgggaagagttccagaaggaccctgtgggcctgatgagccgggtggcccagcctgccagcaagaagatcgatcagaacaagctgaaacctgagatggacgagaagggcaacctgaccaccgccggctttgcctgctctcagtgtggccagcccctgttcgtgtacaagctggagcaggtgtctgagaagggcaaggcttacaccaactacttcggacggtgcaatgtggccgagcacgaaaagctgatcctgctggcccagctgaagcccgagaaggatagcgacgaagccgtgacatatagcctgggaaagtttgggcagagggccctggatttctacagcattcatgtgaccaaggagtccacccaccccgtgaagcccctggcccagatcgccggaaacagatacgcctccggacctgtgggaaaggccctgagcgacgcatgtatgggcacaatcgcctccttcctgtctaagtaccaggacatcatcatcgaacaccagaaggtggtgaagggcaaccagaagagactggagagcctgcgggagctggccggcaaggaaaacctggaataccctagcgtgaccctgccacctcagcctcacaccaaggagggcgttgatgcctacaacgaagtgatcgcccgggtgcgaatgtgggtgaacctgaacctgtggcagaagctgaagctaagcagagatgatgccaagcctctgctgagactgaagggattcccttcctttcctctggtcgagagacaggccaacgaagtggactggtgggacatggtgtgtaacgtgaagaagctgatcaacgagaaaaaggaggatggcaaggtgttttggcagaatctggctggctacaagagacaggaagccctgagaccatacctgagcagcgaggaagatcggaagaagggaaagaaattcgctcggtaccagctgggcgacctgctgctgcacctggaaaagaagcacggcgaggactggggaaaggtgtacgacgaggcctgggagcggattgacaagaaagtggaaggcctgagcaagcacatcaagctggaagaggaacggagaagcgaggacgcccagagcaaggccgccctgaccgactggctgcgggctaaggccagcttcgtgatcgagggcctgaaggaggccgacaaggacgagttctgcagatgcgagctgaagctgcagaagtggtacggggacctgcggggaaagcccttcgccatcgaagccgagaacagcatcctggacatcagcggcttcagcaagcagtacaactgtgccttcatctggcagaaggacggcgtgaagaagctgaacctgtacctgatcatcaactacttcaagggcggcaagctgcggttcaagaagatcaaacctgaagccttcgaagccaacagattctacaccgtgatcaacaaaaagagcggcgagatcgtgcccatggaggtgaacttcaacttcgacgaccccaacctgatcatcctgcctctggcctttggcaagagacagggcagagaattcatctggaacgacctgctgtccctggaaaccggcagcctgaagctggccaacggaagagtgatcgagaagacactgtacaacagaagaacccggcaggatgagcctgccctgttcgtggccctgaccttcgagcggcgggaggtcctggactcctccaatatcaaaccaatgaacctgatcggcgtggcaagaggcgaaaacatccccgccgtgatcgccctgaccgaccccgagggctgcccactgagccggtttaaggatagcctgggaaacccaacccacatcctgagaatcggcgagagctataaggagaagcagcggaccatccaggccaagaaggaggtggagcagcggagagccggcggctacagccggaagtacgccagcaaagccaagaatctggcagacgatatggtgagaaacaccgctagagatctgctgtactacgccgtgacccaggatgccatgctgatcttcgccaacctgagccggggcttcggccggcagggcaagcggaccttcatggccgagagacagtacacacggatggaggactggctgaccgccaagctggcctacgagggcctgagcaagacctacctgtccaagacactggcccagtacacctccaagacatgcagcaactgtgggtttaccatcaccagcgccgactacgacagggtgctggagaagctgaagaagacagcaacaggctggatgaccacaattaacggcaaggagctgaaggtggagggccagattacctactacaacagatacaagagacagaacgtagtcaaggacctgtccgtcgagctggatagactgagcgaagaatctgtgaacaacgacatctcctcctggacaaagggcagaagcggagaagctctgagcctcctgaagaaaagattctcccatagacccgtgcaggagaagttcgtgtgcctgaactgcggcttcgagacacacgcagccgagcaagccgccctgaacatcgccagatcctggctgttcctgcggagccaggagtacaagaaataccagacaaacaagacaaccggcaacaccgataagagagccttcgtcgagacctggcagtccttttaccggaagaagcttaaggaggtgtggaaacctgccgtgcggtctggcggatctggcggaggctccaccagccccaagaaaaagagaaaagtctaagctgccttctgcggggcttgccttctggccatgcccttcttctctcccttgcacctgtacctcttggtctttgaataaagcctgagtaggaaggctagcaaaaaaaaaaaaaaaaaaaaaaaaaaaaaaaaaaaaaaaaaaaaaaaaaaaaaaaaaaaaaaaaaaaaaaaaaaaaaaaagcccagccggctccccaacctctaccgaggagggcacctctgagtccgccacccccgagagcggccctggcacctccaccgagcccagcgagggcagcgcacccggcagccctgccggcagccccacctccacagaggagggaaccagcaccgagcccagcgaaggcagcgccccaggcaccagcaccgagcctagtgagcaggagattaaacggatcaacaagatcagaagaagacttgtgaaagacagcaacaccaagaaggccggcaagacaggccccatgaaaaccctgctggttagagtgatgacacccgatctgagagagcggctggaaaacctgagaaagaagcctgaaaatatcccccagcccatcagcaatacatctagagccaacctgaataagctgctgaccgattacaccgaaatgaagaaggcgatcctgcatgtgtactgggaagagttccagaaggaccctgtgggcctgatgagccgggtggcccagcctgccagcaagaagatcgatcagaacaagctgaaacctgagatggacgagaagggcaacctgaccaccgccggctttgcctgctctcagtgtggccagcccctgttcgtgtacaagctggagcaggtgtctgagaagggcaaggcttacaccaactacttcggacggtgcaatgtggccgagcacgaaaagctgatcctgctggcccagctgaagcccgagaaggatagcgacgaagccgtgacatatagcctgggaaagtttgggcagagggccctggatttctacagcattcatgtgaccaaggagtccacccaccccgtgaagcccctggcccagatcgccggaaacagatacgcctccggacctgtgggaaaggccctgagcgacgcatgtatgggcacaatcgcctccttcctgtctaagtaccaggacatcatcatcgaacaccagaaggtggtgaagggcaaccagaagagactggagagcctgcgggagctggccggcaaggaaaacctggaataccctagcgtgaccctgccacctcagcctcacaccaaggagggcgttgatgcctacaacgaagtgatcgcccgggtgcgaatgtgggtgaacctgaacctgtggcagaagctgaagctaagcagagatgatgccaagcctctgctgagactgaagggattcccttcctttcctctggtcgagagacaggccaacgaagtggactggtgggacatggtgtgtaacgtgaagaagctgatcaacgagaaaaaggaggatggcaaggtgttttggcagaatctggctggctacaagagacaggaagccctgagaccatacctgagcagcgaggaagatcggaagaagggaaagaaattcgctcggtaccagctgggcgacctgctgctgcacctggaaaagaagcacggcgaggactggggaaaggtgtacgacgaggcctgggagcggattgacaagaaagtggaaggcctgagcaagcacatcaagctggaagaggaacggagaagcgaggacgcccagagcaaggccgccctgaccgactggctgcgggctaaggccagcttcgtgatcgagggcctgaaggaggccgacaaggacgagttctgcagatgcgagctgaagctgcagaagtggtacggggacctgcggggaaagcccttcgccatcgaagccgagaacagcatcctggacatcagcggcttcagcaagcagtacaactgtgccttcatctggcagaaggacggcgtgaagaagctgaacctgtacctgatcatcaactacttcaagggcggcaagctgcggttcaagaagatcaaacctgaagccttcgaagccaacagattctacaccgtgatcaacaaaaagagcggcgagatcgtgcccatggaggtgaacttcaacttcgacgaccccaacctgatcatcctgcctctggcctttggcaagagacagggcagagaattcatctggaacgacctgctgtccctggaaaccggcagcctgaagctggccaacggaagagtgatcgagaagacactgtacaacagaagaacccggcaggatgagcctgccctgttcgtggccctgaccttcgagcggcgggaggtcctggactcctccaatatcaaaccaatgaacctgatcggcgtggcaagaggcgaaaacatccccgccgtgatcgccctgaccgaccccgagggctgcccactgagccggtttaaggatagcctgggaaacccaacccacatcctgagaatcggcgagagctataaggagaagcagcggaccatccaggccaagaaggaggtggagcagcggagagccggcggctacagccggaagtacgccagcaaagccaagaatctggcagacgatatggtgagaaacaccgctagagatctgctgtactacgccgtgacccaggatgccatgctgatcttcgccaacctgagccggggcttcggccggcagggcaagcggaccttcatggccgagagacagtacacacggatggaggactggctgaccgccaagctggcctacgagggcctgagcaagacctacctgtccaagacactggcccagtacacctccaagacatgcagcaactgtgggtttaccatcaccagcgccgactacgacagggtgctggagaagctgaagaagacagcaacaggctggatgaccacaattaacggcaaggagctgaaggtggagggccagattacctactacaacagatacaagagacagaacgtagtcaaggacctgtccgtcgagctggatagactgagcgaagaatctgtgaacaacgacatctcctcctggacaaagggcagaagcggagaagctctgagcctcctgaagaaaagattctcccatagacccgtgcaggagaagttcgtgtgcctgaactgcggcttcgagacacacgcagccgagcaagccgccctgaacatcgccagatcctggctgttcctgcggagccaggagtacaagaaataccagacaaacaagacaaccggcaacaccgataagagagccttcgtcgagacctggcagtccttttaccggaagaagcttaaggaggtgtggaaacctgccgtgcggtctggcggatctggcggaggctccaccagccccaagaaaaagagaaaagtctaagctgccttctgcggggcttgccttctggccatgcccttcttctctcccttgcacctgtacctcttggtctttgaataaagcctgagtaggaaggctagcaaaaaaaaaaaaaaaaaaaaaaaaaaaaaaaaaaaaaaaaaaaaaaaaaaaaaaaaaaaaaaaaaaaaaaaaaaaaaaaa

SEQ ID NO: 9657 - RNA, 8787 nt, synthetic construct
  source 1..8787: mol_type = other RNA
aggaaataagagagaaaagaagagtaagaagaaatataagagccaccatggcccctaagaagaagcgtaaagtgagccggatgaaccacgaccaggagttcgacccccctaaggtgtaccctcccgtccccgccgagaagagaaagcccatccgggtcctgagcctgttcgatggcatcgccaccggtctgctggtgctgaaggacctgggcatccaggtggataggtacattgcctccgaggtgtgcgaggactccatcaccgtgggaatggtgcgtcatcagggcaagatcatgtacgtgggcgacgtgcggagcgtgacacagaagcatatccaggagtggggccctttcgacctggtgatcggcggcagcccttgcaatgacctgagcatcgtgaacccagcccggaagggcctgtacgagggaaccggcagactgttcttcgagttttacagactgctgcacgacgcccggcctaaggaaggcgacgaccggcccttcttttggctgttcgagaatgtggtggccatgggagtcagcgacaagcgggatattagccggttcctggagagcaaccccgtgatgatcgatgccaaggaagtgagcgccgcccaccgggccagatacttctggggcaatctgcctggcatgaacagacccctggccagcaccgtgaacgacaagctggagctgcaggagtgcctggagcacggccggatcgccaagttcagcaaggtgagaaccatcaccacccgaagcaacagcatcaaacaaggcaaggaccagcactttcctgtgttcatgaacgagaaggaggacatcctgtggtgtaccgagatggagagagtgttcgggttcccagtccactacacagatgtcagcaacatgtctagactggccagacagagactgctgggaagaagctggtccgtccctgtgatcagacacctgttcgcccctctgaaggagtacttcgcctgcgtgagcagcggcaacagcaacgccaacagccggggccccagcttctctagcggcctggtgccactgtccctgagagggagccacatgggccccatggagatctacaaaaccgtgagcgcctggaagcggcagcctgtgcgcgtgctgagcctgtttcggaatatcgataaagtcctgaaaagcctgggattcctggagagcggctctggctccggcggtggcaccctgaagtacgtggaggatgtgacaaacgtggtcagacgggatgtggagaagtggggccccttcgatctggtgtacggcagcacccaacccctgggcagctcttgtgaccggtgccctggctggtacatgtttcagttccaccggatcctgcagtacgccctgccgagacaggagtcccagcggccattcttttggattttcatggacaacttgctgctgaccgaggatgaccaggaaactaccactcggttcctgcagaccgaagccgtgaccctgcaggacgtgagaggccgggactaccagaacgccatgcgggtgtggtccaacatccctggactgaaaagcaagcacgcacctctgacccctaaagaagaggagtacctgcaggcccaggtgcggagcagaagcaagctggacgcccctaaggtggatctgctggtgaagaattgcctcctgcccctgagagagtacttcaagtatttcagccagaatagtctgcccctgggaggcagcggcggcggccacagcgagggcaggctgaccttccaggacgtggccatcgacttcacccaggaggagtgggagtgcctggaccccggccagaggaagctgtacagggacgtgatggtggagaactacaggaacctggccagcctgggcctggtgagcaaggtggacctggtgaccttcctggagctgctgaaggaccccaggaacatcaggaggatgaagaccaccgccatctaccccgccgtgagcccccagggcggcccaagcagcggcgcccctcctcccagcggcggcaggcggcccaagcagcggcgcccctcctcccagcggcggcagcccagccggctccccaacctctaccgaggagggcacctctgagtccgccacccccgagagcggccctggcacctccaccgagcccagcgagggcagcgcacccggcagccctgccggcagccccacctccacagaggagggaaccagcaccgagcccagcgaaggcagcgccccaggcaccagcaccgagcctagtgagcaggagattaaacggatcaacaagatcagaagaagacttgtgaaagacagcaacaccaagaaggccggcaagacaggccccatgaaaaccctgctggttagagtgatgacacccgatctgagagagcggctggaaaacctgagaaagaagcctgaaaatatcccccagcccatcagcaatacatctagagccaacctgaataagctgctgaccgattacaccgaaatgaagaaggcgatcctgcatgtgtactgggaagagttccagaaggaccctgtgggcctgatgagccgggtggcccagcctgccagcaagaagatcgatcagaacaagctgaaacctgagatggacgagaagggcaacctgaccaccgccggctttgcctgctctcagtgtggccagcccctgttcgtgtacaagctggagcaggtgtctgagaagggcaaggcttacaccaactacttcggacggtgcaatgtggccgagcacgaaaagctgatcctgctggcccagctgaagcccgagaaggatagcgacgaagccgtgacatatagcctgggaaagtttgggcagagggccctggatttctacagcattcatgtgaccaaggagtccacccaccccgtgaagcccctggcccagatcgccggaaacagatacgcctccggacctgtgggaaaggccctgagcgacgcatgtatgggcacaatcgcctccttcctgtctaagtaccaggacatcatcatcgaacaccagaaggtggtgaagggcaaccagaagagactggagagcctgcgggagctggccggcaaggaaaacctggaataccctagcgtgaccctgccacctcagcctcacaccaaggagggcgttgatgcctacaacgaagtgatcgcccgggtgcgaatgtgggtgaacctgaacctgtggcagaagctgaagctaagcagagatgatgccaagcctctgctgagactgaagggattcccttcctttcctctggtcgagagacaggccaacgaagtggactggtgggacatggtgtgtaacgtgaagaagctgatcaacgagaaaaaggaggatggcaaggtgttttggcagaatctggctggctacaagagacaggaagccctgagaccatacctgagcagcgaggaagatcggaagaagggaaagaaattcgctcggtaccagctgggcgacctgctgctgcacctggaaaagaagcacggcgaggactggggaaaggtgtacgacgaggcctgggagcggattgacaagaaagtggaaggcctgagcaagcacatcaagctggaagaggaacggagaagcgaggacgcccagagcaaggccgccctgaccgactggctgcgggctaaggccagcttcgtgatcgagggcctgaaggaggccgacaaggacgagttctgcagatgcgagctgaagctgcagaagtggtacggggacctgcggggaaagcccttcgccatcgaagccgagaacagcatcctggacatcagcggcttcagcaagcagtacaactgtgccttcatctggcagaaggacggcgtgaagaagctgaacctgtacctgatcatcaactacttcaagggcggcaagctgcggttcaagaagatcaaacctgaagccttcgaagccaacagattctacaccgtgatcaacaaaaagagcggcgagatcgtgcccatggaggtgaacttcaacttcgacgaccccaacctgatcatcctgcctctggcctttggcaagagacagggcagagaattcatctggaacgacctgctgtccctggaaaccggcagcctgaagctggccaacggaagagtgatcgagaagacactgtacaacagaagaacccggcaggatgagcctgccctgttcgtggccctgaccttcgagcggcgggaggtcctggactcctccaatatcaaaccaatgaacctgatcggcgtggcaagaggcgaaaacatccccgccgtgatcgccctgaccgaccccgagggctgcccactgagccggtttaaggatagcctgggaaacccaacccacatcctgagaatcggcgagagctataaggagaagcagcggaccatccaggccaagaaggaggtggagcagcggagagccggcggctacagccggaagtacgccagcaaagccaagaatctggcagacgatatggtgagaaacaccgctagagatctgctgtactacgccgtgacccaggatgccatgctgatcttcgccaacctgagccggggcttcggccggcagggcaagcggaccttcatggccgagagacagtacacacggatggaggactggctgaccgccaagctggcctacgagggcctgagcaagacctacctgtccaagacactggcccagtacacctccaagacatgcagcaactgtgggtttaccatcaccagcgccgactacgacagggtgctggagaagctgaagaagacagcaacaggctggatgaccacaattaacggcaaggagctgaaggtggagggccagattacctactacaacagatacaagagacagaacgtagtcaaggacctgtccgtcgagctggatagactgagcgaagaatctgtgaacaacgacatctcctcctggacaaagggcagaagcggagaagctctgagcctcctgaagaaaagattctcccatagacccgtgcaggagaagttcgtgtgcctgaactgcggcttcgagacacacgcagccgagcaagccgccctgaacatcgccagatcctggctgttcctgcggagccaggagtacaagaaataccagacaaacaagacaaccggcaacaccgataagagagccttcgtcgagacctggcagtccttttaccggaagaagcttaaggaggtgtggaaacctgccgtgcggtctggcggatctggcggaggctccaccagccccaagaaaaagagaaaagtctaagctgccttctgcggggcttgccttctggccatgcccttcttctctcccttgcacctgtacctcttggtctttgaataaagcctgagtaggaaggctagcaaaaaaaaaaaaaaaaaaaaaaaaaaaaaaaaaaaaaaaaaaaaaaaaaaaaaaaaaaaaaaaaaaaaaaaaaaaaaaaagcccagccggctccccaacctctaccgaggagggcacctctgagtccgccacccccgagagcggccctggcacctccaccgagcccagcgagggcagcgcacccggcagccctgccggcagccccacctccacagaggagggaaccagcaccgagcccagcgaaggcagcgccccaggcaccagcaccgagcctagtgagcaggagattaaacggatcaacaagatcagaagaagacttgtgaaagacagcaacaccaagaaggccggcaagacaggccccatgaaaaccctgctggttagagtgatgacacccgatctgagagagcggctggaaaacctgagaaagaagcctgaaaatatcccccagcccatcagcaatacatctagagccaacctgaataagctgctgaccgattacaccgaaatgaagaaggcgatcctgcatgtgtactgggaagagttccagaaggaccctgtgggcctgatgagccgggtggcccagcctgccagcaagaagatcgatcagaacaagctgaaacctgagatggacgagaagggcaacctgaccaccgccggctttgcctgctctcagtgtggccagcccctgttcgtgtacaagctggagcaggtgtctgagaagggcaaggcttacaccaactacttcggacggtgcaatgtggccgagcacgaaaagctgatcctgctggcccagctgaagcccgagaaggatagcgacgaagccgtgacatatagcctgggaaagtttgggcagagggccctggatttctacagcattcatgtgaccaaggagtccacccaccccgtgaagcccctggcccagatcgccggaaacagatacgcctccggacctgtgggaaaggccctgagcgacgcatgtatgggcacaatcgcctccttcctgtctaagtaccaggacatcatcatcgaacaccagaaggtggtgaagggcaaccagaagagactggagagcctgcgggagctggccggcaaggaaaacctggaataccctagcgtgaccctgccacctcagcctcacaccaaggagggcgttgatgcctacaacgaagtgatcgcccgggtgcgaatgtgggtgaacctgaacctgtggcagaagctgaagctaagcagagatgatgccaagcctctgctgagactgaagggattcccttcctttcctctggtcgagagacaggccaacgaagtggactggtgggacatggtgtgtaacgtgaagaagctgatcaacgagaaaaaggaggatggcaaggtgttttggcagaatctggctggctacaagagacaggaagccctgagaccatacctgagcagcgaggaagatcggaagaagggaaagaaattcgctcggtaccagctgggcgacctgctgctgcacctggaaaagaagcacggcgaggactggggaaaggtgtacgacgaggcctgggagcggattgacaagaaagtggaaggcctgagcaagcacatcaagctggaagaggaacggagaagcgaggacgcccagagcaaggccgccctgaccgactggctgcgggctaaggccagcttcgtgatcgagggcctgaaggaggccgacaaggacgagttctgcagatgcgagctgaagctgcagaagtggtacggggacctgcggggaaagcccttcgccatcgaagccgagaacagcatcctggacatcagcggcttcagcaagcagtacaactgtgccttcatctggcagaaggacggcgtgaagaagctgaacctgtacctgatcatcaactacttcaagggcggcaagctgcggttcaagaagatcaaacctgaagccttcgaagccaacagattctacaccgtgatcaacaaaaagagcggcgagatcgtgcccatggaggtgaacttcaacttcgacgaccccaacctgatcatcctgcctctggcctttggcaagagacagggcagagaattcatctggaacgacctgctgtccctggaaaccggcagcctgaagctggccaacggaagagtgatcgagaagacactgtacaacagaagaacccggcaggatgagcctgccctgttcgtggccctgaccttcgagcggcgggaggtcctggactcctccaatatcaaaccaatgaacctgatcggcgtggcaagaggcgaaaacatccccgccgtgatcgccctgaccgaccccgagggctgcccactgagccggtttaaggatagcctgggaaacccaacccacatcctgagaatcggcgagagctataaggagaagcagcggaccatccaggccaagaaggaggtggagcagcggagagccggcggctacagccggaagtacgccagcaaagccaagaatctggcagacgatatggtgagaaacaccgctagagatctgctgtactacgccgtgacccaggatgccatgctgatcttcgccaacctgagccggggcttcggccggcagggcaagcggaccttcatggccgagagacagtacacacggatggaggactggctgaccgccaagctggcctacgagggcctgagcaagacctacctgtccaagacactggcccagtacacctccaagacatgcagcaactgtgggtttaccatcaccagcgccgactacgacagggtgctggagaagctgaagaagacagcaacaggctggatgaccacaattaacggcaaggagctgaaggtggagggccagattacctactacaacagatacaagagacagaacgtagtcaaggacctgtccgtcgagctggatagactgagcgaagaatctgtgaacaacgacatctcctcctggacaaagggcagaagcggagaagctctgagcctcctgaagaaaagattctcccatagacccgtgcaggagaagttcgtgtgcctgaactgcggcttcgagacacacgcagccgagcaagccgccctgaacatcgccagatcctggctgttcctgcggagccaggagtacaagaaataccagacaaacaagacaaccggcaacaccgataagagagccttcgtcgagacctggcagtccttttaccggaagaagcttaaggaggtgtggaaacctgccgtgcggtctggcggatctggcggaggctccaccagccccaagaaaaagagaaaagtctaagctgccttctgcggggcttgccttctggccatgcccttcttctctcccttgcacctgtacctcttggtctttgaataaagcctgagtaggaaggctagcaaaaaaaaaaaaaaaaaaaaaaaaaaaaaaaaaaaaaaaaaaaaaaaaaaaaaaaaaaaaaaaaaaaaaaaaaaaaaaaa

SEQ ID NO: 9658 - RNA, 8787 nt, synthetic construct
  source 1..8787: mol_type = other RNA
aggaaataagagagaaaagaagagtaagaagaaatataagagccaccatggcccctaagaagaagcgtaaagtgagccggatgaaccacgaccaggagttcgacccccctaaggtgtaccctcccgtccccgccgagaagagaaagcccatccgggtcctgagcctgttcgatggcatcgccaccggtctgctggtgctgaaggacctgggcatccaggtggataggtacattgcctccgaggtgtgcgaggactccatcaccgtgggaatggtgcgtcatcagggcaagatcatgtacgtgggcgacgtgcggagcgtgacacagaagcatatccaggagtggggccctttcgacctggtgatcggcggcagcccttgcaatgacctgagcatcgtgaacccagcccggaagggcctgtacgagggaaccggcagactgttcttcgagttttacagactgctgcacgacgcccggcctaaggaaggcgacgaccggcccttcttttggctgttcgagaatgtggtggccatgggagtcagcgacaagcgggatattagccggttcctggagagcaaccccgtgatgatcgatgccaaggaagtgagcgccgcccaccgggccagatacttctggggcaatctgcctggcatgaacagacccctggccagcaccgtgaacgacaagctggagctgcaggagtgcctggagcacggccggatcgccaagttcagcaaggtgagaaccatcaccacccgaagcaacagcatcaaacaaggcaaggaccagcactttcctgtgttcatgaacgagaaggaggacatcctgtggtgtaccgagatggagagagtgttcgggttcccagtccactacacagatgtcagcaacatgtctagactggccagacagagactgctgggaagaagctggtccgtccctgtgatcagacacctgttcgcccctctgaaggagtacttcgcctgcgtgagcagcggcaacagcaacgccaacagccggggccccagcttctctagcggcctggtgccactgtccctgagagggagccacatgggccccatggagatctacaaaaccgtgagcgcctggaagcggcagcctgtgcgcgtgctgagcctgtttcggaatatcgataaagtcctgaaaagcctgggattcctggagagcggctctggctccggcggtggcaccctgaagtacgtggaggatgtgacaaacgtggtcagacgggatgtggagaagtggggccccttcgatctggtgtacggcagcacccaacccctgggcagctcttgtgaccggtgccctggctggtacatgtttcagttccaccggatcctgcagtacgccctgccgagacaggagtcccagcggccattcttttggattttcatggacaacttgctgctgaccgaggatgaccaggaaactaccactcggttcctgcagaccgaagccgtgaccctgcaggacgtgagaggccgggactaccagaacgccatgcgggtgtggtccaacatccctggactgaaaagcaagcacgcacctctgacccctaaagaagaggagtacctgcaggcccaggtgcggagcagaagcaagctggacgcccctaaggtggatctgctggtgaagaattgcctcctgcccctgagagagtacttcaagtatttcagccagaatagtctgcccctgggaggcagcggcggcggcatgaacatggagggcctggtgatgttccaggacctgagcatcgacttcagccaggaggagtgggagtgcctggacgccgcccagaaggacctgtacagggacgtgatgatggagaactacagcagcctggtgagcctgggcctgagcatccccaagcccgacgtgatcagcctgctggagcagggcaaggagccctggatggtgagcagggacgtgctgggcggctggtgcaggggcctggagggcggcccaagcagcggcgcccctcctcccagcggcggcaggcggcccaagcagcggcgcccctcctcccagcggcggcagcccagccggctccccaacctctaccgaggagggcacctctgagtccgccacccccgagagcggccctggcacctccaccgagcccagcgagggcagcgcacccggcagccctgccggcagccccacctccacagaggagggaaccagcaccgagcccagcgaaggcagcgccccaggcaccagcaccgagcctagtgagcaggagattaaacggatcaacaagatcagaagaagacttgtgaaagacagcaacaccaagaaggccggcaagacaggccccatgaaaaccctgctggttagagtgatgacacccgatctgagagagcggctggaaaacctgagaaagaagcctgaaaatatcccccagcccatcagcaatacatctagagccaacctgaataagctgctgaccgattacaccgaaatgaagaaggcgatcctgcatgtgtactgggaagagttccagaaggaccctgtgggcctgatgagccgggtggcccagcctgccagcaagaagatcgatcagaacaagctgaaacctgagatggacgagaagggcaacctgaccaccgccggctttgcctgctctcagtgtggccagcccctgttcgtgtacaagctggagcaggtgtctgagaagggcaaggcttacaccaactacttcggacggtgcaatgtggccgagcacgaaaagctgatcctgctggcccagctgaagcccgagaaggatagcgacgaagccgtgacatatagcctgggaaagtttgggcagagggccctggatttctacagcattcatgtgaccaaggagtccacccaccccgtgaagcccctggcccagatcgccggaaacagatacgcctccggacctgtgggaaaggccctgagcgacgcatgtatgggcacaatcgcctccttcctgtctaagtaccaggacatcatcatcgaacaccagaaggtggtgaagggcaaccagaagagactggagagcctgcgggagctggccggcaaggaaaacctggaataccctagcgtgaccctgccacctcagcctcacaccaaggagggcgttgatgcctacaacgaagtgatcgcccgggtgcgaatgtgggtgaacctgaacctgtggcagaagctgaagctaagcagagatgatgccaagcctctgctgagactgaagggattcccttcctttcctctggtcgagagacaggccaacgaagtggactggtgggacatggtgtgtaacgtgaagaagctgatcaacgagaaaaaggaggatggcaaggtgttttggcagaatctggctggctacaagagacaggaagccctgagaccatacctgagcagcgaggaagatcggaagaagggaaagaaattcgctcggtaccagctgggcgacctgctgctgcacctggaaaagaagcacggcgaggactggggaaaggtgtacgacgaggcctgggagcggattgacaagaaagtggaaggcctgagcaagcacatcaagctggaagaggaacggagaagcgaggacgcccagagcaaggccgccctgaccgactggctgcgggctaaggccagcttcgtgatcgagggcctgaaggaggccgacaaggacgagttctgcagatgcgagctgaagctgcagaagtggtacggggacctgcggggaaagcccttcgccatcgaagccgagaacagcatcctggacatcagcggcttcagcaagcagtacaactgtgccttcatctggcagaaggacggcgtgaagaagctgaacctgtacctgatcatcaactacttcaagggcggcaagctgcggttcaagaagatcaaacctgaagccttcgaagccaacagattctacaccgtgatcaacaaaaagagcggcgagatcgtgcccatggaggtgaacttcaacttcgacgaccccaacctgatcatcctgcctctggcctttggcaagagacagggcagagaattcatctggaacgacctgctgtccctggaaaccggcagcctgaagctggccaacggaagagtgatcgagaagacactgtacaacagaagaacccggcaggatgagcctgccctgttcgtggccctgaccttcgagcggcgggaggtcctggactcctccaatatcaaaccaatgaacctgatcggcgtggcaagaggcgaaaacatccccgccgtgatcgccctgaccgaccccgagggctgcccactgagccggtttaaggatagcctgggaaacccaacccacatcctgagaatcggcgagagctataaggagaagcagcggaccatccaggccaagaaggaggtggagcagcggagagccggcggctacagccggaagtacgccagcaaagccaagaatctggcagacgatatggtgagaaacaccgctagagatctgctgtactacgccgtgacccaggatgccatgctgatcttcgccaacctgagccggggcttcggccggcagggcaagcggaccttcatggccgagagacagtacacacggatggaggactggctgaccgccaagctggcctacgagggcctgagcaagacctacctgtccaagacactggcccagtacacctccaagacatgcagcaactgtgggtttaccatcaccagcgccgactacgacagggtgctggagaagctgaagaagacagcaacaggctggatgaccacaattaacggcaaggagctgaaggtggagggccagattacctactacaacagatacaagagacagaacgtagtcaaggacctgtccgtcgagctggatagactgagcgaagaatctgtgaacaacgacatctcctcctggacaaagggcagaagcggagaagctctgagcctcctgaagaaaagattctcccatagacccgtgcaggagaagttcgtgtgcctgaactgcggcttcgagacacacgcagccgagcaagccgccctgaacatcgccagatcctggctgttcctgcggagccaggagtacaagaaataccagacaaacaagacaaccggcaacaccgataagagagccttcgtcgagacctggcagtccttttaccggaagaagcttaaggaggtgtggaaacctgccgtgcggtctggcggatctggcggaggctccaccagccccaagaaaaagagaaaagtctaagctgccttctgcggggcttgccttctggccatgcccttcttctctcccttgcacctgtacctcttggtctttgaataaagcctgagtaggaaggctagcaaaaaaaaaaaaaaaaaaaaaaaaaaaaaaaaaaaaaaaaaaaaaaaaaaaaaaaaaaaaaaaaaaaaaaaaaaaaaaaagcccagccggctccccaacctctaccgaggagggcacctctgagtccgccacccccgagagcggccctggcacctccaccgagcccagcgagggcagcgcacccggcagccctgccggcagccccacctccacagaggagggaaccagcaccgagcccagcgaaggcagcgccccaggcaccagcaccgagcctagtgagcaggagattaaacggatcaacaagatcagaagaagacttgtgaaagacagcaacaccaagaaggccggcaagacaggccccatgaaaaccctgctggttagagtgatgacacccgatctgagagagcggctggaaaacctgagaaagaagcctgaaaatatcccccagcccatcagcaatacatctagagccaacctgaataagctgctgaccgattacaccgaaatgaagaaggcgatcctgcatgtgtactgggaagagttccagaaggaccctgtgggcctgatgagccgggtggcccagcctgccagcaagaagatcgatcagaacaagctgaaacctgagatggacgagaagggcaacctgaccaccgccggctttgcctgctctcagtgtggccagcccctgttcgtgtacaagctggagcaggtgtctgagaagggcaaggcttacaccaactacttcggacggtgcaatgtggccgagcacgaaaagctgatcctgctggcccagctgaagcccgagaaggatagcgacgaagccgtgacatatagcctgggaaagtttgggcagagggccctggatttctacagcattcatgtgaccaaggagtccacccaccccgtgaagcccctggcccagatcgccggaaacagatacgcctccggacctgtgggaaaggccctgagcgacgcatgtatgggcacaatcgcctccttcctgtctaagtaccaggacatcatcatcgaacaccagaaggtggtgaagggcaaccagaagagactggagagcctgcgggagctggccggcaaggaaaacctggaataccctagcgtgaccctgccacctcagcctcacaccaaggagggcgttgatgcctacaacgaagtgatcgcccgggtgcgaatgtgggtgaacctgaacctgtggcagaagctgaagctaagcagagatgatgccaagcctctgctgagactgaagggattcccttcctttcctctggtcgagagacaggccaacgaagtggactggtgggacatggtgtgtaacgtgaagaagctgatcaacgagaaaaaggaggatggcaaggtgttttggcagaatctggctggctacaagagacaggaagccctgagaccatacctgagcagcgaggaagatcggaagaagggaaagaaattcgctcggtaccagctgggcgacctgctgctgcacctggaaaagaagcacggcgaggactggggaaaggtgtacgacgaggcctgggagcggattgacaagaaagtggaaggcctgagcaagcacatcaagctggaagaggaacggagaagcgaggacgcccagagcaaggccgccctgaccgactggctgcgggctaaggccagcttcgtgatcgagggcctgaaggaggccgacaaggacgagttctgcagatgcgagctgaagctgcagaagtggtacggggacctgcggggaaagcccttcgccatcgaagccgagaacagcatcctggacatcagcggcttcagcaagcagtacaactgtgccttcatctggcagaaggacggcgtgaagaagctgaacctgtacctgatcatcaactacttcaagggcggcaagctgcggttcaagaagatcaaacctgaagccttcgaagccaacagattctacaccgtgatcaacaaaaagagcggcgagatcgtgcccatggaggtgaacttcaacttcgacgaccccaacctgatcatcctgcctctggcctttggcaagagacagggcagagaattcatctggaacgacctgctgtccctggaaaccggcagcctgaagctggccaacggaagagtgatcgagaagacactgtacaacagaagaacccggcaggatgagcctgccctgttcgtggccctgaccttcgagcggcgggaggtcctggactcctccaatatcaaaccaatgaacctgatcggcgtggcaagaggcgaaaacatccccgccgtgatcgccctgaccgaccccgagggctgcccactgagccggtttaaggatagcctgggaaacccaacccacatcctgagaatcggcgagagctataaggagaagcagcggaccatccaggccaagaaggaggtggagcagcggagagccggcggctacagccggaagtacgccagcaaagccaagaatctggcagacgatatggtgagaaacaccgctagagatctgctgtactacgccgtgacccaggatgccatgctgatcttcgccaacctgagccggggcttcggccggcagggcaagcggaccttcatggccgagagacagtacacacggatggaggactggctgaccgccaagctggcctacgagggcctgagcaagacctacctgtccaagacactggcccagtacacctccaagacatgcagcaactgtgggtttaccatcaccagcgccgactacgacagggtgctggagaagctgaagaagacagcaacaggctggatgaccacaattaacggcaaggagctgaaggtggagggccagattacctactacaacagatacaagagacagaacgtagtcaaggacctgtccgtcgagctggatagactgagcgaagaatctgtgaacaacgacatctcctcctggacaaagggcagaagcggagaagctctgagcctcctgaagaaaagattctcccatagacccgtgcaggagaagttcgtgtgcctgaactgcggcttcgagacacacgcagccgagcaagccgccctgaacatcgccagatcctggctgttcctgcggagccaggagtacaagaaataccagacaaacaagacaaccggcaacaccgataagagagccttcgtcgagacctggcagtccttttaccggaagaagcttaaggaggtgtggaaacctgccgtgcggtctggcggatctggcggaggctccaccagccccaagaaaaagagaaaagtctaagctgccttctgcggggcttgccttctggccatgcccttcttctctcccttgcacctgtacctcttggtctttgaataaagcctgagtaggaaggctagcaaaaaaaaaaaaaaaaaaaaaaaaaaaaaaaaaaaaaaaaaaaaaaaaaaaaaaaaaaaaaaaaaaaaaaaaaaaaaaaa

SEQ ID NO: 9659 - RNA, 8787 nt, synthetic construct
  source 1..8787: mol_type = other RNA
aggaaataagagagaaaagaagagtaagaagaaatataagagccaccatggcccctaagaagaagcgtaaagtgagccggatgaaccacgaccaggagttcgacccccctaaggtgtaccctcccgtccccgccgagaagagaaagcccatccgggtcctgagcctgttcgatggcatcgccaccggtctgctggtgctgaaggacctgggcatccaggtggataggtacattgcctccgaggtgtgcgaggactccatcaccgtgggaatggtgcgtcatcagggcaagatcatgtacgtgggcgacgtgcggagcgtgacacagaagcatatccaggagtggggccctttcgacctggtgatcggcggcagcccttgcaatgacctgagcatcgtgaacccagcccggaagggcctgtacgagggaaccggcagactgttcttcgagttttacagactgctgcacgacgcccggcctaaggaaggcgacgaccggcccttcttttggctgttcgagaatgtggtggccatgggagtcagcgacaagcgggatattagccggttcctggagagcaaccccgtgatgatcgatgccaaggaagtgagcgccgcccaccgggccagatacttctggggcaatctgcctggcatgaacagacccctggccagcaccgtgaacgacaagctggagctgcaggagtgcctggagcacggccggatcgccaagttcagcaaggtgagaaccatcaccacccgaagcaacagcatcaaacaaggcaaggaccagcactttcctgtgttcatgaacgagaaggaggacatcctgtggtgtaccgagatggagagagtgttcgggttcccagtccactacacagatgtcagcaacatgtctagactggccagacagagactgctgggaagaagctggtccgtccctgtgatcagacacctgttcgcccctctgaaggagtacttcgcctgcgtgagcagcggcaacagcaacgccaacagccggggccccagcttctctagcggcctggtgccactgtccctgagagggagccacatgggccccatggagatctacaaaaccgtgagcgcctggaagcggcagcctgtgcgcgtgctgagcctgtttcggaatatcgataaagtcctgaaaagcctgggattcctggagagcggctctggctccggcggtggcaccctgaagtacgtggaggatgtgacaaacgtggtcagacgggatgtggagaagtggggccccttcgatctggtgtacggcagcacccaacccctgggcagctcttgtgaccggtgccctggctggtacatgtttcagttccaccggatcctgcagtacgccctgccgagacaggagtcccagcggccattcttttggattttcatggacaacttgctgctgaccgaggatgaccaggaaactaccactcggttcctgcagaccgaagccgtgaccctgcaggacgtgagaggccgggactaccagaacgccatgcgggtgtggtccaacatccctggactgaaaagcaagcacgcacctctgacccctaaagaagaggagtacctgcaggcccaggtgcggagcagaagcaagctggacgcccctaaggtggatctgctggtgaagaattgcctcctgcccctgagagagtacttcaagtatttcagccagaatagtctgcccctgggaggcagcggcggcggcatcaagagccccctgaccttcggcgacgtggccgtggagttcagcggcgaggagtgggcctggctggacagcgcccagaggagcctgcacaggagcgtgatgctggagaactacaggaacctggccagcctgggcctgtgcctgagcaagcccgagatgatcagcagcctggagcagaggaaggagccctgggccgtgaagaggaagagcaccagcggcaagtgccccgacctgcagaccctgggcggcccaagcagcggcgcccctcctcccagcggcggcaggcggcccaagcagcggcgcccctcctcccagcggcggcagcccagccggctccccaacctctaccgaggagggcacctctgagtccgccacccccgagagcggccctggcacctccaccgagcccagcgagggcagcgcacccggcagccctgccggcagccccacctccacagaggagggaaccagcaccgagcccagcgaaggcagcgccccaggcaccagcaccgagcctagtgagcaggagattaaacggatcaacaagatcagaagaagacttgtgaaagacagcaacaccaagaaggccggcaagacaggccccatgaaaaccctgctggttagagtgatgacacccgatctgagagagcggctggaaaacctgagaaagaagcctgaaaatatcccccagcccatcagcaatacatctagagccaacctgaataagctgctgaccgattacaccgaaatgaagaaggcgatcctgcatgtgtactgggaagagttccagaaggaccctgtgggcctgatgagccgggtggcccagcctgccagcaagaagatcgatcagaacaagctgaaacctgagatggacgagaagggcaacctgaccaccgccggctttgcctgctctcagtgtggccagcccctgttcgtgtacaagctggagcaggtgtctgagaagggcaaggcttacaccaactacttcggacggtgcaatgtggccgagcacgaaaagctgatcctgctggcccagctgaagcccgagaaggatagcgacgaagccgtgacatatagcctgggaaagtttgggcagagggccctggatttctacagcattcatgtgaccaaggagtccacccaccccgtgaagcccctggcccagatcgccggaaacagatacgcctccggacctgtgggaaaggccctgagcgacgcatgtatgggcacaatcgcctccttcctgtctaagtaccaggacatcatcatcgaacaccagaaggtggtgaagggcaaccagaagagactggagagcctgcgggagctggccggcaaggaaaacctggaataccctagcgtgaccctgccacctcagcctcacaccaaggagggcgttgatgcctacaacgaagtgatcgcccgggtgcgaatgtgggtgaacctgaacctgtggcagaagctgaagctaagcagagatgatgccaagcctctgctgagactgaagggattcccttcctttcctctggtcgagagacaggccaacgaagtggactggtgggacatggtgtgtaacgtgaagaagctgatcaacgagaaaaaggaggatggcaaggtgttttggcagaatctggctggctacaagagacaggaagccctgagaccatacctgagcagcgaggaagatcggaagaagggaaagaaattcgctcggtaccagctgggcgacctgctgctgcacctggaaaagaagcacggcgaggactggggaaaggtgtacgacgaggcctgggagcggattgacaagaaagtggaaggcctgagcaagcacatcaagctggaagaggaacggagaagcgaggacgcccagagcaaggccgccctgaccgactggctgcgggctaaggccagcttcgtgatcgagggcctgaaggaggccgacaaggacgagttctgcagatgcgagctgaagctgcagaagtggtacggggacctgcggggaaagcccttcgccatcgaagccgagaacagcatcctggacatcagcggcttcagcaagcagtacaactgtgccttcatctggcagaaggacggcgtgaagaagctgaacctgtacctgatcatcaactacttcaagggcggcaagctgcggttcaagaagatcaaacctgaagccttcgaagccaacagattctacaccgtgatcaacaaaaagagcggcgagatcgtgcccatggaggtgaacttcaacttcgacgaccccaacctgatcatcctgcctctggcctttggcaagagacagggcagagaattcatctggaacgacctgctgtccctggaaaccggcagcctgaagctggccaacggaagagtgatcgagaagacactgtacaacagaagaacccggcaggatgagcctgccctgttcgtggccctgaccttcgagcggcgggaggtcctggactcctccaatatcaaaccaatgaacctgatcggcgtggcaagaggcgaaaacatccccgccgtgatcgccctgaccgaccccgagggctgcccactgagccggtttaaggatagcctgggaaacccaacccacatcctgagaatcggcgagagctataaggagaagcagcggaccatccaggccaagaaggaggtggagcagcggagagccggcggctacagccggaagtacgccagcaaagccaagaatctggcagacgatatggtgagaaacaccgctagagatctgctgtactacgccgtgacccaggatgccatgctgatcttcgccaacctgagccggggcttcggccggcagggcaagcggaccttcatggccgagagacagtacacacggatggaggactggctgaccgccaagctggcctacgagggcctgagcaagacctacctgtccaagacactggcccagtacacctccaagacatgcagcaactgtgggtttaccatcaccagcgccgactacgacagggtgctggagaagctgaagaagacagcaacaggctggatgaccacaattaacggcaaggagctgaaggtggagggccagattacctactacaacagatacaagagacagaacgtagtcaaggacctgtccgtcgagctggatagactgagcgaagaatctgtgaacaacgacatctcctcctggacaaagggcagaagcggagaagctctgagcctcctgaagaaaagattctcccatagacccgtgcaggagaagttcgtgtgcctgaactgcggcttcgagacacacgcagccgagcaagccgccctgaacatcgccagatcctggctgttcctgcggagccaggagtacaagaaataccagacaaacaagacaaccggcaacaccgataagagagccttcgtcgagacctggcagtccttttaccggaagaagcttaaggaggtgtggaaacctgccgtgcggtctggcggatctggcggaggctccaccagccccaagaaaaagagaaaagtctaagctgccttctgcggggcttgccttctggccatgcccttcttctctcccttgcacctgtacctcttggtctttgaataaagcctgagtaggaaggctagcaaaaaaaaaaaaaaaaaaaaaaaaaaaaaaaaaaaaaaaaaaaaaaaaaaaaaaaaaaaaaaaaaaaaaaaaaaaaaaaagcccagccggctccccaacctctaccgaggagggcacctctgagtccgccacccccgagagcggccctggcacctccaccgagcccagcgagggcagcgcacccggcagccctgccggcagccccacctccacagaggagggaaccagcaccgagcccagcgaaggcagcgccccaggcaccagcaccgagcctagtgagcaggagattaaacggatcaacaagatcagaagaagacttgtgaaagacagcaacaccaagaaggccggcaagacaggccccatgaaaaccctgctggttagagtgatgacacccgatctgagagagcggctggaaaacctgagaaagaagcctgaaaatatcccccagcccatcagcaatacatctagagccaacctgaataagctgctgaccgattacaccgaaatgaagaaggcgatcctgcatgtgtactgggaagagttccagaaggaccctgtgggcctgatgagccgggtggcccagcctgccagcaagaagatcgatcagaacaagctgaaacctgagatggacgagaagggcaacctgaccaccgccggctttgcctgctctcagtgtggccagcccctgttcgtgtacaagctggagcaggtgtctgagaagggcaaggcttacaccaactacttcggacggtgcaatgtggccgagcacgaaaagctgatcctgctggcccagctgaagcccgagaaggatagcgacgaagccgtgacatatagcctgggaaagtttgggcagagggccctggatttctacagcattcatgtgaccaaggagtccacccaccccgtgaagcccctggcccagatcgccggaaacagatacgcctccggacctgtgggaaaggccctgagcgacgcatgtatgggcacaatcgcctccttcctgtctaagtaccaggacatcatcatcgaacaccagaaggtggtgaagggcaaccagaagagactggagagcctgcgggagctggccggcaaggaaaacctggaataccctagcgtgaccctgccacctcagcctcacaccaaggagggcgttgatgcctacaacgaagtgatcgcccgggtgcgaatgtgggtgaacctgaacctgtggcagaagctgaagctaagcagagatgatgccaagcctctgctgagactgaagggattcccttcctttcctctggtcgagagacaggccaacgaagtggactggtgggacatggtgtgtaacgtgaagaagctgatcaacgagaaaaaggaggatggcaaggtgttttggcagaatctggctggctacaagagacaggaagccctgagaccatacctgagcagcgaggaagatcggaagaagggaaagaaattcgctcggtaccagctgggcgacctgctgctgcacctggaaaagaagcacggcgaggactggggaaaggtgtacgacgaggcctgggagcggattgacaagaaagtggaaggcctgagcaagcacatcaagctggaagaggaacggagaagcgaggacgcccagagcaaggccgccctgaccgactggctgcgggctaaggccagcttcgtgatcgagggcctgaaggaggccgacaaggacgagttctgcagatgcgagctgaagctgcagaagtggtacggggacctgcggggaaagcccttcgccatcgaagccgagaacagcatcctggacatcagcggcttcagcaagcagtacaactgtgccttcatctggcagaaggacggcgtgaagaagctgaacctgtacctgatcatcaactacttcaagggcggcaagctgcggttcaagaagatcaaacctgaagccttcgaagccaacagattctacaccgtgatcaacaaaaagagcggcgagatcgtgcccatggaggtgaacttcaacttcgacgaccccaacctgatcatcctgcctctggcctttggcaagagacagggcagagaattcatctggaacgacctgctgtccctggaaaccggcagcctgaagctggccaacggaagagtgatcgagaagacactgtacaacagaagaacccggcaggatgagcctgccctgttcgtggccctgaccttcgagcggcgggaggtcctggactcctccaatatcaaaccaatgaacctgatcggcgtggcaagaggcgaaaacatccccgccgtgatcgccctgaccgaccccgagggctgcccactgagccggtttaaggatagcctgggaaacccaacccacatcctgagaatcggcgagagctataaggagaagcagcggaccatccaggccaagaaggaggtggagcagcggagagccggcggctacagccggaagtacgccagcaaagccaagaatctggcagacgatatggtgagaaacaccgctagagatctgctgtactacgccgtgacccaggatgccatgctgatcttcgccaacctgagccggggcttcggccggcagggcaagcggaccttcatggccgagagacagtacacacggatggaggactggctgaccgccaagctggcctacgagggcctgagcaagacctacctgtccaagacactggcccagtacacctccaagacatgcagcaactgtgggtttaccatcaccagcgccgactacgacagggtgctggagaagctgaagaagacagcaacaggctggatgaccacaattaacggcaaggagctgaaggtggagggccagattacctactacaacagatacaagagacagaacgtagtcaaggacctgtccgtcgagctggatagactgagcgaagaatctgtgaacaacgacatctcctcctggacaaagggcagaagcggagaagctctgagcctcctgaagaaaagattctcccatagacccgtgcaggagaagttcgtgtgcctgaactgcggcttcgagacacacgcagccgagcaagccgccctgaacatcgccagatcctggctgttcctgcggagccaggagtacaagaaataccagacaaacaagacaaccggcaacaccgataagagagccttcgtcgagacctggcagtccttttaccggaagaagcttaaggaggtgtggaaacctgccgtgcggtctggcggatctggcggaggctccaccagccccaagaaaaagagaaaagtctaagctgccttctgcggggcttgccttctggccatgcccttcttctctcccttgcacctgtacctcttggtctttgaataaagcctgagtaggaaggctagcaaaaaaaaaaaaaaaaaaaaaaaaaaaaaaaaaaaaaaaaaaaaaaaaaaaaaaaaaaaaaaaaaaaaaaaaaaaaaaaa

SEQ ID NO: 9660 - RNA, 8787 nt, synthetic construct
  source 1..8787: mol_type = other RNA
aggaaataagagagaaaagaagagtaagaagaaatataagagccaccatggcccctaagaagaagcgtaaagtgagccggatgaaccacgaccaggagttcgacccccctaaggtgtaccctcccgtccccgccgagaagagaaagcccatccgggtcctgagcctgttcgatggcatcgccaccggtctgctggtgctgaaggacctgggcatccaggtggataggtacattgcctccgaggtgtgcgaggactccatcaccgtgggaatggtgcgtcatcagggcaagatcatgtacgtgggcgacgtgcggagcgtgacacagaagcatatccaggagtggggccctttcgacctggtgatcggcggcagcccttgcaatgacctgagcatcgtgaacccagcccggaagggcctgtacgagggaaccggcagactgttcttcgagttttacagactgctgcacgacgcccggcctaaggaaggcgacgaccggcccttcttttggctgttcgagaatgtggtggccatgggagtcagcgacaagcgggatattagccggttcctggagagcaaccccgtgatgatcgatgccaaggaagtgagcgccgcccaccgggccagatacttctggggcaatctgcctggcatgaacagacccctggccagcaccgtgaacgacaagctggagctgcaggagtgcctggagcacggccggatcgccaagttcagcaaggtgagaaccatcaccacccgaagcaacagcatcaaacaaggcaaggaccagcactttcctgtgttcatgaacgagaaggaggacatcctgtggtgtaccgagatggagagagtgttcgggttcccagtccactacacagatgtcagcaacatgtctagactggccagacagagactgctgggaagaagctggtccgtccctgtgatcagacacctgttcgcccctctgaaggagtacttcgcctgcgtgagcagcggcaacagcaacgccaacagccggggccccagcttctctagcggcctggtgccactgtccctgagagggagccacatgggccccatggagatctacaaaaccgtgagcgcctggaagcggcagcctgtgcgcgtgctgagcctgtttcggaatatcgataaagtcctgaaaagcctgggattcctggagagcggctctggctccggcggtggcaccctgaagtacgtggaggatgtgacaaacgtggtcagacgggatgtggagaagtggggccccttcgatctggtgtacggcagcacccaacccctgggcagctcttgtgaccggtgccctggctggtacatgtttcagttccaccggatcctgcagtacgccctgccgagacaggagtcccagcggccattcttttggattttcatggacaacttgctgctgaccgaggatgaccaggaaactaccactcggttcctgcagaccgaagccgtgaccctgcaggacgtgagaggccgggactaccagaacgccatgcgggtgtggtccaacatccctggactgaaaagcaagcacgcacctctgacccctaaagaagaggagtacctgcaggcccaggtgcggagcagaagcaagctggacgcccctaaggtggatctgctggtgaagaattgcctcctgcccctgagagagtacttcaagtatttcagccagaatagtctgcccctgggaggcagcggcggcggcctgcccctgaccttcgaggacgtggccgtgtacttcagcgagcaggagtggcagaacctggaggcctggcagaaggagctgtacaagcaggtgatgagggccaactacgagatcctgctgagcctggacaacggcctgcccaagcccgagctgatcagctggatcgagcagggcaaggagctgttcaagaagtggggcgagagccagcagagcaggagcatcatctgcagcagcgccgacctgggcggcccaagcagcggcgcccctcctcccagcggcggcaggcggcccaagcagcggcgcccctcctcccagcggcggcagcccagccggctccccaacctctaccgaggagggcacctctgagtccgccacccccgagagcggccctggcacctccaccgagcccagcgagggcagcgcacccggcagccctgccggcagccccacctccacagaggagggaaccagcaccgagcccagcgaaggcagcgccccaggcaccagcaccgagcctagtgagcaggagattaaacggatcaacaagatcagaagaagacttgtgaaagacagcaacaccaagaaggccggcaagacaggccccatgaaaaccctgctggttagagtgatgacacccgatctgagagagcggctggaaaacctgagaaagaagcctgaaaatatcccccagcccatcagcaatacatctagagccaacctgaataagctgctgaccgattacaccgaaatgaagaaggcgatcctgcatgtgtactgggaagagttccagaaggaccctgtgggcctgatgagccgggtggcccagcctgccagcaagaagatcgatcagaacaagctgaaacctgagatggacgagaagggcaacctgaccaccgccggctttgcctgctctcagtgtggccagcccctgttcgtgtacaagctggagcaggtgtctgagaagggcaaggcttacaccaactacttcggacggtgcaatgtggccgagcacgaaaagctgatcctgctggcccagctgaagcccgagaaggatagcgacgaagccgtgacatatagcctgggaaagtttgggcagagggccctggatttctacagcattcatgtgaccaaggagtccacccaccccgtgaagcccctggcccagatcgccggaaacagatacgcctccggacctgtgggaaaggccctgagcgacgcatgtatgggcacaatcgcctccttcctgtctaagtaccaggacatcatcatcgaacaccagaaggtggtgaagggcaaccagaagagactggagagcctgcgggagctggccggcaaggaaaacctggaataccctagcgtgaccctgccacctcagcctcacaccaaggagggcgttgatgcctacaacgaagtgatcgcccgggtgcgaatgtgggtgaacctgaacctgtggcagaagctgaagctaagcagagatgatgccaagcctctgctgagactgaagggattcccttcctttcctctggtcgagagacaggccaacgaagtggactggtgggacatggtgtgtaacgtgaagaagctgatcaacgagaaaaaggaggatggcaaggtgttttggcagaatctggctggctacaagagacaggaagccctgagaccatacctgagcagcgaggaagatcggaagaagggaaagaaattcgctcggtaccagctgggcgacctgctgctgcacctggaaaagaagcacggcgaggactggggaaaggtgtacgacgaggcctgggagcggattgacaagaaagtggaaggcctgagcaagcacatcaagctggaagaggaacggagaagcgaggacgcccagagcaaggccgccctgaccgactggctgcgggctaaggccagcttcgtgatcgagggcctgaaggaggccgacaaggacgagttctgcagatgcgagctgaagctgcagaagtggtacggggacctgcggggaaagcccttcgccatcgaagccgagaacagcatcctggacatcagcggcttcagcaagcagtacaactgtgccttcatctggcagaaggacggcgtgaagaagctgaacctgtacctgatcatcaactacttcaagggcggcaagctgcggttcaagaagatcaaacctgaagccttcgaagccaacagattctacaccgtgatcaacaaaaagagcggcgagatcgtgcccatggaggtgaacttcaacttcgacgaccccaacctgatcatcctgcctctggcctttggcaagagacagggcagagaattcatctggaacgacctgctgtccctggaaaccggcagcctgaagctggccaacggaagagtgatcgagaagacactgtacaacagaagaacccggcaggatgagcctgccctgttcgtggccctgaccttcgagcggcgggaggtcctggactcctccaatatcaaaccaatgaacctgatcggcgtggcaagaggcgaaaacatccccgccgtgatcgccctgaccgaccccgagggctgcccactgagccggtttaaggatagcctgggaaacccaacccacatcctgagaatcggcgagagctataaggagaagcagcggaccatccaggccaagaaggaggtggagcagcggagagccggcggctacagccggaagtacgccagcaaagccaagaatctggcagacgatatggtgagaaacaccgctagagatctgctgtactacgccgtgacccaggatgccatgctgatcttcgccaacctgagccggggcttcggccggcagggcaagcggaccttcatggccgagagacagtacacacggatggaggactggctgaccgccaagctggcctacgagggcctgagcaagacctacctgtccaagacactggcccagtacacctccaagacatgcagcaactgtgggtttaccatcaccagcgccgactacgacagggtgctggagaagctgaagaagacagcaacaggctggatgaccacaattaacggcaaggagctgaaggtggagggccagattacctactacaacagatacaagagacagaacgtagtcaaggacctgtccgtcgagctggatagactgagcgaagaatctgtgaacaacgacatctcctcctggacaaagggcagaagcggagaagctctgagcctcctgaagaaaagattctcccatagacccgtgcaggagaagttcgtgtgcctgaactgcggcttcgagacacacgcagccgagcaagccgccctgaacatcgccagatcctggctgttcctgcggagccaggagtacaagaaataccagacaaacaagacaaccggcaacaccgataagagagccttcgtcgagacctggcagtccttttaccggaagaagcttaaggaggtgtggaaacctgccgtgcggtctggcggatctggcggaggctccaccagccccaagaaaaagagaaaagtctaagctgccttctgcggggcttgccttctggccatgcccttcttctctcccttgcacctgtacctcttggtctttgaataaagcctgagtaggaaggctagcaaaaaaaaaaaaaaaaaaaaaaaaaaaaaaaaaaaaaaaaaaaaaaaaaaaaaaaaaaaaaaaaaaaaaaaaaaaaaaaagcccagccggctccccaacctctaccgaggagggcacctctgagtccgccacccccgagagcggccctggcacctccaccgagcccagcgagggcagcgcacccggcagccctgccggcagccccacctccacagaggagggaaccagcaccgagcccagcgaaggcagcgccccaggcaccagcaccgagcctagtgagcaggagattaaacggatcaacaagatcagaagaagacttgtgaaagacagcaacaccaagaaggccggcaagacaggccccatgaaaaccctgctggttagagtgatgacacccgatctgagagagcggctggaaaacctgagaaagaagcctgaaaatatcccccagcccatcagcaatacatctagagccaacctgaataagctgctgaccgattacaccgaaatgaagaaggcgatcctgcatgtgtactgggaagagttccagaaggaccctgtgggcctgatgagccgggtggcccagcctgccagcaagaagatcgatcagaacaagctgaaacctgagatggacgagaagggcaacctgaccaccgccggctttgcctgctctcagtgtggccagcccctgttcgtgtacaagctggagcaggtgtctgagaagggcaaggcttacaccaactacttcggacggtgcaatgtggccgagcacgaaaagctgatcctgctggcccagctgaagcccgagaaggatagcgacgaagccgtgacatatagcctgggaaagtttgggcagagggccctggatttctacagcattcatgtgaccaaggagtccacccaccccgtgaagcccctggcccagatcgccggaaacagatacgcctccggacctgtgggaaaggccctgagcgacgcatgtatgggcacaatcgcctccttcctgtctaagtaccaggacatcatcatcgaacaccagaaggtggtgaagggcaaccagaagagactggagagcctgcgggagctggccggcaaggaaaacctggaataccctagcgtgaccctgccacctcagcctcacaccaaggagggcgttgatgcctacaacgaagtgatcgcccgggtgcgaatgtgggtgaacctgaacctgtggcagaagctgaagctaagcagagatgatgccaagcctctgctgagactgaagggattcccttcctttcctctggtcgagagacaggccaacgaagtggactggtgggacatggtgtgtaacgtgaagaagctgatcaacgagaaaaaggaggatggcaaggtgttttggcagaatctggctggctacaagagacaggaagccctgagaccatacctgagcagcgaggaagatcggaagaagggaaagaaattcgctcggtaccagctgggcgacctgctgctgcacctggaaaagaagcacggcgaggactggggaaaggtgtacgacgaggcctgggagcggattgacaagaaagtggaaggcctgagcaagcacatcaagctggaagaggaacggagaagcgaggacgcccagagcaaggccgccctgaccgactggctgcgggctaaggccagcttcgtgatcgagggcctgaaggaggccgacaaggacgagttctgcagatgcgagctgaagctgcagaagtggtacggggacctgcggggaaagcccttcgccatcgaagccgagaacagcatcctggacatcagcggcttcagcaagcagtacaactgtgccttcatctggcagaaggacggcgtgaagaagctgaacctgtacctgatcatcaactacttcaagggcggcaagctgcggttcaagaagatcaaacctgaagccttcgaagccaacagattctacaccgtgatcaacaaaaagagcggcgagatcgtgcccatggaggtgaacttcaacttcgacgaccccaacctgatcatcctgcctctggcctttggcaagagacagggcagagaattcatctggaacgacctgctgtccctggaaaccggcagcctgaagctggccaacggaagagtgatcgagaagacactgtacaacagaagaacccggcaggatgagcctgccctgttcgtggccctgaccttcgagcggcgggaggtcctggactcctccaatatcaaaccaatgaacctgatcggcgtggcaagaggcgaaaacatccccgccgtgatcgccctgaccgaccccgagggctgcccactgagccggtttaaggatagcctgggaaacccaacccacatcctgagaatcggcgagagctataaggagaagcagcggaccatccaggccaagaaggaggtggagcagcggagagccggcggctacagccggaagtacgccagcaaagccaagaatctggcagacgatatggtgagaaacaccgctagagatctgctgtactacgccgtgacccaggatgccatgctgatcttcgccaacctgagccggggcttcggccggcagggcaagcggaccttcatggccgagagacagtacacacggatggaggactggctgaccgccaagctggcctacgagggcctgagcaagacctacctgtccaagacactggcccagtacacctccaagacatgcagcaactgtgggtttaccatcaccagcgccgactacgacagggtgctggagaagctgaagaagacagcaacaggctggatgaccacaattaacggcaaggagctgaaggtggagggccagattacctactacaacagatacaagagacagaacgtagtcaaggacctgtccgtcgagctggatagactgagcgaagaatctgtgaacaacgacatctcctcctggacaaagggcagaagcggagaagctctgagcctcctgaagaaaagattctcccatagacccgtgcaggagaagttcgtgtgcctgaactgcggcttcgagacacacgcagccgagcaagccgccctgaacatcgccagatcctggctgttcctgcggagccaggagtacaagaaataccagacaaacaagacaaccggcaacaccgataagagagccttcgtcgagacctggcagtccttttaccggaagaagcttaaggaggtgtggaaacctgccgtgcggtctggcggatctggcggaggctccaccagccccaagaaaaagagaaaagtctaagctgccttctgcggggcttgccttctggccatgcccttcttctctcccttgcacctgtacctcttggtctttgaataaagcctgagtaggaaggctagcaaaaaaaaaaaaaaaaaaaaaaaaaaaaaaaaaaaaaaaaaaaaaaaaaaaaaaaaaaaaaaaaaaaaaaaaaaaaaaaa

SEQ ID NO: 9661 - RNA, 8787 nt, synthetic construct
  source 1..8787: mol_type = other RNA
aggaaataagagagaaaagaagagtaagaagaaatataagagccaccatggcccctaagaagaagcgtaaagtgagccggatgaaccacgaccaggagttcgacccccctaaggtgtaccctcccgtccccgccgagaagagaaagcccatccgggtcctgagcctgttcgatggcatcgccaccggtctgctggtgctgaaggacctgggcatccaggtggataggtacattgcctccgaggtgtgcgaggactccatcaccgtgggaatggtgcgtcatcagggcaagatcatgtacgtgggcgacgtgcggagcgtgacacagaagcatatccaggagtggggccctttcgacctggtgatcggcggcagcccttgcaatgacctgagcatcgtgaacccagcccggaagggcctgtacgagggaaccggcagactgttcttcgagttttacagactgctgcacgacgcccggcctaaggaaggcgacgaccggcccttcttttggctgttcgagaatgtggtggccatgggagtcagcgacaagcgggatattagccggttcctggagagcaaccccgtgatgatcgatgccaaggaagtgagcgccgcccaccgggccagatacttctggggcaatctgcctggcatgaacagacccctggccagcaccgtgaacgacaagctggagctgcaggagtgcctggagcacggccggatcgccaagttcagcaaggtgagaaccatcaccacccgaagcaacagcatcaaacaaggcaaggaccagcactttcctgtgttcatgaacgagaaggaggacatcctgtggtgtaccgagatggagagagtgttcgggttcccagtccactacacagatgtcagcaacatgtctagactggccagacagagactgctgggaagaagctggtccgtccctgtgatcagacacctgttcgcccctctgaaggagtacttcgcctgcgtgagcagcggcaacagcaacgccaacagccggggccccagcttctctagcggcctggtgccactgtccctgagagggagccacatgggccccatggagatctacaaaaccgtgagcgcctggaagcggcagcctgtgcgcgtgctgagcctgtttcggaatatcgataaagtcctgaaaagcctgggattcctggagagcggctctggctccggcggtggcaccctgaagtacgtggaggatgtgacaaacgtggtcagacgggatgtggagaagtggggccccttcgatctggtgtacggcagcacccaacccctgggcagctcttgtgaccggtgccctggctggtacatgtttcagttccaccggatcctgcagtacgccctgccgagacaggagtcccagcggccattcttttggattttcatggacaacttgctgctgaccgaggatgaccaggaaactaccactcggttcctgcagaccgaagccgtgaccctgcaggacgtgagaggccgggactaccagaacgccatgcgggtgtggtccaacatccctggactgaaaagcaagcacgcacctctgacccctaaagaagaggagtacctgcaggcccaggtgcggagcagaagcaagctggacgcccctaaggtggatctgctggtgaagaattgcctcctgcccctgagagagtacttcaagtatttcagccagaatagtctgcccctgggaggcagcggcggcggcctgcaggacctggtgaccttcaaggacgtgaccgtggagttcaaccaggaggagtgggccctgctggacagcagccagcagaagctgtacagggacgtgatgctggagaactacggcaacctggccagcctgggctaccacgtggacaagcccagcctgatcagccagctggagcaggaggacaaggtgatgaccgaggagggcggcatcctgcccggcacctgccccgacctggagaccgtgggcggcccaagcagcggcgcccctcctcccagcggcggcaggcggcccaagcagcggcgcccctcctcccagcggcggcagcccagccggctccccaacctctaccgaggagggcacctctgagtccgccacccccgagagcggccctggcacctccaccgagcccagcgagggcagcgcacccggcagccctgccggcagccccacctccacagaggagggaaccagcaccgagcccagcgaaggcagcgccccaggcaccagcaccgagcctagtgagcaggagattaaacggatcaacaagatcagaagaagacttgtgaaagacagcaacaccaagaaggccggcaagacaggccccatgaaaaccctgctggttagagtgatgacacccgatctgagagagcggctggaaaacctgagaaagaagcctgaaaatatcccccagcccatcagcaatacatctagagccaacctgaataagctgctgaccgattacaccgaaatgaagaaggcgatcctgcatgtgtactgggaagagttccagaaggaccctgtgggcctgatgagccgggtggcccagcctgccagcaagaagatcgatcagaacaagctgaaacctgagatggacgagaagggcaacctgaccaccgccggctttgcctgctctcagtgtggccagcccctgttcgtgtacaagctggagcaggtgtctgagaagggcaaggcttacaccaactacttcggacggtgcaatgtggccgagcacgaaaagctgatcctgctggcccagctgaagcccgagaaggatagcgacgaagccgtgacatatagcctgggaaagtttgggcagagggccctggatttctacagcattcatgtgaccaaggagtccacccaccccgtgaagcccctggcccagatcgccggaaacagatacgcctccggacctgtgggaaaggccctgagcgacgcatgtatgggcacaatcgcctccttcctgtctaagtaccaggacatcatcatcgaacaccagaaggtggtgaagggcaaccagaagagactggagagcctgcgggagctggccggcaaggaaaacctggaataccctagcgtgaccctgccacctcagcctcacaccaaggagggcgttgatgcctacaacgaagtgatcgcccgggtgcgaatgtgggtgaacctgaacctgtggcagaagctgaagctaagcagagatgatgccaagcctctgctgagactgaagggattcccttcctttcctctggtcgagagacaggccaacgaagtggactggtgggacatggtgtgtaacgtgaagaagctgatcaacgagaaaaaggaggatggcaaggtgttttggcagaatctggctggctacaagagacaggaagccctgagaccatacctgagcagcgaggaagatcggaagaagggaaagaaattcgctcggtaccagctgggcgacctgctgctgcacctggaaaagaagcacggcgaggactggggaaaggtgtacgacgaggcctgggagcggattgacaagaaagtggaaggcctgagcaagcacatcaagctggaagaggaacggagaagcgaggacgcccagagcaaggccgccctgaccgactggctgcgggctaaggccagcttcgtgatcgagggcctgaaggaggccgacaaggacgagttctgcagatgcgagctgaagctgcagaagtggtacggggacctgcggggaaagcccttcgccatcgaagccgagaacagcatcctggacatcagcggcttcagcaagcagtacaactgtgccttcatctggcagaaggacggcgtgaagaagctgaacctgtacctgatcatcaactacttcaagggcggcaagctgcggttcaagaagatcaaacctgaagccttcgaagccaacagattctacaccgtgatcaacaaaaagagcggcgagatcgtgcccatggaggtgaacttcaacttcgacgaccccaacctgatcatcctgcctctggcctttggcaagagacagggcagagaattcatctggaacgacctgctgtccctggaaaccggcagcctgaagctggccaacggaagagtgatcgagaagacactgtacaacagaagaacccggcaggatgagcctgccctgttcgtggccctgaccttcgagcggcgggaggtcctggactcctccaatatcaaaccaatgaacctgatcggcgtggcaagaggcgaaaacatccccgccgtgatcgccctgaccgaccccgagggctgcccactgagccggtttaaggatagcctgggaaacccaacccacatcctgagaatcggcgagagctataaggagaagcagcggaccatccaggccaagaaggaggtggagcagcggagagccggcggctacagccggaagtacgccagcaaagccaagaatctggcagacgatatggtgagaaacaccgctagagatctgctgtactacgccgtgacccaggatgccatgctgatcttcgccaacctgagccggggcttcggccggcagggcaagcggaccttcatggccgagagacagtacacacggatggaggactggctgaccgccaagctggcctacgagggcctgagcaagacctacctgtccaagacactggcccagtacacctccaagacatgcagcaactgtgggtttaccatcaccagcgccgactacgacagggtgctggagaagctgaagaagacagcaacaggctggatgaccacaattaacggcaaggagctgaaggtggagggccagattacctactacaacagatacaagagacagaacgtagtcaaggacctgtccgtcgagctggatagactgagcgaagaatctgtgaacaacgacatctcctcctggacaaagggcagaagcggagaagctctgagcctcctgaagaaaagattctcccatagacccgtgcaggagaagttcgtgtgcctgaactgcggcttcgagacacacgcagccgagcaagccgccctgaacatcgccagatcctggctgttcctgcggagccaggagtacaagaaataccagacaaacaagacaaccggcaacaccgataagagagccttcgtcgagacctggcagtccttttaccggaagaagcttaaggaggtgtggaaacctgccgtgcggtctggcggatctggcggaggctccaccagccccaagaaaaagagaaaagtctaagctgccttctgcggggcttgccttctggccatgcccttcttctctcccttgcacctgtacctcttggtctttgaataaagcctgagtaggaaggctagcaaaaaaaaaaaaaaaaaaaaaaaaaaaaaaaaaaaaaaaaaaaaaaaaaaaaaaaaaaaaaaaaaaaaaaaaaaaaaaaagcccagccggctccccaacctctaccgaggagggcacctctgagtccgccacccccgagagcggccctggcacctccaccgagcccagcgagggcagcgcacccggcagccctgccggcagccccacctccacagaggagggaaccagcaccgagcccagcgaaggcagcgccccaggcaccagcaccgagcctagtgagcaggagattaaacggatcaacaagatcagaagaagacttgtgaaagacagcaacaccaagaaggccggcaagacaggccccatgaaaaccctgctggttagagtgatgacacccgatctgagagagcggctggaaaacctgagaaagaagcctgaaaatatcccccagcccatcagcaatacatctagagccaacctgaataagctgctgaccgattacaccgaaatgaagaaggcgatcctgcatgtgtactgggaagagttccagaaggaccctgtgggcctgatgagccgggtggcccagcctgccagcaagaagatcgatcagaacaagctgaaacctgagatggacgagaagggcaacctgaccaccgccggctttgcctgctctcagtgtggccagcccctgttcgtgtacaagctggagcaggtgtctgagaagggcaaggcttacaccaactacttcggacggtgcaatgtggccgagcacgaaaagctgatcctgctggcccagctgaagcccgagaaggatagcgacgaagccgtgacatatagcctgggaaagtttgggcagagggccctggatttctacagcattcatgtgaccaaggagtccacccaccccgtgaagcccctggcccagatcgccggaaacagatacgcctccggacctgtgggaaaggccctgagcgacgcatgtatgggcacaatcgcctccttcctgtctaagtaccaggacatcatcatcgaacaccagaaggtggtgaagggcaaccagaagagactggagagcctgcgggagctggccggcaaggaaaacctggaataccctagcgtgaccctgccacctcagcctcacaccaaggagggcgttgatgcctacaacgaagtgatcgcccgggtgcgaatgtgggtgaacctgaacctgtggcagaagctgaagctaagcagagatgatgccaagcctctgctgagactgaagggattcccttcctttcctctggtcgagagacaggccaacgaagtggactggtgggacatggtgtgtaacgtgaagaagctgatcaacgagaaaaaggaggatggcaaggtgttttggcagaatctggctggctacaagagacaggaagccctgagaccatacctgagcagcgaggaagatcggaagaagggaaagaaattcgctcggtaccagctgggcgacctgctgctgcacctggaaaagaagcacggcgaggactggggaaaggtgtacgacgaggcctgggagcggattgacaagaaagtggaaggcctgagcaagcacatcaagctggaagaggaacggagaagcgaggacgcccagagcaaggccgccctgaccgactggctgcgggctaaggccagcttcgtgatcgagggcctgaaggaggccgacaaggacgagttctgcagatgcgagctgaagctgcagaagtggtacggggacctgcggggaaagcccttcgccatcgaagccgagaacagcatcctggacatcagcggcttcagcaagcagtacaactgtgccttcatctggcagaaggacggcgtgaagaagctgaacctgtacctgatcatcaactacttcaagggcggcaagctgcggttcaagaagatcaaacctgaagccttcgaagccaacagattctacaccgtgatcaacaaaaagagcggcgagatcgtgcccatggaggtgaacttcaacttcgacgaccccaacctgatcatcctgcctctggcctttggcaagagacagggcagagaattcatctggaacgacctgctgtccctggaaaccggcagcctgaagctggccaacggaagagtgatcgagaagacactgtacaacagaagaacccggcaggatgagcctgccctgttcgtggccctgaccttcgagcggcgggaggtcctggactcctccaatatcaaaccaatgaacctgatcggcgtggcaagaggcgaaaacatccccgccgtgatcgccctgaccgaccccgagggctgcccactgagccggtttaaggatagcctgggaaacccaacccacatcctgagaatcggcgagagctataaggagaagcagcggaccatccaggccaagaaggaggtggagcagcggagagccggcggctacagccggaagtacgccagcaaagccaagaatctggcagacgatatggtgagaaacaccgctagagatctgctgtactacgccgtgacccaggatgccatgctgatcttcgccaacctgagccggggcttcggccggcagggcaagcggaccttcatggccgagagacagtacacacggatggaggactggctgaccgccaagctggcctacgagggcctgagcaagacctacctgtccaagacactggcccagtacacctccaagacatgcagcaactgtgggtttaccatcaccagcgccgactacgacagggtgctggagaagctgaagaagacagcaacaggctggatgaccacaattaacggcaaggagctgaaggtggagggccagattacctactacaacagatacaagagacagaacgtagtcaaggacctgtccgtcgagctggatagactgagcgaagaatctgtgaacaacgacatctcctcctggacaaagggcagaagcggagaagctctgagcctcctgaagaaaagattctcccatagacccgtgcaggagaagttcgtgtgcctgaactgcggcttcgagacacacgcagccgagcaagccgccctgaacatcgccagatcctggctgttcctgcggagccaggagtacaagaaataccagacaaacaagacaaccggcaacaccgataagagagccttcgtcgagacctggcagtccttttaccggaagaagcttaaggaggtgtggaaacctgccgtgcggtctggcggatctggcggaggctccaccagccccaagaaaaagagaaaagtctaagctgccttctgcggggcttgccttctggccatgcccttcttctctcccttgcacctgtacctcttggtctttgaataaagcctgagtaggaaggctagcaaaaaaaaaaaaaaaaaaaaaaaaaaaaaaaaaaaaaaaaaaaaaaaaaaaaaaaaaaaaaaaaaaaaaaaaaaaaaaaa

SEQ ID NO: 9662 - RNA, 8787 nt, synthetic construct
  source 1..8787: mol_type = other RNA
aggaaataagagagaaaagaagagtaagaagaaatataagagccaccatggcccctaagaagaagcgtaaagtgagccggatgaaccacgaccaggagttcgacccccctaaggtgtaccctcccgtccccgccgagaagagaaagcccatccgggtcctgagcctgttcgatggcatcgccaccggtctgctggtgctgaaggacctgggcatccaggtggataggtacattgcctccgaggtgtgcgaggactccatcaccgtgggaatggtgcgtcatcagggcaagatcatgtacgtgggcgacgtgcggagcgtgacacagaagcatatccaggagtggggccctttcgacctggtgatcggcggcagcccttgcaatgacctgagcatcgtgaacccagcccggaagggcctgtacgagggaaccggcagactgttcttcgagttttacagactgctgcacgacgcccggcctaaggaaggcgacgaccggcccttcttttggctgttcgagaatgtggtggccatgggagtcagcgacaagcgggatattagccggttcctggagagcaaccccgtgatgatcgatgccaaggaagtgagcgccgcccaccgggccagatacttctggggcaatctgcctggcatgaacagacccctggccagcaccgtgaacgacaagctggagctgcaggagtgcctggagcacggccggatcgccaagttcagcaaggtgagaaccatcaccacccgaagcaacagcatcaaacaaggcaaggaccagcactttcctgtgttcatgaacgagaaggaggacatcctgtggtgtaccgagatggagagagtgttcgggttcccagtccactacacagatgtcagcaacatgtctagactggccagacagagactgctgggaagaagctggtccgtccctgtgatcagacacctgttcgcccctctgaaggagtacttcgcctgcgtgagcagcggcaacagcaacgccaacagccggggccccagcttctctagcggcctggtgccactgtccctgagagggagccacatgggccccatggagatctacaaaaccgtgagcgcctggaagcggcagcctgtgcgcgtgctgagcctgtttcggaatatcgataaagtcctgaaaagcctgggattcctggagagcggctctggctccggcggtggcaccctgaagtacgtggaggatgtgacaaacgtggtcagacgggatgtggagaagtggggccccttcgatctggtgtacggcagcacccaacccctgggcagctcttgtgaccggtgccctggctggtacatgtttcagttccaccggatcctgcagtacgccctgccgagacaggagtcccagcggccattcttttggattttcatggacaacttgctgctgaccgaggatgaccaggaaactaccactcggttcctgcagaccgaagccgtgaccctgcaggacgtgagaggccgggactaccagaacgccatgcgggtgtggtccaacatccctggactgaaaagcaagcacgcacctctgacccctaaagaagaggagtacctgcaggcccaggtgcggagcagaagcaagctggacgcccctaaggtggatctgctggtgaagaattgcctcctgcccctgagagagtacttcaagtatttcagccagaatagtctgcccctgggaggcagcggcggcggcgagcaggagcccgtgaccttcaaggacgtggccgtggacttcacccaggaggagtggggccagctggacctggtgcagaggaccctgtacagggacgtgatgctggagacctacggccacctgctgagcgtgggcaaccagaccgccaagcccgaggtgatcagcctgctggagcagggcgaggagccctggagcgtggagcagacctgcccccagagggcctgccccgagtggatgaggaacggcggcccaagcagcggcgcccctcctcccagcggcggcaggcggcccaagcagcggcgcccctcctcccagcggcggcagcccagccggctccccaacctctaccgaggagggcacctctgagtccgccacccccgagagcggccctggcacctccaccgagcccagcgagggcagcgcacccggcagccctgccggcagccccacctccacagaggagggaaccagcaccgagcccagcgaaggcagcgccccaggcaccagcaccgagcctagtgagcaggagattaaacggatcaacaagatcagaagaagacttgtgaaagacagcaacaccaagaaggccggcaagacaggccccatgaaaaccctgctggttagagtgatgacacccgatctgagagagcggctggaaaacctgagaaagaagcctgaaaatatcccccagcccatcagcaatacatctagagccaacctgaataagctgctgaccgattacaccgaaatgaagaaggcgatcctgcatgtgtactgggaagagttccagaaggaccctgtgggcctgatgagccgggtggcccagcctgccagcaagaagatcgatcagaacaagctgaaacctgagatggacgagaagggcaacctgaccaccgccggctttgcctgctctcagtgtggccagcccctgttcgtgtacaagctggagcaggtgtctgagaagggcaaggcttacaccaactacttcggacggtgcaatgtggccgagcacgaaaagctgatcctgctggcccagctgaagcccgagaaggatagcgacgaagccgtgacatatagcctgggaaagtttgggcagagggccctggatttctacagcattcatgtgaccaaggagtccacccaccccgtgaagcccctggcccagatcgccggaaacagatacgcctccggacctgtgggaaaggccctgagcgacgcatgtatgggcacaatcgcctccttcctgtctaagtaccaggacatcatcatcgaacaccagaaggtggtgaagggcaaccagaagagactggagagcctgcgggagctggccggcaaggaaaacctggaataccctagcgtgaccctgccacctcagcctcacaccaaggagggcgttgatgcctacaacgaagtgatcgcccgggtgcgaatgtgggtgaacctgaacctgtggcagaagctgaagctaagcagagatgatgccaagcctctgctgagactgaagggattcccttcctttcctctggtcgagagacaggccaacgaagtggactggtgggacatggtgtgtaacgtgaagaagctgatcaacgagaaaaaggaggatggcaaggtgttttggcagaatctggctggctacaagagacaggaagccctgagaccatacctgagcagcgaggaagatcggaagaagggaaagaaattcgctcggtaccagctgggcgacctgctgctgcacctggaaaagaagcacggcgaggactggggaaaggtgtacgacgaggcctgggagcggattgacaagaaagtggaaggcctgagcaagcacatcaagctggaagaggaacggagaagcgaggacgcccagagcaaggccgccctgaccgactggctgcgggctaaggccagcttcgtgatcgagggcctgaaggaggccgacaaggacgagttctgcagatgcgagctgaagctgcagaagtggtacggggacctgcggggaaagcccttcgccatcgaagccgagaacagcatcctggacatcagcggcttcagcaagcagtacaactgtgccttcatctggcagaaggacggcgtgaagaagctgaacctgtacctgatcatcaactacttcaagggcggcaagctgcggttcaagaagatcaaacctgaagccttcgaagccaacagattctacaccgtgatcaacaaaaagagcggcgagatcgtgcccatggaggtgaacttcaacttcgacgaccccaacctgatcatcctgcctctggcctttggcaagagacagggcagagaattcatctggaacgacctgctgtccctggaaaccggcagcctgaagctggccaacggaagagtgatcgagaagacactgtacaacagaagaacccggcaggatgagcctgccctgttcgtggccctgaccttcgagcggcgggaggtcctggactcctccaatatcaaaccaatgaacctgatcggcgtggcaagaggcgaaaacatccccgccgtgatcgccctgaccgaccccgagggctgcccactgagccggtttaaggatagcctgggaaacccaacccacatcctgagaatcggcgagagctataaggagaagcagcggaccatccaggccaagaaggaggtggagcagcggagagccggcggctacagccggaagtacgccagcaaagccaagaatctggcagacgatatggtgagaaacaccgctagagatctgctgtactacgccgtgacccaggatgccatgctgatcttcgccaacctgagccggggcttcggccggcagggcaagcggaccttcatggccgagagacagtacacacggatggaggactggctgaccgccaagctggcctacgagggcctgagcaagacctacctgtccaagacactggcccagtacacctccaagacatgcagcaactgtgggtttaccatcaccagcgccgactacgacagggtgctggagaagctgaagaagacagcaacaggctggatgaccacaattaacggcaaggagctgaaggtggagggccagattacctactacaacagatacaagagacagaacgtagtcaaggacctgtccgtcgagctggatagactgagcgaagaatctgtgaacaacgacatctcctcctggacaaagggcagaagcggagaagctctgagcctcctgaagaaaagattctcccatagacccgtgcaggagaagttcgtgtgcctgaactgcggcttcgagacacacgcagccgagcaagccgccctgaacatcgccagatcctggctgttcctgcggagccaggagtacaagaaataccagacaaacaagacaaccggcaacaccgataagagagccttcgtcgagacctggcagtccttttaccggaagaagcttaaggaggtgtggaaacctgccgtgcggtctggcggatctggcggaggctccaccagccccaagaaaaagagaaaagtctaagctgccttctgcggggcttgccttctggccatgcccttcttctctcccttgcacctgtacctcttggtctttgaataaagcctgagtaggaaggctagcaaaaaaaaaaaaaaaaaaaaaaaaaaaaaaaaaaaaaaaaaaaaaaaaaaaaaaaaaaaaaaaaaaaaaaaaaaaaaaaagcccagccggctccccaacctctaccgaggagggcacctctgagtccgccacccccgagagcggccctggcacctccaccgagcccagcgagggcagcgcacccggcagccctgccggcagccccacctccacagaggagggaaccagcaccgagcccagcgaaggcagcgccccaggcaccagcaccgagcctagtgagcaggagattaaacggatcaacaagatcagaagaagacttgtgaaagacagcaacaccaagaaggccggcaagacaggccccatgaaaaccctgctggttagagtgatgacacccgatctgagagagcggctggaaaacctgagaaagaagcctgaaaatatcccccagcccatcagcaatacatctagagccaacctgaataagctgctgaccgattacaccgaaatgaagaaggcgatcctgcatgtgtactgggaagagttccagaaggaccctgtgggcctgatgagccgggtggcccagcctgccagcaagaagatcgatcagaacaagctgaaacctgagatggacgagaagggcaacctgaccaccgccggctttgcctgctctcagtgtggccagcccctgttcgtgtacaagctggagcaggtgtctgagaagggcaaggcttacaccaactacttcggacggtgcaatgtggccgagcacgaaaagctgatcctgctggcccagctgaagcccgagaaggatagcgacgaagccgtgacatatagcctgggaaagtttgggcagagggccctggatttctacagcattcatgtgaccaaggagtccacccaccccgtgaagcccctggcccagatcgccggaaacagatacgcctccggacctgtgggaaaggccctgagcgacgcatgtatgggcacaatcgcctccttcctgtctaagtaccaggacatcatcatcgaacaccagaaggtggtgaagggcaaccagaagagactggagagcctgcgggagctggccggcaaggaaaacctggaataccctagcgtgaccctgccacctcagcctcacaccaaggagggcgttgatgcctacaacgaagtgatcgcccgggtgcgaatgtgggtgaacctgaacctgtggcagaagctgaagctaagcagagatgatgccaagcctctgctgagactgaagggattcccttcctttcctctggtcgagagacaggccaacgaagtggactggtgggacatggtgtgtaacgtgaagaagctgatcaacgagaaaaaggaggatggcaaggtgttttggcagaatctggctggctacaagagacaggaagccctgagaccatacctgagcagcgaggaagatcggaagaagggaaagaaattcgctcggtaccagctgggcgacctgctgctgcacctggaaaagaagcacggcgaggactggggaaaggtgtacgacgaggcctgggagcggattgacaagaaagtggaaggcctgagcaagcacatcaagctggaagaggaacggagaagcgaggacgcccagagcaaggccgccctgaccgactggctgcgggctaaggccagcttcgtgatcgagggcctgaaggaggccgacaaggacgagttctgcagatgcgagctgaagctgcagaagtggtacggggacctgcggggaaagcccttcgccatcgaagccgagaacagcatcctggacatcagcggcttcagcaagcagtacaactgtgccttcatctggcagaaggacggcgtgaagaagctgaacctgtacctgatcatcaactacttcaagggcggcaagctgcggttcaagaagatcaaacctgaagccttcgaagccaacagattctacaccgtgatcaacaaaaagagcggcgagatcgtgcccatggaggtgaacttcaacttcgacgaccccaacctgatcatcctgcctctggcctttggcaagagacagggcagagaattcatctggaacgacctgctgtccctggaaaccggcagcctgaagctggccaacggaagagtgatcgagaagacactgtacaacagaagaacccggcaggatgagcctgccctgttcgtggccctgaccttcgagcggcgggaggtcctggactcctccaatatcaaaccaatgaacctgatcggcgtggcaagaggcgaaaacatccccgccgtgatcgccctgaccgaccccgagggctgcccactgagccggtttaaggatagcctgggaaacccaacccacatcctgagaatcggcgagagctataaggagaagcagcggaccatccaggccaagaaggaggtggagcagcggagagccggcggctacagccggaagtacgccagcaaagccaagaatctggcagacgatatggtgagaaacaccgctagagatctgctgtactacgccgtgacccaggatgccatgctgatcttcgccaacctgagccggggcttcggccggcagggcaagcggaccttcatggccgagagacagtacacacggatggaggactggctgaccgccaagctggcctacgagggcctgagcaagacctacctgtccaagacactggcccagtacacctccaagacatgcagcaactgtgggtttaccatcaccagcgccgactacgacagggtgctggagaagctgaagaagacagcaacaggctggatgaccacaattaacggcaaggagctgaaggtggagggccagattacctactacaacagatacaagagacagaacgtagtcaaggacctgtccgtcgagctggatagactgagcgaagaatctgtgaacaacgacatctcctcctggacaaagggcagaagcggagaagctctgagcctcctgaagaaaagattctcccatagacccgtgcaggagaagttcgtgtgcctgaactgcggcttcgagacacacgcagccgagcaagccgccctgaacatcgccagatcctggctgttcctgcggagccaggagtacaagaaataccagacaaacaagacaaccggcaacaccgataagagagccttcgtcgagacctggcagtccttttaccggaagaagcttaaggaggtgtggaaacctgccgtgcggtctggcggatctggcggaggctccaccagccccaagaaaaagagaaaagtctaagctgccttctgcggggcttgccttctggccatgcccttcttctctcccttgcacctgtacctcttggtctttgaataaagcctgagtaggaaggctagcaaaaaaaaaaaaaaaaaaaaaaaaaaaaaaaaaaaaaaaaaaaaaaaaaaaaaaaaaaaaaaaaaaaaaaaaaaaaaaaa

SEQ ID NO: 9663 - RNA, 8787 nt, synthetic construct
  source 1..8787: mol_type = other RNA
aggaaataagagagaaaagaagagtaagaagaaatataagagccaccatggcccctaagaagaagcgtaaagtgagccggatgaaccacgaccaggagttcgacccccctaaggtgtaccctcccgtccccgccgagaagagaaagcccatccgggtcctgagcctgttcgatggcatcgccaccggtctgctggtgctgaaggacctgggcatccaggtggataggtacattgcctccgaggtgtgcgaggactccatcaccgtgggaatggtgcgtcatcagggcaagatcatgtacgtgggcgacgtgcggagcgtgacacagaagcatatccaggagtggggccctttcgacctggtgatcggcggcagcccttgcaatgacctgagcatcgtgaacccagcccggaagggcctgtacgagggaaccggcagactgttcttcgagttttacagactgctgcacgacgcccggcctaaggaaggcgacgaccggcccttcttttggctgttcgagaatgtggtggccatgggagtcagcgacaagcgggatattagccggttcctggagagcaaccccgtgatgatcgatgccaaggaagtgagcgccgcccaccgggccagatacttctggggcaatctgcctggcatgaacagacccctggccagcaccgtgaacgacaagctggagctgcaggagtgcctggagcacggccggatcgccaagttcagcaaggtgagaaccatcaccacccgaagcaacagcatcaaacaaggcaaggaccagcactttcctgtgttcatgaacgagaaggaggacatcctgtggtgtaccgagatggagagagtgttcgggttcccagtccactacacagatgtcagcaacatgtctagactggccagacagagactgctgggaagaagctggtccgtccctgtgatcagacacctgttcgcccctctgaaggagtacttcgcctgcgtgagcagcggcaacagcaacgccaacagccggggccccagcttctctagcggcctggtgccactgtccctgagagggagccacatgggccccatggagatctacaaaaccgtgagcgcctggaagcggcagcctgtgcgcgtgctgagcctgtttcggaatatcgataaagtcctgaaaagcctgggattcctggagagcggctctggctccggcggtggcaccctgaagtacgtggaggatgtgacaaacgtggtcagacgggatgtggagaagtggggccccttcgatctggtgtacggcagcacccaacccctgggcagctcttgtgaccggtgccctggctggtacatgtttcagttccaccggatcctgcagtacgccctgccgagacaggagtcccagcggccattcttttggattttcatggacaacttgctgctgaccgaggatgaccaggaaactaccactcggttcctgcagaccgaagccgtgaccctgcaggacgtgagaggccgggactaccagaacgccatgcgggtgtggtccaacatccctggactgaaaagcaagcacgcacctctgacccctaaagaagaggagtacctgcaggcccaggtgcggagcagaagcaagctggacgcccctaaggtggatctgctggtgaagaattgcctcctgcccctgagagagtacttcaagtatttcagccagaatagtctgcccctgggaggcagcggcggcggcatgcccctgaaggcccagtaccaggagatggtgaccttcgaggacgtggccgtgcacttcaccaagaccgagtggaccggcctgagccccgcccagagggccctgtacaggagcgtgatgctggagaacttcggcaacctgaccgccctgggctaccccgtgcccaagcccgccctgatcagcctgctggagggcggcgacatggcctggggcctggaggcccaggacgacccccccgccgagggcggcccaagcagcggcgcccctcctcccagcggcggcaggcggcccaagcagcggcgcccctcctcccagcggcggcagcccagccggctccccaacctctaccgaggagggcacctctgagtccgccacccccgagagcggccctggcacctccaccgagcccagcgagggcagcgcacccggcagccctgccggcagccccacctccacagaggagggaaccagcaccgagcccagcgaaggcagcgccccaggcaccagcaccgagcctagtgagcaggagattaaacggatcaacaagatcagaagaagacttgtgaaagacagcaacaccaagaaggccggcaagacaggccccatgaaaaccctgctggttagagtgatgacacccgatctgagagagcggctggaaaacctgagaaagaagcctgaaaatatcccccagcccatcagcaatacatctagagccaacctgaataagctgctgaccgattacaccgaaatgaagaaggcgatcctgcatgtgtactgggaagagttccagaaggaccctgtgggcctgatgagccgggtggcccagcctgccagcaagaagatcgatcagaacaagctgaaacctgagatggacgagaagggcaacctgaccaccgccggctttgcctgctctcagtgtggccagcccctgttcgtgtacaagctggagcaggtgtctgagaagggcaaggcttacaccaactacttcggacggtgcaatgtggccgagcacgaaaagctgatcctgctggcccagctgaagcccgagaaggatagcgacgaagccgtgacatatagcctgggaaagtttgggcagagggccctggatttctacagcattcatgtgaccaaggagtccacccaccccgtgaagcccctggcccagatcgccggaaacagatacgcctccggacctgtgggaaaggccctgagcgacgcatgtatgggcacaatcgcctccttcctgtctaagtaccaggacatcatcatcgaacaccagaaggtggtgaagggcaaccagaagagactggagagcctgcgggagctggccggcaaggaaaacctggaataccctagcgtgaccctgccacctcagcctcacaccaaggagggcgttgatgcctacaacgaagtgatcgcccgggtgcgaatgtgggtgaacctgaacctgtggcagaagctgaagctaagcagagatgatgccaagcctctgctgagactgaagggattcccttcctttcctctggtcgagagacaggccaacgaagtggactggtgggacatggtgtgtaacgtgaagaagctgatcaacgagaaaaaggaggatggcaaggtgttttggcagaatctggctggctacaagagacaggaagccctgagaccatacctgagcagcgaggaagatcggaagaagggaaagaaattcgctcggtaccagctgggcgacctgctgctgcacctggaaaagaagcacggcgaggactggggaaaggtgtacgacgaggcctgggagcggattgacaagaaagtggaaggcctgagcaagcacatcaagctggaagaggaacggagaagcgaggacgcccagagcaaggccgccctgaccgactggctgcgggctaaggccagcttcgtgatcgagggcctgaaggaggccgacaaggacgagttctgcagatgcgagctgaagctgcagaagtggtacggggacctgcggggaaagcccttcgccatcgaagccgagaacagcatcctggacatcagcggcttcagcaagcagtacaactgtgccttcatctggcagaaggacggcgtgaagaagctgaacctgtacctgatcatcaactacttcaagggcggcaagctgcggttcaagaagatcaaacctgaagccttcgaagccaacagattctacaccgtgatcaacaaaaagagcggcgagatcgtgcccatggaggtgaacttcaacttcgacgaccccaacctgatcatcctgcctctggcctttggcaagagacagggcagagaattcatctggaacgacctgctgtccctggaaaccggcagcctgaagctggccaacggaagagtgatcgagaagacactgtacaacagaagaacccggcaggatgagcctgccctgttcgtggccctgaccttcgagcggcgggaggtcctggactcctccaatatcaaaccaatgaacctgatcggcgtggcaagaggcgaaaacatccccgccgtgatcgccctgaccgaccccgagggctgcccactgagccggtttaaggatagcctgggaaacccaacccacatcctgagaatcggcgagagctataaggagaagcagcggaccatccaggccaagaaggaggtggagcagcggagagccggcggctacagccggaagtacgccagcaaagccaagaatctggcagacgatatggtgagaaacaccgctagagatctgctgtactacgccgtgacccaggatgccatgctgatcttcgccaacctgagccggggcttcggccggcagggcaagcggaccttcatggccgagagacagtacacacggatggaggactggctgaccgccaagctggcctacgagggcctgagcaagacctacctgtccaagacactggcccagtacacctccaagacatgcagcaactgtgggtttaccatcaccagcgccgactacgacagggtgctggagaagctgaagaagacagcaacaggctggatgaccacaattaacggcaaggagctgaaggtggagggccagattacctactacaacagatacaagagacagaacgtagtcaaggacctgtccgtcgagctggatagactgagcgaagaatctgtgaacaacgacatctcctcctggacaaagggcagaagcggagaagctctgagcctcctgaagaaaagattctcccatagacccgtgcaggagaagttcgtgtgcctgaactgcggcttcgagacacacgcagccgagcaagccgccctgaacatcgccagatcctggctgttcctgcggagccaggagtacaagaaataccagacaaacaagacaaccggcaacaccgataagagagccttcgtcgagacctggcagtccttttaccggaagaagcttaaggaggtgtggaaacctgccgtgcggtctggcggatctggcggaggctccaccagccccaagaaaaagagaaaagtctaagctgccttctgcggggcttgccttctggccatgcccttcttctctcccttgcacctgtacctcttggtctttgaataaagcctgagtaggaaggctagcaaaaaaaaaaaaaaaaaaaaaaaaaaaaaaaaaaaaaaaaaaaaaaaaaaaaaaaaaaaaaaaaaaaaaaaaaaaaaaaagcccagccggctccccaacctctaccgaggagggcacctctgagtccgccacccccgagagcggccctggcacctccaccgagcccagcgagggcagcgcacccggcagccctgccggcagccccacctccacagaggagggaaccagcaccgagcccagcgaaggcagcgccccaggcaccagcaccgagcctagtgagcaggagattaaacggatcaacaagatcagaagaagacttgtgaaagacagcaacaccaagaaggccggcaagacaggccccatgaaaaccctgctggttagagtgatgacacccgatctgagagagcggctggaaaacctgagaaagaagcctgaaaatatcccccagcccatcagcaatacatctagagccaacctgaataagctgctgaccgattacaccgaaatgaagaaggcgatcctgcatgtgtactgggaagagttccagaaggaccctgtgggcctgatgagccgggtggcccagcctgccagcaagaagatcgatcagaacaagctgaaacctgagatggacgagaagggcaacctgaccaccgccggctttgcctgctctcagtgtggccagcccctgttcgtgtacaagctggagcaggtgtctgagaagggcaaggcttacaccaactacttcggacggtgcaatgtggccgagcacgaaaagctgatcctgctggcccagctgaagcccgagaaggatagcgacgaagccgtgacatatagcctgggaaagtttgggcagagggccctggatttctacagcattcatgtgaccaaggagtccacccaccccgtgaagcccctggcccagatcgccggaaacagatacgcctccggacctgtgggaaaggccctgagcgacgcatgtatgggcacaatcgcctccttcctgtctaagtaccaggacatcatcatcgaacaccagaaggtggtgaagggcaaccagaagagactggagagcctgcgggagctggccggcaaggaaaacctggaataccctagcgtgaccctgccacctcagcctcacaccaaggagggcgttgatgcctacaacgaagtgatcgcccgggtgcgaatgtgggtgaacctgaacctgtggcagaagctgaagctaagcagagatgatgccaagcctctgctgagactgaagggattcccttcctttcctctggtcgagagacaggccaacgaagtggactggtgggacatggtgtgtaacgtgaagaagctgatcaacgagaaaaaggaggatggcaaggtgttttggcagaatctggctggctacaagagacaggaagccctgagaccatacctgagcagcgaggaagatcggaagaagggaaagaaattcgctcggtaccagctgggcgacctgctgctgcacctggaaaagaagcacggcgaggactggggaaaggtgtacgacgaggcctgggagcggattgacaagaaagtggaaggcctgagcaagcacatcaagctggaagaggaacggagaagcgaggacgcccagagcaaggccgccctgaccgactggctgcgggctaaggccagcttcgtgatcgagggcctgaaggaggccgacaaggacgagttctgcagatgcgagctgaagctgcagaagtggtacggggacctgcggggaaagcccttcgccatcgaagccgagaacagcatcctggacatcagcggcttcagcaagcagtacaactgtgccttcatctggcagaaggacggcgtgaagaagctgaacctgtacctgatcatcaactacttcaagggcggcaagctgcggttcaagaagatcaaacctgaagccttcgaagccaacagattctacaccgtgatcaacaaaaagagcggcgagatcgtgcccatggaggtgaacttcaacttcgacgaccccaacctgatcatcctgcctctggcctttggcaagagacagggcagagaattcatctggaacgacctgctgtccctggaaaccggcagcctgaagctggccaacggaagagtgatcgagaagacactgtacaacagaagaacccggcaggatgagcctgccctgttcgtggccctgaccttcgagcggcgggaggtcctggactcctccaatatcaaaccaatgaacctgatcggcgtggcaagaggcgaaaacatccccgccgtgatcgccctgaccgaccccgagggctgcccactgagccggtttaaggatagcctgggaaacccaacccacatcctgagaatcggcgagagctataaggagaagcagcggaccatccaggccaagaaggaggtggagcagcggagagccggcggctacagccggaagtacgccagcaaagccaagaatctggcagacgatatggtgagaaacaccgctagagatctgctgtactacgccgtgacccaggatgccatgctgatcttcgccaacctgagccggggcttcggccggcagggcaagcggaccttcatggccgagagacagtacacacggatggaggactggctgaccgccaagctggcctacgagggcctgagcaagacctacctgtccaagacactggcccagtacacctccaagacatgcagcaactgtgggtttaccatcaccagcgccgactacgacagggtgctggagaagctgaagaagacagcaacaggctggatgaccacaattaacggcaaggagctgaaggtggagggccagattacctactacaacagatacaagagacagaacgtagtcaaggacctgtccgtcgagctggatagactgagcgaagaatctgtgaacaacgacatctcctcctggacaaagggcagaagcggagaagctctgagcctcctgaagaaaagattctcccatagacccgtgcaggagaagttcgtgtgcctgaactgcggcttcgagacacacgcagccgagcaagccgccctgaacatcgccagatcctggctgttcctgcggagccaggagtacaagaaataccagacaaacaagacaaccggcaacaccgataagagagccttcgtcgagacctggcagtccttttaccggaagaagcttaaggaggtgtggaaacctgccgtgcggtctggcggatctggcggaggctccaccagccccaagaaaaagagaaaagtctaagctgccttctgcggggcttgccttctggccatgcccttcttctctcccttgcacctgtacctcttggtctttgaataaagcctgagtaggaaggctagcaaaaaaaaaaaaaaaaaaaaaaaaaaaaaaaaaaaaaaaaaaaaaaaaaaaaaaaaaaaaaaaaaaaaaaaaaaaaaaaa

SEQ ID NO: 9664 - RNA, 8787 nt, synthetic construct
  source 1..8787: mol_type = other RNA
aggaaataagagagaaaagaagagtaagaagaaatataagagccaccatggcccctaagaagaagcgtaaagtgagccggatgaaccacgaccaggagttcgacccccctaaggtgtaccctcccgtccccgccgagaagagaaagcccatccgggtcctgagcctgttcgatggcatcgccaccggtctgctggtgctgaaggacctgggcatccaggtggataggtacattgcctccgaggtgtgcgaggactccatcaccgtgggaatggtgcgtcatcagggcaagatcatgtacgtgggcgacgtgcggagcgtgacacagaagcatatccaggagtggggccctttcgacctggtgatcggcggcagcccttgcaatgacctgagcatcgtgaacccagcccggaagggcctgtacgagggaaccggcagactgttcttcgagttttacagactgctgcacgacgcccggcctaaggaaggcgacgaccggcccttcttttggctgttcgagaatgtggtggccatgggagtcagcgacaagcgggatattagccggttcctggagagcaaccccgtgatgatcgatgccaaggaagtgagcgccgcccaccgggccagatacttctggggcaatctgcctggcatgaacagacccctggccagcaccgtgaacgacaagctggagctgcaggagtgcctggagcacggccggatcgccaagttcagcaaggtgagaaccatcaccacccgaagcaacagcatcaaacaaggcaaggaccagcactttcctgtgttcatgaacgagaaggaggacatcctgtggtgtaccgagatggagagagtgttcgggttcccagtccactacacagatgtcagcaacatgtctagactggccagacagagactgctgggaagaagctggtccgtccctgtgatcagacacctgttcgcccctctgaaggagtacttcgcctgcgtgagcagcggcaacagcaacgccaacagccggggccccagcttctctagcggcctggtgccactgtccctgagagggagccacatgggccccatggagatctacaaaaccgtgagcgcctggaagcggcagcctgtgcgcgtgctgagcctgtttcggaatatcgataaagtcctgaaaagcctgggattcctggagagcggctctggctccggcggtggcaccctgaagtacgtggaggatgtgacaaacgtggtcagacgggatgtggagaagtggggccccttcgatctggtgtacggcagcacccaacccctgggcagctcttgtgaccggtgccctggctggtacatgtttcagttccaccggatcctgcagtacgccctgccgagacaggagtcccagcggccattcttttggattttcatggacaacttgctgctgaccgaggatgaccaggaaactaccactcggttcctgcagaccgaagccgtgaccctgcaggacgtgagaggccgggactaccagaacgccatgcgggtgtggtccaacatccctggactgaaaagcaagcacgcacctctgacccctaaagaagaggagtacctgcaggcccaggtgcggagcagaagcaagctggacgcccctaaggtggatctgctggtgaagaattgcctcctgcccctgagagagtacttcaagtatttcagccagaatagtctgcccctgggaggcagcggcggcggcgtgcccgccctggtgaccttcagggacgtggccgtggacttcacccaggaggagtggaggcacctggagcccgcccagagggccctgcacagggacgtgatgctggagaacttccagaacctggtgagcgtgggcctgcccgtgagcaaggtggacgtgatcagcctgctggagaggggcgaggccccctggcagcccgagggcggcggcccccccgacccctgctacgactacctgaactggggcggcccaagcagcggcgcccctcctcccagcggcggcaggcggcccaagcagcggcgcccctcctcccagcggcggcagcccagccggctccccaacctctaccgaggagggcacctctgagtccgccacccccgagagcggccctggcacctccaccgagcccagcgagggcagcgcacccggcagccctgccggcagccccacctccacagaggagggaaccagcaccgagcccagcgaaggcagcgccccaggcaccagcaccgagcctagtgagcaggagattaaacggatcaacaagatcagaagaagacttgtgaaagacagcaacaccaagaaggccggcaagacaggccccatgaaaaccctgctggttagagtgatgacacccgatctgagagagcggctggaaaacctgagaaagaagcctgaaaatatcccccagcccatcagcaatacatctagagccaacctgaataagctgctgaccgattacaccgaaatgaagaaggcgatcctgcatgtgtactgggaagagttccagaaggaccctgtgggcctgatgagccgggtggcccagcctgccagcaagaagatcgatcagaacaagctgaaacctgagatggacgagaagggcaacctgaccaccgccggctttgcctgctctcagtgtggccagcccctgttcgtgtacaagctggagcaggtgtctgagaagggcaaggcttacaccaactacttcggacggtgcaatgtggccgagcacgaaaagctgatcctgctggcccagctgaagcccgagaaggatagcgacgaagccgtgacatatagcctgggaaagtttgggcagagggccctggatttctacagcattcatgtgaccaaggagtccacccaccccgtgaagcccctggcccagatcgccggaaacagatacgcctccggacctgtgggaaaggccctgagcgacgcatgtatgggcacaatcgcctccttcctgtctaagtaccaggacatcatcatcgaacaccagaaggtggtgaagggcaaccagaagagactggagagcctgcgggagctggccggcaaggaaaacctggaataccctagcgtgaccctgccacctcagcctcacaccaaggagggcgttgatgcctacaacgaagtgatcgcccgggtgcgaatgtgggtgaacctgaacctgtggcagaagctgaagctaagcagagatgatgccaagcctctgctgagactgaagggattcccttcctttcctctggtcgagagacaggccaacgaagtggactggtgggacatggtgtgtaacgtgaagaagctgatcaacgagaaaaaggaggatggcaaggtgttttggcagaatctggctggctacaagagacaggaagccctgagaccatacctgagcagcgaggaagatcggaagaagggaaagaaattcgctcggtaccagctgggcgacctgctgctgcacctggaaaagaagcacggcgaggactggggaaaggtgtacgacgaggcctgggagcggattgacaagaaagtggaaggcctgagcaagcacatcaagctggaagaggaacggagaagcgaggacgcccagagcaaggccgccctgaccgactggctgcgggctaaggccagcttcgtgatcgagggcctgaaggaggccgacaaggacgagttctgcagatgcgagctgaagctgcagaagtggtacggggacctgcggggaaagcccttcgccatcgaagccgagaacagcatcctggacatcagcggcttcagcaagcagtacaactgtgccttcatctggcagaaggacggcgtgaagaagctgaacctgtacctgatcatcaactacttcaagggcggcaagctgcggttcaagaagatcaaacctgaagccttcgaagccaacagattctacaccgtgatcaacaaaaagagcggcgagatcgtgcccatggaggtgaacttcaacttcgacgaccccaacctgatcatcctgcctctggcctttggcaagagacagggcagagaattcatctggaacgacctgctgtccctggaaaccggcagcctgaagctggccaacggaagagtgatcgagaagacactgtacaacagaagaacccggcaggatgagcctgccctgttcgtggccctgaccttcgagcggcgggaggtcctggactcctccaatatcaaaccaatgaacctgatcggcgtggcaagaggcgaaaacatccccgccgtgatcgccctgaccgaccccgagggctgcccactgagccggtttaaggatagcctgggaaacccaacccacatcctgagaatcggcgagagctataaggagaagcagcggaccatccaggccaagaaggaggtggagcagcggagagccggcggctacagccggaagtacgccagcaaagccaagaatctggcagacgatatggtgagaaacaccgctagagatctgctgtactacgccgtgacccaggatgccatgctgatcttcgccaacctgagccggggcttcggccggcagggcaagcggaccttcatggccgagagacagtacacacggatggaggactggctgaccgccaagctggcctacgagggcctgagcaagacctacctgtccaagacactggcccagtacacctccaagacatgcagcaactgtgggtttaccatcaccagcgccgactacgacagggtgctggagaagctgaagaagacagcaacaggctggatgaccacaattaacggcaaggagctgaaggtggagggccagattacctactacaacagatacaagagacagaacgtagtcaaggacctgtccgtcgagctggatagactgagcgaagaatctgtgaacaacgacatctcctcctggacaaagggcagaagcggagaagctctgagcctcctgaagaaaagattctcccatagacccgtgcaggagaagttcgtgtgcctgaactgcggcttcgagacacacgcagccgagcaagccgccctgaacatcgccagatcctggctgttcctgcggagccaggagtacaagaaataccagacaaacaagacaaccggcaacaccgataagagagccttcgtcgagacctggcagtccttttaccggaagaagcttaaggaggtgtggaaacctgccgtgcggtctggcggatctggcggaggctccaccagccccaagaaaaagagaaaagtctaagctgccttctgcggggcttgccttctggccatgcccttcttctctcccttgcacctgtacctcttggtctttgaataaagcctgagtaggaaggctagcaaaaaaaaaaaaaaaaaaaaaaaaaaaaaaaaaaaaaaaaaaaaaaaaaaaaaaaaaaaaaaaaaaaaaaaaaaaaaaaagcccagccggctccccaacctctaccgaggagggcacctctgagtccgccacccccgagagcggccctggcacctccaccgagcccagcgagggcagcgcacccggcagccctgccggcagccccacctccacagaggagggaaccagcaccgagcccagcgaaggcagcgccccaggcaccagcaccgagcctagtgagcaggagattaaacggatcaacaagatcagaagaagacttgtgaaagacagcaacaccaagaaggccggcaagacaggccccatgaaaaccctgctggttagagtgatgacacccgatctgagagagcggctggaaaacctgagaaagaagcctgaaaatatcccccagcccatcagcaatacatctagagccaacctgaataagctgctgaccgattacaccgaaatgaagaaggcgatcctgcatgtgtactgggaagagttccagaaggaccctgtgggcctgatgagccgggtggcccagcctgccagcaagaagatcgatcagaacaagctgaaacctgagatggacgagaagggcaacctgaccaccgccggctttgcctgctctcagtgtggccagcccctgttcgtgtacaagctggagcaggtgtctgagaagggcaaggcttacaccaactacttcggacggtgcaatgtggccgagcacgaaaagctgatcctgctggcccagctgaagcccgagaaggatagcgacgaagccgtgacatatagcctgggaaagtttgggcagagggccctggatttctacagcattcatgtgaccaaggagtccacccaccccgtgaagcccctggcccagatcgccggaaacagatacgcctccggacctgtgggaaaggccctgagcgacgcatgtatgggcacaatcgcctccttcctgtctaagtaccaggacatcatcatcgaacaccagaaggtggtgaagggcaaccagaagagactggagagcctgcgggagctggccggcaaggaaaacctggaataccctagcgtgaccctgccacctcagcctcacaccaaggagggcgttgatgcctacaacgaagtgatcgcccgggtgcgaatgtgggtgaacctgaacctgtggcagaagctgaagctaagcagagatgatgccaagcctctgctgagactgaagggattcccttcctttcctctggtcgagagacaggccaacgaagtggactggtgggacatggtgtgtaacgtgaagaagctgatcaacgagaaaaaggaggatggcaaggtgttttggcagaatctggctggctacaagagacaggaagccctgagaccatacctgagcagcgaggaagatcggaagaagggaaagaaattcgctcggtaccagctgggcgacctgctgctgcacctggaaaagaagcacggcgaggactggggaaaggtgtacgacgaggcctgggagcggattgacaagaaagtggaaggcctgagcaagcacatcaagctggaagaggaacggagaagcgaggacgcccagagcaaggccgccctgaccgactggctgcgggctaaggccagcttcgtgatcgagggcctgaaggaggccgacaaggacgagttctgcagatgcgagctgaagctgcagaagtggtacggggacctgcggggaaagcccttcgccatcgaagccgagaacagcatcctggacatcagcggcttcagcaagcagtacaactgtgccttcatctggcagaaggacggcgtgaagaagctgaacctgtacctgatcatcaactacttcaagggcggcaagctgcggttcaagaagatcaaacctgaagccttcgaagccaacagattctacaccgtgatcaacaaaaagagcggcgagatcgtgcccatggaggtgaacttcaacttcgacgaccccaacctgatcatcctgcctctggcctttggcaagagacagggcagagaattcatctggaacgacctgctgtccctggaaaccggcagcctgaagctggccaacggaagagtgatcgagaagacactgtacaacagaagaacccggcaggatgagcctgccctgttcgtggccctgaccttcgagcggcgggaggtcctggactcctccaatatcaaaccaatgaacctgatcggcgtggcaagaggcgaaaacatccccgccgtgatcgccctgaccgaccccgagggctgcccactgagccggtttaaggatagcctgggaaacccaacccacatcctgagaatcggcgagagctataaggagaagcagcggaccatccaggccaagaaggaggtggagcagcggagagccggcggctacagccggaagtacgccagcaaagccaagaatctggcagacgatatggtgagaaacaccgctagagatctgctgtactacgccgtgacccaggatgccatgctgatcttcgccaacctgagccggggcttcggccggcagggcaagcggaccttcatggccgagagacagtacacacggatggaggactggctgaccgccaagctggcctacgagggcctgagcaagacctacctgtccaagacactggcccagtacacctccaagacatgcagcaactgtgggtttaccatcaccagcgccgactacgacagggtgctggagaagctgaagaagacagcaacaggctggatgaccacaattaacggcaaggagctgaaggtggagggccagattacctactacaacagatacaagagacagaacgtagtcaaggacctgtccgtcgagctggatagactgagcgaagaatctgtgaacaacgacatctcctcctggacaaagggcagaagcggagaagctctgagcctcctgaagaaaagattctcccatagacccgtgcaggagaagttcgtgtgcctgaactgcggcttcgagacacacgcagccgagcaagccgccctgaacatcgccagatcctggctgttcctgcggagccaggagtacaagaaataccagacaaacaagacaaccggcaacaccgataagagagccttcgtcgagacctggcagtccttttaccggaagaagcttaaggaggtgtggaaacctgccgtgcggtctggcggatctggcggaggctccaccagccccaagaaaaagagaaaagtctaagctgccttctgcggggcttgccttctggccatgcccttcttctctcccttgcacctgtacctcttggtctttgaataaagcctgagtaggaaggctagcaaaaaaaaaaaaaaaaaaaaaaaaaaaaaaaaaaaaaaaaaaaaaaaaaaaaaaaaaaaaaaaaaaaaaaaaaaaaaaaa

SEQ ID NO: 9665 - RNA, 8787 nt, synthetic construct
  source 1..8787: mol_type = other RNA
aggaaataagagagaaaagaagagtaagaagaaatataagagccaccatggcccctaagaagaagcgtaaagtgagccggatgaaccacgaccaggagttcgacccccctaaggtgtaccctcccgtccccgccgagaagagaaagcccatccgggtcctgagcctgttcgatggcatcgccaccggtctgctggtgctgaaggacctgggcatccaggtggataggtacattgcctccgaggtgtgcgaggactccatcaccgtgggaatggtgcgtcatcagggcaagatcatgtacgtgggcgacgtgcggagcgtgacacagaagcatatccaggagtggggccctttcgacctggtgatcggcggcagcccttgcaatgacctgagcatcgtgaacccagcccggaagggcctgtacgagggaaccggcagactgttcttcgagttttacagactgctgcacgacgcccggcctaaggaaggcgacgaccggcccttcttttggctgttcgagaatgtggtggccatgggagtcagcgacaagcgggatattagccggttcctggagagcaaccccgtgatgatcgatgccaaggaagtgagcgccgcccaccgggccagatacttctggggcaatctgcctggcatgaacagacccctggccagcaccgtgaacgacaagctggagctgcaggagtgcctggagcacggccggatcgccaagttcagcaaggtgagaaccatcaccacccgaagcaacagcatcaaacaaggcaaggaccagcactttcctgtgttcatgaacgagaaggaggacatcctgtggtgtaccgagatggagagagtgttcgggttcccagtccactacacagatgtcagcaacatgtctagactggccagacagagactgctgggaagaagctggtccgtccctgtgatcagacacctgttcgcccctctgaaggagtacttcgcctgcgtgagcagcggcaacagcaacgccaacagccggggccccagcttctctagcggcctggtgccactgtccctgagagggagccacatgggccccatggagatctacaaaaccgtgagcgcctggaagcggcagcctgtgcgcgtgctgagcctgtttcggaatatcgataaagtcctgaaaagcctgggattcctggagagcggctctggctccggcggtggcaccctgaagtacgtggaggatgtgacaaacgtggtcagacgggatgtggagaagtggggccccttcgatctggtgtacggcagcacccaacccctgggcagctcttgtgaccggtgccctggctggtacatgtttcagttccaccggatcctgcagtacgccctgccgagacaggagtcccagcggccattcttttggattttcatggacaacttgctgctgaccgaggatgaccaggaaactaccactcggttcctgcagaccgaagccgtgaccctgcaggacgtgagaggccgggactaccagaacgccatgcgggtgtggtccaacatccctggactgaaaagcaagcacgcacctctgacccctaaagaagaggagtacctgcaggcccaggtgcggagcagaagcaagctggacgcccctaaggtggatctgctggtgaagaattgcctcctgcccctgagagagtacttcaagtatttcagccagaatagtctgcccctgggaggcagcggcggcggcgcccaggagagcctgaccttcgacgacgtggccgtggagttcacctgggaggagtggcagctgctggcccccgcccagaaggacctgtacagggacgtgatgctggagaactacagcaacctggtgagcgtgggctaccaggccagcaagcccgacgccctgagcaagctggtgcagggcgagcccccctggaccatggaggacgagatccactgcaggacccacagcgagatctgggaggtgggcggcccaagcagcggcgcccctcctcccagcggcggcaggcggcccaagcagcggcgcccctcctcccagcggcggcagcccagccggctccccaacctctaccgaggagggcacctctgagtccgccacccccgagagcggccctggcacctccaccgagcccagcgagggcagcgcacccggcagccctgccggcagccccacctccacagaggagggaaccagcaccgagcccagcgaaggcagcgccccaggcaccagcaccgagcctagtgagcaggagattaaacggatcaacaagatcagaagaagacttgtgaaagacagcaacaccaagaaggccggcaagacaggccccatgaaaaccctgctggttagagtgatgacacccgatctgagagagcggctggaaaacctgagaaagaagcctgaaaatatcccccagcccatcagcaatacatctagagccaacctgaataagctgctgaccgattacaccgaaatgaagaaggcgatcctgcatgtgtactgggaagagttccagaaggaccctgtgggcctgatgagccgggtggcccagcctgccagcaagaagatcgatcagaacaagctgaaacctgagatggacgagaagggcaacctgaccaccgccggctttgcctgctctcagtgtggccagcccctgttcgtgtacaagctggagcaggtgtctgagaagggcaaggcttacaccaactacttcggacggtgcaatgtggccgagcacgaaaagctgatcctgctggcccagctgaagcccgagaaggatagcgacgaagccgtgacatatagcctgggaaagtttgggcagagggccctggatttctacagcattcatgtgaccaaggagtccacccaccccgtgaagcccctggcccagatcgccggaaacagatacgcctccggacctgtgggaaaggccctgagcgacgcatgtatgggcacaatcgcctccttcctgtctaagtaccaggacatcatcatcgaacaccagaaggtggtgaagggcaaccagaagagactggagagcctgcgggagctggccggcaaggaaaacctggaataccctagcgtgaccctgccacctcagcctcacaccaaggagggcgttgatgcctacaacgaagtgatcgcccgggtgcgaatgtgggtgaacctgaacctgtggcagaagctgaagctaagcagagatgatgccaagcctctgctgagactgaagggattcccttcctttcctctggtcgagagacaggccaacgaagtggactggtgggacatggtgtgtaacgtgaagaagctgatcaacgagaaaaaggaggatggcaaggtgttttggcagaatctggctggctacaagagacaggaagccctgagaccatacctgagcagcgaggaagatcggaagaagggaaagaaattcgctcggtaccagctgggcgacctgctgctgcacctggaaaagaagcacggcgaggactggggaaaggtgtacgacgaggcctgggagcggattgacaagaaagtggaaggcctgagcaagcacatcaagctggaagaggaacggagaagcgaggacgcccagagcaaggccgccctgaccgactggctgcgggctaaggccagcttcgtgatcgagggcctgaaggaggccgacaaggacgagttctgcagatgcgagctgaagctgcagaagtggtacggggacctgcggggaaagcccttcgccatcgaagccgagaacagcatcctggacatcagcggcttcagcaagcagtacaactgtgccttcatctggcagaaggacggcgtgaagaagctgaacctgtacctgatcatcaactacttcaagggcggcaagctgcggttcaagaagatcaaacctgaagccttcgaagccaacagattctacaccgtgatcaacaaaaagagcggcgagatcgtgcccatggaggtgaacttcaacttcgacgaccccaacctgatcatcctgcctctggcctttggcaagagacagggcagagaattcatctggaacgacctgctgtccctggaaaccggcagcctgaagctggccaacggaagagtgatcgagaagacactgtacaacagaagaacccggcaggatgagcctgccctgttcgtggccctgaccttcgagcggcgggaggtcctggactcctccaatatcaaaccaatgaacctgatcggcgtggcaagaggcgaaaacatccccgccgtgatcgccctgaccgaccccgagggctgcccactgagccggtttaaggatagcctgggaaacccaacccacatcctgagaatcggcgagagctataaggagaagcagcggaccatccaggccaagaaggaggtggagcagcggagagccggcggctacagccggaagtacgccagcaaagccaagaatctggcagacgatatggtgagaaacaccgctagagatctgctgtactacgccgtgacccaggatgccatgctgatcttcgccaacctgagccggggcttcggccggcagggcaagcggaccttcatggccgagagacagtacacacggatggaggactggctgaccgccaagctggcctacgagggcctgagcaagacctacctgtccaagacactggcccagtacacctccaagacatgcagcaactgtgggtttaccatcaccagcgccgactacgacagggtgctggagaagctgaagaagacagcaacaggctggatgaccacaattaacggcaaggagctgaaggtggagggccagattacctactacaacagatacaagagacagaacgtagtcaaggacctgtccgtcgagctggatagactgagcgaagaatctgtgaacaacgacatctcctcctggacaaagggcagaagcggagaagctctgagcctcctgaagaaaagattctcccatagacccgtgcaggagaagttcgtgtgcctgaactgcggcttcgagacacacgcagccgagcaagccgccctgaacatcgccagatcctggctgttcctgcggagccaggagtacaagaaataccagacaaacaagacaaccggcaacaccgataagagagccttcgtcgagacctggcagtccttttaccggaagaagcttaaggaggtgtggaaacctgccgtgcggtctggcggatctggcggaggctccaccagccccaagaaaaagagaaaagtctaagctgccttctgcggggcttgccttctggccatgcccttcttctctcccttgcacctgtacctcttggtctttgaataaagcctgagtaggaaggctagcaaaaaaaaaaaaaaaaaaaaaaaaaaaaaaaaaaaaaaaaaaaaaaaaaaaaaaaaaaaaaaaaaaaaaaaaaaaaaaaagcccagccggctccccaacctctaccgaggagggcacctctgagtccgccacccccgagagcggccctggcacctccaccgagcccagcgagggcagcgcacccggcagccctgccggcagccccacctccacagaggagggaaccagcaccgagcccagcgaaggcagcgccccaggcaccagcaccgagcctagtgagcaggagattaaacggatcaacaagatcagaagaagacttgtgaaagacagcaacaccaagaaggccggcaagacaggccccatgaaaaccctgctggttagagtgatgacacccgatctgagagagcggctggaaaacctgagaaagaagcctgaaaatatcccccagcccatcagcaatacatctagagccaacctgaataagctgctgaccgattacaccgaaatgaagaaggcgatcctgcatgtgtactgggaagagttccagaaggaccctgtgggcctgatgagccgggtggcccagcctgccagcaagaagatcgatcagaacaagctgaaacctgagatggacgagaagggcaacctgaccaccgccggctttgcctgctctcagtgtggccagcccctgttcgtgtacaagctggagcaggtgtctgagaagggcaaggcttacaccaactacttcggacggtgcaatgtggccgagcacgaaaagctgatcctgctggcccagctgaagcccgagaaggatagcgacgaagccgtgacatatagcctgggaaagtttgggcagagggccctggatttctacagcattcatgtgaccaaggagtccacccaccccgtgaagcccctggcccagatcgccggaaacagatacgcctccggacctgtgggaaaggccctgagcgacgcatgtatgggcacaatcgcctccttcctgtctaagtaccaggacatcatcatcgaacaccagaaggtggtgaagggcaaccagaagagactggagagcctgcgggagctggccggcaaggaaaacctggaataccctagcgtgaccctgccacctcagcctcacaccaaggagggcgttgatgcctacaacgaagtgatcgcccgggtgcgaatgtgggtgaacctgaacctgtggcagaagctgaagctaagcagagatgatgccaagcctctgctgagactgaagggattcccttcctttcctctggtcgagagacaggccaacgaagtggactggtgggacatggtgtgtaacgtgaagaagctgatcaacgagaaaaaggaggatggcaaggtgttttggcagaatctggctggctacaagagacaggaagccctgagaccatacctgagcagcgaggaagatcggaagaagggaaagaaattcgctcggtaccagctgggcgacctgctgctgcacctggaaaagaagcacggcgaggactggggaaaggtgtacgacgaggcctgggagcggattgacaagaaagtggaaggcctgagcaagcacatcaagctggaagaggaacggagaagcgaggacgcccagagcaaggccgccctgaccgactggctgcgggctaaggccagcttcgtgatcgagggcctgaaggaggccgacaaggacgagttctgcagatgcgagctgaagctgcagaagtggtacggggacctgcggggaaagcccttcgccatcgaagccgagaacagcatcctggacatcagcggcttcagcaagcagtacaactgtgccttcatctggcagaaggacggcgtgaagaagctgaacctgtacctgatcatcaactacttcaagggcggcaagctgcggttcaagaagatcaaacctgaagccttcgaagccaacagattctacaccgtgatcaacaaaaagagcggcgagatcgtgcccatggaggtgaacttcaacttcgacgaccccaacctgatcatcctgcctctggcctttggcaagagacagggcagagaattcatctggaacgacctgctgtccctggaaaccggcagcctgaagctggccaacggaagagtgatcgagaagacactgtacaacagaagaacccggcaggatgagcctgccctgttcgtggccctgaccttcgagcggcgggaggtcctggactcctccaatatcaaaccaatgaacctgatcggcgtggcaagaggcgaaaacatccccgccgtgatcgccctgaccgaccccgagggctgcccactgagccggtttaaggatagcctgggaaacccaacccacatcctgagaatcggcgagagctataaggagaagcagcggaccatccaggccaagaaggaggtggagcagcggagagccggcggctacagccggaagtacgccagcaaagccaagaatctggcagacgatatggtgagaaacaccgctagagatctgctgtactacgccgtgacccaggatgccatgctgatcttcgccaacctgagccggggcttcggccggcagggcaagcggaccttcatggccgagagacagtacacacggatggaggactggctgaccgccaagctggcctacgagggcctgagcaagacctacctgtccaagacactggcccagtacacctccaagacatgcagcaactgtgggtttaccatcaccagcgccgactacgacagggtgctggagaagctgaagaagacagcaacaggctggatgaccacaattaacggcaaggagctgaaggtggagggccagattacctactacaacagatacaagagacagaacgtagtcaaggacctgtccgtcgagctggatagactgagcgaagaatctgtgaacaacgacatctcctcctggacaaagggcagaagcggagaagctctgagcctcctgaagaaaagattctcccatagacccgtgcaggagaagttcgtgtgcctgaactgcggcttcgagacacacgcagccgagcaagccgccctgaacatcgccagatcctggctgttcctgcggagccaggagtacaagaaataccagacaaacaagacaaccggcaacaccgataagagagccttcgtcgagacctggcagtccttttaccggaagaagcttaaggaggtgtggaaacctgccgtgcggtctggcggatctggcggaggctccaccagccccaagaaaaagagaaaagtctaagctgccttctgcggggcttgccttctggccatgcccttcttctctcccttgcacctgtacctcttggtctttgaataaagcctgagtaggaaggctagcaaaaaaaaaaaaaaaaaaaaaaaaaaaaaaaaaaaaaaaaaaaaaaaaaaaaaaaaaaaaaaaaaaaaaaaaaaaaaaaa

SEQ ID NO: 9666 - RNA, 8787 nt, synthetic construct
  source 1..8787: mol_type = other RNA
aggaaataagagagaaaagaagagtaagaagaaatataagagccaccatggcccctaagaagaagcgtaaagtgagccggatgaaccacgaccaggagttcgacccccctaaggtgtaccctcccgtccccgccgagaagagaaagcccatccgggtcctgagcctgttcgatggcatcgccaccggtctgctggtgctgaaggacctgggcatccaggtggataggtacattgcctccgaggtgtgcgaggactccatcaccgtgggaatggtgcgtcatcagggcaagatcatgtacgtgggcgacgtgcggagcgtgacacagaagcatatccaggagtggggccctttcgacctggtgatcggcggcagcccttgcaatgacctgagcatcgtgaacccagcccggaagggcctgtacgagggaaccggcagactgttcttcgagttttacagactgctgcacgacgcccggcctaaggaaggcgacgaccggcccttcttttggctgttcgagaatgtggtggccatgggagtcagcgacaagcgggatattagccggttcctggagagcaaccccgtgatgatcgatgccaaggaagtgagcgccgcccaccgggccagatacttctggggcaatctgcctggcatgaacagacccctggccagcaccgtgaacgacaagctggagctgcaggagtgcctggagcacggccggatcgccaagttcagcaaggtgagaaccatcaccacccgaagcaacagcatcaaacaaggcaaggaccagcactttcctgtgttcatgaacgagaaggaggacatcctgtggtgtaccgagatggagagagtgttcgggttcccagtccactacacagatgtcagcaacatgtctagactggccagacagagactgctgggaagaagctggtccgtccctgtgatcagacacctgttcgcccctctgaaggagtacttcgcctgcgtgagcagcggcaacagcaacgccaacagccggggccccagcttctctagcggcctggtgccactgtccctgagagggagccacatgggccccatggagatctacaaaaccgtgagcgcctggaagcggcagcctgtgcgcgtgctgagcctgtttcggaatatcgataaagtcctgaaaagcctgggattcctggagagcggctctggctccggcggtggcaccctgaagtacgtggaggatgtgacaaacgtggtcagacgggatgtggagaagtggggccccttcgatctggtgtacggcagcacccaacccctgggcagctcttgtgaccggtgccctggctggtacatgtttcagttccaccggatcctgcagtacgccctgccgagacaggagtcccagcggccattcttttggattttcatggacaacttgctgctgaccgaggatgaccaggaaactaccactcggttcctgcagaccgaagccgtgaccctgcaggacgtgagaggccgggactaccagaacgccatgcgggtgtggtccaacatccctggactgaaaagcaagcacgcacctctgacccctaaagaagaggagtacctgcaggcccaggtgcggagcagaagcaagctggacgcccctaaggtggatctgctggtgaagaattgcctcctgcccctgagagagtacttcaagtatttcagccagaatagtctgcccctgggaggcagcggcggcggcttccaggagagcgtgaccttcaaggacgtgaccgtgaacttcacccaggaggagtgggagcagctgaaccccgcccagagggagctgtacagggacgtgatgctggagaactacaggaacctgatcagcctgggcctgcccatcagcaagcccgacgtgatcttccagctggagcagggccaggagccctggatgctggacgtgcagggcaccgagaggcaggccgtgcccaggagcaccagcggcggcccaagcagcggcgcccctcctcccagcggcggcaggcggcccaagcagcggcgcccctcctcccagcggcggcagcccagccggctccccaacctctaccgaggagggcacctctgagtccgccacccccgagagcggccctggcacctccaccgagcccagcgagggcagcgcacccggcagccctgccggcagccccacctccacagaggagggaaccagcaccgagcccagcgaaggcagcgccccaggcaccagcaccgagcctagtgagcaggagattaaacggatcaacaagatcagaagaagacttgtgaaagacagcaacaccaagaaggccggcaagacaggccccatgaaaaccctgctggttagagtgatgacacccgatctgagagagcggctggaaaacctgagaaagaagcctgaaaatatcccccagcccatcagcaatacatctagagccaacctgaataagctgctgaccgattacaccgaaatgaagaaggcgatcctgcatgtgtactgggaagagttccagaaggaccctgtgggcctgatgagccgggtggcccagcctgccagcaagaagatcgatcagaacaagctgaaacctgagatggacgagaagggcaacctgaccaccgccggctttgcctgctctcagtgtggccagcccctgttcgtgtacaagctggagcaggtgtctgagaagggcaaggcttacaccaactacttcggacggtgcaatgtggccgagcacgaaaagctgatcctgctggcccagctgaagcccgagaaggatagcgacgaagccgtgacatatagcctgggaaagtttgggcagagggccctggatttctacagcattcatgtgaccaaggagtccacccaccccgtgaagcccctggcccagatcgccggaaacagatacgcctccggacctgtgggaaaggccctgagcgacgcatgtatgggcacaatcgcctccttcctgtctaagtaccaggacatcatcatcgaacaccagaaggtggtgaagggcaaccagaagagactggagagcctgcgggagctggccggcaaggaaaacctggaataccctagcgtgaccctgccacctcagcctcacaccaaggagggcgttgatgcctacaacgaagtgatcgcccgggtgcgaatgtgggtgaacctgaacctgtggcagaagctgaagctaagcagagatgatgccaagcctctgctgagactgaagggattcccttcctttcctctggtcgagagacaggccaacgaagtggactggtgggacatggtgtgtaacgtgaagaagctgatcaacgagaaaaaggaggatggcaaggtgttttggcagaatctggctggctacaagagacaggaagccctgagaccatacctgagcagcgaggaagatcggaagaagggaaagaaattcgctcggtaccagctgggcgacctgctgctgcacctggaaaagaagcacggcgaggactggggaaaggtgtacgacgaggcctgggagcggattgacaagaaagtggaaggcctgagcaagcacatcaagctggaagaggaacggagaagcgaggacgcccagagcaaggccgccctgaccgactggctgcgggctaaggccagcttcgtgatcgagggcctgaaggaggccgacaaggacgagttctgcagatgcgagctgaagctgcagaagtggtacggggacctgcggggaaagcccttcgccatcgaagccgagaacagcatcctggacatcagcggcttcagcaagcagtacaactgtgccttcatctggcagaaggacggcgtgaagaagctgaacctgtacctgatcatcaactacttcaagggcggcaagctgcggttcaagaagatcaaacctgaagccttcgaagccaacagattctacaccgtgatcaacaaaaagagcggcgagatcgtgcccatggaggtgaacttcaacttcgacgaccccaacctgatcatcctgcctctggcctttggcaagagacagggcagagaattcatctggaacgacctgctgtccctggaaaccggcagcctgaagctggccaacggaagagtgatcgagaagacactgtacaacagaagaacccggcaggatgagcctgccctgttcgtggccctgaccttcgagcggcgggaggtcctggactcctccaatatcaaaccaatgaacctgatcggcgtggcaagaggcgaaaacatccccgccgtgatcgccctgaccgaccccgagggctgcccactgagccggtttaaggatagcctgggaaacccaacccacatcctgagaatcggcgagagctataaggagaagcagcggaccatccaggccaagaaggaggtggagcagcggagagccggcggctacagccggaagtacgccagcaaagccaagaatctggcagacgatatggtgagaaacaccgctagagatctgctgtactacgccgtgacccaggatgccatgctgatcttcgccaacctgagccggggcttcggccggcagggcaagcggaccttcatggccgagagacagtacacacggatggaggactggctgaccgccaagctggcctacgagggcctgagcaagacctacctgtccaagacactggcccagtacacctccaagacatgcagcaactgtgggtttaccatcaccagcgccgactacgacagggtgctggagaagctgaagaagacagcaacaggctggatgaccacaattaacggcaaggagctgaaggtggagggccagattacctactacaacagatacaagagacagaacgtagtcaaggacctgtccgtcgagctggatagactgagcgaagaatctgtgaacaacgacatctcctcctggacaaagggcagaagcggagaagctctgagcctcctgaagaaaagattctcccatagacccgtgcaggagaagttcgtgtgcctgaactgcggcttcgagacacacgcagccgagcaagccgccctgaacatcgccagatcctggctgttcctgcggagccaggagtacaagaaataccagacaaacaagacaaccggcaacaccgataagagagccttcgtcgagacctggcagtccttttaccggaagaagcttaaggaggtgtggaaacctgccgtgcggtctggcggatctggcggaggctccaccagccccaagaaaaagagaaaagtctaagctgccttctgcggggcttgccttctggccatgcccttcttctctcccttgcacctgtacctcttggtctttgaataaagcctgagtaggaaggctagcaaaaaaaaaaaaaaaaaaaaaaaaaaaaaaaaaaaaaaaaaaaaaaaaaaaaaaaaaaaaaaaaaaaaaaaaaaaaaaaagcccagccggctccccaacctctaccgaggagggcacctctgagtccgccacccccgagagcggccctggcacctccaccgagcccagcgagggcagcgcacccggcagccctgccggcagccccacctccacagaggagggaaccagcaccgagcccagcgaaggcagcgccccaggcaccagcaccgagcctagtgagcaggagattaaacggatcaacaagatcagaagaagacttgtgaaagacagcaacaccaagaaggccggcaagacaggccccatgaaaaccctgctggttagagtgatgacacccgatctgagagagcggctggaaaacctgagaaagaagcctgaaaatatcccccagcccatcagcaatacatctagagccaacctgaataagctgctgaccgattacaccgaaatgaagaaggcgatcctgcatgtgtactgggaagagttccagaaggaccctgtgggcctgatgagccgggtggcccagcctgccagcaagaagatcgatcagaacaagctgaaacctgagatggacgagaagggcaacctgaccaccgccggctttgcctgctctcagtgtggccagcccctgttcgtgtacaagctggagcaggtgtctgagaagggcaaggcttacaccaactacttcggacggtgcaatgtggccgagcacgaaaagctgatcctgctggcccagctgaagcccgagaaggatagcgacgaagccgtgacatatagcctgggaaagtttgggcagagggccctggatttctacagcattcatgtgaccaaggagtccacccaccccgtgaagcccctggcccagatcgccggaaacagatacgcctccggacctgtgggaaaggccctgagcgacgcatgtatgggcacaatcgcctccttcctgtctaagtaccaggacatcatcatcgaacaccagaaggtggtgaagggcaaccagaagagactggagagcctgcgggagctggccggcaaggaaaacctggaataccctagcgtgaccctgccacctcagcctcacaccaaggagggcgttgatgcctacaacgaagtgatcgcccgggtgcgaatgtgggtgaacctgaacctgtggcagaagctgaagctaagcagagatgatgccaagcctctgctgagactgaagggattcccttcctttcctctggtcgagagacaggccaacgaagtggactggtgggacatggtgtgtaacgtgaagaagctgatcaacgagaaaaaggaggatggcaaggtgttttggcagaatctggctggctacaagagacaggaagccctgagaccatacctgagcagcgaggaagatcggaagaagggaaagaaattcgctcggtaccagctgggcgacctgctgctgcacctggaaaagaagcacggcgaggactggggaaaggtgtacgacgaggcctgggagcggattgacaagaaagtggaaggcctgagcaagcacatcaagctggaagaggaacggagaagcgaggacgcccagagcaaggccgccctgaccgactggctgcgggctaaggccagcttcgtgatcgagggcctgaaggaggccgacaaggacgagttctgcagatgcgagctgaagctgcagaagtggtacggggacctgcggggaaagcccttcgccatcgaagccgagaacagcatcctggacatcagcggcttcagcaagcagtacaactgtgccttcatctggcagaaggacggcgtgaagaagctgaacctgtacctgatcatcaactacttcaagggcggcaagctgcggttcaagaagatcaaacctgaagccttcgaagccaacagattctacaccgtgatcaacaaaaagagcggcgagatcgtgcccatggaggtgaacttcaacttcgacgaccccaacctgatcatcctgcctctggcctttggcaagagacagggcagagaattcatctggaacgacctgctgtccctggaaaccggcagcctgaagctggccaacggaagagtgatcgagaagacactgtacaacagaagaacccggcaggatgagcctgccctgttcgtggccctgaccttcgagcggcgggaggtcctggactcctccaatatcaaaccaatgaacctgatcggcgtggcaagaggcgaaaacatccccgccgtgatcgccctgaccgaccccgagggctgcccactgagccggtttaaggatagcctgggaaacccaacccacatcctgagaatcggcgagagctataaggagaagcagcggaccatccaggccaagaaggaggtggagcagcggagagccggcggctacagccggaagtacgccagcaaagccaagaatctggcagacgatatggtgagaaacaccgctagagatctgctgtactacgccgtgacccaggatgccatgctgatcttcgccaacctgagccggggcttcggccggcagggcaagcggaccttcatggccgagagacagtacacacggatggaggactggctgaccgccaagctggcctacgagggcctgagcaagacctacctgtccaagacactggcccagtacacctccaagacatgcagcaactgtgggtttaccatcaccagcgccgactacgacagggtgctggagaagctgaagaagacagcaacaggctggatgaccacaattaacggcaaggagctgaaggtggagggccagattacctactacaacagatacaagagacagaacgtagtcaaggacctgtccgtcgagctggatagactgagcgaagaatctgtgaacaacgacatctcctcctggacaaagggcagaagcggagaagctctgagcctcctgaagaaaagattctcccatagacccgtgcaggagaagttcgtgtgcctgaactgcggcttcgagacacacgcagccgagcaagccgccctgaacatcgccagatcctggctgttcctgcggagccaggagtacaagaaataccagacaaacaagacaaccggcaacaccgataagagagccttcgtcgagacctggcagtccttttaccggaagaagcttaaggaggtgtggaaacctgccgtgcggtctggcggatctggcggaggctccaccagccccaagaaaaagagaaaagtctaagctgccttctgcggggcttgccttctggccatgcccttcttctctcccttgcacctgtacctcttggtctttgaataaagcctgagtaggaaggctagcaaaaaaaaaaaaaaaaaaaaaaaaaaaaaaaaaaaaaaaaaaaaaaaaaaaaaaaaaaaaaaaaaaaaaaaaaaaaaaaa

SEQ ID NO: 9667 - RNA, 8787 nt, synthetic construct
  source 1..8787: mol_type = other RNA
aggaaataagagagaaaagaagagtaagaagaaatataagagccaccatggcccctaagaagaagcgtaaagtgagccggatgaaccacgaccaggagttcgacccccctaaggtgtaccctcccgtccccgccgagaagagaaagcccatccgggtcctgagcctgttcgatggcatcgccaccggtctgctggtgctgaaggacctgggcatccaggtggataggtacattgcctccgaggtgtgcgaggactccatcaccgtgggaatggtgcgtcatcagggcaagatcatgtacgtgggcgacgtgcggagcgtgacacagaagcatatccaggagtggggccctttcgacctggtgatcggcggcagcccttgcaatgacctgagcatcgtgaacccagcccggaagggcctgtacgagggaaccggcagactgttcttcgagttttacagactgctgcacgacgcccggcctaaggaaggcgacgaccggcccttcttttggctgttcgagaatgtggtggccatgggagtcagcgacaagcgggatattagccggttcctggagagcaaccccgtgatgatcgatgccaaggaagtgagcgccgcccaccgggccagatacttctggggcaatctgcctggcatgaacagacccctggccagcaccgtgaacgacaagctggagctgcaggagtgcctggagcacggccggatcgccaagttcagcaaggtgagaaccatcaccacccgaagcaacagcatcaaacaaggcaaggaccagcactttcctgtgttcatgaacgagaaggaggacatcctgtggtgtaccgagatggagagagtgttcgggttcccagtccactacacagatgtcagcaacatgtctagactggccagacagagactgctgggaagaagctggtccgtccctgtgatcagacacctgttcgcccctctgaaggagtacttcgcctgcgtgagcagcggcaacagcaacgccaacagccggggccccagcttctctagcggcctggtgccactgtccctgagagggagccacatgggccccatggagatctacaaaaccgtgagcgcctggaagcggcagcctgtgcgcgtgctgagcctgtttcggaatatcgataaagtcctgaaaagcctgggattcctggagagcggctctggctccggcggtggcaccctgaagtacgtggaggatgtgacaaacgtggtcagacgggatgtggagaagtggggccccttcgatctggtgtacggcagcacccaacccctgggcagctcttgtgaccggtgccctggctggtacatgtttcagttccaccggatcctgcagtacgccctgccgagacaggagtcccagcggccattcttttggattttcatggacaacttgctgctgaccgaggatgaccaggaaactaccactcggttcctgcagaccgaagccgtgaccctgcaggacgtgagaggccgggactaccagaacgccatgcgggtgtggtccaacatccctggactgaaaagcaagcacgcacctctgacccctaaagaagaggagtacctgcaggcccaggtgcggagcagaagcaagctggacgcccctaaggtggatctgctggtgaagaattgcctcctgcccctgagagagtacttcaagtatttcagccagaatagtctgcccctgggaggcagcggcggcggcgtggccttcgaggacgtggccgtgtacttcaccgccgaggagtgggacctgctgggccccaaccagaagagcctgtacagcgaggtgatgatggagaactacgagaacgtgagctacctggccgacaactggaagaagaccatcgccttcgcccacagccagaaggacttcatccacaagctgcaccagaggacccacaaggaggacgagcaccacaccagggccgagccctgcgagagcaccggcggcccaagcagcggcgcccctcctcccagcggcggcaggcggcccaagcagcggcgcccctcctcccagcggcggcagcccagccggctccccaacctctaccgaggagggcacctctgagtccgccacccccgagagcggccctggcacctccaccgagcccagcgagggcagcgcacccggcagccctgccggcagccccacctccacagaggagggaaccagcaccgagcccagcgaaggcagcgccccaggcaccagcaccgagcctagtgagcaggagattaaacggatcaacaagatcagaagaagacttgtgaaagacagcaacaccaagaaggccggcaagacaggccccatgaaaaccctgctggttagagtgatgacacccgatctgagagagcggctggaaaacctgagaaagaagcctgaaaatatcccccagcccatcagcaatacatctagagccaacctgaataagctgctgaccgattacaccgaaatgaagaaggcgatcctgcatgtgtactgggaagagttccagaaggaccctgtgggcctgatgagccgggtggcccagcctgccagcaagaagatcgatcagaacaagctgaaacctgagatggacgagaagggcaacctgaccaccgccggctttgcctgctctcagtgtggccagcccctgttcgtgtacaagctggagcaggtgtctgagaagggcaaggcttacaccaactacttcggacggtgcaatgtggccgagcacgaaaagctgatcctgctggcccagctgaagcccgagaaggatagcgacgaagccgtgacatatagcctgggaaagtttgggcagagggccctggatttctacagcattcatgtgaccaaggagtccacccaccccgtgaagcccctggcccagatcgccggaaacagatacgcctccggacctgtgggaaaggccctgagcgacgcatgtatgggcacaatcgcctccttcctgtctaagtaccaggacatcatcatcgaacaccagaaggtggtgaagggcaaccagaagagactggagagcctgcgggagctggccggcaaggaaaacctggaataccctagcgtgaccctgccacctcagcctcacaccaaggagggcgttgatgcctacaacgaagtgatcgcccgggtgcgaatgtgggtgaacctgaacctgtggcagaagctgaagctaagcagagatgatgccaagcctctgctgagactgaagggattcccttcctttcctctggtcgagagacaggccaacgaagtggactggtgggacatggtgtgtaacgtgaagaagctgatcaacgagaaaaaggaggatggcaaggtgttttggcagaatctggctggctacaagagacaggaagccctgagaccatacctgagcagcgaggaagatcggaagaagggaaagaaattcgctcggtaccagctgggcgacctgctgctgcacctggaaaagaagcacggcgaggactggggaaaggtgtacgacgaggcctgggagcggattgacaagaaagtggaaggcctgagcaagcacatcaagctggaagaggaacggagaagcgaggacgcccagagcaaggccgccctgaccgactggctgcgggctaaggccagcttcgtgatcgagggcctgaaggaggccgacaaggacgagttctgcagatgcgagctgaagctgcagaagtggtacggggacctgcggggaaagcccttcgccatcgaagccgagaacagcatcctggacatcagcggcttcagcaagcagtacaactgtgccttcatctggcagaaggacggcgtgaagaagctgaacctgtacctgatcatcaactacttcaagggcggcaagctgcggttcaagaagatcaaacctgaagccttcgaagccaacagattctacaccgtgatcaacaaaaagagcggcgagatcgtgcccatggaggtgaacttcaacttcgacgaccccaacctgatcatcctgcctctggcctttggcaagagacagggcagagaattcatctggaacgacctgctgtccctggaaaccggcagcctgaagctggccaacggaagagtgatcgagaagacactgtacaacagaagaacccggcaggatgagcctgccctgttcgtggccctgaccttcgagcggcgggaggtcctggactcctccaatatcaaaccaatgaacctgatcggcgtggcaagaggcgaaaacatccccgccgtgatcgccctgaccgaccccgagggctgcccactgagccggtttaaggatagcctgggaaacccaacccacatcctgagaatcggcgagagctataaggagaagcagcggaccatccaggccaagaaggaggtggagcagcggagagccggcggctacagccggaagtacgccagcaaagccaagaatctggcagacgatatggtgagaaacaccgctagagatctgctgtactacgccgtgacccaggatgccatgctgatcttcgccaacctgagccggggcttcggccggcagggcaagcggaccttcatggccgagagacagtacacacggatggaggactggctgaccgccaagctggcctacgagggcctgagcaagacctacctgtccaagacactggcccagtacacctccaagacatgcagcaactgtgggtttaccatcaccagcgccgactacgacagggtgctggagaagctgaagaagacagcaacaggctggatgaccacaattaacggcaaggagctgaaggtggagggccagattacctactacaacagatacaagagacagaacgtagtcaaggacctgtccgtcgagctggatagactgagcgaagaatctgtgaacaacgacatctcctcctggacaaagggcagaagcggagaagctctgagcctcctgaagaaaagattctcccatagacccgtgcaggagaagttcgtgtgcctgaactgcggcttcgagacacacgcagccgagcaagccgccctgaacatcgccagatcctggctgttcctgcggagccaggagtacaagaaataccagacaaacaagacaaccggcaacaccgataagagagccttcgtcgagacctggcagtccttttaccggaagaagcttaaggaggtgtggaaacctgccgtgcggtctggcggatctggcggaggctccaccagccccaagaaaaagagaaaagtctaagctgccttctgcggggcttgccttctggccatgcccttcttctctcccttgcacctgtacctcttggtctttgaataaagcctgagtaggaaggctagcaaaaaaaaaaaaaaaaaaaaaaaaaaaaaaaaaaaaaaaaaaaaaaaaaaaaaaaaaaaaaaaaaaaaaaaaaaaaaaaagcccagccggctccccaacctctaccgaggagggcacctctgagtccgccacccccgagagcggccctggcacctccaccgagcccagcgagggcagcgcacccggcagccctgccggcagccccacctccacagaggagggaaccagcaccgagcccagcgaaggcagcgccccaggcaccagcaccgagcctagtgagcaggagattaaacggatcaacaagatcagaagaagacttgtgaaagacagcaacaccaagaaggccggcaagacaggccccatgaaaaccctgctggttagagtgatgacacccgatctgagagagcggctggaaaacctgagaaagaagcctgaaaatatcccccagcccatcagcaatacatctagagccaacctgaataagctgctgaccgattacaccgaaatgaagaaggcgatcctgcatgtgtactgggaagagttccagaaggaccctgtgggcctgatgagccgggtggcccagcctgccagcaagaagatcgatcagaacaagctgaaacctgagatggacgagaagggcaacctgaccaccgccggctttgcctgctctcagtgtggccagcccctgttcgtgtacaagctggagcaggtgtctgagaagggcaaggcttacaccaactacttcggacggtgcaatgtggccgagcacgaaaagctgatcctgctggcccagctgaagcccgagaaggatagcgacgaagccgtgacatatagcctgggaaagtttgggcagagggccctggatttctacagcattcatgtgaccaaggagtccacccaccccgtgaagcccctggcccagatcgccggaaacagatacgcctccggacctgtgggaaaggccctgagcgacgcatgtatgggcacaatcgcctccttcctgtctaagtaccaggacatcatcatcgaacaccagaaggtggtgaagggcaaccagaagagactggagagcctgcgggagctggccggcaaggaaaacctggaataccctagcgtgaccctgccacctcagcctcacaccaaggagggcgttgatgcctacaacgaagtgatcgcccgggtgcgaatgtgggtgaacctgaacctgtggcagaagctgaagctaagcagagatgatgccaagcctctgctgagactgaagggattcccttcctttcctctggtcgagagacaggccaacgaagtggactggtgggacatggtgtgtaacgtgaagaagctgatcaacgagaaaaaggaggatggcaaggtgttttggcagaatctggctggctacaagagacaggaagccctgagaccatacctgagcagcgaggaagatcggaagaagggaaagaaattcgctcggtaccagctgggcgacctgctgctgcacctggaaaagaagcacggcgaggactggggaaaggtgtacgacgaggcctgggagcggattgacaagaaagtggaaggcctgagcaagcacatcaagctggaagaggaacggagaagcgaggacgcccagagcaaggccgccctgaccgactggctgcgggctaaggccagcttcgtgatcgagggcctgaaggaggccgacaaggacgagttctgcagatgcgagctgaagctgcagaagtggtacggggacctgcggggaaagcccttcgccatcgaagccgagaacagcatcctggacatcagcggcttcagcaagcagtacaactgtgccttcatctggcagaaggacggcgtgaagaagctgaacctgtacctgatcatcaactacttcaagggcggcaagctgcggttcaagaagatcaaacctgaagccttcgaagccaacagattctacaccgtgatcaacaaaaagagcggcgagatcgtgcccatggaggtgaacttcaacttcgacgaccccaacctgatcatcctgcctctggcctttggcaagagacagggcagagaattcatctggaacgacctgctgtccctggaaaccggcagcctgaagctggccaacggaagagtgatcgagaagacactgtacaacagaagaacccggcaggatgagcctgccctgttcgtggccctgaccttcgagcggcgggaggtcctggactcctccaatatcaaaccaatgaacctgatcggcgtggcaagaggcgaaaacatccccgccgtgatcgccctgaccgaccccgagggctgcccactgagccggtttaaggatagcctgggaaacccaacccacatcctgagaatcggcgagagctataaggagaagcagcggaccatccaggccaagaaggaggtggagcagcggagagccggcggctacagccggaagtacgccagcaaagccaagaatctggcagacgatatggtgagaaacaccgctagagatctgctgtactacgccgtgacccaggatgccatgctgatcttcgccaacctgagccggggcttcggccggcagggcaagcggaccttcatggccgagagacagtacacacggatggaggactggctgaccgccaagctggcctacgagggcctgagcaagacctacctgtccaagacactggcccagtacacctccaagacatgcagcaactgtgggtttaccatcaccagcgccgactacgacagggtgctggagaagctgaagaagacagcaacaggctggatgaccacaattaacggcaaggagctgaaggtggagggccagattacctactacaacagatacaagagacagaacgtagtcaaggacctgtccgtcgagctggatagactgagcgaagaatctgtgaacaacgacatctcctcctggacaaagggcagaagcggagaagctctgagcctcctgaagaaaagattctcccatagacccgtgcaggagaagttcgtgtgcctgaactgcggcttcgagacacacgcagccgagcaagccgccctgaacatcgccagatcctggctgttcctgcggagccaggagtacaagaaataccagacaaacaagacaaccggcaacaccgataagagagccttcgtcgagacctggcagtccttttaccggaagaagcttaaggaggtgtggaaacctgccgtgcggtctggcggatctggcggaggctccaccagccccaagaaaaagagaaaagtctaagctgccttctgcggggcttgccttctggccatgcccttcttctctcccttgcacctgtacctcttggtctttgaataaagcctgagtaggaaggctagcaaaaaaaaaaaaaaaaaaaaaaaaaaaaaaaaaaaaaaaaaaaaaaaaaaaaaaaaaaaaaaaaaaaaaaaaaaaaaaaa

SEQ ID NO: 9668 - RNA, 8787 nt, synthetic construct
  source 1..8787: mol_type = other RNA
aggaaataagagagaaaagaagagtaagaagaaatataagagccaccatggcccctaagaagaagcgtaaagtgagccggatgaaccacgaccaggagttcgacccccctaaggtgtaccctcccgtccccgccgagaagagaaagcccatccgggtcctgagcctgttcgatggcatcgccaccggtctgctggtgctgaaggacctgggcatccaggtggataggtacattgcctccgaggtgtgcgaggactccatcaccgtgggaatggtgcgtcatcagggcaagatcatgtacgtgggcgacgtgcggagcgtgacacagaagcatatccaggagtggggccctttcgacctggtgatcggcggcagcccttgcaatgacctgagcatcgtgaacccagcccggaagggcctgtacgagggaaccggcagactgttcttcgagttttacagactgctgcacgacgcccggcctaaggaaggcgacgaccggcccttcttttggctgttcgagaatgtggtggccatgggagtcagcgacaagcgggatattagccggttcctggagagcaaccccgtgatgatcgatgccaaggaagtgagcgccgcccaccgggccagatacttctggggcaatctgcctggcatgaacagacccctggccagcaccgtgaacgacaagctggagctgcaggagtgcctggagcacggccggatcgccaagttcagcaaggtgagaaccatcaccacccgaagcaacagcatcaaacaaggcaaggaccagcactttcctgtgttcatgaacgagaaggaggacatcctgtggtgtaccgagatggagagagtgttcgggttcccagtccactacacagatgtcagcaacatgtctagactggccagacagagactgctgggaagaagctggtccgtccctgtgatcagacacctgttcgcccctctgaaggagtacttcgcctgcgtgagcagcggcaacagcaacgccaacagccggggccccagcttctctagcggcctggtgccactgtccctgagagggagccacatgggccccatggagatctacaaaaccgtgagcgcctggaagcggcagcctgtgcgcgtgctgagcctgtttcggaatatcgataaagtcctgaaaagcctgggattcctggagagcggctctggctccggcggtggcaccctgaagtacgtggaggatgtgacaaacgtggtcagacgggatgtggagaagtggggccccttcgatctggtgtacggcagcacccaacccctgggcagctcttgtgaccggtgccctggctggtacatgtttcagttccaccggatcctgcagtacgccctgccgagacaggagtcccagcggccattcttttggattttcatggacaacttgctgctgaccgaggatgaccaggaaactaccactcggttcctgcagaccgaagccgtgaccctgcaggacgtgagaggccgggactaccagaacgccatgcgggtgtggtccaacatccctggactgaaaagcaagcacgcacctctgacccctaaagaagaggagtacctgcaggcccaggtgcggagcagaagcaagctggacgcccctaaggtggatctgctggtgaagaattgcctcctgcccctgagagagtacttcaagtatttcagccagaatagtctgcccctgggaggcagcggcggcggccagcagaggcccgtgagcttcaaggacgtggtggtgggcttcacccaggaggagtggaggaggctgaaccccgcccagagggccctgtacagggacgtgatgctggagacctacagcaacctggtgagcgtgggctacgagggcaccaagcccgacgtgatcctgaggctggagcaggaggaggccccctggatctgcgaggccgtgtgccccggctgccactgccaggaggacttcctgagcggcggcccaagcagcggcgcccctcctcccagcggcggcaggcggcccaagcagcggcgcccctcctcccagcggcggcagcccagccggctccccaacctctaccgaggagggcacctctgagtccgccacccccgagagcggccctggcacctccaccgagcccagcgagggcagcgcacccggcagccctgccggcagccccacctccacagaggagggaaccagcaccgagcccagcgaaggcagcgccccaggcaccagcaccgagcctagtgagcaggagattaaacggatcaacaagatcagaagaagacttgtgaaagacagcaacaccaagaaggccggcaagacaggccccatgaaaaccctgctggttagagtgatgacacccgatctgagagagcggctggaaaacctgagaaagaagcctgaaaatatcccccagcccatcagcaatacatctagagccaacctgaataagctgctgaccgattacaccgaaatgaagaaggcgatcctgcatgtgtactgggaagagttccagaaggaccctgtgggcctgatgagccgggtggcccagcctgccagcaagaagatcgatcagaacaagctgaaacctgagatggacgagaagggcaacctgaccaccgccggctttgcctgctctcagtgtggccagcccctgttcgtgtacaagctggagcaggtgtctgagaagggcaaggcttacaccaactacttcggacggtgcaatgtggccgagcacgaaaagctgatcctgctggcccagctgaagcccgagaaggatagcgacgaagccgtgacatatagcctgggaaagtttgggcagagggccctggatttctacagcattcatgtgaccaaggagtccacccaccccgtgaagcccctggcccagatcgccggaaacagatacgcctccggacctgtgggaaaggccctgagcgacgcatgtatgggcacaatcgcctccttcctgtctaagtaccaggacatcatcatcgaacaccagaaggtggtgaagggcaaccagaagagactggagagcctgcgggagctggccggcaaggaaaacctggaataccctagcgtgaccctgccacctcagcctcacaccaaggagggcgttgatgcctacaacgaagtgatcgcccgggtgcgaatgtgggtgaacctgaacctgtggcagaagctgaagctaagcagagatgatgccaagcctctgctgagactgaagggattcccttcctttcctctggtcgagagacaggccaacgaagtggactggtgggacatggtgtgtaacgtgaagaagctgatcaacgagaaaaaggaggatggcaaggtgttttggcagaatctggctggctacaagagacaggaagccctgagaccatacctgagcagcgaggaagatcggaagaagggaaagaaattcgctcggtaccagctgggcgacctgctgctgcacctggaaaagaagcacggcgaggactggggaaaggtgtacgacgaggcctgggagcggattgacaagaaagtggaaggcctgagcaagcacatcaagctggaagaggaacggagaagcgaggacgcccagagcaaggccgccctgaccgactggctgcgggctaaggccagcttcgtgatcgagggcctgaaggaggccgacaaggacgagttctgcagatgcgagctgaagctgcagaagtggtacggggacctgcggggaaagcccttcgccatcgaagccgagaacagcatcctggacatcagcggcttcagcaagcagtacaactgtgccttcatctggcagaaggacggcgtgaagaagctgaacctgtacctgatcatcaactacttcaagggcggcaagctgcggttcaagaagatcaaacctgaagccttcgaagccaacagattctacaccgtgatcaacaaaaagagcggcgagatcgtgcccatggaggtgaacttcaacttcgacgaccccaacctgatcatcctgcctctggcctttggcaagagacagggcagagaattcatctggaacgacctgctgtccctggaaaccggcagcctgaagctggccaacggaagagtgatcgagaagacactgtacaacagaagaacccggcaggatgagcctgccctgttcgtggccctgaccttcgagcggcgggaggtcctggactcctccaatatcaaaccaatgaacctgatcggcgtggcaagaggcgaaaacatccccgccgtgatcgccctgaccgaccccgagggctgcccactgagccggtttaaggatagcctgggaaacccaacccacatcctgagaatcggcgagagctataaggagaagcagcggaccatccaggccaagaaggaggtggagcagcggagagccggcggctacagccggaagtacgccagcaaagccaagaatctggcagacgatatggtgagaaacaccgctagagatctgctgtactacgccgtgacccaggatgccatgctgatcttcgccaacctgagccggggcttcggccggcagggcaagcggaccttcatggccgagagacagtacacacggatggaggactggctgaccgccaagctggcctacgagggcctgagcaagacctacctgtccaagacactggcccagtacacctccaagacatgcagcaactgtgggtttaccatcaccagcgccgactacgacagggtgctggagaagctgaagaagacagcaacaggctggatgaccacaattaacggcaaggagctgaaggtggagggccagattacctactacaacagatacaagagacagaacgtagtcaaggacctgtccgtcgagctggatagactgagcgaagaatctgtgaacaacgacatctcctcctggacaaagggcagaagcggagaagctctgagcctcctgaagaaaagattctcccatagacccgtgcaggagaagttcgtgtgcctgaactgcggcttcgagacacacgcagccgagcaagccgccctgaacatcgccagatcctggctgttcctgcggagccaggagtacaagaaataccagacaaacaagacaaccggcaacaccgataagagagccttcgtcgagacctggcagtccttttaccggaagaagcttaaggaggtgtggaaacctgccgtgcggtctggcggatctggcggaggctccaccagccccaagaaaaagagaaaagtctaagctgccttctgcggggcttgccttctggccatgcccttcttctctcccttgcacctgtacctcttggtctttgaataaagcctgagtaggaaggctagcaaaaaaaaaaaaaaaaaaaaaaaaaaaaaaaaaaaaaaaaaaaaaaaaaaaaaaaaaaaaaaaaaaaaaaaaaaaaaaaagcccagccggctccccaacctctaccgaggagggcacctctgagtccgccacccccgagagcggccctggcacctccaccgagcccagcgagggcagcgcacccggcagccctgccggcagccccacctccacagaggagggaaccagcaccgagcccagcgaaggcagcgccccaggcaccagcaccgagcctagtgagcaggagattaaacggatcaacaagatcagaagaagacttgtgaaagacagcaacaccaagaaggccggcaagacaggccccatgaaaaccctgctggttagagtgatgacacccgatctgagagagcggctggaaaacctgagaaagaagcctgaaaatatcccccagcccatcagcaatacatctagagccaacctgaataagctgctgaccgattacaccgaaatgaagaaggcgatcctgcatgtgtactgggaagagttccagaaggaccctgtgggcctgatgagccgggtggcccagcctgccagcaagaagatcgatcagaacaagctgaaacctgagatggacgagaagggcaacctgaccaccgccggctttgcctgctctcagtgtggccagcccctgttcgtgtacaagctggagcaggtgtctgagaagggcaaggcttacaccaactacttcggacggtgcaatgtggccgagcacgaaaagctgatcctgctggcccagctgaagcccgagaaggatagcgacgaagccgtgacatatagcctgggaaagtttgggcagagggccctggatttctacagcattcatgtgaccaaggagtccacccaccccgtgaagcccctggcccagatcgccggaaacagatacgcctccggacctgtgggaaaggccctgagcgacgcatgtatgggcacaatcgcctccttcctgtctaagtaccaggacatcatcatcgaacaccagaaggtggtgaagggcaaccagaagagactggagagcctgcgggagctggccggcaaggaaaacctggaataccctagcgtgaccctgccacctcagcctcacaccaaggagggcgttgatgcctacaacgaagtgatcgcccgggtgcgaatgtgggtgaacctgaacctgtggcagaagctgaagctaagcagagatgatgccaagcctctgctgagactgaagggattcccttcctttcctctggtcgagagacaggccaacgaagtggactggtgggacatggtgtgtaacgtgaagaagctgatcaacgagaaaaaggaggatggcaaggtgttttggcagaatctggctggctacaagagacaggaagccctgagaccatacctgagcagcgaggaagatcggaagaagggaaagaaattcgctcggtaccagctgggcgacctgctgctgcacctggaaaagaagcacggcgaggactggggaaaggtgtacgacgaggcctgggagcggattgacaagaaagtggaaggcctgagcaagcacatcaagctggaagaggaacggagaagcgaggacgcccagagcaaggccgccctgaccgactggctgcgggctaaggccagcttcgtgatcgagggcctgaaggaggccgacaaggacgagttctgcagatgcgagctgaagctgcagaagtggtacggggacctgcggggaaagcccttcgccatcgaagccgagaacagcatcctggacatcagcggcttcagcaagcagtacaactgtgccttcatctggcagaaggacggcgtgaagaagctgaacctgtacctgatcatcaactacttcaagggcggcaagctgcggttcaagaagatcaaacctgaagccttcgaagccaacagattctacaccgtgatcaacaaaaagagcggcgagatcgtgcccatggaggtgaacttcaacttcgacgaccccaacctgatcatcctgcctctggcctttggcaagagacagggcagagaattcatctggaacgacctgctgtccctggaaaccggcagcctgaagctggccaacggaagagtgatcgagaagacactgtacaacagaagaacccggcaggatgagcctgccctgttcgtggccctgaccttcgagcggcgggaggtcctggactcctccaatatcaaaccaatgaacctgatcggcgtggcaagaggcgaaaacatccccgccgtgatcgccctgaccgaccccgagggctgcccactgagccggtttaaggatagcctgggaaacccaacccacatcctgagaatcggcgagagctataaggagaagcagcggaccatccaggccaagaaggaggtggagcagcggagagccggcggctacagccggaagtacgccagcaaagccaagaatctggcagacgatatggtgagaaacaccgctagagatctgctgtactacgccgtgacccaggatgccatgctgatcttcgccaacctgagccggggcttcggccggcagggcaagcggaccttcatggccgagagacagtacacacggatggaggactggctgaccgccaagctggcctacgagggcctgagcaagacctacctgtccaagacactggcccagtacacctccaagacatgcagcaactgtgggtttaccatcaccagcgccgactacgacagggtgctggagaagctgaagaagacagcaacaggctggatgaccacaattaacggcaaggagctgaaggtggagggccagattacctactacaacagatacaagagacagaacgtagtcaaggacctgtccgtcgagctggatagactgagcgaagaatctgtgaacaacgacatctcctcctggacaaagggcagaagcggagaagctctgagcctcctgaagaaaagattctcccatagacccgtgcaggagaagttcgtgtgcctgaactgcggcttcgagacacacgcagccgagcaagccgccctgaacatcgccagatcctggctgttcctgcggagccaggagtacaagaaataccagacaaacaagacaaccggcaacaccgataagagagccttcgtcgagacctggcagtccttttaccggaagaagcttaaggaggtgtggaaacctgccgtgcggtctggcggatctggcggaggctccaccagccccaagaaaaagagaaaagtctaagctgccttctgcggggcttgccttctggccatgcccttcttctctcccttgcacctgtacctcttggtctttgaataaagcctgagtaggaaggctagcaaaaaaaaaaaaaaaaaaaaaaaaaaaaaaaaaaaaaaaaaaaaaaaaaaaaaaaaaaaaaaaaaaaaaaaaaaaaaaaa

SEQ ID NO: 9669 - RNA, 8787 nt, synthetic construct
  source 1..8787: mol_type = other RNA
aggaaataagagagaaaagaagagtaagaagaaatataagagccaccatggcccctaagaagaagcgtaaagtgagccggatgaaccacgaccaggagttcgacccccctaaggtgtaccctcccgtccccgccgagaagagaaagcccatccgggtcctgagcctgttcgatggcatcgccaccggtctgctggtgctgaaggacctgggcatccaggtggataggtacattgcctccgaggtgtgcgaggactccatcaccgtgggaatggtgcgtcatcagggcaagatcatgtacgtgggcgacgtgcggagcgtgacacagaagcatatccaggagtggggccctttcgacctggtgatcggcggcagcccttgcaatgacctgagcatcgtgaacccagcccggaagggcctgtacgagggaaccggcagactgttcttcgagttttacagactgctgcacgacgcccggcctaaggaaggcgacgaccggcccttcttttggctgttcgagaatgtggtggccatgggagtcagcgacaagcgggatattagccggttcctggagagcaaccccgtgatgatcgatgccaaggaagtgagcgccgcccaccgggccagatacttctggggcaatctgcctggcatgaacagacccctggccagcaccgtgaacgacaagctggagctgcaggagtgcctggagcacggccggatcgccaagttcagcaaggtgagaaccatcaccacccgaagcaacagcatcaaacaaggcaaggaccagcactttcctgtgttcatgaacgagaaggaggacatcctgtggtgtaccgagatggagagagtgttcgggttcccagtccactacacagatgtcagcaacatgtctagactggccagacagagactgctgggaagaagctggtccgtccctgtgatcagacacctgttcgcccctctgaaggagtacttcgcctgcgtgagcagcggcaacagcaacgccaacagccggggccccagcttctctagcggcctggtgccactgtccctgagagggagccacatgggccccatggagatctacaaaaccgtgagcgcctggaagcggcagcctgtgcgcgtgctgagcctgtttcggaatatcgataaagtcctgaaaagcctgggattcctggagagcggctctggctccggcggtggcaccctgaagtacgtggaggatgtgacaaacgtggtcagacgggatgtggagaagtggggccccttcgatctggtgtacggcagcacccaacccctgggcagctcttgtgaccggtgccctggctggtacatgtttcagttccaccggatcctgcagtacgccctgccgagacaggagtcccagcggccattcttttggattttcatggacaacttgctgctgaccgaggatgaccaggaaactaccactcggttcctgcagaccgaagccgtgaccctgcaggacgtgagaggccgggactaccagaacgccatgcgggtgtggtccaacatccctggactgaaaagcaagcacgcacctctgacccctaaagaagaggagtacctgcaggcccaggtgcggagcagaagcaagctggacgcccctaaggtggatctgctggtgaagaattgcctcctgcccctgagagagtacttcaagtatttcagccagaatagtctgcccctgggaggcagcggcggcggcatggccttcagggacgtggccgtggacttcacccaggacgagtgggtgctgctgagccccgcccagaggagcctgtacagggaggtgatgctggagaactacagcaacctggtgagcctgggcatccccttcagcaagcccaagctgatcacccagctggagcagggcaaggagagctggagggaggagaggaagtgcagccccgtgagctgcctgggcgagtggggccactgggtggtgcagggcggcccaagcagcggcgcccctcctcccagcggcggcaggcggcccaagcagcggcgcccctcctcccagcggcggcagcccagccggctccccaacctctaccgaggagggcacctctgagtccgccacccccgagagcggccctggcacctccaccgagcccagcgagggcagcgcacccggcagccctgccggcagccccacctccacagaggagggaaccagcaccgagcccagcgaaggcagcgccccaggcaccagcaccgagcctagtgagcaggagattaaacggatcaacaagatcagaagaagacttgtgaaagacagcaacaccaagaaggccggcaagacaggccccatgaaaaccctgctggttagagtgatgacacccgatctgagagagcggctggaaaacctgagaaagaagcctgaaaatatcccccagcccatcagcaatacatctagagccaacctgaataagctgctgaccgattacaccgaaatgaagaaggcgatcctgcatgtgtactgggaagagttccagaaggaccctgtgggcctgatgagccgggtggcccagcctgccagcaagaagatcgatcagaacaagctgaaacctgagatggacgagaagggcaacctgaccaccgccggctttgcctgctctcagtgtggccagcccctgttcgtgtacaagctggagcaggtgtctgagaagggcaaggcttacaccaactacttcggacggtgcaatgtggccgagcacgaaaagctgatcctgctggcccagctgaagcccgagaaggatagcgacgaagccgtgacatatagcctgggaaagtttgggcagagggccctggatttctacagcattcatgtgaccaaggagtccacccaccccgtgaagcccctggcccagatcgccggaaacagatacgcctccggacctgtgggaaaggccctgagcgacgcatgtatgggcacaatcgcctccttcctgtctaagtaccaggacatcatcatcgaacaccagaaggtggtgaagggcaaccagaagagactggagagcctgcgggagctggccggcaaggaaaacctggaataccctagcgtgaccctgccacctcagcctcacaccaaggagggcgttgatgcctacaacgaagtgatcgcccgggtgcgaatgtgggtgaacctgaacctgtggcagaagctgaagctaagcagagatgatgccaagcctctgctgagactgaagggattcccttcctttcctctggtcgagagacaggccaacgaagtggactggtgggacatggtgtgtaacgtgaagaagctgatcaacgagaaaaaggaggatggcaaggtgttttggcagaatctggctggctacaagagacaggaagccctgagaccatacctgagcagcgaggaagatcggaagaagggaaagaaattcgctcggtaccagctgggcgacctgctgctgcacctggaaaagaagcacggcgaggactggggaaaggtgtacgacgaggcctgggagcggattgacaagaaagtggaaggcctgagcaagcacatcaagctggaagaggaacggagaagcgaggacgcccagagcaaggccgccctgaccgactggctgcgggctaaggccagcttcgtgatcgagggcctgaaggaggccgacaaggacgagttctgcagatgcgagctgaagctgcagaagtggtacggggacctgcggggaaagcccttcgccatcgaagccgagaacagcatcctggacatcagcggcttcagcaagcagtacaactgtgccttcatctggcagaaggacggcgtgaagaagctgaacctgtacctgatcatcaactacttcaagggcggcaagctgcggttcaagaagatcaaacctgaagccttcgaagccaacagattctacaccgtgatcaacaaaaagagcggcgagatcgtgcccatggaggtgaacttcaacttcgacgaccccaacctgatcatcctgcctctggcctttggcaagagacagggcagagaattcatctggaacgacctgctgtccctggaaaccggcagcctgaagctggccaacggaagagtgatcgagaagacactgtacaacagaagaacccggcaggatgagcctgccctgttcgtggccctgaccttcgagcggcgggaggtcctggactcctccaatatcaaaccaatgaacctgatcggcgtggcaagaggcgaaaacatccccgccgtgatcgccctgaccgaccccgagggctgcccactgagccggtttaaggatagcctgggaaacccaacccacatcctgagaatcggcgagagctataaggagaagcagcggaccatccaggccaagaaggaggtggagcagcggagagccggcggctacagccggaagtacgccagcaaagccaagaatctggcagacgatatggtgagaaacaccgctagagatctgctgtactacgccgtgacccaggatgccatgctgatcttcgccaacctgagccggggcttcggccggcagggcaagcggaccttcatggccgagagacagtacacacggatggaggactggctgaccgccaagctggcctacgagggcctgagcaagacctacctgtccaagacactggcccagtacacctccaagacatgcagcaactgtgggtttaccatcaccagcgccgactacgacagggtgctggagaagctgaagaagacagcaacaggctggatgaccacaattaacggcaaggagctgaaggtggagggccagattacctactacaacagatacaagagacagaacgtagtcaaggacctgtccgtcgagctggatagactgagcgaagaatctgtgaacaacgacatctcctcctggacaaagggcagaagcggagaagctctgagcctcctgaagaaaagattctcccatagacccgtgcaggagaagttcgtgtgcctgaactgcggcttcgagacacacgcagccgagcaagccgccctgaacatcgccagatcctggctgttcctgcggagccaggagtacaagaaataccagacaaacaagacaaccggcaacaccgataagagagccttcgtcgagacctggcagtccttttaccggaagaagcttaaggaggtgtggaaacctgccgtgcggtctggcggatctggcggaggctccaccagccccaagaaaaagagaaaagtctaagctgccttctgcggggcttgccttctggccatgcccttcttctctcccttgcacctgtacctcttggtctttgaataaagcctgagtaggaaggctagcaaaaaaaaaaaaaaaaaaaaaaaaaaaaaaaaaaaaaaaaaaaaaaaaaaaaaaaaaaaaaaaaaaaaaaaaaaaaaaaagcccagccggctccccaacctctaccgaggagggcacctctgagtccgccacccccgagagcggccctggcacctccaccgagcccagcgagggcagcgcacccggcagccctgccggcagccccacctccacagaggagggaaccagcaccgagcccagcgaaggcagcgccccaggcaccagcaccgagcctagtgagcaggagattaaacggatcaacaagatcagaagaagacttgtgaaagacagcaacaccaagaaggccggcaagacaggccccatgaaaaccctgctggttagagtgatgacacccgatctgagagagcggctggaaaacctgagaaagaagcctgaaaatatcccccagcccatcagcaatacatctagagccaacctgaataagctgctgaccgattacaccgaaatgaagaaggcgatcctgcatgtgtactgggaagagttccagaaggaccctgtgggcctgatgagccgggtggcccagcctgccagcaagaagatcgatcagaacaagctgaaacctgagatggacgagaagggcaacctgaccaccgccggctttgcctgctctcagtgtggccagcccctgttcgtgtacaagctggagcaggtgtctgagaagggcaaggcttacaccaactacttcggacggtgcaatgtggccgagcacgaaaagctgatcctgctggcccagctgaagcccgagaaggatagcgacgaagccgtgacatatagcctgggaaagtttgggcagagggccctggatttctacagcattcatgtgaccaaggagtccacccaccccgtgaagcccctggcccagatcgccggaaacagatacgcctccggacctgtgggaaaggccctgagcgacgcatgtatgggcacaatcgcctccttcctgtctaagtaccaggacatcatcatcgaacaccagaaggtggtgaagggcaaccagaagagactggagagcctgcgggagctggccggcaaggaaaacctggaataccctagcgtgaccctgccacctcagcctcacaccaaggagggcgttgatgcctacaacgaagtgatcgcccgggtgcgaatgtgggtgaacctgaacctgtggcagaagctgaagctaagcagagatgatgccaagcctctgctgagactgaagggattcccttcctttcctctggtcgagagacaggccaacgaagtggactggtgggacatggtgtgtaacgtgaagaagctgatcaacgagaaaaaggaggatggcaaggtgttttggcagaatctggctggctacaagagacaggaagccctgagaccatacctgagcagcgaggaagatcggaagaagggaaagaaattcgctcggtaccagctgggcgacctgctgctgcacctggaaaagaagcacggcgaggactggggaaaggtgtacgacgaggcctgggagcggattgacaagaaagtggaaggcctgagcaagcacatcaagctggaagaggaacggagaagcgaggacgcccagagcaaggccgccctgaccgactggctgcgggctaaggccagcttcgtgatcgagggcctgaaggaggccgacaaggacgagttctgcagatgcgagctgaagctgcagaagtggtacggggacctgcggggaaagcccttcgccatcgaagccgagaacagcatcctggacatcagcggcttcagcaagcagtacaactgtgccttcatctggcagaaggacggcgtgaagaagctgaacctgtacctgatcatcaactacttcaagggcggcaagctgcggttcaagaagatcaaacctgaagccttcgaagccaacagattctacaccgtgatcaacaaaaagagcggcgagatcgtgcccatggaggtgaacttcaacttcgacgaccccaacctgatcatcctgcctctggcctttggcaagagacagggcagagaattcatctggaacgacctgctgtccctggaaaccggcagcctgaagctggccaacggaagagtgatcgagaagacactgtacaacagaagaacccggcaggatgagcctgccctgttcgtggccctgaccttcgagcggcgggaggtcctggactcctccaatatcaaaccaatgaacctgatcggcgtggcaagaggcgaaaacatccccgccgtgatcgccctgaccgaccccgagggctgcccactgagccggtttaaggatagcctgggaaacccaacccacatcctgagaatcggcgagagctataaggagaagcagcggaccatccaggccaagaaggaggtggagcagcggagagccggcggctacagccggaagtacgccagcaaagccaagaatctggcagacgatatggtgagaaacaccgctagagatctgctgtactacgccgtgacccaggatgccatgctgatcttcgccaacctgagccggggcttcggccggcagggcaagcggaccttcatggccgagagacagtacacacggatggaggactggctgaccgccaagctggcctacgagggcctgagcaagacctacctgtccaagacactggcccagtacacctccaagacatgcagcaactgtgggtttaccatcaccagcgccgactacgacagggtgctggagaagctgaagaagacagcaacaggctggatgaccacaattaacggcaaggagctgaaggtggagggccagattacctactacaacagatacaagagacagaacgtagtcaaggacctgtccgtcgagctggatagactgagcgaagaatctgtgaacaacgacatctcctcctggacaaagggcagaagcggagaagctctgagcctcctgaagaaaagattctcccatagacccgtgcaggagaagttcgtgtgcctgaactgcggcttcgagacacacgcagccgagcaagccgccctgaacatcgccagatcctggctgttcctgcggagccaggagtacaagaaataccagacaaacaagacaaccggcaacaccgataagagagccttcgtcgagacctggcagtccttttaccggaagaagcttaaggaggtgtggaaacctgccgtgcggtctggcggatctggcggaggctccaccagccccaagaaaaagagaaaagtctaagctgccttctgcggggcttgccttctggccatgcccttcttctctcccttgcacctgtacctcttggtctttgaataaagcctgagtaggaaggctagcaaaaaaaaaaaaaaaaaaaaaaaaaaaaaaaaaaaaaaaaaaaaaaaaaaaaaaaaaaaaaaaaaaaaaaaaaaaaaaaa

SEQ ID NO: 9670 - RNA, 8787 nt, synthetic construct
  source 1..8787: mol_type = other RNA
aggaaataagagagaaaagaagagtaagaagaaatataagagccaccatggcccctaagaagaagcgtaaagtgagccggatgaaccacgaccaggagttcgacccccctaaggtgtaccctcccgtccccgccgagaagagaaagcccatccgggtcctgagcctgttcgatggcatcgccaccggtctgctggtgctgaaggacctgggcatccaggtggataggtacattgcctccgaggtgtgcgaggactccatcaccgtgggaatggtgcgtcatcagggcaagatcatgtacgtgggcgacgtgcggagcgtgacacagaagcatatccaggagtggggccctttcgacctggtgatcggcggcagcccttgcaatgacctgagcatcgtgaacccagcccggaagggcctgtacgagggaaccggcagactgttcttcgagttttacagactgctgcacgacgcccggcctaaggaaggcgacgaccggcccttcttttggctgttcgagaatgtggtggccatgggagtcagcgacaagcgggatattagccggttcctggagagcaaccccgtgatgatcgatgccaaggaagtgagcgccgcccaccgggccagatacttctggggcaatctgcctggcatgaacagacccctggccagcaccgtgaacgacaagctggagctgcaggagtgcctggagcacggccggatcgccaagttcagcaaggtgagaaccatcaccacccgaagcaacagcatcaaacaaggcaaggaccagcactttcctgtgttcatgaacgagaaggaggacatcctgtggtgtaccgagatggagagagtgttcgggttcccagtccactacacagatgtcagcaacatgtctagactggccagacagagactgctgggaagaagctggtccgtccctgtgatcagacacctgttcgcccctctgaaggagtacttcgcctgcgtgagcagcggcaacagcaacgccaacagccggggccccagcttctctagcggcctggtgccactgtccctgagagggagccacatgggccccatggagatctacaaaaccgtgagcgcctggaagcggcagcctgtgcgcgtgctgagcctgtttcggaatatcgataaagtcctgaaaagcctgggattcctggagagcggctctggctccggcggtggcaccctgaagtacgtggaggatgtgacaaacgtggtcagacgggatgtggagaagtggggccccttcgatctggtgtacggcagcacccaacccctgggcagctcttgtgaccggtgccctggctggtacatgtttcagttccaccggatcctgcagtacgccctgccgagacaggagtcccagcggccattcttttggattttcatggacaacttgctgctgaccgaggatgaccaggaaactaccactcggttcctgcagaccgaagccgtgaccctgcaggacgtgagaggccgggactaccagaacgccatgcgggtgtggtccaacatccctggactgaaaagcaagcacgcacctctgacccctaaagaagaggagtacctgcaggcccaggtgcggagcagaagcaagctggacgcccctaaggtggatctgctggtgaagaattgcctcctgcccctgagagagtacttcaagtatttcagccagaatagtctgcccctgggaggcagcggcggcggcgccgcccaggagctggtgaccttccaggacgtgttcgtggacttcagccaggaggagctgaacagcctgagcgccgcccagaggaggctgcacagggaggtgaccctggagaactacaggagcctggtgagcctgggctacaggttccccaagcccgacatcatcgcccagctggaggaggaggagagcagggccatggaggaggacggcgacaccaagaccggccccgactgggagaccggcggcggcccaagcagcggcgcccctcctcccagcggcggcaggcggcccaagcagcggcgcccctcctcccagcggcggcagcccagccggctccccaacctctaccgaggagggcacctctgagtccgccacccccgagagcggccctggcacctccaccgagcccagcgagggcagcgcacccggcagccctgccggcagccccacctccacagaggagggaaccagcaccgagcccagcgaaggcagcgccccaggcaccagcaccgagcctagtgagcaggagattaaacggatcaacaagatcagaagaagacttgtgaaagacagcaacaccaagaaggccggcaagacaggccccatgaaaaccctgctggttagagtgatgacacccgatctgagagagcggctggaaaacctgagaaagaagcctgaaaatatcccccagcccatcagcaatacatctagagccaacctgaataagctgctgaccgattacaccgaaatgaagaaggcgatcctgcatgtgtactgggaagagttccagaaggaccctgtgggcctgatgagccgggtggcccagcctgccagcaagaagatcgatcagaacaagctgaaacctgagatggacgagaagggcaacctgaccaccgccggctttgcctgctctcagtgtggccagcccctgttcgtgtacaagctggagcaggtgtctgagaagggcaaggcttacaccaactacttcggacggtgcaatgtggccgagcacgaaaagctgatcctgctggcccagctgaagcccgagaaggatagcgacgaagccgtgacatatagcctgggaaagtttgggcagagggccctggatttctacagcattcatgtgaccaaggagtccacccaccccgtgaagcccctggcccagatcgccggaaacagatacgcctccggacctgtgggaaaggccctgagcgacgcatgtatgggcacaatcgcctccttcctgtctaagtaccaggacatcatcatcgaacaccagaaggtggtgaagggcaaccagaagagactggagagcctgcgggagctggccggcaaggaaaacctggaataccctagcgtgaccctgccacctcagcctcacaccaaggagggcgttgatgcctacaacgaagtgatcgcccgggtgcgaatgtgggtgaacctgaacctgtggcagaagctgaagctaagcagagatgatgccaagcctctgctgagactgaagggattcccttcctttcctctggtcgagagacaggccaacgaagtggactggtgggacatggtgtgtaacgtgaagaagctgatcaacgagaaaaaggaggatggcaaggtgttttggcagaatctggctggctacaagagacaggaagccctgagaccatacctgagcagcgaggaagatcggaagaagggaaagaaattcgctcggtaccagctgggcgacctgctgctgcacctggaaaagaagcacggcgaggactggggaaaggtgtacgacgaggcctgggagcggattgacaagaaagtggaaggcctgagcaagcacatcaagctggaagaggaacggagaagcgaggacgcccagagcaaggccgccctgaccgactggctgcgggctaaggccagcttcgtgatcgagggcctgaaggaggccgacaaggacgagttctgcagatgcgagctgaagctgcagaagtggtacggggacctgcggggaaagcccttcgccatcgaagccgagaacagcatcctggacatcagcggcttcagcaagcagtacaactgtgccttcatctggcagaaggacggcgtgaagaagctgaacctgtacctgatcatcaactacttcaagggcggcaagctgcggttcaagaagatcaaacctgaagccttcgaagccaacagattctacaccgtgatcaacaaaaagagcggcgagatcgtgcccatggaggtgaacttcaacttcgacgaccccaacctgatcatcctgcctctggcctttggcaagagacagggcagagaattcatctggaacgacctgctgtccctggaaaccggcagcctgaagctggccaacggaagagtgatcgagaagacactgtacaacagaagaacccggcaggatgagcctgccctgttcgtggccctgaccttcgagcggcgggaggtcctggactcctccaatatcaaaccaatgaacctgatcggcgtggcaagaggcgaaaacatccccgccgtgatcgccctgaccgaccccgagggctgcccactgagccggtttaaggatagcctgggaaacccaacccacatcctgagaatcggcgagagctataaggagaagcagcggaccatccaggccaagaaggaggtggagcagcggagagccggcggctacagccggaagtacgccagcaaagccaagaatctggcagacgatatggtgagaaacaccgctagagatctgctgtactacgccgtgacccaggatgccatgctgatcttcgccaacctgagccggggcttcggccggcagggcaagcggaccttcatggccgagagacagtacacacggatggaggactggctgaccgccaagctggcctacgagggcctgagcaagacctacctgtccaagacactggcccagtacacctccaagacatgcagcaactgtgggtttaccatcaccagcgccgactacgacagggtgctggagaagctgaagaagacagcaacaggctggatgaccacaattaacggcaaggagctgaaggtggagggccagattacctactacaacagatacaagagacagaacgtagtcaaggacctgtccgtcgagctggatagactgagcgaagaatctgtgaacaacgacatctcctcctggacaaagggcagaagcggagaagctctgagcctcctgaagaaaagattctcccatagacccgtgcaggagaagttcgtgtgcctgaactgcggcttcgagacacacgcagccgagcaagccgccctgaacatcgccagatcctggctgttcctgcggagccaggagtacaagaaataccagacaaacaagacaaccggcaacaccgataagagagccttcgtcgagacctggcagtccttttaccggaagaagcttaaggaggtgtggaaacctgccgtgcggtctggcggatctggcggaggctccaccagccccaagaaaaagagaaaagtctaagctgccttctgcggggcttgccttctggccatgcccttcttctctcccttgcacctgtacctcttggtctttgaataaagcctgagtaggaaggctagcaaaaaaaaaaaaaaaaaaaaaaaaaaaaaaaaaaaaaaaaaaaaaaaaaaaaaaaaaaaaaaaaaaaaaaaaaaaaaaaagcccagccggctccccaacctctaccgaggagggcacctctgagtccgccacccccgagagcggccctggcacctccaccgagcccagcgagggcagcgcacccggcagccctgccggcagccccacctccacagaggagggaaccagcaccgagcccagcgaaggcagcgccccaggcaccagcaccgagcctagtgagcaggagattaaacggatcaacaagatcagaagaagacttgtgaaagacagcaacaccaagaaggccggcaagacaggccccatgaaaaccctgctggttagagtgatgacacccgatctgagagagcggctggaaaacctgagaaagaagcctgaaaatatcccccagcccatcagcaatacatctagagccaacctgaataagctgctgaccgattacaccgaaatgaagaaggcgatcctgcatgtgtactgggaagagttccagaaggaccctgtgggcctgatgagccgggtggcccagcctgccagcaagaagatcgatcagaacaagctgaaacctgagatggacgagaagggcaacctgaccaccgccggctttgcctgctctcagtgtggccagcccctgttcgtgtacaagctggagcaggtgtctgagaagggcaaggcttacaccaactacttcggacggtgcaatgtggccgagcacgaaaagctgatcctgctggcccagctgaagcccgagaaggatagcgacgaagccgtgacatatagcctgggaaagtttgggcagagggccctggatttctacagcattcatgtgaccaaggagtccacccaccccgtgaagcccctggcccagatcgccggaaacagatacgcctccggacctgtgggaaaggccctgagcgacgcatgtatgggcacaatcgcctccttcctgtctaagtaccaggacatcatcatcgaacaccagaaggtggtgaagggcaaccagaagagactggagagcctgcgggagctggccggcaaggaaaacctggaataccctagcgtgaccctgccacctcagcctcacaccaaggagggcgttgatgcctacaacgaagtgatcgcccgggtgcgaatgtgggtgaacctgaacctgtggcagaagctgaagctaagcagagatgatgccaagcctctgctgagactgaagggattcccttcctttcctctggtcgagagacaggccaacgaagtggactggtgggacatggtgtgtaacgtgaagaagctgatcaacgagaaaaaggaggatggcaaggtgttttggcagaatctggctggctacaagagacaggaagccctgagaccatacctgagcagcgaggaagatcggaagaagggaaagaaattcgctcggtaccagctgggcgacctgctgctgcacctggaaaagaagcacggcgaggactggggaaaggtgtacgacgaggcctgggagcggattgacaagaaagtggaaggcctgagcaagcacatcaagctggaagaggaacggagaagcgaggacgcccagagcaaggccgccctgaccgactggctgcgggctaaggccagcttcgtgatcgagggcctgaaggaggccgacaaggacgagttctgcagatgcgagctgaagctgcagaagtggtacggggacctgcggggaaagcccttcgccatcgaagccgagaacagcatcctggacatcagcggcttcagcaagcagtacaactgtgccttcatctggcagaaggacggcgtgaagaagctgaacctgtacctgatcatcaactacttcaagggcggcaagctgcggttcaagaagatcaaacctgaagccttcgaagccaacagattctacaccgtgatcaacaaaaagagcggcgagatcgtgcccatggaggtgaacttcaacttcgacgaccccaacctgatcatcctgcctctggcctttggcaagagacagggcagagaattcatctggaacgacctgctgtccctggaaaccggcagcctgaagctggccaacggaagagtgatcgagaagacactgtacaacagaagaacccggcaggatgagcctgccctgttcgtggccctgaccttcgagcggcgggaggtcctggactcctccaatatcaaaccaatgaacctgatcggcgtggcaagaggcgaaaacatccccgccgtgatcgccctgaccgaccccgagggctgcccactgagccggtttaaggatagcctgggaaacccaacccacatcctgagaatcggcgagagctataaggagaagcagcggaccatccaggccaagaaggaggtggagcagcggagagccggcggctacagccggaagtacgccagcaaagccaagaatctggcagacgatatggtgagaaacaccgctagagatctgctgtactacgccgtgacccaggatgccatgctgatcttcgccaacctgagccggggcttcggccggcagggcaagcggaccttcatggccgagagacagtacacacggatggaggactggctgaccgccaagctggcctacgagggcctgagcaagacctacctgtccaagacactggcccagtacacctccaagacatgcagcaactgtgggtttaccatcaccagcgccgactacgacagggtgctggagaagctgaagaagacagcaacaggctggatgaccacaattaacggcaaggagctgaaggtggagggccagattacctactacaacagatacaagagacagaacgtagtcaaggacctgtccgtcgagctggatagactgagcgaagaatctgtgaacaacgacatctcctcctggacaaagggcagaagcggagaagctctgagcctcctgaagaaaagattctcccatagacccgtgcaggagaagttcgtgtgcctgaactgcggcttcgagacacacgcagccgagcaagccgccctgaacatcgccagatcctggctgttcctgcggagccaggagtacaagaaataccagacaaacaagacaaccggcaacaccgataagagagccttcgtcgagacctggcagtccttttaccggaagaagcttaaggaggtgtggaaacctgccgtgcggtctggcggatctggcggaggctccaccagccccaagaaaaagagaaaagtctaagctgccttctgcggggcttgccttctggccatgcccttcttctctcccttgcacctgtacctcttggtctttgaataaagcctgagtaggaaggctagcaaaaaaaaaaaaaaaaaaaaaaaaaaaaaaaaaaaaaaaaaaaaaaaaaaaaaaaaaaaaaaaaaaaaaaaaaaaaaaaa

SEQ ID NO: 9671 - RNA, 8787 nt, synthetic construct
  source 1..8787: mol_type = other RNA
aggaaataagagagaaaagaagagtaagaagaaatataagagccaccatggcccctaagaagaagcgtaaagtgagccggatgaaccacgaccaggagttcgacccccctaaggtgtaccctcccgtccccgccgagaagagaaagcccatccgggtcctgagcctgttcgatggcatcgccaccggtctgctggtgctgaaggacctgggcatccaggtggataggtacattgcctccgaggtgtgcgaggactccatcaccgtgggaatggtgcgtcatcagggcaagatcatgtacgtgggcgacgtgcggagcgtgacacagaagcatatccaggagtggggccctttcgacctggtgatcggcggcagcccttgcaatgacctgagcatcgtgaacccagcccggaagggcctgtacgagggaaccggcagactgttcttcgagttttacagactgctgcacgacgcccggcctaaggaaggcgacgaccggcccttcttttggctgttcgagaatgtggtggccatgggagtcagcgacaagcgggatattagccggttcctggagagcaaccccgtgatgatcgatgccaaggaagtgagcgccgcccaccgggccagatacttctggggcaatctgcctggcatgaacagacccctggccagcaccgtgaacgacaagctggagctgcaggagtgcctggagcacggccggatcgccaagttcagcaaggtgagaaccatcaccacccgaagcaacagcatcaaacaaggcaaggaccagcactttcctgtgttcatgaacgagaaggaggacatcctgtggtgtaccgagatggagagagtgttcgggttcccagtccactacacagatgtcagcaacatgtctagactggccagacagagactgctgggaagaagctggtccgtccctgtgatcagacacctgttcgcccctctgaaggagtacttcgcctgcgtgagcagcggcaacagcaacgccaacagccggggccccagcttctctagcggcctggtgccactgtccctgagagggagccacatgggccccatggagatctacaaaaccgtgagcgcctggaagcggcagcctgtgcgcgtgctgagcctgtttcggaatatcgataaagtcctgaaaagcctgggattcctggagagcggctctggctccggcggtggcaccctgaagtacgtggaggatgtgacaaacgtggtcagacgggatgtggagaagtggggccccttcgatctggtgtacggcagcacccaacccctgggcagctcttgtgaccggtgccctggctggtacatgtttcagttccaccggatcctgcagtacgccctgccgagacaggagtcccagcggccattcttttggattttcatggacaacttgctgctgaccgaggatgaccaggaaactaccactcggttcctgcagaccgaagccgtgaccctgcaggacgtgagaggccgggactaccagaacgccatgcgggtgtggtccaacatccctggactgaaaagcaagcacgcacctctgacccctaaagaagaggagtacctgcaggcccaggtgcggagcagaagcaagctggacgcccctaaggtggatctgctggtgaagaattgcctcctgcccctgagagagtacttcaagtatttcagccagaatagtctgcccctgggaggcagcggcggcggcggcaagatgagcgtgaccttcgaggacgtggccctgtacttcagccccgaggagtgggccaagctgagcggctgccagaggcagctgtacagggaggtgatgctggagaactaccagatggtggccagcctgggctgggccaccgtgaagcccgagatcatctgcaagatggagagggaggagaccccctgcgtgctggacccccccggcgagcagcagatgcaccagagccccgtgcccgccggcggcccaagcagcggcgcccctcctcccagcggcggcaggcggcccaagcagcggcgcccctcctcccagcggcggcagcccagccggctccccaacctctaccgaggagggcacctctgagtccgccacccccgagagcggccctggcacctccaccgagcccagcgagggcagcgcacccggcagccctgccggcagccccacctccacagaggagggaaccagcaccgagcccagcgaaggcagcgccccaggcaccagcaccgagcctagtgagcaggagattaaacggatcaacaagatcagaagaagacttgtgaaagacagcaacaccaagaaggccggcaagacaggccccatgaaaaccctgctggttagagtgatgacacccgatctgagagagcggctggaaaacctgagaaagaagcctgaaaatatcccccagcccatcagcaatacatctagagccaacctgaataagctgctgaccgattacaccgaaatgaagaaggcgatcctgcatgtgtactgggaagagttccagaaggaccctgtgggcctgatgagccgggtggcccagcctgccagcaagaagatcgatcagaacaagctgaaacctgagatggacgagaagggcaacctgaccaccgccggctttgcctgctctcagtgtggccagcccctgttcgtgtacaagctggagcaggtgtctgagaagggcaaggcttacaccaactacttcggacggtgcaatgtggccgagcacgaaaagctgatcctgctggcccagctgaagcccgagaaggatagcgacgaagccgtgacatatagcctgggaaagtttgggcagagggccctggatttctacagcattcatgtgaccaaggagtccacccaccccgtgaagcccctggcccagatcgccggaaacagatacgcctccggacctgtgggaaaggccctgagcgacgcatgtatgggcacaatcgcctccttcctgtctaagtaccaggacatcatcatcgaacaccagaaggtggtgaagggcaaccagaagagactggagagcctgcgggagctggccggcaaggaaaacctggaataccctagcgtgaccctgccacctcagcctcacaccaaggagggcgttgatgcctacaacgaagtgatcgcccgggtgcgaatgtgggtgaacctgaacctgtggcagaagctgaagctaagcagagatgatgccaagcctctgctgagactgaagggattcccttcctttcctctggtcgagagacaggccaacgaagtggactggtgggacatggtgtgtaacgtgaagaagctgatcaacgagaaaaaggaggatggcaaggtgttttggcagaatctggctggctacaagagacaggaagccctgagaccatacctgagcagcgaggaagatcggaagaagggaaagaaattcgctcggtaccagctgggcgacctgctgctgcacctggaaaagaagcacggcgaggactggggaaaggtgtacgacgaggcctgggagcggattgacaagaaagtggaaggcctgagcaagcacatcaagctggaagaggaacggagaagcgaggacgcccagagcaaggccgccctgaccgactggctgcgggctaaggccagcttcgtgatcgagggcctgaaggaggccgacaaggacgagttctgcagatgcgagctgaagctgcagaagtggtacggggacctgcggggaaagcccttcgccatcgaagccgagaacagcatcctggacatcagcggcttcagcaagcagtacaactgtgccttcatctggcagaaggacggcgtgaagaagctgaacctgtacctgatcatcaactacttcaagggcggcaagctgcggttcaagaagatcaaacctgaagccttcgaagccaacagattctacaccgtgatcaacaaaaagagcggcgagatcgtgcccatggaggtgaacttcaacttcgacgaccccaacctgatcatcctgcctctggcctttggcaagagacagggcagagaattcatctggaacgacctgctgtccctggaaaccggcagcctgaagctggccaacggaagagtgatcgagaagacactgtacaacagaagaacccggcaggatgagcctgccctgttcgtggccctgaccttcgagcggcgggaggtcctggactcctccaatatcaaaccaatgaacctgatcggcgtggcaagaggcgaaaacatccccgccgtgatcgccctgaccgaccccgagggctgcccactgagccggtttaaggatagcctgggaaacccaacccacatcctgagaatcggcgagagctataaggagaagcagcggaccatccaggccaagaaggaggtggagcagcggagagccggcggctacagccggaagtacgccagcaaagccaagaatctggcagacgatatggtgagaaacaccgctagagatctgctgtactacgccgtgacccaggatgccatgctgatcttcgccaacctgagccggggcttcggccggcagggcaagcggaccttcatggccgagagacagtacacacggatggaggactggctgaccgccaagctggcctacgagggcctgagcaagacctacctgtccaagacactggcccagtacacctccaagacatgcagcaactgtgggtttaccatcaccagcgccgactacgacagggtgctggagaagctgaagaagacagcaacaggctggatgaccacaattaacggcaaggagctgaaggtggagggccagattacctactacaacagatacaagagacagaacgtagtcaaggacctgtccgtcgagctggatagactgagcgaagaatctgtgaacaacgacatctcctcctggacaaagggcagaagcggagaagctctgagcctcctgaagaaaagattctcccatagacccgtgcaggagaagttcgtgtgcctgaactgcggcttcgagacacacgcagccgagcaagccgccctgaacatcgccagatcctggctgttcctgcggagccaggagtacaagaaataccagacaaacaagacaaccggcaacaccgataagagagccttcgtcgagacctggcagtccttttaccggaagaagcttaaggaggtgtggaaacctgccgtgcggtctggcggatctggcggaggctccaccagccccaagaaaaagagaaaagtctaagctgccttctgcggggcttgccttctggccatgcccttcttctctcccttgcacctgtacctcttggtctttgaataaagcctgagtaggaaggctagcaaaaaaaaaaaaaaaaaaaaaaaaaaaaaaaaaaaaaaaaaaaaaaaaaaaaaaaaaaaaaaaaaaaaaaaaaaaaaaaagcccagccggctccccaacctctaccgaggagggcacctctgagtccgccacccccgagagcggccctggcacctccaccgagcccagcgagggcagcgcacccggcagccctgccggcagccccacctccacagaggagggaaccagcaccgagcccagcgaaggcagcgccccaggcaccagcaccgagcctagtgagcaggagattaaacggatcaacaagatcagaagaagacttgtgaaagacagcaacaccaagaaggccggcaagacaggccccatgaaaaccctgctggttagagtgatgacacccgatctgagagagcggctggaaaacctgagaaagaagcctgaaaatatcccccagcccatcagcaatacatctagagccaacctgaataagctgctgaccgattacaccgaaatgaagaaggcgatcctgcatgtgtactgggaagagttccagaaggaccctgtgggcctgatgagccgggtggcccagcctgccagcaagaagatcgatcagaacaagctgaaacctgagatggacgagaagggcaacctgaccaccgccggctttgcctgctctcagtgtggccagcccctgttcgtgtacaagctggagcaggtgtctgagaagggcaaggcttacaccaactacttcggacggtgcaatgtggccgagcacgaaaagctgatcctgctggcccagctgaagcccgagaaggatagcgacgaagccgtgacatatagcctgggaaagtttgggcagagggccctggatttctacagcattcatgtgaccaaggagtccacccaccccgtgaagcccctggcccagatcgccggaaacagatacgcctccggacctgtgggaaaggccctgagcgacgcatgtatgggcacaatcgcctccttcctgtctaagtaccaggacatcatcatcgaacaccagaaggtggtgaagggcaaccagaagagactggagagcctgcgggagctggccggcaaggaaaacctggaataccctagcgtgaccctgccacctcagcctcacaccaaggagggcgttgatgcctacaacgaagtgatcgcccgggtgcgaatgtgggtgaacctgaacctgtggcagaagctgaagctaagcagagatgatgccaagcctctgctgagactgaagggattcccttcctttcctctggtcgagagacaggccaacgaagtggactggtgggacatggtgtgtaacgtgaagaagctgatcaacgagaaaaaggaggatggcaaggtgttttggcagaatctggctggctacaagagacaggaagccctgagaccatacctgagcagcgaggaagatcggaagaagggaaagaaattcgctcggtaccagctgggcgacctgctgctgcacctggaaaagaagcacggcgaggactggggaaaggtgtacgacgaggcctgggagcggattgacaagaaagtggaaggcctgagcaagcacatcaagctggaagaggaacggagaagcgaggacgcccagagcaaggccgccctgaccgactggctgcgggctaaggccagcttcgtgatcgagggcctgaaggaggccgacaaggacgagttctgcagatgcgagctgaagctgcagaagtggtacggggacctgcggggaaagcccttcgccatcgaagccgagaacagcatcctggacatcagcggcttcagcaagcagtacaactgtgccttcatctggcagaaggacggcgtgaagaagctgaacctgtacctgatcatcaactacttcaagggcggcaagctgcggttcaagaagatcaaacctgaagccttcgaagccaacagattctacaccgtgatcaacaaaaagagcggcgagatcgtgcccatggaggtgaacttcaacttcgacgaccccaacctgatcatcctgcctctggcctttggcaagagacagggcagagaattcatctggaacgacctgctgtccctggaaaccggcagcctgaagctggccaacggaagagtgatcgagaagacactgtacaacagaagaacccggcaggatgagcctgccctgttcgtggccctgaccttcgagcggcgggaggtcctggactcctccaatatcaaaccaatgaacctgatcggcgtggcaagaggcgaaaacatccccgccgtgatcgccctgaccgaccccgagggctgcccactgagccggtttaaggatagcctgggaaacccaacccacatcctgagaatcggcgagagctataaggagaagcagcggaccatccaggccaagaaggaggtggagcagcggagagccggcggctacagccggaagtacgccagcaaagccaagaatctggcagacgatatggtgagaaacaccgctagagatctgctgtactacgccgtgacccaggatgccatgctgatcttcgccaacctgagccggggcttcggccggcagggcaagcggaccttcatggccgagagacagtacacacggatggaggactggctgaccgccaagctggcctacgagggcctgagcaagacctacctgtccaagacactggcccagtacacctccaagacatgcagcaactgtgggtttaccatcaccagcgccgactacgacagggtgctggagaagctgaagaagacagcaacaggctggatgaccacaattaacggcaaggagctgaaggtggagggccagattacctactacaacagatacaagagacagaacgtagtcaaggacctgtccgtcgagctggatagactgagcgaagaatctgtgaacaacgacatctcctcctggacaaagggcagaagcggagaagctctgagcctcctgaagaaaagattctcccatagacccgtgcaggagaagttcgtgtgcctgaactgcggcttcgagacacacgcagccgagcaagccgccctgaacatcgccagatcctggctgttcctgcggagccaggagtacaagaaataccagacaaacaagacaaccggcaacaccgataagagagccttcgtcgagacctggcagtccttttaccggaagaagcttaaggaggtgtggaaacctgccgtgcggtctggcggatctggcggaggctccaccagccccaagaaaaagagaaaagtctaagctgccttctgcggggcttgccttctggccatgcccttcttctctcccttgcacctgtacctcttggtctttgaataaagcctgagtaggaaggctagcaaaaaaaaaaaaaaaaaaaaaaaaaaaaaaaaaaaaaaaaaaaaaaaaaaaaaaaaaaaaaaaaaaaaaaaaaaaaaaaa

SEQ ID NO: 9672 - RNA, 8787 nt, synthetic construct
  source 1..8787: mol_type = other RNA
aggaaataagagagaaaagaagagtaagaagaaatataagagccaccatggcccctaagaagaagcgtaaagtgagccggatgaaccacgaccaggagttcgacccccctaaggtgtaccctcccgtccccgccgagaagagaaagcccatccgggtcctgagcctgttcgatggcatcgccaccggtctgctggtgctgaaggacctgggcatccaggtggataggtacattgcctccgaggtgtgcgaggactccatcaccgtgggaatggtgcgtcatcagggcaagatcatgtacgtgggcgacgtgcggagcgtgacacagaagcatatccaggagtggggccctttcgacctggtgatcggcggcagcccttgcaatgacctgagcatcgtgaacccagcccggaagggcctgtacgagggaaccggcagactgttcttcgagttttacagactgctgcacgacgcccggcctaaggaaggcgacgaccggcccttcttttggctgttcgagaatgtggtggccatgggagtcagcgacaagcgggatattagccggttcctggagagcaaccccgtgatgatcgatgccaaggaagtgagcgccgcccaccgggccagatacttctggggcaatctgcctggcatgaacagacccctggccagcaccgtgaacgacaagctggagctgcaggagtgcctggagcacggccggatcgccaagttcagcaaggtgagaaccatcaccacccgaagcaacagcatcaaacaaggcaaggaccagcactttcctgtgttcatgaacgagaaggaggacatcctgtggtgtaccgagatggagagagtgttcgggttcccagtccactacacagatgtcagcaacatgtctagactggccagacagagactgctgggaagaagctggtccgtccctgtgatcagacacctgttcgcccctctgaaggagtacttcgcctgcgtgagcagcggcaacagcaacgccaacagccggggccccagcttctctagcggcctggtgccactgtccctgagagggagccacatgggccccatggagatctacaaaaccgtgagcgcctggaagcggcagcctgtgcgcgtgctgagcctgtttcggaatatcgataaagtcctgaaaagcctgggattcctggagagcggctctggctccggcggtggcaccctgaagtacgtggaggatgtgacaaacgtggtcagacgggatgtggagaagtggggccccttcgatctggtgtacggcagcacccaacccctgggcagctcttgtgaccggtgccctggctggtacatgtttcagttccaccggatcctgcagtacgccctgccgagacaggagtcccagcggccattcttttggattttcatggacaacttgctgctgaccgaggatgaccaggaaactaccactcggttcctgcagaccgaagccgtgaccctgcaggacgtgagaggccgggactaccagaacgccatgcgggtgtggtccaacatccctggactgaaaagcaagcacgcacctctgacccctaaagaagaggagtacctgcaggcccaggtgcggagcagaagcaagctggacgcccctaaggtggatctgctggtgaagaattgcctcctgcccctgagagagtacttcaagtatttcagccagaatagtctgcccctgggaggcagcggcggcggcagccaggagcccgtgagcttcgccgaggtggccgtgtacttcagcagggaggagtgggccctgctggaccccgcccagagggccctgtacagggacgtgatgctggagacctaccagtgcgtggccagcctggcccccctgcccgcccccaagcccatgctgatcagcctgctggagggcggcgaggagccctggatccccgacgtgaggagccccgaggccgtgcccggcgacctgagccccggcggcccaagcagcggcgcccctcctcccagcggcggcaggcggcccaagcagcggcgcccctcctcccagcggcggcagcccagccggctccccaacctctaccgaggagggcacctctgagtccgccacccccgagagcggccctggcacctccaccgagcccagcgagggcagcgcacccggcagccctgccggcagccccacctccacagaggagggaaccagcaccgagcccagcgaaggcagcgccccaggcaccagcaccgagcctagtgagcaggagattaaacggatcaacaagatcagaagaagacttgtgaaagacagcaacaccaagaaggccggcaagacaggccccatgaaaaccctgctggttagagtgatgacacccgatctgagagagcggctggaaaacctgagaaagaagcctgaaaatatcccccagcccatcagcaatacatctagagccaacctgaataagctgctgaccgattacaccgaaatgaagaaggcgatcctgcatgtgtactgggaagagttccagaaggaccctgtgggcctgatgagccgggtggcccagcctgccagcaagaagatcgatcagaacaagctgaaacctgagatggacgagaagggcaacctgaccaccgccggctttgcctgctctcagtgtggccagcccctgttcgtgtacaagctggagcaggtgtctgagaagggcaaggcttacaccaactacttcggacggtgcaatgtggccgagcacgaaaagctgatcctgctggcccagctgaagcccgagaaggatagcgacgaagccgtgacatatagcctgggaaagtttgggcagagggccctggatttctacagcattcatgtgaccaaggagtccacccaccccgtgaagcccctggcccagatcgccggaaacagatacgcctccggacctgtgggaaaggccctgagcgacgcatgtatgggcacaatcgcctccttcctgtctaagtaccaggacatcatcatcgaacaccagaaggtggtgaagggcaaccagaagagactggagagcctgcgggagctggccggcaaggaaaacctggaataccctagcgtgaccctgccacctcagcctcacaccaaggagggcgttgatgcctacaacgaagtgatcgcccgggtgcgaatgtgggtgaacctgaacctgtggcagaagctgaagctaagcagagatgatgccaagcctctgctgagactgaagggattcccttcctttcctctggtcgagagacaggccaacgaagtggactggtgggacatggtgtgtaacgtgaagaagctgatcaacgagaaaaaggaggatggcaaggtgttttggcagaatctggctggctacaagagacaggaagccctgagaccatacctgagcagcgaggaagatcggaagaagggaaagaaattcgctcggtaccagctgggcgacctgctgctgcacctggaaaagaagcacggcgaggactggggaaaggtgtacgacgaggcctgggagcggattgacaagaaagtggaaggcctgagcaagcacatcaagctggaagaggaacggagaagcgaggacgcccagagcaaggccgccctgaccgactggctgcgggctaaggccagcttcgtgatcgagggcctgaaggaggccgacaaggacgagttctgcagatgcgagctgaagctgcagaagtggtacggggacctgcggggaaagcccttcgccatcgaagccgagaacagcatcctggacatcagcggcttcagcaagcagtacaactgtgccttcatctggcagaaggacggcgtgaagaagctgaacctgtacctgatcatcaactacttcaagggcggcaagctgcggttcaagaagatcaaacctgaagccttcgaagccaacagattctacaccgtgatcaacaaaaagagcggcgagatcgtgcccatggaggtgaacttcaacttcgacgaccccaacctgatcatcctgcctctggcctttggcaagagacagggcagagaattcatctggaacgacctgctgtccctggaaaccggcagcctgaagctggccaacggaagagtgatcgagaagacactgtacaacagaagaacccggcaggatgagcctgccctgttcgtggccctgaccttcgagcggcgggaggtcctggactcctccaatatcaaaccaatgaacctgatcggcgtggcaagaggcgaaaacatccccgccgtgatcgccctgaccgaccccgagggctgcccactgagccggtttaaggatagcctgggaaacccaacccacatcctgagaatcggcgagagctataaggagaagcagcggaccatccaggccaagaaggaggtggagcagcggagagccggcggctacagccggaagtacgccagcaaagccaagaatctggcagacgatatggtgagaaacaccgctagagatctgctgtactacgccgtgacccaggatgccatgctgatcttcgccaacctgagccggggcttcggccggcagggcaagcggaccttcatggccgagagacagtacacacggatggaggactggctgaccgccaagctggcctacgagggcctgagcaagacctacctgtccaagacactggcccagtacacctccaagacatgcagcaactgtgggtttaccatcaccagcgccgactacgacagggtgctggagaagctgaagaagacagcaacaggctggatgaccacaattaacggcaaggagctgaaggtggagggccagattacctactacaacagatacaagagacagaacgtagtcaaggacctgtccgtcgagctggatagactgagcgaagaatctgtgaacaacgacatctcctcctggacaaagggcagaagcggagaagctctgagcctcctgaagaaaagattctcccatagacccgtgcaggagaagttcgtgtgcctgaactgcggcttcgagacacacgcagccgagcaagccgccctgaacatcgccagatcctggctgttcctgcggagccaggagtacaagaaataccagacaaacaagacaaccggcaacaccgataagagagccttcgtcgagacctggcagtccttttaccggaagaagcttaaggaggtgtggaaacctgccgtgcggtctggcggatctggcggaggctccaccagccccaagaaaaagagaaaagtctaagctgccttctgcggggcttgccttctggccatgcccttcttctctcccttgcacctgtacctcttggtctttgaataaagcctgagtaggaaggctagcaaaaaaaaaaaaaaaaaaaaaaaaaaaaaaaaaaaaaaaaaaaaaaaaaaaaaaaaaaaaaaaaaaaaaaaaaaaaaaaagcccagccggctccccaacctctaccgaggagggcacctctgagtccgccacccccgagagcggccctggcacctccaccgagcccagcgagggcagcgcacccggcagccctgccggcagccccacctccacagaggagggaaccagcaccgagcccagcgaaggcagcgccccaggcaccagcaccgagcctagtgagcaggagattaaacggatcaacaagatcagaagaagacttgtgaaagacagcaacaccaagaaggccggcaagacaggccccatgaaaaccctgctggttagagtgatgacacccgatctgagagagcggctggaaaacctgagaaagaagcctgaaaatatcccccagcccatcagcaatacatctagagccaacctgaataagctgctgaccgattacaccgaaatgaagaaggcgatcctgcatgtgtactgggaagagttccagaaggaccctgtgggcctgatgagccgggtggcccagcctgccagcaagaagatcgatcagaacaagctgaaacctgagatggacgagaagggcaacctgaccaccgccggctttgcctgctctcagtgtggccagcccctgttcgtgtacaagctggagcaggtgtctgagaagggcaaggcttacaccaactacttcggacggtgcaatgtggccgagcacgaaaagctgatcctgctggcccagctgaagcccgagaaggatagcgacgaagccgtgacatatagcctgggaaagtttgggcagagggccctggatttctacagcattcatgtgaccaaggagtccacccaccccgtgaagcccctggcccagatcgccggaaacagatacgcctccggacctgtgggaaaggccctgagcgacgcatgtatgggcacaatcgcctccttcctgtctaagtaccaggacatcatcatcgaacaccagaaggtggtgaagggcaaccagaagagactggagagcctgcgggagctggccggcaaggaaaacctggaataccctagcgtgaccctgccacctcagcctcacaccaaggagggcgttgatgcctacaacgaagtgatcgcccgggtgcgaatgtgggtgaacctgaacctgtggcagaagctgaagctaagcagagatgatgccaagcctctgctgagactgaagggattcccttcctttcctctggtcgagagacaggccaacgaagtggactggtgggacatggtgtgtaacgtgaagaagctgatcaacgagaaaaaggaggatggcaaggtgttttggcagaatctggctggctacaagagacaggaagccctgagaccatacctgagcagcgaggaagatcggaagaagggaaagaaattcgctcggtaccagctgggcgacctgctgctgcacctggaaaagaagcacggcgaggactggggaaaggtgtacgacgaggcctgggagcggattgacaagaaagtggaaggcctgagcaagcacatcaagctggaagaggaacggagaagcgaggacgcccagagcaaggccgccctgaccgactggctgcgggctaaggccagcttcgtgatcgagggcctgaaggaggccgacaaggacgagttctgcagatgcgagctgaagctgcagaagtggtacggggacctgcggggaaagcccttcgccatcgaagccgagaacagcatcctggacatcagcggcttcagcaagcagtacaactgtgccttcatctggcagaaggacggcgtgaagaagctgaacctgtacctgatcatcaactacttcaagggcggcaagctgcggttcaagaagatcaaacctgaagccttcgaagccaacagattctacaccgtgatcaacaaaaagagcggcgagatcgtgcccatggaggtgaacttcaacttcgacgaccccaacctgatcatcctgcctctggcctttggcaagagacagggcagagaattcatctggaacgacctgctgtccctggaaaccggcagcctgaagctggccaacggaagagtgatcgagaagacactgtacaacagaagaacccggcaggatgagcctgccctgttcgtggccctgaccttcgagcggcgggaggtcctggactcctccaatatcaaaccaatgaacctgatcggcgtggcaagaggcgaaaacatccccgccgtgatcgccctgaccgaccccgagggctgcccactgagccggtttaaggatagcctgggaaacccaacccacatcctgagaatcggcgagagctataaggagaagcagcggaccatccaggccaagaaggaggtggagcagcggagagccggcggctacagccggaagtacgccagcaaagccaagaatctggcagacgatatggtgagaaacaccgctagagatctgctgtactacgccgtgacccaggatgccatgctgatcttcgccaacctgagccggggcttcggccggcagggcaagcggaccttcatggccgagagacagtacacacggatggaggactggctgaccgccaagctggcctacgagggcctgagcaagacctacctgtccaagacactggcccagtacacctccaagacatgcagcaactgtgggtttaccatcaccagcgccgactacgacagggtgctggagaagctgaagaagacagcaacaggctggatgaccacaattaacggcaaggagctgaaggtggagggccagattacctactacaacagatacaagagacagaacgtagtcaaggacctgtccgtcgagctggatagactgagcgaagaatctgtgaacaacgacatctcctcctggacaaagggcagaagcggagaagctctgagcctcctgaagaaaagattctcccatagacccgtgcaggagaagttcgtgtgcctgaactgcggcttcgagacacacgcagccgagcaagccgccctgaacatcgccagatcctggctgttcctgcggagccaggagtacaagaaataccagacaaacaagacaaccggcaacaccgataagagagccttcgtcgagacctggcagtccttttaccggaagaagcttaaggaggtgtggaaacctgccgtgcggtctggcggatctggcggaggctccaccagccccaagaaaaagagaaaagtctaagctgccttctgcggggcttgccttctggccatgcccttcttctctcccttgcacctgtacctcttggtctttgaataaagcctgagtaggaaggctagcaaaaaaaaaaaaaaaaaaaaaaaaaaaaaaaaaaaaaaaaaaaaaaaaaaaaaaaaaaaaaaaaaaaaaaaaaaaaaaaa

SEQ ID NO: 9673 - RNA, 8787 nt, synthetic construct
  source 1..8787: mol_type = other RNA
aggaaataagagagaaaagaagagtaagaagaaatataagagccaccatggcccctaagaagaagcgtaaagtgagccggatgaaccacgaccaggagttcgacccccctaaggtgtaccctcccgtccccgccgagaagagaaagcccatccgggtcctgagcctgttcgatggcatcgccaccggtctgctggtgctgaaggacctgggcatccaggtggataggtacattgcctccgaggtgtgcgaggactccatcaccgtgggaatggtgcgtcatcagggcaagatcatgtacgtgggcgacgtgcggagcgtgacacagaagcatatccaggagtggggccctttcgacctggtgatcggcggcagcccttgcaatgacctgagcatcgtgaacccagcccggaagggcctgtacgagggaaccggcagactgttcttcgagttttacagactgctgcacgacgcccggcctaaggaaggcgacgaccggcccttcttttggctgttcgagaatgtggtggccatgggagtcagcgacaagcgggatattagccggttcctggagagcaaccccgtgatgatcgatgccaaggaagtgagcgccgcccaccgggccagatacttctggggcaatctgcctggcatgaacagacccctggccagcaccgtgaacgacaagctggagctgcaggagtgcctggagcacggccggatcgccaagttcagcaaggtgagaaccatcaccacccgaagcaacagcatcaaacaaggcaaggaccagcactttcctgtgttcatgaacgagaaggaggacatcctgtggtgtaccgagatggagagagtgttcgggttcccagtccactacacagatgtcagcaacatgtctagactggccagacagagactgctgggaagaagctggtccgtccctgtgatcagacacctgttcgcccctctgaaggagtacttcgcctgcgtgagcagcggcaacagcaacgccaacagccggggccccagcttctctagcggcctggtgccactgtccctgagagggagccacatgggccccatggagatctacaaaaccgtgagcgcctggaagcggcagcctgtgcgcgtgctgagcctgtttcggaatatcgataaagtcctgaaaagcctgggattcctggagagcggctctggctccggcggtggcaccctgaagtacgtggaggatgtgacaaacgtggtcagacgggatgtggagaagtggggccccttcgatctggtgtacggcagcacccaacccctgggcagctcttgtgaccggtgccctggctggtacatgtttcagttccaccggatcctgcagtacgccctgccgagacaggagtcccagcggccattcttttggattttcatggacaacttgctgctgaccgaggatgaccaggaaactaccactcggttcctgcagaccgaagccgtgaccctgcaggacgtgagaggccgggactaccagaacgccatgcgggtgtggtccaacatccctggactgaaaagcaagcacgcacctctgacccctaaagaagaggagtacctgcaggcccaggtgcggagcagaagcaagctggacgcccctaaggtggatctgctggtgaagaattgcctcctgcccctgagagagtacttcaagtatttcagccagaatagtctgcccctgggaggcagcggcggcggcctgaggggcctggtgaccttcgaggacgtggccgtggagttcacccaggaggagtgggccctgctggaccccgcccagaggaccctgtacagggacgtgatgctggagaactgcaggaacctggccagcctgggctgcagggtgaacaagcccagcctgatcagccagctggagcaggacaagaaggtgatcaccgaggagaggggcatcctgcccagcacctgccccgacctggagaccctgggcggcccaagcagcggcgcccctcctcccagcggcggcaggcggcccaagcagcggcgcccctcctcccagcggcggcagcccagccggctccccaacctctaccgaggagggcacctctgagtccgccacccccgagagcggccctggcacctccaccgagcccagcgagggcagcgcacccggcagccctgccggcagccccacctccacagaggagggaaccagcaccgagcccagcgaaggcagcgccccaggcaccagcaccgagcctagtgagcaggagattaaacggatcaacaagatcagaagaagacttgtgaaagacagcaacaccaagaaggccggcaagacaggccccatgaaaaccctgctggttagagtgatgacacccgatctgagagagcggctggaaaacctgagaaagaagcctgaaaatatcccccagcccatcagcaatacatctagagccaacctgaataagctgctgaccgattacaccgaaatgaagaaggcgatcctgcatgtgtactgggaagagttccagaaggaccctgtgggcctgatgagccgggtggcccagcctgccagcaagaagatcgatcagaacaagctgaaacctgagatggacgagaagggcaacctgaccaccgccggctttgcctgctctcagtgtggccagcccctgttcgtgtacaagctggagcaggtgtctgagaagggcaaggcttacaccaactacttcggacggtgcaatgtggccgagcacgaaaagctgatcctgctggcccagctgaagcccgagaaggatagcgacgaagccgtgacatatagcctgggaaagtttgggcagagggccctggatttctacagcattcatgtgaccaaggagtccacccaccccgtgaagcccctggcccagatcgccggaaacagatacgcctccggacctgtgggaaaggccctgagcgacgcatgtatgggcacaatcgcctccttcctgtctaagtaccaggacatcatcatcgaacaccagaaggtggtgaagggcaaccagaagagactggagagcctgcgggagctggccggcaaggaaaacctggaataccctagcgtgaccctgccacctcagcctcacaccaaggagggcgttgatgcctacaacgaagtgatcgcccgggtgcgaatgtgggtgaacctgaacctgtggcagaagctgaagctaagcagagatgatgccaagcctctgctgagactgaagggattcccttcctttcctctggtcgagagacaggccaacgaagtggactggtgggacatggtgtgtaacgtgaagaagctgatcaacgagaaaaaggaggatggcaaggtgttttggcagaatctggctggctacaagagacaggaagccctgagaccatacctgagcagcgaggaagatcggaagaagggaaagaaattcgctcggtaccagctgggcgacctgctgctgcacctggaaaagaagcacggcgaggactggggaaaggtgtacgacgaggcctgggagcggattgacaagaaagtggaaggcctgagcaagcacatcaagctggaagaggaacggagaagcgaggacgcccagagcaaggccgccctgaccgactggctgcgggctaaggccagcttcgtgatcgagggcctgaaggaggccgacaaggacgagttctgcagatgcgagctgaagctgcagaagtggtacggggacctgcggggaaagcccttcgccatcgaagccgagaacagcatcctggacatcagcggcttcagcaagcagtacaactgtgccttcatctggcagaaggacggcgtgaagaagctgaacctgtacctgatcatcaactacttcaagggcggcaagctgcggttcaagaagatcaaacctgaagccttcgaagccaacagattctacaccgtgatcaacaaaaagagcggcgagatcgtgcccatggaggtgaacttcaacttcgacgaccccaacctgatcatcctgcctctggcctttggcaagagacagggcagagaattcatctggaacgacctgctgtccctggaaaccggcagcctgaagctggccaacggaagagtgatcgagaagacactgtacaacagaagaacccggcaggatgagcctgccctgttcgtggccctgaccttcgagcggcgggaggtcctggactcctccaatatcaaaccaatgaacctgatcggcgtggcaagaggcgaaaacatccccgccgtgatcgccctgaccgaccccgagggctgcccactgagccggtttaaggatagcctgggaaacccaacccacatcctgagaatcggcgagagctataaggagaagcagcggaccatccaggccaagaaggaggtggagcagcggagagccggcggctacagccggaagtacgccagcaaagccaagaatctggcagacgatatggtgagaaacaccgctagagatctgctgtactacgccgtgacccaggatgccatgctgatcttcgccaacctgagccggggcttcggccggcagggcaagcggaccttcatggccgagagacagtacacacggatggaggactggctgaccgccaagctggcctacgagggcctgagcaagacctacctgtccaagacactggcccagtacacctccaagacatgcagcaactgtgggtttaccatcaccagcgccgactacgacagggtgctggagaagctgaagaagacagcaacaggctggatgaccacaattaacggcaaggagctgaaggtggagggccagattacctactacaacagatacaagagacagaacgtagtcaaggacctgtccgtcgagctggatagactgagcgaagaatctgtgaacaacgacatctcctcctggacaaagggcagaagcggagaagctctgagcctcctgaagaaaagattctcccatagacccgtgcaggagaagttcgtgtgcctgaactgcggcttcgagacacacgcagccgagcaagccgccctgaacatcgccagatcctggctgttcctgcggagccaggagtacaagaaataccagacaaacaagacaaccggcaacaccgataagagagccttcgtcgagacctggcagtccttttaccggaagaagcttaaggaggtgtggaaacctgccgtgcggtctggcggatctggcggaggctccaccagccccaagaaaaagagaaaagtctaagctgccttctgcggggcttgccttctggccatgcccttcttctctcccttgcacctgtacctcttggtctttgaataaagcctgagtaggaaggctagcaaaaaaaaaaaaaaaaaaaaaaaaaaaaaaaaaaaaaaaaaaaaaaaaaaaaaaaaaaaaaaaaaaaaaaaaaaaaaaaagcccagccggctccccaacctctaccgaggagggcacctctgagtccgccacccccgagagcggccctggcacctccaccgagcccagcgagggcagcgcacccggcagccctgccggcagccccacctccacagaggagggaaccagcaccgagcccagcgaaggcagcgccccaggcaccagcaccgagcctagtgagcaggagattaaacggatcaacaagatcagaagaagacttgtgaaagacagcaacaccaagaaggccggcaagacaggccccatgaaaaccctgctggttagagtgatgacacccgatctgagagagcggctggaaaacctgagaaagaagcctgaaaatatcccccagcccatcagcaatacatctagagccaacctgaataagctgctgaccgattacaccgaaatgaagaaggcgatcctgcatgtgtactgggaagagttccagaaggaccctgtgggcctgatgagccgggtggcccagcctgccagcaagaagatcgatcagaacaagctgaaacctgagatggacgagaagggcaacctgaccaccgccggctttgcctgctctcagtgtggccagcccctgttcgtgtacaagctggagcaggtgtctgagaagggcaaggcttacaccaactacttcggacggtgcaatgtggccgagcacgaaaagctgatcctgctggcccagctgaagcccgagaaggatagcgacgaagccgtgacatatagcctgggaaagtttgggcagagggccctggatttctacagcattcatgtgaccaaggagtccacccaccccgtgaagcccctggcccagatcgccggaaacagatacgcctccggacctgtgggaaaggccctgagcgacgcatgtatgggcacaatcgcctccttcctgtctaagtaccaggacatcatcatcgaacaccagaaggtggtgaagggcaaccagaagagactggagagcctgcgggagctggccggcaaggaaaacctggaataccctagcgtgaccctgccacctcagcctcacaccaaggagggcgttgatgcctacaacgaagtgatcgcccgggtgcgaatgtgggtgaacctgaacctgtggcagaagctgaagctaagcagagatgatgccaagcctctgctgagactgaagggattcccttcctttcctctggtcgagagacaggccaacgaagtggactggtgggacatggtgtgtaacgtgaagaagctgatcaacgagaaaaaggaggatggcaaggtgttttggcagaatctggctggctacaagagacaggaagccctgagaccatacctgagcagcgaggaagatcggaagaagggaaagaaattcgctcggtaccagctgggcgacctgctgctgcacctggaaaagaagcacggcgaggactggggaaaggtgtacgacgaggcctgggagcggattgacaagaaagtggaaggcctgagcaagcacatcaagctggaagaggaacggagaagcgaggacgcccagagcaaggccgccctgaccgactggctgcgggctaaggccagcttcgtgatcgagggcctgaaggaggccgacaaggacgagttctgcagatgcgagctgaagctgcagaagtggtacggggacctgcggggaaagcccttcgccatcgaagccgagaacagcatcctggacatcagcggcttcagcaagcagtacaactgtgccttcatctggcagaaggacggcgtgaagaagctgaacctgtacctgatcatcaactacttcaagggcggcaagctgcggttcaagaagatcaaacctgaagccttcgaagccaacagattctacaccgtgatcaacaaaaagagcggcgagatcgtgcccatggaggtgaacttcaacttcgacgaccccaacctgatcatcctgcctctggcctttggcaagagacagggcagagaattcatctggaacgacctgctgtccctggaaaccggcagcctgaagctggccaacggaagagtgatcgagaagacactgtacaacagaagaacccggcaggatgagcctgccctgttcgtggccctgaccttcgagcggcgggaggtcctggactcctccaatatcaaaccaatgaacctgatcggcgtggcaagaggcgaaaacatccccgccgtgatcgccctgaccgaccccgagggctgcccactgagccggtttaaggatagcctgggaaacccaacccacatcctgagaatcggcgagagctataaggagaagcagcggaccatccaggccaagaaggaggtggagcagcggagagccggcggctacagccggaagtacgccagcaaagccaagaatctggcagacgatatggtgagaaacaccgctagagatctgctgtactacgccgtgacccaggatgccatgctgatcttcgccaacctgagccggggcttcggccggcagggcaagcggaccttcatggccgagagacagtacacacggatggaggactggctgaccgccaagctggcctacgagggcctgagcaagacctacctgtccaagacactggcccagtacacctccaagacatgcagcaactgtgggtttaccatcaccagcgccgactacgacagggtgctggagaagctgaagaagacagcaacaggctggatgaccacaattaacggcaaggagctgaaggtggagggccagattacctactacaacagatacaagagacagaacgtagtcaaggacctgtccgtcgagctggatagactgagcgaagaatctgtgaacaacgacatctcctcctggacaaagggcagaagcggagaagctctgagcctcctgaagaaaagattctcccatagacccgtgcaggagaagttcgtgtgcctgaactgcggcttcgagacacacgcagccgagcaagccgccctgaacatcgccagatcctggctgttcctgcggagccaggagtacaagaaataccagacaaacaagacaaccggcaacaccgataagagagccttcgtcgagacctggcagtccttttaccggaagaagcttaaggaggtgtggaaacctgccgtgcggtctggcggatctggcggaggctccaccagccccaagaaaaagagaaaagtctaagctgccttctgcggggcttgccttctggccatgcccttcttctctcccttgcacctgtacctcttggtctttgaataaagcctgagtaggaaggctagcaaaaaaaaaaaaaaaaaaaaaaaaaaaaaaaaaaaaaaaaaaaaaaaaaaaaaaaaaaaaaaaaaaaaaaaaaaaaaaaa

SEQ ID NO: 9674 - RNA, 8787 nt, synthetic construct
  source 1..8787: mol_type = other RNA
aggaaataagagagaaaagaagagtaagaagaaatataagagccaccatggcccctaagaagaagcgtaaagtgagccggatgaaccacgaccaggagttcgacccccctaaggtgtaccctcccgtccccgccgagaagagaaagcccatccgggtcctgagcctgttcgatggcatcgccaccggtctgctggtgctgaaggacctgggcatccaggtggataggtacattgcctccgaggtgtgcgaggactccatcaccgtgggaatggtgcgtcatcagggcaagatcatgtacgtgggcgacgtgcggagcgtgacacagaagcatatccaggagtggggccctttcgacctggtgatcggcggcagcccttgcaatgacctgagcatcgtgaacccagcccggaagggcctgtacgagggaaccggcagactgttcttcgagttttacagactgctgcacgacgcccggcctaaggaaggcgacgaccggcccttcttttggctgttcgagaatgtggtggccatgggagtcagcgacaagcgggatattagccggttcctggagagcaaccccgtgatgatcgatgccaaggaagtgagcgccgcccaccgggccagatacttctggggcaatctgcctggcatgaacagacccctggccagcaccgtgaacgacaagctggagctgcaggagtgcctggagcacggccggatcgccaagttcagcaaggtgagaaccatcaccacccgaagcaacagcatcaaacaaggcaaggaccagcactttcctgtgttcatgaacgagaaggaggacatcctgtggtgtaccgagatggagagagtgttcgggttcccagtccactacacagatgtcagcaacatgtctagactggccagacagagactgctgggaagaagctggtccgtccctgtgatcagacacctgttcgcccctctgaaggagtacttcgcctgcgtgagcagcggcaacagcaacgccaacagccggggccccagcttctctagcggcctggtgccactgtccctgagagggagccacatgggccccatggagatctacaaaaccgtgagcgcctggaagcggcagcctgtgcgcgtgctgagcctgtttcggaatatcgataaagtcctgaaaagcctgggattcctggagagcggctctggctccggcggtggcaccctgaagtacgtggaggatgtgacaaacgtggtcagacgggatgtggagaagtggggccccttcgatctggtgtacggcagcacccaacccctgggcagctcttgtgaccggtgccctggctggtacatgtttcagttccaccggatcctgcagtacgccctgccgagacaggagtcccagcggccattcttttggattttcatggacaacttgctgctgaccgaggatgaccaggaaactaccactcggttcctgcagaccgaagccgtgaccctgcaggacgtgagaggccgggactaccagaacgccatgcgggtgtggtccaacatccctggactgaaaagcaagcacgcacctctgacccctaaagaagaggagtacctgcaggcccaggtgcggagcagaagcaagctggacgcccctaaggtggatctgctggtgaagaattgcctcctgcccctgagagagtacttcaagtatttcagccagaatagtctgcccctgggaggcagcggcggcggcagcctggagcaggtgagcttcaaggacgtgtgcgtggacttcacccaggaggagtggtacctgctggaccccgcccagaagatcctgtacagggacgtgatcctggagaactacagcaacatcgtgagcgtgggccactgcggcaccaagcccgaggtgatcttcaagatcgagcagggcgaggagccctgggtgctgggcgagggcttcagcagcctgcagcaccccgagaggaactggaagggcggcccaagcagcggcgcccctcctcccagcggcggcaggcggcccaagcagcggcgcccctcctcccagcggcggcagcccagccggctccccaacctctaccgaggagggcacctctgagtccgccacccccgagagcggccctggcacctccaccgagcccagcgagggcagcgcacccggcagccctgccggcagccccacctccacagaggagggaaccagcaccgagcccagcgaaggcagcgccccaggcaccagcaccgagcctagtgagcaggagattaaacggatcaacaagatcagaagaagacttgtgaaagacagcaacaccaagaaggccggcaagacaggccccatgaaaaccctgctggttagagtgatgacacccgatctgagagagcggctggaaaacctgagaaagaagcctgaaaatatcccccagcccatcagcaatacatctagagccaacctgaataagctgctgaccgattacaccgaaatgaagaaggcgatcctgcatgtgtactgggaagagttccagaaggaccctgtgggcctgatgagccgggtggcccagcctgccagcaagaagatcgatcagaacaagctgaaacctgagatggacgagaagggcaacctgaccaccgccggctttgcctgctctcagtgtggccagcccctgttcgtgtacaagctggagcaggtgtctgagaagggcaaggcttacaccaactacttcggacggtgcaatgtggccgagcacgaaaagctgatcctgctggcccagctgaagcccgagaaggatagcgacgaagccgtgacatatagcctgggaaagtttgggcagagggccctggatttctacagcattcatgtgaccaaggagtccacccaccccgtgaagcccctggcccagatcgccggaaacagatacgcctccggacctgtgggaaaggccctgagcgacgcatgtatgggcacaatcgcctccttcctgtctaagtaccaggacatcatcatcgaacaccagaaggtggtgaagggcaaccagaagagactggagagcctgcgggagctggccggcaaggaaaacctggaataccctagcgtgaccctgccacctcagcctcacaccaaggagggcgttgatgcctacaacgaagtgatcgcccgggtgcgaatgtgggtgaacctgaacctgtggcagaagctgaagctaagcagagatgatgccaagcctctgctgagactgaagggattcccttcctttcctctggtcgagagacaggccaacgaagtggactggtgggacatggtgtgtaacgtgaagaagctgatcaacgagaaaaaggaggatggcaaggtgttttggcagaatctggctggctacaagagacaggaagccctgagaccatacctgagcagcgaggaagatcggaagaagggaaagaaattcgctcggtaccagctgggcgacctgctgctgcacctggaaaagaagcacggcgaggactggggaaaggtgtacgacgaggcctgggagcggattgacaagaaagtggaaggcctgagcaagcacatcaagctggaagaggaacggagaagcgaggacgcccagagcaaggccgccctgaccgactggctgcgggctaaggccagcttcgtgatcgagggcctgaaggaggccgacaaggacgagttctgcagatgcgagctgaagctgcagaagtggtacggggacctgcggggaaagcccttcgccatcgaagccgagaacagcatcctggacatcagcggcttcagcaagcagtacaactgtgccttcatctggcagaaggacggcgtgaagaagctgaacctgtacctgatcatcaactacttcaagggcggcaagctgcggttcaagaagatcaaacctgaagccttcgaagccaacagattctacaccgtgatcaacaaaaagagcggcgagatcgtgcccatggaggtgaacttcaacttcgacgaccccaacctgatcatcctgcctctggcctttggcaagagacagggcagagaattcatctggaacgacctgctgtccctggaaaccggcagcctgaagctggccaacggaagagtgatcgagaagacactgtacaacagaagaacccggcaggatgagcctgccctgttcgtggccctgaccttcgagcggcgggaggtcctggactcctccaatatcaaaccaatgaacctgatcggcgtggcaagaggcgaaaacatccccgccgtgatcgccctgaccgaccccgagggctgcccactgagccggtttaaggatagcctgggaaacccaacccacatcctgagaatcggcgagagctataaggagaagcagcggaccatccaggccaagaaggaggtggagcagcggagagccggcggctacagccggaagtacgccagcaaagccaagaatctggcagacgatatggtgagaaacaccgctagagatctgctgtactacgccgtgacccaggatgccatgctgatcttcgccaacctgagccggggcttcggccggcagggcaagcggaccttcatggccgagagacagtacacacggatggaggactggctgaccgccaagctggcctacgagggcctgagcaagacctacctgtccaagacactggcccagtacacctccaagacatgcagcaactgtgggtttaccatcaccagcgccgactacgacagggtgctggagaagctgaagaagacagcaacaggctggatgaccacaattaacggcaaggagctgaaggtggagggccagattacctactacaacagatacaagagacagaacgtagtcaaggacctgtccgtcgagctggatagactgagcgaagaatctgtgaacaacgacatctcctcctggacaaagggcagaagcggagaagctctgagcctcctgaagaaaagattctcccatagacccgtgcaggagaagttcgtgtgcctgaactgcggcttcgagacacacgcagccgagcaagccgccctgaacatcgccagatcctggctgttcctgcggagccaggagtacaagaaataccagacaaacaagacaaccggcaacaccgataagagagccttcgtcgagacctggcagtccttttaccggaagaagcttaaggaggtgtggaaacctgccgtgcggtctggcggatctggcggaggctccaccagccccaagaaaaagagaaaagtctaagctgccttctgcggggcttgccttctggccatgcccttcttctctcccttgcacctgtacctcttggtctttgaataaagcctgagtaggaaggctagcaaaaaaaaaaaaaaaaaaaaaaaaaaaaaaaaaaaaaaaaaaaaaaaaaaaaaaaaaaaaaaaaaaaaaaaaaaaaaaaagcccagccggctccccaacctctaccgaggagggcacctctgagtccgccacccccgagagcggccctggcacctccaccgagcccagcgagggcagcgcacccggcagccctgccggcagccccacctccacagaggagggaaccagcaccgagcccagcgaaggcagcgccccaggcaccagcaccgagcctagtgagcaggagattaaacggatcaacaagatcagaagaagacttgtgaaagacagcaacaccaagaaggccggcaagacaggccccatgaaaaccctgctggttagagtgatgacacccgatctgagagagcggctggaaaacctgagaaagaagcctgaaaatatcccccagcccatcagcaatacatctagagccaacctgaataagctgctgaccgattacaccgaaatgaagaaggcgatcctgcatgtgtactgggaagagttccagaaggaccctgtgggcctgatgagccgggtggcccagcctgccagcaagaagatcgatcagaacaagctgaaacctgagatggacgagaagggcaacctgaccaccgccggctttgcctgctctcagtgtggccagcccctgttcgtgtacaagctggagcaggtgtctgagaagggcaaggcttacaccaactacttcggacggtgcaatgtggccgagcacgaaaagctgatcctgctggcccagctgaagcccgagaaggatagcgacgaagccgtgacatatagcctgggaaagtttgggcagagggccctggatttctacagcattcatgtgaccaaggagtccacccaccccgtgaagcccctggcccagatcgccggaaacagatacgcctccggacctgtgggaaaggccctgagcgacgcatgtatgggcacaatcgcctccttcctgtctaagtaccaggacatcatcatcgaacaccagaaggtggtgaagggcaaccagaagagactggagagcctgcgggagctggccggcaaggaaaacctggaataccctagcgtgaccctgccacctcagcctcacaccaaggagggcgttgatgcctacaacgaagtgatcgcccgggtgcgaatgtgggtgaacctgaacctgtggcagaagctgaagctaagcagagatgatgccaagcctctgctgagactgaagggattcccttcctttcctctggtcgagagacaggccaacgaagtggactggtgggacatggtgtgtaacgtgaagaagctgatcaacgagaaaaaggaggatggcaaggtgttttggcagaatctggctggctacaagagacaggaagccctgagaccatacctgagcagcgaggaagatcggaagaagggaaagaaattcgctcggtaccagctgggcgacctgctgctgcacctggaaaagaagcacggcgaggactggggaaaggtgtacgacgaggcctgggagcggattgacaagaaagtggaaggcctgagcaagcacatcaagctggaagaggaacggagaagcgaggacgcccagagcaaggccgccctgaccgactggctgcgggctaaggccagcttcgtgatcgagggcctgaaggaggccgacaaggacgagttctgcagatgcgagctgaagctgcagaagtggtacggggacctgcggggaaagcccttcgccatcgaagccgagaacagcatcctggacatcagcggcttcagcaagcagtacaactgtgccttcatctggcagaaggacggcgtgaagaagctgaacctgtacctgatcatcaactacttcaagggcggcaagctgcggttcaagaagatcaaacctgaagccttcgaagccaacagattctacaccgtgatcaacaaaaagagcggcgagatcgtgcccatggaggtgaacttcaacttcgacgaccccaacctgatcatcctgcctctggcctttggcaagagacagggcagagaattcatctggaacgacctgctgtccctggaaaccggcagcctgaagctggccaacggaagagtgatcgagaagacactgtacaacagaagaacccggcaggatgagcctgccctgttcgtggccctgaccttcgagcggcgggaggtcctggactcctccaatatcaaaccaatgaacctgatcggcgtggcaagaggcgaaaacatccccgccgtgatcgccctgaccgaccccgagggctgcccactgagccggtttaaggatagcctgggaaacccaacccacatcctgagaatcggcgagagctataaggagaagcagcggaccatccaggccaagaaggaggtggagcagcggagagccggcggctacagccggaagtacgccagcaaagccaagaatctggcagacgatatggtgagaaacaccgctagagatctgctgtactacgccgtgacccaggatgccatgctgatcttcgccaacctgagccggggcttcggccggcagggcaagcggaccttcatggccgagagacagtacacacggatggaggactggctgaccgccaagctggcctacgagggcctgagcaagacctacctgtccaagacactggcccagtacacctccaagacatgcagcaactgtgggtttaccatcaccagcgccgactacgacagggtgctggagaagctgaagaagacagcaacaggctggatgaccacaattaacggcaaggagctgaaggtggagggccagattacctactacaacagatacaagagacagaacgtagtcaaggacctgtccgtcgagctggatagactgagcgaagaatctgtgaacaacgacatctcctcctggacaaagggcagaagcggagaagctctgagcctcctgaagaaaagattctcccatagacccgtgcaggagaagttcgtgtgcctgaactgcggcttcgagacacacgcagccgagcaagccgccctgaacatcgccagatcctggctgttcctgcggagccaggagtacaagaaataccagacaaacaagacaaccggcaacaccgataagagagccttcgtcgagacctggcagtccttttaccggaagaagcttaaggaggtgtggaaacctgccgtgcggtctggcggatctggcggaggctccaccagccccaagaaaaagagaaaagtctaagctgccttctgcggggcttgccttctggccatgcccttcttctctcccttgcacctgtacctcttggtctttgaataaagcctgagtaggaaggctagcaaaaaaaaaaaaaaaaaaaaaaaaaaaaaaaaaaaaaaaaaaaaaaaaaaaaaaaaaaaaaaaaaaaaaaaaaaaaaaaa

SEQ ID NO: 9675 - RNA, 8787 nt, synthetic construct
  source 1..8787: mol_type = other RNA
aggaaataagagagaaaagaagagtaagaagaaatataagagccaccatggcccctaagaagaagcgtaaagtgagccggatgaaccacgaccaggagttcgacccccctaaggtgtaccctcccgtccccgccgagaagagaaagcccatccgggtcctgagcctgttcgatggcatcgccaccggtctgctggtgctgaaggacctgggcatccaggtggataggtacattgcctccgaggtgtgcgaggactccatcaccgtgggaatggtgcgtcatcagggcaagatcatgtacgtgggcgacgtgcggagcgtgacacagaagcatatccaggagtggggccctttcgacctggtgatcggcggcagcccttgcaatgacctgagcatcgtgaacccagcccggaagggcctgtacgagggaaccggcagactgttcttcgagttttacagactgctgcacgacgcccggcctaaggaaggcgacgaccggcccttcttttggctgttcgagaatgtggtggccatgggagtcagcgacaagcgggatattagccggttcctggagagcaaccccgtgatgatcgatgccaaggaagtgagcgccgcccaccgggccagatacttctggggcaatctgcctggcatgaacagacccctggccagcaccgtgaacgacaagctggagctgcaggagtgcctggagcacggccggatcgccaagttcagcaaggtgagaaccatcaccacccgaagcaacagcatcaaacaaggcaaggaccagcactttcctgtgttcatgaacgagaaggaggacatcctgtggtgtaccgagatggagagagtgttcgggttcccagtccactacacagatgtcagcaacatgtctagactggccagacagagactgctgggaagaagctggtccgtccctgtgatcagacacctgttcgcccctctgaaggagtacttcgcctgcgtgagcagcggcaacagcaacgccaacagccggggccccagcttctctagcggcctggtgccactgtccctgagagggagccacatgggccccatggagatctacaaaaccgtgagcgcctggaagcggcagcctgtgcgcgtgctgagcctgtttcggaatatcgataaagtcctgaaaagcctgggattcctggagagcggctctggctccggcggtggcaccctgaagtacgtggaggatgtgacaaacgtggtcagacgggatgtggagaagtggggccccttcgatctggtgtacggcagcacccaacccctgggcagctcttgtgaccggtgccctggctggtacatgtttcagttccaccggatcctgcagtacgccctgccgagacaggagtcccagcggccattcttttggattttcatggacaacttgctgctgaccgaggatgaccaggaaactaccactcggttcctgcagaccgaagccgtgaccctgcaggacgtgagaggccgggactaccagaacgccatgcgggtgtggtccaacatccctggactgaaaagcaagcacgcacctctgacccctaaagaagaggagtacctgcaggcccaggtgcggagcagaagcaagctggacgcccctaaggtggatctgctggtgaagaattgcctcctgcccctgagagagtacttcaagtatttcagccagaatagtctgcccctgggaggcagcggcggcggcctgaagggcctggtgaccttcgaggacgtggccgtggagttcacccaggaggagtgggccctgctggaccccgcccagaggaccctgtacagggacgtgatgctggagaacttcaggaacctggccagcctgggcaaccaggtggacaagcccggcctgatcagccagctggagcaggaggacaaggtgatgaccgaggagaggggcatcttccccggcgcctgccccgacgtggagaaccccggcggcccaagcagcggcgcccctcctcccagcggcggcaggcggcccaagcagcggcgcccctcctcccagcggcggcagcccagccggctccccaacctctaccgaggagggcacctctgagtccgccacccccgagagcggccctggcacctccaccgagcccagcgagggcagcgcacccggcagccctgccggcagccccacctccacagaggagggaaccagcaccgagcccagcgaaggcagcgccccaggcaccagcaccgagcctagtgagcaggagattaaacggatcaacaagatcagaagaagacttgtgaaagacagcaacaccaagaaggccggcaagacaggccccatgaaaaccctgctggttagagtgatgacacccgatctgagagagcggctggaaaacctgagaaagaagcctgaaaatatcccccagcccatcagcaatacatctagagccaacctgaataagctgctgaccgattacaccgaaatgaagaaggcgatcctgcatgtgtactgggaagagttccagaaggaccctgtgggcctgatgagccgggtggcccagcctgccagcaagaagatcgatcagaacaagctgaaacctgagatggacgagaagggcaacctgaccaccgccggctttgcctgctctcagtgtggccagcccctgttcgtgtacaagctggagcaggtgtctgagaagggcaaggcttacaccaactacttcggacggtgcaatgtggccgagcacgaaaagctgatcctgctggcccagctgaagcccgagaaggatagcgacgaagccgtgacatatagcctgggaaagtttgggcagagggccctggatttctacagcattcatgtgaccaaggagtccacccaccccgtgaagcccctggcccagatcgccggaaacagatacgcctccggacctgtgggaaaggccctgagcgacgcatgtatgggcacaatcgcctccttcctgtctaagtaccaggacatcatcatcgaacaccagaaggtggtgaagggcaaccagaagagactggagagcctgcgggagctggccggcaaggaaaacctggaataccctagcgtgaccctgccacctcagcctcacaccaaggagggcgttgatgcctacaacgaagtgatcgcccgggtgcgaatgtgggtgaacctgaacctgtggcagaagctgaagctaagcagagatgatgccaagcctctgctgagactgaagggattcccttcctttcctctggtcgagagacaggccaacgaagtggactggtgggacatggtgtgtaacgtgaagaagctgatcaacgagaaaaaggaggatggcaaggtgttttggcagaatctggctggctacaagagacaggaagccctgagaccatacctgagcagcgaggaagatcggaagaagggaaagaaattcgctcggtaccagctgggcgacctgctgctgcacctggaaaagaagcacggcgaggactggggaaaggtgtacgacgaggcctgggagcggattgacaagaaagtggaaggcctgagcaagcacatcaagctggaagaggaacggagaagcgaggacgcccagagcaaggccgccctgaccgactggctgcgggctaaggccagcttcgtgatcgagggcctgaaggaggccgacaaggacgagttctgcagatgcgagctgaagctgcagaagtggtacggggacctgcggggaaagcccttcgccatcgaagccgagaacagcatcctggacatcagcggcttcagcaagcagtacaactgtgccttcatctggcagaaggacggcgtgaagaagctgaacctgtacctgatcatcaactacttcaagggcggcaagctgcggttcaagaagatcaaacctgaagccttcgaagccaacagattctacaccgtgatcaacaaaaagagcggcgagatcgtgcccatggaggtgaacttcaacttcgacgaccccaacctgatcatcctgcctctggcctttggcaagagacagggcagagaattcatctggaacgacctgctgtccctggaaaccggcagcctgaagctggccaacggaagagtgatcgagaagacactgtacaacagaagaacccggcaggatgagcctgccctgttcgtggccctgaccttcgagcggcgggaggtcctggactcctccaatatcaaaccaatgaacctgatcggcgtggcaagaggcgaaaacatccccgccgtgatcgccctgaccgaccccgagggctgcccactgagccggtttaaggatagcctgggaaacccaacccacatcctgagaatcggcgagagctataaggagaagcagcggaccatccaggccaagaaggaggtggagcagcggagagccggcggctacagccggaagtacgccagcaaagccaagaatctggcagacgatatggtgagaaacaccgctagagatctgctgtactacgccgtgacccaggatgccatgctgatcttcgccaacctgagccggggcttcggccggcagggcaagcggaccttcatggccgagagacagtacacacggatggaggactggctgaccgccaagctggcctacgagggcctgagcaagacctacctgtccaagacactggcccagtacacctccaagacatgcagcaactgtgggtttaccatcaccagcgccgactacgacagggtgctggagaagctgaagaagacagcaacaggctggatgaccacaattaacggcaaggagctgaaggtggagggccagattacctactacaacagatacaagagacagaacgtagtcaaggacctgtccgtcgagctggatagactgagcgaagaatctgtgaacaacgacatctcctcctggacaaagggcagaagcggagaagctctgagcctcctgaagaaaagattctcccatagacccgtgcaggagaagttcgtgtgcctgaactgcggcttcgagacacacgcagccgagcaagccgccctgaacatcgccagatcctggctgttcctgcggagccaggagtacaagaaataccagacaaacaagacaaccggcaacaccgataagagagccttcgtcgagacctggcagtccttttaccggaagaagcttaaggaggtgtggaaacctgccgtgcggtctggcggatctggcggaggctccaccagccccaagaaaaagagaaaagtctaagctgccttctgcggggcttgccttctggccatgcccttcttctctcccttgcacctgtacctcttggtctttgaataaagcctgagtaggaaggctagcaaaaaaaaaaaaaaaaaaaaaaaaaaaaaaaaaaaaaaaaaaaaaaaaaaaaaaaaaaaaaaaaaaaaaaaaaaaaaaaagcccagccggctccccaacctctaccgaggagggcacctctgagtccgccacccccgagagcggccctggcacctccaccgagcccagcgagggcagcgcacccggcagccctgccggcagccccacctccacagaggagggaaccagcaccgagcccagcgaaggcagcgccccaggcaccagcaccgagcctagtgagcaggagattaaacggatcaacaagatcagaagaagacttgtgaaagacagcaacaccaagaaggccggcaagacaggccccatgaaaaccctgctggttagagtgatgacacccgatctgagagagcggctggaaaacctgagaaagaagcctgaaaatatcccccagcccatcagcaatacatctagagccaacctgaataagctgctgaccgattacaccgaaatgaagaaggcgatcctgcatgtgtactgggaagagttccagaaggaccctgtgggcctgatgagccgggtggcccagcctgccagcaagaagatcgatcagaacaagctgaaacctgagatggacgagaagggcaacctgaccaccgccggctttgcctgctctcagtgtggccagcccctgttcgtgtacaagctggagcaggtgtctgagaagggcaaggcttacaccaactacttcggacggtgcaatgtggccgagcacgaaaagctgatcctgctggcccagctgaagcccgagaaggatagcgacgaagccgtgacatatagcctgggaaagtttgggcagagggccctggatttctacagcattcatgtgaccaaggagtccacccaccccgtgaagcccctggcccagatcgccggaaacagatacgcctccggacctgtgggaaaggccctgagcgacgcatgtatgggcacaatcgcctccttcctgtctaagtaccaggacatcatcatcgaacaccagaaggtggtgaagggcaaccagaagagactggagagcctgcgggagctggccggcaaggaaaacctggaataccctagcgtgaccctgccacctcagcctcacaccaaggagggcgttgatgcctacaacgaagtgatcgcccgggtgcgaatgtgggtgaacctgaacctgtggcagaagctgaagctaagcagagatgatgccaagcctctgctgagactgaagggattcccttcctttcctctggtcgagagacaggccaacgaagtggactggtgggacatggtgtgtaacgtgaagaagctgatcaacgagaaaaaggaggatggcaaggtgttttggcagaatctggctggctacaagagacaggaagccctgagaccatacctgagcagcgaggaagatcggaagaagggaaagaaattcgctcggtaccagctgggcgacctgctgctgcacctggaaaagaagcacggcgaggactggggaaaggtgtacgacgaggcctgggagcggattgacaagaaagtggaaggcctgagcaagcacatcaagctggaagaggaacggagaagcgaggacgcccagagcaaggccgccctgaccgactggctgcgggctaaggccagcttcgtgatcgagggcctgaaggaggccgacaaggacgagttctgcagatgcgagctgaagctgcagaagtggtacggggacctgcggggaaagcccttcgccatcgaagccgagaacagcatcctggacatcagcggcttcagcaagcagtacaactgtgccttcatctggcagaaggacggcgtgaagaagctgaacctgtacctgatcatcaactacttcaagggcggcaagctgcggttcaagaagatcaaacctgaagccttcgaagccaacagattctacaccgtgatcaacaaaaagagcggcgagatcgtgcccatggaggtgaacttcaacttcgacgaccccaacctgatcatcctgcctctggcctttggcaagagacagggcagagaattcatctggaacgacctgctgtccctggaaaccggcagcctgaagctggccaacggaagagtgatcgagaagacactgtacaacagaagaacccggcaggatgagcctgccctgttcgtggccctgaccttcgagcggcgggaggtcctggactcctccaatatcaaaccaatgaacctgatcggcgtggcaagaggcgaaaacatccccgccgtgatcgccctgaccgaccccgagggctgcccactgagccggtttaaggatagcctgggaaacccaacccacatcctgagaatcggcgagagctataaggagaagcagcggaccatccaggccaagaaggaggtggagcagcggagagccggcggctacagccggaagtacgccagcaaagccaagaatctggcagacgatatggtgagaaacaccgctagagatctgctgtactacgccgtgacccaggatgccatgctgatcttcgccaacctgagccggggcttcggccggcagggcaagcggaccttcatggccgagagacagtacacacggatggaggactggctgaccgccaagctggcctacgagggcctgagcaagacctacctgtccaagacactggcccagtacacctccaagacatgcagcaactgtgggtttaccatcaccagcgccgactacgacagggtgctggagaagctgaagaagacagcaacaggctggatgaccacaattaacggcaaggagctgaaggtggagggccagattacctactacaacagatacaagagacagaacgtagtcaaggacctgtccgtcgagctggatagactgagcgaagaatctgtgaacaacgacatctcctcctggacaaagggcagaagcggagaagctctgagcctcctgaagaaaagattctcccatagacccgtgcaggagaagttcgtgtgcctgaactgcggcttcgagacacacgcagccgagcaagccgccctgaacatcgccagatcctggctgttcctgcggagccaggagtacaagaaataccagacaaacaagacaaccggcaacaccgataagagagccttcgtcgagacctggcagtccttttaccggaagaagcttaaggaggtgtggaaacctgccgtgcggtctggcggatctggcggaggctccaccagccccaagaaaaagagaaaagtctaagctgccttctgcggggcttgccttctggccatgcccttcttctctcccttgcacctgtacctcttggtctttgaataaagcctgagtaggaaggctagcaaaaaaaaaaaaaaaaaaaaaaaaaaaaaaaaaaaaaaaaaaaaaaaaaaaaaaaaaaaaaaaaaaaaaaaaaaaaaaaa

SEQ ID NO: 9676 - RNA, 8787 nt, synthetic construct
  source 1..8787: mol_type = other RNA
aggaaataagagagaaaagaagagtaagaagaaatataagagccaccatggcccctaagaagaagcgtaaagtgagccggatgaaccacgaccaggagttcgacccccctaaggtgtaccctcccgtccccgccgagaagagaaagcccatccgggtcctgagcctgttcgatggcatcgccaccggtctgctggtgctgaaggacctgggcatccaggtggataggtacattgcctccgaggtgtgcgaggactccatcaccgtgggaatggtgcgtcatcagggcaagatcatgtacgtgggcgacgtgcggagcgtgacacagaagcatatccaggagtggggccctttcgacctggtgatcggcggcagcccttgcaatgacctgagcatcgtgaacccagcccggaagggcctgtacgagggaaccggcagactgttcttcgagttttacagactgctgcacgacgcccggcctaaggaaggcgacgaccggcccttcttttggctgttcgagaatgtggtggccatgggagtcagcgacaagcgggatattagccggttcctggagagcaaccccgtgatgatcgatgccaaggaagtgagcgccgcccaccgggccagatacttctggggcaatctgcctggcatgaacagacccctggccagcaccgtgaacgacaagctggagctgcaggagtgcctggagcacggccggatcgccaagttcagcaaggtgagaaccatcaccacccgaagcaacagcatcaaacaaggcaaggaccagcactttcctgtgttcatgaacgagaaggaggacatcctgtggtgtaccgagatggagagagtgttcgggttcccagtccactacacagatgtcagcaacatgtctagactggccagacagagactgctgggaagaagctggtccgtccctgtgatcagacacctgttcgcccctctgaaggagtacttcgcctgcgtgagcagcggcaacagcaacgccaacagccggggccccagcttctctagcggcctggtgccactgtccctgagagggagccacatgggccccatggagatctacaaaaccgtgagcgcctggaagcggcagcctgtgcgcgtgctgagcctgtttcggaatatcgataaagtcctgaaaagcctgggattcctggagagcggctctggctccggcggtggcaccctgaagtacgtggaggatgtgacaaacgtggtcagacgggatgtggagaagtggggccccttcgatctggtgtacggcagcacccaacccctgggcagctcttgtgaccggtgccctggctggtacatgtttcagttccaccggatcctgcagtacgccctgccgagacaggagtcccagcggccattcttttggattttcatggacaacttgctgctgaccgaggatgaccaggaaactaccactcggttcctgcagaccgaagccgtgaccctgcaggacgtgagaggccgggactaccagaacgccatgcgggtgtggtccaacatccctggactgaaaagcaagcacgcacctctgacccctaaagaagaggagtacctgcaggcccaggtgcggagcagaagcaagctggacgcccctaaggtggatctgctggtgaagaattgcctcctgcccctgagagagtacttcaagtatttcagccagaatagtctgcccctgggaggcagcggcggcggcgacaagaccatcatcgccttcggcgacgtggccgtggccttcaccgagagggagtggaagctgctgagccccgcccagaggaccctgtacagggacgtgatgctggagacctacagccacctggtgagcctgggcatcgccttcagcaagcccaagttcatcacccagctggagcagggcgacgagccctggagggaggagagcgagtgcctgctggagctgtgccccgagcccaggaccgagggcggcccaagcagcggcgcccctcctcccagcggcggcaggcggcccaagcagcggcgcccctcctcccagcggcggcagcccagccggctccccaacctctaccgaggagggcacctctgagtccgccacccccgagagcggccctggcacctccaccgagcccagcgagggcagcgcacccggcagccctgccggcagccccacctccacagaggagggaaccagcaccgagcccagcgaaggcagcgccccaggcaccagcaccgagcctagtgagcaggagattaaacggatcaacaagatcagaagaagacttgtgaaagacagcaacaccaagaaggccggcaagacaggccccatgaaaaccctgctggttagagtgatgacacccgatctgagagagcggctggaaaacctgagaaagaagcctgaaaatatcccccagcccatcagcaatacatctagagccaacctgaataagctgctgaccgattacaccgaaatgaagaaggcgatcctgcatgtgtactgggaagagttccagaaggaccctgtgggcctgatgagccgggtggcccagcctgccagcaagaagatcgatcagaacaagctgaaacctgagatggacgagaagggcaacctgaccaccgccggctttgcctgctctcagtgtggccagcccctgttcgtgtacaagctggagcaggtgtctgagaagggcaaggcttacaccaactacttcggacggtgcaatgtggccgagcacgaaaagctgatcctgctggcccagctgaagcccgagaaggatagcgacgaagccgtgacatatagcctgggaaagtttgggcagagggccctggatttctacagcattcatgtgaccaaggagtccacccaccccgtgaagcccctggcccagatcgccggaaacagatacgcctccggacctgtgggaaaggccctgagcgacgcatgtatgggcacaatcgcctccttcctgtctaagtaccaggacatcatcatcgaacaccagaaggtggtgaagggcaaccagaagagactggagagcctgcgggagctggccggcaaggaaaacctggaataccctagcgtgaccctgccacctcagcctcacaccaaggagggcgttgatgcctacaacgaagtgatcgcccgggtgcgaatgtgggtgaacctgaacctgtggcagaagctgaagctaagcagagatgatgccaagcctctgctgagactgaagggattcccttcctttcctctggtcgagagacaggccaacgaagtggactggtgggacatggtgtgtaacgtgaagaagctgatcaacgagaaaaaggaggatggcaaggtgttttggcagaatctggctggctacaagagacaggaagccctgagaccatacctgagcagcgaggaagatcggaagaagggaaagaaattcgctcggtaccagctgggcgacctgctgctgcacctggaaaagaagcacggcgaggactggggaaaggtgtacgacgaggcctgggagcggattgacaagaaagtggaaggcctgagcaagcacatcaagctggaagaggaacggagaagcgaggacgcccagagcaaggccgccctgaccgactggctgcgggctaaggccagcttcgtgatcgagggcctgaaggaggccgacaaggacgagttctgcagatgcgagctgaagctgcagaagtggtacggggacctgcggggaaagcccttcgccatcgaagccgagaacagcatcctggacatcagcggcttcagcaagcagtacaactgtgccttcatctggcagaaggacggcgtgaagaagctgaacctgtacctgatcatcaactacttcaagggcggcaagctgcggttcaagaagatcaaacctgaagccttcgaagccaacagattctacaccgtgatcaacaaaaagagcggcgagatcgtgcccatggaggtgaacttcaacttcgacgaccccaacctgatcatcctgcctctggcctttggcaagagacagggcagagaattcatctggaacgacctgctgtccctggaaaccggcagcctgaagctggccaacggaagagtgatcgagaagacactgtacaacagaagaacccggcaggatgagcctgccctgttcgtggccctgaccttcgagcggcgggaggtcctggactcctccaatatcaaaccaatgaacctgatcggcgtggcaagaggcgaaaacatccccgccgtgatcgccctgaccgaccccgagggctgcccactgagccggtttaaggatagcctgggaaacccaacccacatcctgagaatcggcgagagctataaggagaagcagcggaccatccaggccaagaaggaggtggagcagcggagagccggcggctacagccggaagtacgccagcaaagccaagaatctggcagacgatatggtgagaaacaccgctagagatctgctgtactacgccgtgacccaggatgccatgctgatcttcgccaacctgagccggggcttcggccggcagggcaagcggaccttcatggccgagagacagtacacacggatggaggactggctgaccgccaagctggcctacgagggcctgagcaagacctacctgtccaagacactggcccagtacacctccaagacatgcagcaactgtgggtttaccatcaccagcgccgactacgacagggtgctggagaagctgaagaagacagcaacaggctggatgaccacaattaacggcaaggagctgaaggtggagggccagattacctactacaacagatacaagagacagaacgtagtcaaggacctgtccgtcgagctggatagactgagcgaagaatctgtgaacaacgacatctcctcctggacaaagggcagaagcggagaagctctgagcctcctgaagaaaagattctcccatagacccgtgcaggagaagttcgtgtgcctgaactgcggcttcgagacacacgcagccgagcaagccgccctgaacatcgccagatcctggctgttcctgcggagccaggagtacaagaaataccagacaaacaagacaaccggcaacaccgataagagagccttcgtcgagacctggcagtccttttaccggaagaagcttaaggaggtgtggaaacctgccgtgcggtctggcggatctggcggaggctccaccagccccaagaaaaagagaaaagtctaagctgccttctgcggggcttgccttctggccatgcccttcttctctcccttgcacctgtacctcttggtctttgaataaagcctgagtaggaaggctagcaaaaaaaaaaaaaaaaaaaaaaaaaaaaaaaaaaaaaaaaaaaaaaaaaaaaaaaaaaaaaaaaaaaaaaaaaaaaaaaagcccagccggctccccaacctctaccgaggagggcacctctgagtccgccacccccgagagcggccctggcacctccaccgagcccagcgagggcagcgcacccggcagccctgccggcagccccacctccacagaggagggaaccagcaccgagcccagcgaaggcagcgccccaggcaccagcaccgagcctagtgagcaggagattaaacggatcaacaagatcagaagaagacttgtgaaagacagcaacaccaagaaggccggcaagacaggccccatgaaaaccctgctggttagagtgatgacacccgatctgagagagcggctggaaaacctgagaaagaagcctgaaaatatcccccagcccatcagcaatacatctagagccaacctgaataagctgctgaccgattacaccgaaatgaagaaggcgatcctgcatgtgtactgggaagagttccagaaggaccctgtgggcctgatgagccgggtggcccagcctgccagcaagaagatcgatcagaacaagctgaaacctgagatggacgagaagggcaacctgaccaccgccggctttgcctgctctcagtgtggccagcccctgttcgtgtacaagctggagcaggtgtctgagaagggcaaggcttacaccaactacttcggacggtgcaatgtggccgagcacgaaaagctgatcctgctggcccagctgaagcccgagaaggatagcgacgaagccgtgacatatagcctgggaaagtttgggcagagggccctggatttctacagcattcatgtgaccaaggagtccacccaccccgtgaagcccctggcccagatcgccggaaacagatacgcctccggacctgtgggaaaggccctgagcgacgcatgtatgggcacaatcgcctccttcctgtctaagtaccaggacatcatcatcgaacaccagaaggtggtgaagggcaaccagaagagactggagagcctgcgggagctggccggcaaggaaaacctggaataccctagcgtgaccctgccacctcagcctcacaccaaggagggcgttgatgcctacaacgaagtgatcgcccgggtgcgaatgtgggtgaacctgaacctgtggcagaagctgaagctaagcagagatgatgccaagcctctgctgagactgaagggattcccttcctttcctctggtcgagagacaggccaacgaagtggactggtgggacatggtgtgtaacgtgaagaagctgatcaacgagaaaaaggaggatggcaaggtgttttggcagaatctggctggctacaagagacaggaagccctgagaccatacctgagcagcgaggaagatcggaagaagggaaagaaattcgctcggtaccagctgggcgacctgctgctgcacctggaaaagaagcacggcgaggactggggaaaggtgtacgacgaggcctgggagcggattgacaagaaagtggaaggcctgagcaagcacatcaagctggaagaggaacggagaagcgaggacgcccagagcaaggccgccctgaccgactggctgcgggctaaggccagcttcgtgatcgagggcctgaaggaggccgacaaggacgagttctgcagatgcgagctgaagctgcagaagtggtacggggacctgcggggaaagcccttcgccatcgaagccgagaacagcatcctggacatcagcggcttcagcaagcagtacaactgtgccttcatctggcagaaggacggcgtgaagaagctgaacctgtacctgatcatcaactacttcaagggcggcaagctgcggttcaagaagatcaaacctgaagccttcgaagccaacagattctacaccgtgatcaacaaaaagagcggcgagatcgtgcccatggaggtgaacttcaacttcgacgaccccaacctgatcatcctgcctctggcctttggcaagagacagggcagagaattcatctggaacgacctgctgtccctggaaaccggcagcctgaagctggccaacggaagagtgatcgagaagacactgtacaacagaagaacccggcaggatgagcctgccctgttcgtggccctgaccttcgagcggcgggaggtcctggactcctccaatatcaaaccaatgaacctgatcggcgtggcaagaggcgaaaacatccccgccgtgatcgccctgaccgaccccgagggctgcccactgagccggtttaaggatagcctgggaaacccaacccacatcctgagaatcggcgagagctataaggagaagcagcggaccatccaggccaagaaggaggtggagcagcggagagccggcggctacagccggaagtacgccagcaaagccaagaatctggcagacgatatggtgagaaacaccgctagagatctgctgtactacgccgtgacccaggatgccatgctgatcttcgccaacctgagccggggcttcggccggcagggcaagcggaccttcatggccgagagacagtacacacggatggaggactggctgaccgccaagctggcctacgagggcctgagcaagacctacctgtccaagacactggcccagtacacctccaagacatgcagcaactgtgggtttaccatcaccagcgccgactacgacagggtgctggagaagctgaagaagacagcaacaggctggatgaccacaattaacggcaaggagctgaaggtggagggccagattacctactacaacagatacaagagacagaacgtagtcaaggacctgtccgtcgagctggatagactgagcgaagaatctgtgaacaacgacatctcctcctggacaaagggcagaagcggagaagctctgagcctcctgaagaaaagattctcccatagacccgtgcaggagaagttcgtgtgcctgaactgcggcttcgagacacacgcagccgagcaagccgccctgaacatcgccagatcctggctgttcctgcggagccaggagtacaagaaataccagacaaacaagacaaccggcaacaccgataagagagccttcgtcgagacctggcagtccttttaccggaagaagcttaaggaggtgtggaaacctgccgtgcggtctggcggatctggcggaggctccaccagccccaagaaaaagagaaaagtctaagctgccttctgcggggcttgccttctggccatgcccttcttctctcccttgcacctgtacctcttggtctttgaataaagcctgagtaggaaggctagcaaaaaaaaaaaaaaaaaaaaaaaaaaaaaaaaaaaaaaaaaaaaaaaaaaaaaaaaaaaaaaaaaaaaaaaaaaaaaaaa

SEQ ID NO: 9677 - RNA, 8787 nt, synthetic construct
  source 1..8787: mol_type = other RNA
aggaaataagagagaaaagaagagtaagaagaaatataagagccaccatggcccctaagaagaagcgtaaagtgagccggatgaaccacgaccaggagttcgacccccctaaggtgtaccctcccgtccccgccgagaagagaaagcccatccgggtcctgagcctgttcgatggcatcgccaccggtctgctggtgctgaaggacctgggcatccaggtggataggtacattgcctccgaggtgtgcgaggactccatcaccgtgggaatggtgcgtcatcagggcaagatcatgtacgtgggcgacgtgcggagcgtgacacagaagcatatccaggagtggggccctttcgacctggtgatcggcggcagcccttgcaatgacctgagcatcgtgaacccagcccggaagggcctgtacgagggaaccggcagactgttcttcgagttttacagactgctgcacgacgcccggcctaaggaaggcgacgaccggcccttcttttggctgttcgagaatgtggtggccatgggagtcagcgacaagcgggatattagccggttcctggagagcaaccccgtgatgatcgatgccaaggaagtgagcgccgcccaccgggccagatacttctggggcaatctgcctggcatgaacagacccctggccagcaccgtgaacgacaagctggagctgcaggagtgcctggagcacggccggatcgccaagttcagcaaggtgagaaccatcaccacccgaagcaacagcatcaaacaaggcaaggaccagcactttcctgtgttcatgaacgagaaggaggacatcctgtggtgtaccgagatggagagagtgttcgggttcccagtccactacacagatgtcagcaacatgtctagactggccagacagagactgctgggaagaagctggtccgtccctgtgatcagacacctgttcgcccctctgaaggagtacttcgcctgcgtgagcagcggcaacagcaacgccaacagccggggccccagcttctctagcggcctggtgccactgtccctgagagggagccacatgggccccatggagatctacaaaaccgtgagcgcctggaagcggcagcctgtgcgcgtgctgagcctgtttcggaatatcgataaagtcctgaaaagcctgggattcctggagagcggctctggctccggcggtggcaccctgaagtacgtggaggatgtgacaaacgtggtcagacgggatgtggagaagtggggccccttcgatctggtgtacggcagcacccaacccctgggcagctcttgtgaccggtgccctggctggtacatgtttcagttccaccggatcctgcagtacgccctgccgagacaggagtcccagcggccattcttttggattttcatggacaacttgctgctgaccgaggatgaccaggaaactaccactcggttcctgcagaccgaagccgtgaccctgcaggacgtgagaggccgggactaccagaacgccatgcgggtgtggtccaacatccctggactgaaaagcaagcacgcacctctgacccctaaagaagaggagtacctgcaggcccaggtgcggagcagaagcaagctggacgcccctaaggtggatctgctggtgaagaattgcctcctgcccctgagagagtacttcaagtatttcagccagaatagtctgcccctgggaggcagcggcggcggcggcaagatgcccgtgaccttcgaggacgtggccgtgtacttcagccccgaggagtgggccgagctggccggctggcagaggaggctgtacagggaggtgatgctggagaactaccaggccgtggccagcctgggctggcccgccgtgaagcccgagatcatctgcaagatggagagggaggagatgccctgcatgcccgccccccccagggccaggtggaggcacaggacccccgtgcccgccggcggcccaagcagcggcgcccctcctcccagcggcggcaggcggcccaagcagcggcgcccctcctcccagcggcggcagcccagccggctccccaacctctaccgaggagggcacctctgagtccgccacccccgagagcggccctggcacctccaccgagcccagcgagggcagcgcacccggcagccctgccggcagccccacctccacagaggagggaaccagcaccgagcccagcgaaggcagcgccccaggcaccagcaccgagcctagtgagcaggagattaaacggatcaacaagatcagaagaagacttgtgaaagacagcaacaccaagaaggccggcaagacaggccccatgaaaaccctgctggttagagtgatgacacccgatctgagagagcggctggaaaacctgagaaagaagcctgaaaatatcccccagcccatcagcaatacatctagagccaacctgaataagctgctgaccgattacaccgaaatgaagaaggcgatcctgcatgtgtactgggaagagttccagaaggaccctgtgggcctgatgagccgggtggcccagcctgccagcaagaagatcgatcagaacaagctgaaacctgagatggacgagaagggcaacctgaccaccgccggctttgcctgctctcagtgtggccagcccctgttcgtgtacaagctggagcaggtgtctgagaagggcaaggcttacaccaactacttcggacggtgcaatgtggccgagcacgaaaagctgatcctgctggcccagctgaagcccgagaaggatagcgacgaagccgtgacatatagcctgggaaagtttgggcagagggccctggatttctacagcattcatgtgaccaaggagtccacccaccccgtgaagcccctggcccagatcgccggaaacagatacgcctccggacctgtgggaaaggccctgagcgacgcatgtatgggcacaatcgcctccttcctgtctaagtaccaggacatcatcatcgaacaccagaaggtggtgaagggcaaccagaagagactggagagcctgcgggagctggccggcaaggaaaacctggaataccctagcgtgaccctgccacctcagcctcacaccaaggagggcgttgatgcctacaacgaagtgatcgcccgggtgcgaatgtgggtgaacctgaacctgtggcagaagctgaagctaagcagagatgatgccaagcctctgctgagactgaagggattcccttcctttcctctggtcgagagacaggccaacgaagtggactggtgggacatggtgtgtaacgtgaagaagctgatcaacgagaaaaaggaggatggcaaggtgttttggcagaatctggctggctacaagagacaggaagccctgagaccatacctgagcagcgaggaagatcggaagaagggaaagaaattcgctcggtaccagctgggcgacctgctgctgcacctggaaaagaagcacggcgaggactggggaaaggtgtacgacgaggcctgggagcggattgacaagaaagtggaaggcctgagcaagcacatcaagctggaagaggaacggagaagcgaggacgcccagagcaaggccgccctgaccgactggctgcgggctaaggccagcttcgtgatcgagggcctgaaggaggccgacaaggacgagttctgcagatgcgagctgaagctgcagaagtggtacggggacctgcggggaaagcccttcgccatcgaagccgagaacagcatcctggacatcagcggcttcagcaagcagtacaactgtgccttcatctggcagaaggacggcgtgaagaagctgaacctgtacctgatcatcaactacttcaagggcggcaagctgcggttcaagaagatcaaacctgaagccttcgaagccaacagattctacaccgtgatcaacaaaaagagcggcgagatcgtgcccatggaggtgaacttcaacttcgacgaccccaacctgatcatcctgcctctggcctttggcaagagacagggcagagaattcatctggaacgacctgctgtccctggaaaccggcagcctgaagctggccaacggaagagtgatcgagaagacactgtacaacagaagaacccggcaggatgagcctgccctgttcgtggccctgaccttcgagcggcgggaggtcctggactcctccaatatcaaaccaatgaacctgatcggcgtggcaagaggcgaaaacatccccgccgtgatcgccctgaccgaccccgagggctgcccactgagccggtttaaggatagcctgggaaacccaacccacatcctgagaatcggcgagagctataaggagaagcagcggaccatccaggccaagaaggaggtggagcagcggagagccggcggctacagccggaagtacgccagcaaagccaagaatctggcagacgatatggtgagaaacaccgctagagatctgctgtactacgccgtgacccaggatgccatgctgatcttcgccaacctgagccggggcttcggccggcagggcaagcggaccttcatggccgagagacagtacacacggatggaggactggctgaccgccaagctggcctacgagggcctgagcaagacctacctgtccaagacactggcccagtacacctccaagacatgcagcaactgtgggtttaccatcaccagcgccgactacgacagggtgctggagaagctgaagaagacagcaacaggctggatgaccacaattaacggcaaggagctgaaggtggagggccagattacctactacaacagatacaagagacagaacgtagtcaaggacctgtccgtcgagctggatagactgagcgaagaatctgtgaacaacgacatctcctcctggacaaagggcagaagcggagaagctctgagcctcctgaagaaaagattctcccatagacccgtgcaggagaagttcgtgtgcctgaactgcggcttcgagacacacgcagccgagcaagccgccctgaacatcgccagatcctggctgttcctgcggagccaggagtacaagaaataccagacaaacaagacaaccggcaacaccgataagagagccttcgtcgagacctggcagtccttttaccggaagaagcttaaggaggtgtggaaacctgccgtgcggtctggcggatctggcggaggctccaccagccccaagaaaaagagaaaagtctaagctgccttctgcggggcttgccttctggccatgcccttcttctctcccttgcacctgtacctcttggtctttgaataaagcctgagtaggaaggctagcaaaaaaaaaaaaaaaaaaaaaaaaaaaaaaaaaaaaaaaaaaaaaaaaaaaaaaaaaaaaaaaaaaaaaaaaaaaaaaaagcccagccggctccccaacctctaccgaggagggcacctctgagtccgccacccccgagagcggccctggcacctccaccgagcccagcgagggcagcgcacccggcagccctgccggcagccccacctccacagaggagggaaccagcaccgagcccagcgaaggcagcgccccaggcaccagcaccgagcctagtgagcaggagattaaacggatcaacaagatcagaagaagacttgtgaaagacagcaacaccaagaaggccggcaagacaggccccatgaaaaccctgctggttagagtgatgacacccgatctgagagagcggctggaaaacctgagaaagaagcctgaaaatatcccccagcccatcagcaatacatctagagccaacctgaataagctgctgaccgattacaccgaaatgaagaaggcgatcctgcatgtgtactgggaagagttccagaaggaccctgtgggcctgatgagccgggtggcccagcctgccagcaagaagatcgatcagaacaagctgaaacctgagatggacgagaagggcaacctgaccaccgccggctttgcctgctctcagtgtggccagcccctgttcgtgtacaagctggagcaggtgtctgagaagggcaaggcttacaccaactacttcggacggtgcaatgtggccgagcacgaaaagctgatcctgctggcccagctgaagcccgagaaggatagcgacgaagccgtgacatatagcctgggaaagtttgggcagagggccctggatttctacagcattcatgtgaccaaggagtccacccaccccgtgaagcccctggcccagatcgccggaaacagatacgcctccggacctgtgggaaaggccctgagcgacgcatgtatgggcacaatcgcctccttcctgtctaagtaccaggacatcatcatcgaacaccagaaggtggtgaagggcaaccagaagagactggagagcctgcgggagctggccggcaaggaaaacctggaataccctagcgtgaccctgccacctcagcctcacaccaaggagggcgttgatgcctacaacgaagtgatcgcccgggtgcgaatgtgggtgaacctgaacctgtggcagaagctgaagctaagcagagatgatgccaagcctctgctgagactgaagggattcccttcctttcctctggtcgagagacaggccaacgaagtggactggtgggacatggtgtgtaacgtgaagaagctgatcaacgagaaaaaggaggatggcaaggtgttttggcagaatctggctggctacaagagacaggaagccctgagaccatacctgagcagcgaggaagatcggaagaagggaaagaaattcgctcggtaccagctgggcgacctgctgctgcacctggaaaagaagcacggcgaggactggggaaaggtgtacgacgaggcctgggagcggattgacaagaaagtggaaggcctgagcaagcacatcaagctggaagaggaacggagaagcgaggacgcccagagcaaggccgccctgaccgactggctgcgggctaaggccagcttcgtgatcgagggcctgaaggaggccgacaaggacgagttctgcagatgcgagctgaagctgcagaagtggtacggggacctgcggggaaagcccttcgccatcgaagccgagaacagcatcctggacatcagcggcttcagcaagcagtacaactgtgccttcatctggcagaaggacggcgtgaagaagctgaacctgtacctgatcatcaactacttcaagggcggcaagctgcggttcaagaagatcaaacctgaagccttcgaagccaacagattctacaccgtgatcaacaaaaagagcggcgagatcgtgcccatggaggtgaacttcaacttcgacgaccccaacctgatcatcctgcctctggcctttggcaagagacagggcagagaattcatctggaacgacctgctgtccctggaaaccggcagcctgaagctggccaacggaagagtgatcgagaagacactgtacaacagaagaacccggcaggatgagcctgccctgttcgtggccctgaccttcgagcggcgggaggtcctggactcctccaatatcaaaccaatgaacctgatcggcgtggcaagaggcgaaaacatccccgccgtgatcgccctgaccgaccccgagggctgcccactgagccggtttaaggatagcctgggaaacccaacccacatcctgagaatcggcgagagctataaggagaagcagcggaccatccaggccaagaaggaggtggagcagcggagagccggcggctacagccggaagtacgccagcaaagccaagaatctggcagacgatatggtgagaaacaccgctagagatctgctgtactacgccgtgacccaggatgccatgctgatcttcgccaacctgagccggggcttcggccggcagggcaagcggaccttcatggccgagagacagtacacacggatggaggactggctgaccgccaagctggcctacgagggcctgagcaagacctacctgtccaagacactggcccagtacacctccaagacatgcagcaactgtgggtttaccatcaccagcgccgactacgacagggtgctggagaagctgaagaagacagcaacaggctggatgaccacaattaacggcaaggagctgaaggtggagggccagattacctactacaacagatacaagagacagaacgtagtcaaggacctgtccgtcgagctggatagactgagcgaagaatctgtgaacaacgacatctcctcctggacaaagggcagaagcggagaagctctgagcctcctgaagaaaagattctcccatagacccgtgcaggagaagttcgtgtgcctgaactgcggcttcgagacacacgcagccgagcaagccgccctgaacatcgccagatcctggctgttcctgcggagccaggagtacaagaaataccagacaaacaagacaaccggcaacaccgataagagagccttcgtcgagacctggcagtccttttaccggaagaagcttaaggaggtgtggaaacctgccgtgcggtctggcggatctggcggaggctccaccagccccaagaaaaagagaaaagtctaagctgccttctgcggggcttgccttctggccatgcccttcttctctcccttgcacctgtacctcttggtctttgaataaagcctgagtaggaaggctagcaaaaaaaaaaaaaaaaaaaaaaaaaaaaaaaaaaaaaaaaaaaaaaaaaaaaaaaaaaaaaaaaaaaaaaaaaaaaaaaa

SEQ ID NO: 9678 - RNA, 8787 nt, synthetic construct
  source 1..8787: mol_type = other RNA
aggaaataagagagaaaagaagagtaagaagaaatataagagccaccatggcccctaagaagaagcgtaaagtgagccggatgaaccacgaccaggagttcgacccccctaaggtgtaccctcccgtccccgccgagaagagaaagcccatccgggtcctgagcctgttcgatggcatcgccaccggtctgctggtgctgaaggacctgggcatccaggtggataggtacattgcctccgaggtgtgcgaggactccatcaccgtgggaatggtgcgtcatcagggcaagatcatgtacgtgggcgacgtgcggagcgtgacacagaagcatatccaggagtggggccctttcgacctggtgatcggcggcagcccttgcaatgacctgagcatcgtgaacccagcccggaagggcctgtacgagggaaccggcagactgttcttcgagttttacagactgctgcacgacgcccggcctaaggaaggcgacgaccggcccttcttttggctgttcgagaatgtggtggccatgggagtcagcgacaagcgggatattagccggttcctggagagcaaccccgtgatgatcgatgccaaggaagtgagcgccgcccaccgggccagatacttctggggcaatctgcctggcatgaacagacccctggccagcaccgtgaacgacaagctggagctgcaggagtgcctggagcacggccggatcgccaagttcagcaaggtgagaaccatcaccacccgaagcaacagcatcaaacaaggcaaggaccagcactttcctgtgttcatgaacgagaaggaggacatcctgtggtgtaccgagatggagagagtgttcgggttcccagtccactacacagatgtcagcaacatgtctagactggccagacagagactgctgggaagaagctggtccgtccctgtgatcagacacctgttcgcccctctgaaggagtacttcgcctgcgtgagcagcggcaacagcaacgccaacagccggggccccagcttctctagcggcctggtgccactgtccctgagagggagccacatgggccccatggagatctacaaaaccgtgagcgcctggaagcggcagcctgtgcgcgtgctgagcctgtttcggaatatcgataaagtcctgaaaagcctgggattcctggagagcggctctggctccggcggtggcaccctgaagtacgtggaggatgtgacaaacgtggtcagacgggatgtggagaagtggggccccttcgatctggtgtacggcagcacccaacccctgggcagctcttgtgaccggtgccctggctggtacatgtttcagttccaccggatcctgcagtacgccctgccgagacaggagtcccagcggccattcttttggattttcatggacaacttgctgctgaccgaggatgaccaggaaactaccactcggttcctgcagaccgaagccgtgaccctgcaggacgtgagaggccgggactaccagaacgccatgcgggtgtggtccaacatccctggactgaaaagcaagcacgcacctctgacccctaaagaagaggagtacctgcaggcccaggtgcggagcagaagcaagctggacgcccctaaggtggatctgctggtgaagaattgcctcctgcccctgagagagtacttcaagtatttcagccagaatagtctgcccctgggaggcagcggcggcggccagtgcggcctgctgaccttcggcgacgtggccatcgagttcagccaggaggagtggaggtgcctgagccacacccagagggagctgtacagggacgtgatgctggagaactacggccacctgctgttcctgggcctgatcgtgagcaagcccgacctggtgagcctgctggagcagagcaaggagccctgggacgtgaggaggaagaagacccagaggcccagcgtgctgatgggccacgtgggcggcccaagcagcggcgcccctcctcccagcggcggcaggcggcccaagcagcggcgcccctcctcccagcggcggcagcccagccggctccccaacctctaccgaggagggcacctctgagtccgccacccccgagagcggccctggcacctccaccgagcccagcgagggcagcgcacccggcagccctgccggcagccccacctccacagaggagggaaccagcaccgagcccagcgaaggcagcgccccaggcaccagcaccgagcctagtgagcaggagattaaacggatcaacaagatcagaagaagacttgtgaaagacagcaacaccaagaaggccggcaagacaggccccatgaaaaccctgctggttagagtgatgacacccgatctgagagagcggctggaaaacctgagaaagaagcctgaaaatatcccccagcccatcagcaatacatctagagccaacctgaataagctgctgaccgattacaccgaaatgaagaaggcgatcctgcatgtgtactgggaagagttccagaaggaccctgtgggcctgatgagccgggtggcccagcctgccagcaagaagatcgatcagaacaagctgaaacctgagatggacgagaagggcaacctgaccaccgccggctttgcctgctctcagtgtggccagcccctgttcgtgtacaagctggagcaggtgtctgagaagggcaaggcttacaccaactacttcggacggtgcaatgtggccgagcacgaaaagctgatcctgctggcccagctgaagcccgagaaggatagcgacgaagccgtgacatatagcctgggaaagtttgggcagagggccctggatttctacagcattcatgtgaccaaggagtccacccaccccgtgaagcccctggcccagatcgccggaaacagatacgcctccggacctgtgggaaaggccctgagcgacgcatgtatgggcacaatcgcctccttcctgtctaagtaccaggacatcatcatcgaacaccagaaggtggtgaagggcaaccagaagagactggagagcctgcgggagctggccggcaaggaaaacctggaataccctagcgtgaccctgccacctcagcctcacaccaaggagggcgttgatgcctacaacgaagtgatcgcccgggtgcgaatgtgggtgaacctgaacctgtggcagaagctgaagctaagcagagatgatgccaagcctctgctgagactgaagggattcccttcctttcctctggtcgagagacaggccaacgaagtggactggtgggacatggtgtgtaacgtgaagaagctgatcaacgagaaaaaggaggatggcaaggtgttttggcagaatctggctggctacaagagacaggaagccctgagaccatacctgagcagcgaggaagatcggaagaagggaaagaaattcgctcggtaccagctgggcgacctgctgctgcacctggaaaagaagcacggcgaggactggggaaaggtgtacgacgaggcctgggagcggattgacaagaaagtggaaggcctgagcaagcacatcaagctggaagaggaacggagaagcgaggacgcccagagcaaggccgccctgaccgactggctgcgggctaaggccagcttcgtgatcgagggcctgaaggaggccgacaaggacgagttctgcagatgcgagctgaagctgcagaagtggtacggggacctgcggggaaagcccttcgccatcgaagccgagaacagcatcctggacatcagcggcttcagcaagcagtacaactgtgccttcatctggcagaaggacggcgtgaagaagctgaacctgtacctgatcatcaactacttcaagggcggcaagctgcggttcaagaagatcaaacctgaagccttcgaagccaacagattctacaccgtgatcaacaaaaagagcggcgagatcgtgcccatggaggtgaacttcaacttcgacgaccccaacctgatcatcctgcctctggcctttggcaagagacagggcagagaattcatctggaacgacctgctgtccctggaaaccggcagcctgaagctggccaacggaagagtgatcgagaagacactgtacaacagaagaacccggcaggatgagcctgccctgttcgtggccctgaccttcgagcggcgggaggtcctggactcctccaatatcaaaccaatgaacctgatcggcgtggcaagaggcgaaaacatccccgccgtgatcgccctgaccgaccccgagggctgcccactgagccggtttaaggatagcctgggaaacccaacccacatcctgagaatcggcgagagctataaggagaagcagcggaccatccaggccaagaaggaggtggagcagcggagagccggcggctacagccggaagtacgccagcaaagccaagaatctggcagacgatatggtgagaaacaccgctagagatctgctgtactacgccgtgacccaggatgccatgctgatcttcgccaacctgagccggggcttcggccggcagggcaagcggaccttcatggccgagagacagtacacacggatggaggactggctgaccgccaagctggcctacgagggcctgagcaagacctacctgtccaagacactggcccagtacacctccaagacatgcagcaactgtgggtttaccatcaccagcgccgactacgacagggtgctggagaagctgaagaagacagcaacaggctggatgaccacaattaacggcaaggagctgaaggtggagggccagattacctactacaacagatacaagagacagaacgtagtcaaggacctgtccgtcgagctggatagactgagcgaagaatctgtgaacaacgacatctcctcctggacaaagggcagaagcggagaagctctgagcctcctgaagaaaagattctcccatagacccgtgcaggagaagttcgtgtgcctgaactgcggcttcgagacacacgcagccgagcaagccgccctgaacatcgccagatcctggctgttcctgcggagccaggagtacaagaaataccagacaaacaagacaaccggcaacaccgataagagagccttcgtcgagacctggcagtccttttaccggaagaagcttaaggaggtgtggaaacctgccgtgcggtctggcggatctggcggaggctccaccagccccaagaaaaagagaaaagtctaagctgccttctgcggggcttgccttctggccatgcccttcttctctcccttgcacctgtacctcttggtctttgaataaagcctgagtaggaaggctagcaaaaaaaaaaaaaaaaaaaaaaaaaaaaaaaaaaaaaaaaaaaaaaaaaaaaaaaaaaaaaaaaaaaaaaaaaaaaaaaagcccagccggctccccaacctctaccgaggagggcacctctgagtccgccacccccgagagcggccctggcacctccaccgagcccagcgagggcagcgcacccggcagccctgccggcagccccacctccacagaggagggaaccagcaccgagcccagcgaaggcagcgccccaggcaccagcaccgagcctagtgagcaggagattaaacggatcaacaagatcagaagaagacttgtgaaagacagcaacaccaagaaggccggcaagacaggccccatgaaaaccctgctggttagagtgatgacacccgatctgagagagcggctggaaaacctgagaaagaagcctgaaaatatcccccagcccatcagcaatacatctagagccaacctgaataagctgctgaccgattacaccgaaatgaagaaggcgatcctgcatgtgtactgggaagagttccagaaggaccctgtgggcctgatgagccgggtggcccagcctgccagcaagaagatcgatcagaacaagctgaaacctgagatggacgagaagggcaacctgaccaccgccggctttgcctgctctcagtgtggccagcccctgttcgtgtacaagctggagcaggtgtctgagaagggcaaggcttacaccaactacttcggacggtgcaatgtggccgagcacgaaaagctgatcctgctggcccagctgaagcccgagaaggatagcgacgaagccgtgacatatagcctgggaaagtttgggcagagggccctggatttctacagcattcatgtgaccaaggagtccacccaccccgtgaagcccctggcccagatcgccggaaacagatacgcctccggacctgtgggaaaggccctgagcgacgcatgtatgggcacaatcgcctccttcctgtctaagtaccaggacatcatcatcgaacaccagaaggtggtgaagggcaaccagaagagactggagagcctgcgggagctggccggcaaggaaaacctggaataccctagcgtgaccctgccacctcagcctcacaccaaggagggcgttgatgcctacaacgaagtgatcgcccgggtgcgaatgtgggtgaacctgaacctgtggcagaagctgaagctaagcagagatgatgccaagcctctgctgagactgaagggattcccttcctttcctctggtcgagagacaggccaacgaagtggactggtgggacatggtgtgtaacgtgaagaagctgatcaacgagaaaaaggaggatggcaaggtgttttggcagaatctggctggctacaagagacaggaagccctgagaccatacctgagcagcgaggaagatcggaagaagggaaagaaattcgctcggtaccagctgggcgacctgctgctgcacctggaaaagaagcacggcgaggactggggaaaggtgtacgacgaggcctgggagcggattgacaagaaagtggaaggcctgagcaagcacatcaagctggaagaggaacggagaagcgaggacgcccagagcaaggccgccctgaccgactggctgcgggctaaggccagcttcgtgatcgagggcctgaaggaggccgacaaggacgagttctgcagatgcgagctgaagctgcagaagtggtacggggacctgcggggaaagcccttcgccatcgaagccgagaacagcatcctggacatcagcggcttcagcaagcagtacaactgtgccttcatctggcagaaggacggcgtgaagaagctgaacctgtacctgatcatcaactacttcaagggcggcaagctgcggttcaagaagatcaaacctgaagccttcgaagccaacagattctacaccgtgatcaacaaaaagagcggcgagatcgtgcccatggaggtgaacttcaacttcgacgaccccaacctgatcatcctgcctctggcctttggcaagagacagggcagagaattcatctggaacgacctgctgtccctggaaaccggcagcctgaagctggccaacggaagagtgatcgagaagacactgtacaacagaagaacccggcaggatgagcctgccctgttcgtggccctgaccttcgagcggcgggaggtcctggactcctccaatatcaaaccaatgaacctgatcggcgtggcaagaggcgaaaacatccccgccgtgatcgccctgaccgaccccgagggctgcccactgagccggtttaaggatagcctgggaaacccaacccacatcctgagaatcggcgagagctataaggagaagcagcggaccatccaggccaagaaggaggtggagcagcggagagccggcggctacagccggaagtacgccagcaaagccaagaatctggcagacgatatggtgagaaacaccgctagagatctgctgtactacgccgtgacccaggatgccatgctgatcttcgccaacctgagccggggcttcggccggcagggcaagcggaccttcatggccgagagacagtacacacggatggaggactggctgaccgccaagctggcctacgagggcctgagcaagacctacctgtccaagacactggcccagtacacctccaagacatgcagcaactgtgggtttaccatcaccagcgccgactacgacagggtgctggagaagctgaagaagacagcaacaggctggatgaccacaattaacggcaaggagctgaaggtggagggccagattacctactacaacagatacaagagacagaacgtagtcaaggacctgtccgtcgagctggatagactgagcgaagaatctgtgaacaacgacatctcctcctggacaaagggcagaagcggagaagctctgagcctcctgaagaaaagattctcccatagacccgtgcaggagaagttcgtgtgcctgaactgcggcttcgagacacacgcagccgagcaagccgccctgaacatcgccagatcctggctgttcctgcggagccaggagtacaagaaataccagacaaacaagacaaccggcaacaccgataagagagccttcgtcgagacctggcagtccttttaccggaagaagcttaaggaggtgtggaaacctgccgtgcggtctggcggatctggcggaggctccaccagccccaagaaaaagagaaaagtctaagctgccttctgcggggcttgccttctggccatgcccttcttctctcccttgcacctgtacctcttggtctttgaataaagcctgagtaggaaggctagcaaaaaaaaaaaaaaaaaaaaaaaaaaaaaaaaaaaaaaaaaaaaaaaaaaaaaaaaaaaaaaaaaaaaaaaaaaaaaaaa
